United States Patent Application Publication US 2002/0137139 A1 - sequence listing, part 2

SEQ ID NO: 6295 - DNA, 407 bp, Bos taurus
  Clone ID: 27-LIB3058-039-Q1-K1-G3
caaggacatccgccggggcaacgtgtgttgggacagcaagtccgacccaccccaagaagccgcccagttcacgttccaggtcatcattctgaaccaccctgggcagatcagcgctggctactcaccagtcattgactgccacacagcccacatcgcctgcaagtttgctgagctgaaggagaagattgaccggcgctctggcaagaaattggaggacaaccccaagtccctgaagtccggtgatgcagccattgtggagatggtcccggggaagcctatgtgtgtggagagcttctcccagtacccacctctcggccgcttcgccgtgcgcgacatgcggcagacagtggccgtgggcgtcatcaagaacgtggagaagaagagcggcggcgccggcaaggtcacca

SEQ ID NO: 6296 - DNA, 395 bp, Bos taurus
  Clone ID: 27-LIB3058-040-Q1-K1-G11
ccattcgttcgaagggagtactgaacatggcccacccactacaacaaaacccagattcccccctcagtcgctgtcctatcaggaagcttggataagcctcttatccttatccatcagagggcagacagaatgaaaaccacaatcacagaaaactagtcaaactgatcacatggaccacaacagccttgtctagctcaagaaaactatgagccatgccatgtagggccacccaagatggacaggttatggcagagttttgacaaaatgtagtccactggagaagggaacgggaaaccagttcggtattcttgccttgaacagtatgaaaaggtctttgcttaacttaatacaatattaaactattatctcacatggaaaagtgaacatgtcatgat

SEQ ID NO: 6297 - DNA, 341 bp, Bos taurus
  Clone ID: 27-LIB3058-041-Q1-K1-G3
ttggcttaacatttgcgttggggagagcggaaacaggctgacccgggcaggcaaggtgctggagcagctcacgggccagaccccagtggttttcaaagctagatacactgtcaggtgctctggcattaggagaaacgcaaagatcgccgtccactgcaccgtccgtggggccaaggcggaagaaatcctggagaaaggtctaaaggtgcgagagtacgagttaagaaaaaataacttctcagatactggaaactttggctttgggatccaagaacacatcgacctggggatcaagtatgacccgagcatcggtatctacggcctggacttctacgtggtgc

SEQ ID NO: 6298 - DNA, 379 bp, Bos taurus
  unsure (342): unsure at all n locations; Clone ID: 27-LIB3058-042-Q1-K1-G3
gctgacacctgaggtgttctccatcgccttctttgggcccatagtcaacgagggctacgtgaacgccgacagcggcccagagctacgctgcgtcttcaacggcaacgcgggcgcctgccgcttcggagtcgcgctcggcctcggggccttcctagcctgctcctgcttcctgctgctcgacgtgcgcttccagcagatcagcagcgtccgcgaccggcggcgcgctgtgctgctcgacctgggcttctcaggcctctggtccttcctgtggttcgtgggcttttgtttcctcaccaaccagtggcagcgcacggcgcccgggccgggcacagcgcaggcggnggacgcggcgcgcgccgtcatcaccttcagcttcttc

SEQ ID NO: 6299 - DNA, 406 bp, Bos taurus
  Clone ID: 27-LIB3058-043-Q1-K1-G3
gacccacgcgtccggcggctggcaggatcatgaaggggcctgtacctctcaaccttgaagttccctcatatgagttcaccagcgatgatatggtgattgttggttagagacctggactcgagttacaggcttctttcagtcttcatgtcacctcagaagagttacttgagaacaagccttctgtgctttgaattagttgatttgaaatatttaagaattgctaataatgtgtttgcaaacatgtaaattgaatttaatgttgaatactttcaagcattcacctaaaaaagcccccattaaacattgttatgctcaaagggtgcagtgtctttgatagttaattctaattaaaaattgtagatgagtgtataaaatatttgtgaaatctgtaaaagaaaaataaaaa

SEQ ID NO: 6300 - DNA, 425 bp, Bos taurus
  Clone ID: 27-LIB3058-045-Q1-K1-G11
gcgattcctgttgcctctcttgaccccatcaaggaatggttaaattcctgtgacctaaaatacacagaaggagtacagtccctcaactggactaaaattatgaagaccattgttgatgaccctgagggcttctttgaacaaggtggctggtctttcctggaacctgagggtgaggggagtgatgctgaggaaggggattccgagtctgaaatcgaagatgagacttttaatccttcagaggaagactatgaagaggaggaggaggacagtgatgaagattattcatcagaagctgaagaatcagattattccaaggaatcattgggcagtgaagaagagagtggaaaggattgggacgaactggaggaagaagcccgaaaagccgaccgtgaaagccgctatgaggaagaagaagaacagagtcg

SEQ ID NO: 6301 - DNA, 437 bp, Bos taurus
  Clone ID: 27-LIB3058-045-Q1-K1-G3
cggacgcgtgggcggacgcgtgggaagtaaattacaaagatgccttatccgtggtttgggagatcatgatgcaagaagctttcgaagttccttccacccagctcctctccctgtatgttctataccagtgcctggcaaagaagacagacttcagttgggaagaggagaggaacttcggtgcctccctgttactcccaggcctgaagcagaagaactcagtggggttgagttcccagttgtacggctatgcacttcttgggaaggtggagttgcagcaggggctgcgggctgtgtaccataacatgccccttctgtggcggccaggctacctcgacagagcccttcaagtgatggagaaggtggcctcctccccagaggatgggaagctgtgtagggaagcgctgggtgtgctggacagggcactgaaggctctgact

SEQ ID NO: 6302 - DNA, 408 bp, Bos taurus
  Clone ID: 27-LIB3058-046-Q1-K1-G3
aataagcagccgacatattgacttaactctttctcaaatttagaggcaaagtccaagactctcagttgaaaggctgagaaaccagtaatgtggaaagtaagagaaaagaaaaaaaaacaaaaaacccaaagagagacaacagcctttatcagttccgtccagttgctcagtttgtccgactctctgcgaccccgtggactgcagcactccaggcttccctgtccatcgccaactcaggtgaataaagtccaccagggccaaatgatctcagaatcaactctgaacctaaccaacatctgtacacacagatgtacagatgtgtgccagcattcgagcacactgcaaaacccaaggtcacctgagaagctggaactggaggagaggaccggggtgacaaagagagcactc

SEQ ID NO: 6303 - DNA, 412 bp, Bos taurus
  unsure (391): unsure at all n locations; Clone ID: 27-LIB3058-047-Q1-K1-G3
ctctaattaagtggatcctgattgtgatgttttccacttacttccctggatattttggtggtgagtactggctctggtgggtgttcctggttctaggctttctcctgtttctcagaggatttatcaattatgcaaaagttcggaagatgccagaaaatttctcaaatctccccaggaccagagttctctttatttattaaagatgttttctggcgaaggccttcctgcatttatgaattctctcccaagaagcaagagaacacctgcaggaagtgaatcaagatgcggaacacagaggaatcatcacctgctttaaaaaaataaagtactgttgacaaagatcgtttctctctatttgttcctaggtgtaaaattttaatagttaatgcanaattctgtaatcattgaatca

SEQ ID NO: 6304 - DNA, 431 bp, Bos taurus
  unsure (69),(222): unsure at all n locations; Clone ID: 27-LIB3058-049-Q1-K1-G3
cttcgccgaccccttggccagttattgcgcactttctttcccaggacacctttcaggtcaggctatcangaaagtggaaggtctctatgccattagggtctcaattcatgcccatcaatgggggtgatataaatggactatctgcttaacccagcttaagaatgccagcaatgacatcgttagacattgtggcagtctaggccttggtttggctgccatggngaccgcacgccaggatgtgtatgatttgctaaaaacaaacctctatcaggatgatgctgtgacaggcgaagcagctggcctggccctaggtttggttatgttgggctctaaaaatgcccaggctattgaggacatggttggctatgcacaggaaactcaacatgagaagattcttcgtggtcttgcagttggcattggcgtaatgatgt

SEQ ID NO: 6305 - DNA, 417 bp, Bos taurus
  Clone ID: 27-LIB3058-052-Q1-K1-G11
atagccacccacttgcctgttgactcagcagtgatggggcatttgtggcgggaacacagagggtggggtgtctgcccttgaggagctgactatcctcagagatgagcgttaaaccgaccgctggacccagggtcccttacaggggccaggcgctgtgtgagtacagctgtatggatgcgggttcccacggaggggcccggaggatgggtaggtgttagtgtggcagtgagggaaggagcgggaatttccttggcagagaagcagcatcattgcccccacttaacagaaggagaaactgaggctcagcgcgcgagtgagttagcagtggagcatggatcaggtctgatcaagtccttccaaggggcagcggtgacaggagaggaccccagacaggcggatgacagctgcttgttgggg

SEQ ID NO: 6306 - DNA, 420 bp, Bos taurus
  Clone ID: 27-LIB3058-053-Q1-K1-G11
gaccatatatacttcgtataaggagaagagcatttttctcgtggcccacaggaaagatcctacaggcatggatcctgatgatatctggcaactctcgtccagtctcaaaaggttcgatgataaatacactctgaaactgaccttcatcagtggaagaacgaagcagcaacgggaagctgagttcaccaagtccattgctaagttttttgaccacagcgggactctggtcatggacgcatatgagcctgagatatctagactccacgactgtcttgccacagaaagaaaaataaagtagctgcttctaaaagcagccatcttttggctggatcttgccgaattaaagggtgagggagaatgaatctgagaacttaacatggagtaagttagaaatgttaaaaatgtccctgttttgtcttg

SEQ ID NO: 6307 - DNA, 433 bp, Bos taurus
  Clone ID: 27-LIB3058-054-Q1-K1-G3
gttctagatcgcgagcggccgccctttttttttttttttcatctacacagtgtttttatttttattcaactataagcaaacagcaaaattaacacaatattcaccaactccagaacagttttcttttttaaaccaaagtgtgattaatttaacaagcacagactttcagattctgataacctcttacccaacccagccctgctgctcatctagatggccaggctttaacagcaaagcaatttcttctatggagctttttccagtattgctctttaaaggagccacagtgggacactgacacgcagtaaccagcctgagacgttgggggtcccctggttgtcttggtgagacagagccgtgaaaacacatgccagtaggtaccttcacacacaattctgtgctcagggtcacaaaggcgggagacagtcaatct

SEQ ID NO: 6308 - DNA, 434 bp, Bos taurus
  Clone ID: 27-LIB3058-058-Q1-K1-G3
atcgcgagcggccgcccttttttttttttttttttttttttttttttacattttattcacatttatttttcgcttttagtgggctcacagaaaattagaacaccttaagcaggagtttaatagcaatttttgtaagcaaagttacattccatctctaagtcaaattggtcaaagcttctccagtatttacaaaacatgatagacaagatgctacacaaaaccattgcatctgaagattttttccttattctcaaagacgactggaaaagaaagcattgtctgctgtaatcaaaaacataccacagtataaacagtaaccattccacttatcacagcttggttgagtttaaaatttgtgtttaaaaggtccaagatgactgcagttttacaaaaatgggcaaggtggaaagttgcaaacttcatgtgcttctgga

SEQ ID NO: 6309 - DNA, 402 bp, Bos taurus
  unsure (345): unsure at all n locations; Clone ID: 27-LIB34-001-Q1-E1-G11
cactcggctaccaggacgggccctgctattggctcacacagggtctcggggtgtggactccaggcctggtctatctttggatgatgctgcaagccccaccttcctttcctctcagcccactgcccccctcgctgcctctctggactcaccccatggggcccagccctgagatggctccgccctcaccaaagctcttgcccaccttctccaggctgtgccaggagataggatgcagacaggggtggccctgccagctgccccagcccagtcactctatgattctctctggctaaacccttgcaggcagccagagtggtgatgacccgtgacccgctgggggagcangcggaggggatggactctgacctcggttacaggaggagaaatcccgaaccccgttgc

SEQ ID NO: 6310 - DNA, 398 bp, Bos taurus
  Clone ID: 27-LIB34-001-Q1-E1-G3
cacaagcagtccgggatgaagaccctggagagccagctgacaccccaggcggtggagcggtggcagaggagcatgacaaacaggacgcgggaagtgctcctgcccaagttcaagctggaaaaggactacgacctggtgggcgccctgcgggccctgggggtcacggcgctcttcgacagcaaaacaacaacaacgggaataacgggcaaaaggttctccatggactggtcaaaccacaagggcaccaccacggtgaccaaggagggcacacaggccgcagccttgaccgccttggggttaatgccgctgtcaacccagttcggcttaaccttcaaccggcccttccggttcctcatctacgagcaccgcaccagctgcctgctcttcctgggccgggt

SEQ ID NO: 6311 - DNA, 441 bp, Bos taurus
  Clone ID: 27-LIB34-002-Q1-E1-G11
cggtctagctatccgggccggaccacgcgtccggaaaattttggttccgtagcagattttctcatcatttacatcgaagaagcacatgcatcagatggctgggcttttaagaacaatgtggacatcaagaatcaccggaatctccaggaccgcctgcgggcagcccacctgctgctggacaggagccccccgtgccccgtggtggtagacacaatgacgaaccagagcagctcgtgctacgcagcactgccagagaggctctatgtgctccaggagggcatggtcctgtacaagggtaaacctggtccttggaactaccatccagaggaagttcgtgctgttctggaaaagctccacagttaatctggacggattgcccagttctaggtgcccaacctgagggccccttaaggcttggtttgacccccatcccagctgaca

SEQ ID NO: 6312 - DNA, 322 bp, Bos taurus
  Clone ID: 27-LIB34-003-Q1-E1-G11
ggtccagggacgactcaaaagtcaggaagcttcacactgagaggcaggcagagaacatcacacacagctgaacagaaactcagaggacggaatcgccaagaaaagtggccatggagctaatcccaaacttttccgtggaaacctgagttctcctggatagcaacctggtgcacctctatcgatatggtacttattcacatggactgtttaagaagctgggggttcctggcccaagagctctgcctctttttggaaacgttctatcctaccgaaagggtgtttgtgagtttgataaacaaatgtttaaaaagtatgggaaaaa

SEQ ID NO: 6313 - DNA, 332 bp, Bos taurus
  Clone ID: 27-LIB34-005-Q1-E1-G3
cggacgcgtgggctgcaggagaaggaggtgatacaggacgtggtggcagaaaaatgaagaggatcctggttttcctccttgctgtagcctttgtgcatgctctagagagaggccgagattatgagaaagataaagtctgcaaggaccttgccagcctgggaagagatgacttcacatctttgtcaatggtcctatacagcaagaaatttcccagtgggacctttgaacaaattaaccatcttgtgaatgaagttgtttccttaacagtaacctgctgtgcggaaggggccgatcctgactgctaagacaacaggacttcaacattgtctgac

SEQ ID NO: 6314 - DNA, 393 bp, Bos taurus
  Clone ID: 27-LIB34-006-Q1-E1-G11
gtgatttcactttaactcaatgaccctgctaataattggcctaacaacaaatatactaacaatataccaatgatgacgagatgttatccgagaaagcaccttccaagggcaccataccccagctgtccaaaaaggcctccgttatggaataattctttttagtatctccgaagtactattctttaccggatttttctgagctttctaccactcaagcctcgcccccacccctgaactatgcggctgctgacccccaacaggcattcacccactaaaccccctagaagtcccactgctcaacacctctgtcctattggcttccggagtttctattacctgagcccatcatagtttaatagaatgggaccgaaagcatatattacaagccctatt

SEQ ID NO: 6315 - DNA, 312 bp, Bos taurus
  Clone ID: 27-LIB34-007-Q1-E1-G3
attctagatcgcgagcggccgcccttttttttttttttttttttttttttttttttttttttttttttttttttttttttttttttttttttttttaagtttgtggtgggatgcagattccccctattttaaaaacgtgaaaaaaaaacatgactgaaggactatttgcatttttcaagccactggaaagaaaaatggaaaatatgaaaaacagtgatcttcttacacattgatgaataatttggcattttatttaagaaatacaactttcctttcaaaacgtaagaacaagaatgacaggaatcctgcaat

SEQ ID NO: 6316 - DNA, 406 bp, Bos taurus
  unsure (379): unsure at all n locations; Clone ID: 27-LIB34-008-Q1-E1-G3
cccggacctcttcttccacctttcaatatatgactctgctaaaaaacatgtggaaaggaaggcagaatcaagtagaagataatgaaaatgtagtaaacgagtactcctcacatctggaaaagcaccagttatagatagatgagactgtgaagaataatatcccaactaagcttcgtgtgctccgttcaattctggagaatttgagaagcataatacaataattagaatcggatgtctcaactcagatggaatactgccgcaccccgtgtactgttacttgcaatattcctgtggtgtctggcaaagaatgtgaggaaatcatcacgaatggaggtgaaacatctgaaatgtacctcattcagcctgaggattctagcanatcatatagagtatactgtgatatgaa

SEQ ID NO: 6317 - DNA, 387 bp, Bos taurus
  Clone ID: 27-LIB34-009-Q1-E1-G11
acgggacgggcccaagatggcggcggccgatggcgacgactcgctctaccccatcgcggtgctcatagacgagctccgcaacgaggatgttcagcttcgcctcaacagcatcaagaagctctccaccattgccttggccctcggggtcgaaaggacccgcagtgagcttctgcccttccttacagacaccatctacgatgaggacgaggtcctcctggccctggcggagcagctgggcaccttcaccactctggtcggaggccccgagtacgtgcactgcctgctgccgcccctggagtcgctggccacggtggaggagacggtggtgcgggataaggcagtggagtcgctgcgggccatctcgcacgagcactccccctccgacct

SEQ ID NO: 6318 - DNA, 297 bp, Bos taurus
  Clone ID: 27-LIB34-009-Q1-E1-G3
acacgaagctcatgaacgtgtttttgaaagactccatcaccacttgggagattctggccgtgagcttgtcagacaagaaagggatctgtgtggctgacccctatgaggtcactgtgatgcaggatttctttatcgacctgcgtctcccctactcggtggtgcgcaacgagcaagtggagatccgagcgatcctctacaactaccgggaggcggaaaatctcaaggtgagggtggaattgctctacaatccagccttctgtagcctggccaccgccaagaaacgccaacagcagacta

SEQ ID NO: 6319 - DNA, 418 bp, Bos taurus
  Clone ID: 27-LIB34-010-Q1-E2-G11
atgatttcttgcaacttcgaaaaatttaaaaccatgaaacatctattactgctacttttctgtgcttttatagttcaggcccaatttcctactgactatgacgagggacaagatgacagacctaaggtaggtttgggtgcccgcggtcatcggccctatgacaagaagaaggaagaggcccccagcctgagacctgtgccccctcccatcagcggaggtggctatcgggctcgtcccgccacagcaactgtgggccagaagaaagtggagagaaagccccctgacgctgatggctgcctgcacgcggacccggatctgggtgtgttgtgtcctacaggatgtaagttgcaagatactttggtaagacaggagagaccaatccgaaagagtatagaagatttacgtaatactgtggact

SEQ ID NO: 6320 - DNA, 377 bp, Bos taurus
  Clone ID: 27-LIB34-010-Q1-E2-G3
cctgtcttgagtttttgccttttaaatccaactgcctactagatatttccatctaatgccccataaattaggccaatgttgtgtaacttcttgtcacactatttacatagaatgaaatggggttgtgcataatggcagccctgccaagaattttaaactctataggtccaaaaaggaactcagaatcacctgaatattgtgctccatcagtttcctctcccagtgatctcatttctattaatggtgaatgaaactgaaactgttagtcactcagtcgtgtttgattctttgtgatgccatggactgcagaccaccagacttctctgtccatgggattctccaggcaaaaatactggaatgggtagccattcccttct

SEQ ID NO: 6321 - DNA, 391 bp, Bos taurus
  Clone ID: 27-LIB34-011-Q1-E1-G11
gaagggagctggtggctcttccatccccagaccagccaagcctgtgagtgacaccccagacagaggaaccagagccatgcggagtctcagcggactgctgttgttactgactgcctgcctggcagtaaacgccagctccgtgcccacattgcccgatgacattcaagtgcaggagaacttcgacctgtctaggatctatgggaagtggttcaatgtggccgtgggctccacctgcccatggctgaagaggttcaaggagaagatgaccatgagcacagtggtgttgaaagcggggccgacgagcaaggagatcagcgtcaccaacactcacaggcggaaaggtgtctgtgaatcgatctctggtacttatgagaaaacaagcactgatggg

SEQ ID NO: 6322 - DNA, 392 bp, Bos taurus
  Clone ID: 27-LIB34-011-Q1-E1-G3
aggacagacaagtgtgcctgctccaaccacgaaccatacttcggctactcaggggcctttaaatgtctgatggagggcgctggggatgtggcctttgtcaagcactcaacggtattcgacaacctgcctaacccagaagacaggaaaaactatgagctgctctgcggggacaacacccggaagtctgtagatgattaccaagaatgctacttggcaatggttccttcccatgcggttgtggctcgaactgtgggcggcaaggaggatgtgatctgggaacttctcaatcacgcccaggaacattttggcaaagataaaccagacaatttccagctttttccaatcccctcatgggaaaggactgctgtttaaagactctgctgatgggtttt

SEQ ID NO: 6323 - DNA, 402 bp, Bos taurus
  Clone ID: 27-LIB34-012-Q1-E1-G3
agagcctggaaggcagagcaactggacctcgcctaagctgtgtctctgactcatttctgactttaggcaagttcttccaatgggaaaaatggcgaagatgtttagtttcatccttgtcaccactgctctggtaatgggcaggggaagctcggctctggagaactgcctccaggagcaggcgcggctcagagcccaagtgtacctgctggagacccgggtcaagcagcaacaagtcaagatctcgcagcttttgcatgagaaacaagtccagctccttgataaaggagaggagaatagtgtcattgaccttggaggaaagaggcaatacgcagattgttcagagattttcaatgacgggtacaagcagagtggattttataaaatcaaacctctccagagccc

SEQ ID NO: 6324 - DNA, 413 bp, Bos taurus
  Clone ID: 27-LIB34-013-Q1-E1-G11
gtcgaggacgcgtcagatctagacttcattgagttcctttcagaagcaattgctgtctttcttactgtgactttgttgctgtgtaagattgaacatataaatgaatattagtgtgagataaaagagtcagtgtgaaaattcattgacgagactttaatatgtcatcttatgcttgtaccacgatttcttacgttgggattttaaaaatcactttcacagttagagttatacaatgagtacatttaattcaacatatcgaactcagtgattttacattctactgtaattcagaagcatttaaatcattaggataagtgcacaacatttagttcatcattgcaacgaagtcttttatatatctgctctcccccttacgatccgtgacaattgagaagtgcaaaaatagcaccttt

SEQ ID NO: 6325 - DNA, 397 bp, Bos taurus
  Clone ID: 27-LIB34-013-Q1-E1-G3
aaaaactctgttttataaagtattccacagactattatttcaaaataagacatatacaaagaaagtgttaggaaatgtattgaaagaagaggctttgtaaattcattaaacttaagactttgaaagttattgggataactgaattttgacaaagtagcaagttcaaaagaatactgataattttactgtatgtaattttttaagtgaataaaaagattattagaattccatagtagagatgtacctattttcaaaccacccagaggaatctattttattcatattaagtcattctcacagggcaaaagagctctttaaaacttcaagacaagcttatgtatgtccaagaccagttgcttataggtaatcttctatgacctgaagacatacatttccg

SEQ ID NO: 6326 - DNA, 442 bp, Bos taurus
  unsure (348): unsure at all n locations; Clone ID: 27-LIB34-014-Q1-E1-G3
cgggtccacgcacgcgtccgagctttgcccagttttcgcaggagatcggccttgcctccctgggtgcacctgatgagtacattgaaaaacttgcaacaatttactggtttactgtggagtttgggctctgcaagcaaggagactccataaaggcatatggtgctgggctcctgtcatcctttggtgaattacagtattgcctatcagacaagccaaagctccttcctctggaactggagaagaccgctgtccaggagtatacgatcacagagttccagcctctgtattatgtggctgagagttttaatgatgccaaggagaaagtgaggaactttgctgccacaatcncacggcccttctcagttcaattatgaccatacactcaacggattgaggtcttggacaaacaccagcaacttaagaatttggctgactccatcag

SEQ ID NO: 6327 - DNA, 403 bp, Bos taurus
  Clone ID: 27-LIB34-015-Q1-E1-G11
cggacgcgtgggtggcggagtacgacttgactactcgcatcgcgcactttttagatcggcatttagtctttccgttgcttgagtttctctccgtaaaagagatatataatgaaaaggagttgttacaagggaaattggatcttcttagtgataccaacatggtagactttgctatggatgtgtacaaaaacctttattctgatgatattcctcatgctttgagagaaaaaagaacaactgttgttgcacagctgaaacagcttcaagcagaaactgaaccaattgtgaagatgtttgaagatccagaaactacaaggcaaatgcagtcaaccagggatggtcggatgctgtttgactacctggcagacaagcatggtttcaggcaggaatatttagatacact

SEQ ID NO: 6328 - DNA, 378 bp, Bos taurus
  Clone ID: 27-LIB34-017-Q1-E1-G3
gccagacagagactcaggtgtgccagtattcaaaaatttggagaaagagctttaaaagcatggtcagtagctcgcctgagccagaaatttcccaaggctgagtttgtagaagttaccaagctagtgacagatctcacaaaagtccacaaggaatgctgccatggtgacctacttgaatgtgcagatgacagggcagatcttgccaagtacatatgtgataatcaagatacaatctccagtaaactgaaggaatgctgtgataagcctttgttggaaaaatcccactgcattgctgaggtaaaaaaagatgccatacctgaaaacctgcccccattaactgctgactttgctgaagataaggatgtttgcaaaaactat

SEQ ID NO: 6329 - DNA, 379 bp, Bos taurus
  Clone ID: 27-LIB34-018-Q1-E1-G11
ggaatactgccgcaccccgtgtactgttacttgcaatattcctgtggtgtctggcaaagaatgtgaggaaatcatcaggaatggaggtgaaacatctgaaatgtacctcattcagcctgaggattctagcaaaccatatagagtatactgtgatatgaaaacggaaaaaggaggatggacagtaattcagaaccgtcaagatggtagtgttgactttggcaggaaatgggatccatataaacaaggatttggaaatattgcaaccaatgcagaagggaagaaatactgtggtgtaccaggtgagtattggctcggaaatgacagaattagccagcttaccaatatgggacccacaaagcttttgattgaaatggaggac

SEQ ID NO: 6330 - DNA, 431 bp, Bos taurus
  Clone ID: 27-LIB34-019-Q1-E1-G4
aagagaggagacccacgttcccgctagcagctggagtcttctttgacgggcgcctcaatcctgaccgccccccaacccccgctcccccgggattaaaggggggcatggagcccctgaatggactcggacatctgcagttcgcgtgatgaccgcagccgtggcaggtaaaaggattgccatatcaactcactgaagaagtagcctcactatctttgtcttttaaactgcatcaacaatgaagtaatgatatctgagaacaaatgaacacttgccaactaactgtcatcacacgttcaagtgattgtataagcagaaacaagctgcaacagacccatgtgtcagttagtatagagagaatgcttttttcaggtactgtgtatttagaaacagttttagcatagcacgtttaaattataattatgtcaaatgaa

SEQ ID NO: 6331 - DNA, 409 bp, Bos taurus
  Clone ID: 27-LIB34-020-Q1-E1-G11
acaaaactttggcacaatgaagtgggtgacttttatttctcttctccttctcttcagctctgcttattccaggggtgtgtttcgtcgagatacacacaagagtgagattgctcatcggtttaaagatttgggagaagaacattttaaaggcctggtactgattgccttttctcagtatctccagcagtgtccatttgatgagcatgtaaaattagtgaacgaactaactgagtttgcaaaaacatgtgttgctgatgagtcccatgccggctgtgaaaagtcacttcacactctctttggagatgaattgtgtaaagttgcatcccttcgtgaaacctatggtgacatggctgactgctgtgagaaacaagagcctgaaagaaatgaatgcttcctgagccacaaagat

SEQ ID NO: 6332 - DNA, 366 bp, Bos taurus
  Clone ID: 27-LIB34-020-Q1-E2-G11
acaaaactttggcacaatgaagtgggtgacttttatttctcttcaccttcgcttcagctctgcttattccaggggtgtgtttcgtcgagatacacacaagagtgagattgctcatcggtttaaagatttgggagaagaacattttaacggcctggtactgattgccttttcgcagtagctccagcagtgtccatttgatcagcatgtataattagtgaacgaactaactgacgtttgcaaaaacatgtgttgctgatgagtcccatgccggctgtgacaagtcacttcacacgctctttggagatgaattgtgttcagtttcagctcttcctgaaacgtagtgtgacatggctgacttcggtgaga

SEQ ID NO: 6333 - DNA, 427 bp, Bos taurus
  Clone ID: 27-LIB34-020-Q1-E2-G3
catccatggtggtttagtcaatgtagacaaacaggactttgttttccacatactaatgcagtcaccactgggcttaaatggctccattgcagctgtcactataactttagatcttgaccaggcaaaaacgcttcagcatttaataagccagtgtttatgttttcctttaattttccttttttcttctgtatttttaaagaaagatattaacttttgattgtgcagatatcaaatcaaggggacatgcataaacaatcatcagccacttggatgtcattttatagatcaacactgtgtgcttttgtatgaaaagtatatatactttaatagtataagacaaggagatatatattcatttgcactcacgcataacatactttgctggacacaatttcacgtttctctgtgatttaaaaatgcatgtata

SEQ ID NO: 6334 - DNA, 414 bp, Bos taurus
  unsure (37): unsure at all n locations; Clone ID: 27-LIB34-021-Q1-E1-G11
gggtcggtcgacgcgtccgcattaactacgctaatanatataatggagtttttcaagaatgctgccaagctgaagataaacgtgcctgcctgctaccacagattgaaactatgagagaaaaagtactgacttcaggtgccagacagagactcaggtgtgccagtagttcaaaaatttggagaaagagctttaaaagcatggtcagtagctcgcctgagccagagatttcccaaggctgagtttgtagaaattaccaagctagtgacagatctcacaaaagtccacaaggaatgctgccaggggtgacctacttgaatgcgcagatgacagggcagatgttgccaagtgcataggtgataatcaagatacaatctccagtatactgaacgaatgctgtgataagcctttgttgga

SEQ ID NO: 6335 - DNA, 426 bp, Bos taurus
  unsure (408)...(409): unsure at all n locations; Clone ID: 27-LIB34-021-Q1-E1-G3
aagttctgaaaccctagaggacgcaactgtgagtgtctctgtcctagcctctcaacttgctttcctgtgtccaatagcactgcagactccagtactagcctgtccagagcagcaagtgagaggaaacaagccagcattgtaagaggacatgcttctcctcgctctctccgtgctgctcctgctcacacagccctggagatccctgggagcagaaatgacaaccttttctcagaaaatactggccaatgcctgtaccctggttatgtgtagccccctggagagtggcttgcctggtcatgatggacaagatgggagagaatgtcgccatggagagaacggggatccaggttcaccaggacctgcagggcgagcaggaaggcctggatgggttggccctattgggccgannagagacaatggctttgt

SEQ ID NO: 6336 - DNA, 342 bp, Bos taurus
  Clone ID: 27-LIB34-023-Q1-E1-G11
aagaggcagagacccgtgctgagtttgctgagagatcggtagccaagctggaaaagacaattgatgatttggaagataaactgaaatgcaccaaagaggagcacctctgtacacaaaggatgctggaccagactctgcttgacctgaatgagatgtagagcaccccagccccgccctgccgctgctcctccctctcaccccgactccgctggggccagcctgcccgaagctgacctttaaactgagggctgatctttaactggaaggctgctttctcctttcgccacctctctcaccccctactcctgtgtccttttcgccaaactgtctctgcctctcccc

SEQ ID NO: 6337 - DNA, 400 bp, Bos taurus
  Clone ID: 27-LIB34-023-Q1-E1-G3
cagccgcacctcgtgatactgttacttgcaatattcctgtggtgtctggcaaagaatgtgaggaaatcatcaggaatggaggtgaaacatctgaaatgtacctcattcagcctgaggattctagcaaaccatatagagtatactgtgatatgaaaacggaaaaaggaggatggacagtaattcagaaccgtcaagatggtagtgttgactttggcaggaaatgggatccatataaacaaggatttggaaatattgcaaccaatgcagaagggaagaaatactgtggtgtaccaggtgagtattggctcggaaatgacagaattagccagcttaccaatatgggacccacaaagcttttgattgaaatggaagactggaaaggcgataaggtgacggcact

SEQ ID NO: 6338 - DNA, 424 bp, Bos taurus
  Clone ID: 27-LIB34-024-Q1-E1-G3
ctcatgggtcgacgcaagactctaaagtgagtcgtactacactggaggaatgctgtgccaaagatgatccacatgcatgctattccacagtgtttgacaaacttaagcatcttgtggatgagcctcagaatttaatcaaacaaaactgtgaccaattcgaaaaacttggagagtatggattccaaaatgcgctcatagttcgttacaccaggaaagtaccccaagtgtcaactccaactctcgtggaggtttcaagaagcctaggaaaagtgggtactaggtgttgtacaaagccggaatcagaaagaatgccctgtactgaagactatctgagcttgatcctgaaacagttgtgcgtggcgcatgagaagacaccagtgagtgaaagaatcaccaagtgctgcacagagtcactggtgaacag

SEQ ID NO: 6339 - DNA, 345 bp, Bos taurus
  Clone ID: 27-LIB34-025-Q1-E1-G11
gtttgaagaggagggcactttgctgagactagacaggagctgaggcagaggagaaaagtgcagagcagagccatgaagattatcttggatctccttctgcttctgctcatcatcatttagtcctacttggaatctctggtgaaggtcttcattcccaggaggagaaaatctgtggctggagaaattgttctcattacatgagccgggcatggaatatgcaggcagaccgcctatgaatttgcaaaacggaagagcagactggttctgtgggatattaataggcatggtgttgaggaaactgcagcataatgcagaaaactagggggcactacacacgtgtttgtg

SEQ ID NO: 6340 - DNA, 382 bp, Bos taurus
  Clone ID: 27-LIB34-025-Q1-E1-G3
catgtttccagttgggccccaatactggcttaacaacctgtctgatgcccggattttcatcaacatgtatggtgtgaccagcatgtacttttcagctgtaatggtgcgtctgatgctggtgttggcgcctgttatgtgcattctttctggcattggagtctctcaggtgctgtccacttacatgaagaatttggacataagtcgacaagacaagaagagcaagaaacagcaggattctacttaccctattaagaatgaagtggcaagtggcatgatactggtcatggctttctttctcattacctacaccttccactcgacctgggtgaccagtgaggcctactcttctccctccattgtgctgtctgctcgtggtggagat

SEQ ID NO: 6341 - DNA, 379 bp, Bos taurus
  Clone ID: 27-LIB34-027-Q1-E1-G11
aacaaatcaagaaacaaactgcacttgttgagctgttgaaacacaagcccaatgcaacagaggaacaactgataaccgtcatggagaattttgtggcttttgtaaacaagtgctgtgcagctgatgacaaagaagcctgctttgctgtggagggtccaaaacttgttgtttcaactcaaacagccttagcctaaacacgacacaaccacatgcatctcagcctaccctgagagtaacatgaaacaagagaaatgaaaactcagagcttattcatctgttttccttttctgtaggtgttaaaccaacactctcacgaaagaacgtgaatttctttaaatattttgcttcgtttgtttgtgcgacaattaataaaccatgg

SEQ ID NO: 6342 - DNA, 409 bp, Bos taurus
  unsure (300),(302),(316),(335): unsure at all n locations; Clone ID: 27-LIB34-027-Q1-E1-G3
aggagctggtggctcttccatccccagaccagccaagcctgtgagtgacaccccaggcagaggaaccagagcgatgcggagtctcgcgggactgctgttgttactggctgcctggctggcagtaaactgccagctccgtgccggcattgcccgatgggattcaagtgcgggggaacttcgagtggtctgggatctgatgggaagtggttcaagggggccgtgggctccgcctgcccatggctgaagaggttcagggagaagatgaccaggagcacagtggtgttgagagcggggcctgcnancagggagagtaccntcaccaacgctcacaggcngaaaggtgtcggtgaatcggtctctggtacttaggagaaaacaagcactgatgggaagtttctctatcacaaag

SEQ ID NO: 6343 - DNA, 429 bp, Bos taurus
  Clone ID: 27-LIB34-028-Q1-E1-G3
ctcgagcagggagctggtggctcttccatccccagaccagccaagcctgtgagtgacaccccagacagaggaaccagagccatgcggagtctcagcggactgctgttgttactgactgcctgcctggcagtaaacgccagctccgtgcccacattgcccgatgacattcaagtgcaggagaacttcgacctgtctaggatctatgggaagtggttcaatgtggccgtgggctccacctgcccatggctgaagaggttcaaggagaagatgaccatgagcacagtggtgttgaaagcggggccgacgagcaaggagatcagcgtcaccaacactcacaggcgggaaggtgtctgtgaatcgatctctggtacttatgagaaaacaagcactgatgggaagtttctctatcacaaagccaggtgggatatc

SEQ ID NO: 6344 - DNA, 405 bp, Bos taurus
  Clone ID: 27-LIB34-029-Q1-E1-G11
catgtgaactcaatggttgtcttggcttaccacacatccctcatgccttgtgggaaagatatgaccaccagacacaaacagaacagcaagtgtatgatattgggtttgtattgagctacaagtgccattttggctataagccagagacagatggacctacaactgtgacttgtcagagcaatttggagtggagcccatacatagaatgtaaggaggtatgttgcccagaagcaaacctgaataattatggaagcatcactctacacagaagacctagcactagtactcactgtacctatatcagtggagataagatttcatatgaatgtcatagtaaatatatgtttgatgctttatgtacaaaacatggcacttggagtcctagaacaccagaatgcagaccag

SEQ ID NO: 6345 - DNA, 401 bp, Bos taurus
  unsure (336): unsure at all n locations; Clone ID: 27-LIB34-029-Q1-E1-G3
gcagccaagccacacttctggatgagtcaccatgtcgatggaagagtccatcatccgcatcccgccataccactacatccacgtgctagaccagaacagcaatgtgtcccgcgtggaggtcgggccaaagacttacatccggcaggacaatgagaggatcctgttcgctcccgtgcgcatgctgacggtccccccacggcactactgcatggtggccaacccggtggcccgggatgcccagggcactgtgctgtttgatgtcacaggacaagtgcggctccgccacgcggacctggagatccggctggcccaggatcccttccccctgttcccagnggaggtgctagagaacgacatcaccccactgcaggtggttctacccaacaccggcctccatctta

SEQ ID NO: 6346 - DNA, 333 bp, Bos taurus
  Clone ID: 27-LIB34-030-Q1-E1-G3
ctggatgtgaaaacacagtcgtgcagcggcgtggaattctcaacatctgggtcatctaatacagacactggtaaagttactgggaccttggagaccacatataaatggtgtgagtatggtctgactttcacagaaaagtggaacactgataacactctgggaacagaaatcgctattgaagaccaaatttgccaacgtttgaaactgacatttgataccaccttttcgccaaacacatgaaagaacagtggtaaaatcaagtcttcttacaagacggaatgtataaacctccgttgtgatgttgactttgattttgctgggcctgcaatccat

SEQ ID NO: 6347 - DNA, 358 bp, Bos taurus
  Clone ID: 27-LIB34-031-Q1-E1-G11
cggcaggaaaaagaaagcagcagagcccatctctcatttagacggggcgcctttcttctgaacaaagtagggttcaaaacccagactgtggtagacagtgcagctctgaccccttccgcgcatgtaacgagcaagcagtcagcacagcctggcctgtgtggccaggattgatgtagccctggcacgctcgcctccgaagaactaatggctgtgacgtcagagaaaacgccgcacgaagttaacccaggtgtcatccgcctggtcatctcagacccatgaaattaggcaccttgcctgagctgcattgcacgcatctttagagccagctagcctttgggcaagaataaagtttgaaaag

SEQ ID NO: 6348 - DNA, 407 bp, Bos taurus
  unsure (396): unsure at all n locations; Clone ID: 27-LIB34-031-Q1-E1-G3
caggccatgatgaaccctactctcccgggatggaaagtagagtgtgtgggtgatgatatcgcctggatgaaatttgaccaacaaggtaacttgcgggccatcaatccagagaatgggttttttggcgtcgctccgggaacctctgtgaggacaaatcccaacgccatcaagaccatccagaagaataccatcttcaccaacgtggccgagaccagtgacgggggcgtttactgggaaggcattgatcagccgctggcctcaggcatcaagctcatttcctggaagggcaaggagtgggaccccaaggatggggagccttgtgcccaccccaactcacggttctgcactccggccagccagtgccccatcattgaccctgactgggagtctccaganggcgtgcccat

SEQ ID NO: 6349 - DNA, 414 bp, Bos taurus
  Clone ID: 27-LIB34-032-Q1-E1-G3
cccagaccatggcgaagctgttggtgctcaccctcttgggactggggctggcattcttcagggattaccggtcttcttatctagcaagaatgaacgcttcccgagaagtaaaatcggtagaacttcctaactgtaaattaataaaaggaatagaaactggtgctgaagacctggagatacttcctaatggactcgctttcattagttccggattacgatatcctggagtaaaaagctttgaacctgataagcctggaaaaatactgctgatggacctgaacaaagaggatcctacagtgttggaattgaagatgactggaagtaactttgatgcgtcttcatttaaccctcacggcattagcacattcacagatgaagataatactgtgtacctgctggtggtgagccatccag

SEQ ID NO: 6350 - DNA, 353 bp, Bos taurus
  Clone ID: 27-LIB34-033-Q1-E1-G3
aaacatttcatcatgatgaaatttcggttccctcctgtgaatctgcctaatcctacagatcctcacaggcctattcctagcaatacactacacatccgacacaacaacagcattctcctctgttacccatatctgccgagacgtgaactacggctgaatcatccgatacatacacgcaaacggagcttcaatgttttttatctgcttatatatgcacgtacgacgatgcttatattacgggtcttacacctttctagaaacatgaaatattggagtaatccttctgctcacagtaatagccacagcatttataggatacgtcctaccatgaggacaaatatcattctgaggag

SEQ ID NO: 6351 - DNA, 410 bp, Bos taurus
  Clone ID: 27-LIB34-034-Q1-E1-G3
acaaaactttggcacaatgaagtgggtgacttttatttctcttctccttctcttcagctctgcttattccaggggtgtgtttcgtcgagatacacacaagagtgagattgctcatcggtttaaagatttgggagaagaacattttaaaggcctggtactgattgccttttctcagtatctccagcagtgtccatttgatgagcatgtaaaattagtgaacgaactaactgagtttgcaaaaacatgtgttgctgatgagtcccatgccggctgtgaaaagtcacttcacactctctttggagatgaattgtgtaaagttgcatcccttcgtgaaacctatggtgacatggctgactgctgtgagaaacaagagcctgaaagacatgaatgcttcctgagccacaaagatg

SEQ ID NO: 6352 - DNA, 422 bp, Bos taurus
  Clone ID: 27-LIB34-035-Q1-E1-G3
ccagctttgggtggtggctgccgctgggctccggcgttccgtcggcggagggcgacgcggcgtggacagcggccccggcaccccgcgccctgccgcccgcagccgcgcgcccgcccgcccgcttctccccgagctcgccgcctttctcctcagcgcccggtcgccgccgccgccgcggcccagcgagcggcccagatgcaggccatcaagtgtgtggtggtgggagacggcgctgtgggtaagacttgcctcctgatcagttacactaccaatgcgtttcctggagaatatatccccactgtctttgacaactactctgccaatgtcatggtggatggaaaacccgtgaatctgggcttgtgggacacagccggacaataagattatgaccgattacgccccctgtcctactcgcagacaga

SEQ ID NO: 6353 - DNA, 261 bp, Bos taurus
  Clone ID: 27-LIB34-036-Q1-E1-G3
aaacccccgaatgtgaagagttctaagtggaaagggagaaaaaaggggggatttgatggtgccagggaggggctgatctccaaagaactaaggtttaagtttttttgtttttttttttccttctaagctctgcacttcaactagcatctatgagctggcacttgctaacaaatcaaaaatgtgaattaattaataattaaagaccatgatttcctccaaaaaaaaaaaaaaaaaaaaaagaacaaaaaaaaaaaataaaaa

SEQ ID NO: 6354 - DNA, 386 bp, Bos taurus
  Clone ID: 27-LIB34-039-Q1-E1-G11
gtaagatggcggtgtacaaacacgactgcttactactgagtcgcacggccgactcggttcgggtctcggaggcagcaccagtgatcgtcaagcaaagagagcctaaggtatttggccaagatgccgaatatcaaaatcttcagcggtagctctcatgaggacctatcccagaagattgccgaccgcctgggcctggaactgggcaaggtggtgactaagaaattcagcagccatgagacctgtgtggcaatcggacaaagtgttcgtggagaagatgtctacattgttcagattggctgcggtgaaatcaatgacaatctcatggaacttttgagtatgactaatgcctgcaagattgcttcaaccaaccgggttactgcagtcat

SEQ ID NO: 6355 - DNA, 434 bp, Bos taurus
  unsure (296),(376),(406)...(407): unsure at all n locations; Clone ID: 27-LIB34-039-Q1-E1-G3
cttttatttctcttctccttctcttcagctctgcttattccaggggtgtgtttcgtcgagatacacacaagagtgagattgctcatcggtttaaagatttgggagaagaacattttaaaggcctggtactgattgccttttctcagtatctccagcagtgtccatttgatgagcatgtaaaattagtgaacgaactaactgagtttgcaaaaacatgtgttgctgatgagtcccatgccggctgtgaaaagtcacttcacactctctttggagatgaattgtgtaaagttgcatcncttcgtgaaacctatggtgacatggctgactgctgtgagaaacaagagcctgaaagaaatgaatgcttcctgagccacanagatgatagcccagacctccctaaattgannacagaccccaatactttgtgtgatgag

SEQ ID NO: 6356 - DNA, 321 bp, Bos taurus
  Clone ID: 27-LIB34-040-Q1-E1-G11
acgcggtccggatctagatctcaaaacggccgcccgctttgttttgagcgttttcttctttttcgtataaccaccgcctgacgcggcttgtgtttaggtgtccaaggaggaccgtgtgagttaacaactgtgacatgagatacaggttgggacctcgacgttgggaacgaacaccctcccgctccccatacaatcccactgcccccaataaaaaataaccaactatgggagagcagccgagacagcgactggggggcaggggaatgaccatgcctgtgctgggagggcccagaggcagcagctgcaccaatgcgcgagtgt

SEQ ID NO: 6357 - DNA, 380 bp, Bos taurus
  Clone ID: 27-LIB34-040-Q1-E1-G3
aactggtggctcctccaaccccaaaccaaccaaacctggtaatgtgaacccaaaacagaggaaccagaccaatgcggattctcagcggactgctgttgttactgactgcctgcctggcggtaaacgccatctccgtgcccacattgcccgatgacattcaagtgcaggagaacttcgacctgtctaggatatatgaaatgtggtaaagtgtggctgtgggcaccatgtgcccatggctaaagaggttcagggagaatatcaccatgcacatagtggtgttgaaagcggggccgacgaccagggatatcatcgtcaccaacactcacaggcggaaaggtgtctgtaaatctatctcgggttattatgagaaaaccaccgct

SEQ ID NO: 6358 - DNA, 352 bp, Bos taurus
  Clone ID: 27-LIB34-041-Q1-E1-G11
acttaactatgctaataaatataatggagtttttcaagaatgctgccaagctgaagataaaggtgcctgcctgctaccaaagattgaaactatgagagaaaaagtactgacttcatctgccagacagagactcaggtgtgccagtattcaaaaatttggagaaagagctttaaaagcatggtcagtagctcgcctgagccagaaatttcccaaggctgagtttgtagaagttaccaagctagtgacagatctcacaaaagtccacaaggaatgctgccatggtgacctacttgaatgcgcagatgacaaggcagatcttgccaagtacatatgtgataatcaagatacaatc

SEQ ID NO: 6359 - DNA, 407 bp, Bos taurus
  Clone ID: 27-LIB34-041-Q1-E1-G3
gtcctgggtgccggcgtggtgaggaacccagcgctcgaagaggcagccatggggctgctgtctggggacacgctggggcccctggccgtggccctgctcatcttcttgctcttgctggacctgatgcaccggcgctcacgttgggccccacgatacccaccaggccccatgccgctgccggtgctgggcaatctgctgcaggtggacttcgaggacccacgtcccagctttaaccagttgcggcgccgtttcgggaacgtgttcagcctgcagcaggtctggacaccggtagtcgtgctcaacgggctggcggctgtgcgcgaggcgctggtgtaccgcagtcaggacactgccgaccgtccacctcaggcactctacaagcacttgggtttcgggccgcgcgccga

SEQ ID NO: 6360 - DNA, 414 bp, Bos taurus
  Clone ID: 27-LIB34-043-Q1-E1-G11
aattcgaggctcggaaccccgggcccgccgacaccatgagttggtcctcgcaccctccgagtgtaatcttctacattctttcattgctttcttcagcatgcctggcatatgttgctacccgagacaactgctgcatcttagatgaaagatttggtagttattgcccaactacctgtggaattgcagatttcctgaataattaccaaaccagtgtagacaaagatctacgaactttggaaggcatcttatatcaggttgagaacaaaacatcagaagccagagagctggtcaaagcaatccaaatcagctataaccctgatcaaccatcaaagccaaataacatagagagtgctaccaagaattccaagagtatgatggaagaaattatgaaatatgaaacactgatatcaacac

SEQ ID NO: 6361 - DNA, 420 bp, Bos taurus
  Clone ID: 27-LIB34-043-Q1-E1-G3
gctgaaagaggtcaattcccttggcaggtccttttgcatggtgaaattgctgcattctgtggaggttccatcgttaatgaaaaatgggttgtaactgcagcccactgcatcaagcctggtgttaaaattactgttgttgcaagtgagcataacaccgagaagccagaacctatagagcaaaagcgaaatgtgatccgtgctattccttaccacagctacaacgcatctattaataagtagagccacgacattgccctcctggatctggatgaacccttagagctaaatagctatgtaacccctatttgcattgctgacagggactacacgaacatcttccttaaatttggctatggttatgtgagtggctggggcaaaatcctcaacaaatggaggtcagcctcaagtctccagtacctg

SEQ ID NO: 6362 - DNA, 413 bp, Bos taurus
  unsure (66): unsure at all n locations; Clone ID: 27-LIB34-044-Q1-E1-G3
cgaaggagagcagtttgtgaagaaaatcggtggtatttttgcctttaaggtgaaggatggccctgngggtaaagaatccacctgagtggtggacgtgaagaatggcaaaggatcagtgctccctaactcagataagaaggccgactgcacaattacaatggccgactcggacttattggctttgatgactggtaaaatgaatcctcagacggccttctttcaaggcaaattgaaaatcaatggcaacatgggtctggctatgaagttacaaaatctccagcttcagcctggcaaagctaagctgtgaactccctttgcctcctttgaaaatcaagatgagatatatagatatatatccatatatttcattgtcagaacttagattgaaactatacattgggaaataccatgac

SEQ ID NO: 6363 - DNA, 347 bp, Bos taurus
  Clone ID: 27-LIB34-045-Q1-E1-G3
gtcgatcacgcatccggtgagatttgtcgttggaatgaaccactggacttgtacaggtttcccagtgtatcaatataagcccgcatccctgaatgaggctctcaactcctcagtggtccaagtgagttcccattcactgagcccctatctgtttcgggcgtttacatgctcagttaaaaatgtctgtgccctgaatcaagacaacttgggcatggacttacagttcaggattcaccagacgacgtgcacgagggaatctgacgcagaccccgccaattgtgacttccagatgggctaccatgtacccgttgccgtttgcaaaagcactgtgcggatgtctgctgaac

SEQ ID NO: 6364 - DNA, 425 bp, Bos taurus
  Clone ID: 27-LIB34-046-Q1-E1-G3
cacaaaactttggcacaatgaagtgggtgacttttatttctcttctccttctcttcagctctgcttattccaggggtgtgtttcgtcgagatacacacaagagtgagattgctcatcggtttaaagatttgggagaagaacattttaaaggcctggtactgattgccttttctcagtatctccagcagtgtccatttgatgagcatgtaaaattagtgaacgaactaactgagtttgcaaaaacatgtgttgctgatgagtcccatgccggctgtgaaaagtcacttcacactctctttggagatgaattgtgtaaagttgcatcccttcgtgaaacctatggtgacatggctgactgctgtgagaaacaagagcctgaaagaaatgaatgcttcctgagccacaaagatgatagcccagacctc

SEQ ID NO: 6365 - DNA, 320 bp, Bos taurus
  Clone ID: 27-LIB34-047-Q1-E1-G11
gggtcgaccacgcgtccggaggaatacataatttatatgggcagacagccttcacgttattgcactaccatcacatcagtctcactatcctggtggacacgtgctactcaaggcctgaattcgtcaccgtgggaggcgtccatcagccactgtacatgagtcctgggctgtaatattcccacggtatcagtatgggtcttctgtaacatggtcactatctcgcctgagccatacatttctcaaagctgagattttataagtttccaagctagtgacaggtctcacataagtccacaaggaatgctgccatggtgacctac

SEQ ID NO: 6366 - DNA, 379 bp, Bos taurus
  Clone ID: 27-LIB34-047-Q1-E1-G3
ataattattcccatcctattggccgtagcattccttacgttagtggaacgaaaagttctaggctatatacaactccgaaaaggtccaaatgtcgtaggtccatatggcctacttcaacccatcgccgatgcaatcaaacttttcattaaagaaccactacgacccgctacatcttcagcctcaatatttatcctagcacctatcatagctttaggcctagccttaaccatgtgaattcccctaccaataccctatcctcttatcaacataaacctaggagtcctatttatactagccatatcaagcctagccgtatactccattctctgattaggctgagcttccaactcaaaatacgcactaatcggaaccctacgag

SEQ ID NO: 6367 - DNA, 420 bp, Bos taurus
  Clone ID: 27-LIB34-049-Q1-E1-G3
aattgggatatgaatatgtcactgctcttcagaatctaagagaaagtaaacccccggactcctcaaaggatgagtgcatggtgaagtggtgtgcaattggtcaccacgagaggacaaagtgtgatcggtggagtgggttcagcggcggggcaatagagtgtgaaacagcagagaacactgaagagtgcatcgccaagatcatgaaaggagaagctgatgccatgagcttggacggaggctacctctacatagcaggcaaatgtggcctggtgcctgtcctggcagagaactacaaaactgacggtgaaagttgcaagaacacaccagaaaaagggtatcttgctgtagctgtggttaaaacatcagatgctaatatcaactggaacaatctgaaagacaagaagtcctgccacactgcag

SEQ ID NO: 6368 - DNA, 241 bp, Bos taurus
  Clone ID: 27-LIB34-050-Q1-E1-G11
cgaactttattaaaagtggcgttgttgcatgtttgaaataaggtctgtttaagatggcaatcttgtatacaggttggagacagatttctcttttaacatcttttgataaacaacatcagtggtaggataatgtctatgaaaaaaacttcattcttgtgagtcatttaaatgtgtacaatgtacacactggtacttagagtttctgttttgattctttttttaataaagtaccctttgattt

SEQ ID NO: 6369 - DNA, 452 bp, Bos taurus
  Clone ID: 27-LIB34-050-Q1-E1-G3
cgggtccacccacgcctccgcacgcagaccgtcaacagcaacgtggaagcacagcccgagagcaccaccctggcccctgttctgcaggctcagaccctagagactcctgtccaggcaccagttctcaaccctgagaaagaggtcccaccatctgggcggggagactcagagcctgggatggggaccagtgacctagggacctctgagtccccagcagaggaggagacgtgcagtgggaaaccctttgatgccttcactgacctcaagaatggttccctctttgccttccgagggctgtactgctatgagctggatgaaaaggcagtgaggcctggataccccaaactcatccgagatgtctggggcattgaggggcccattgatgctgccttcacccgtgtcaactgtcagggaaagacatacctcttcaagggtagtcagtactggcgctt

SEQ ID NO: 6370 - DNA, 232 bp, Bos taurus
  Clone ID: 27-LIB34-051-Q1-E1-G3
gagaggaggggtgcgtggcccaagacttgtggaaagacagcaatctgcctgcaaagagacaggctggcccttctgctctgatgaagactggaatacaaaatgcccttctggctgcaggatgaaagggttgattgatgaagtcgatcaagattttacaagcagaataaataaactaagagattcactatttaattatcagaagaacagtaaggactctaatacattgaccaag

SEQ ID NO: 6371 - DNA, 241 bp, Bos taurus
  Clone ID: 27-LIB34-052-Q1-E1-G3
aaaaaaggtcttactgaagttaaaacagatgagtttcctcgccatgggagcaacatggaggccgtgtctaagctaaagccttgcttccttatggatggaacaggaactgtcaccccagctaatgcttcaggaattaatgacggtgctgcagcagtggttcttatgaagaagtcggaagctggcaaccgtgggctcacacccttagcacagatagtttcctgggcacaagcaggtgtggagc

SEQ ID NO: 6372 - DNA, 348 bp, Bos taurus
  unsure (333): unsure at all n locations; Clone ID: 27-LIB34-055-Q1-E1-G11
gagggctctcctggaagtgtacaacatgatgagcagggaagtaaaccagttcaaagagacctggaaccgcacgcgccacgtcatcatcatcatgactgacggtttgcacaacatgggtggggatccagtcactgtcattcacgatattcggtacttgctagacattggtagaaatcgcaaaaccccagggaggattatctggatatctatgtgttcggggttggacctctagtgaaccaagagaacatcaatgctttggcttccaagaaggataaagagaaacacgtgttcaaactccaaggcatggaaaacctggaggatgttttcgtccanatgcttgatgaaagc

SEQ ID NO: 6373 - DNA, 354 bp, Bos taurus
  Clone ID: 27-LIB34-055-Q1-E1-G3
gagacctggaaccgcacgcgccacgtcatcatcatcatgactgacggtttgcacaacatgggtggggatccagtcactgtcattcacgatattcggtacttgctagacattggtagaaatcgcaaaaaccccagggaggattatctggatatctatgtgttcggggttggacctctagtgaaccaagagaacatcaatgctttggcttccaagaaggataaagagaaacacgtgttcaaactccaaggcatggaaaacctggaggatgttttcgtccaaatgcttgatgaaagccggacactgggtctctgtggcatggtttgggagcacaaggatggtactgcctaccacaag

SEQ ID NO: 6374 - DNA, 226 bp, Bos taurus
  Clone ID: 27-LIB34-057-Q1-E1-G11
gaaagatgccgaggatttttacgcctctgaggttttatccatcaacttcaaggattctgaagctgccgtaaagcttatcaatgaatatgtgaagaataaaacgcatggaaaaattgagaagctcttaaatgatcttgacgtgctcacaaatttaatcttgttgaattatatcttctttaaagcccagtggaagacgccatttaatcctaaccatacttacgaatca

SEQ ID NO: 6375 - DNA, 228 bp, Bos taurus
  Clone ID: 27-LIB34-058-Q1-E1-G3
tttgaaaaaacagggtctgcaatcacctgacagtgtacagaaaagctcccctctttgtgtagctgacagggccttttggcggaggagaatgtcattgaatcttgacagtgacgtttgcctccagctgcctgacaggcagcaggtcagcagctcaaccccacagaagccagcaccaagtgaagctgaaaaaataaggccaaaatgtgaaaatgaccttcaaattaaata

SEQ ID NO: 6376 - DNA, 200 bp, Bos taurus
  unsure (192): unsure at all n locations; Clone ID: 27-LIB34-059-Q1-E1-G3
gtctgggcattccactccgggagctatctcgctagtgcaaatgtctgccggccagaggttcgcctttgcaatatgcattctagaaataagtctcctgagagcggggcccactcccagctacgacccagcagaaagacaaggcacaccattgcccatagactgcaggatgagctcctggagtgagtggtcganaatgtgac

SEQ ID NO: 6377 - DNA, 301 bp, Bos taurus
  Clone ID: 27-LIB34-060-Q1-E1-G11
acggtatgcacaaccatgtgctgccgatcatgtcacatgccggctgtgaaaactcacttcacactcgccttgaagatgaattgcatcacactgcagcccatcctaaatcccatggccatctggtcgccagcggtgtggccaaaggacctgcaaggcctaaaagccactgcagccacagcgattgcaccacatagtccgccatgttgacctgagaccacatcatcattaagtgctccgctaactgcagaaactgcgtccccgtcgcgacggtcactggcgccacctgctacagatgacccca

SEQ ID NO: 6378 - DNA, 241 bp, Bos taurus
  Clone ID: 27-LIB34-060-Q1-E1-G3
gatcgcgagcggccgcccttttttttttttttaaagtgtgcactctaaacatatcagaaccttatttcttcctgtgaacttaggctgcctgcgcacaaaaaaaaaaaaaaaaattaccaaatggatatgcagtagagtccatagactcttaaaactgaaagaagaaatgaggttgggagaacaagttctttgtcctgaattactgtactggcttgacatggttgatgggtactaaatcaca

SEQ ID NO: 6379 - DNA, 407 bp, Bos taurus
  Clone ID: 27-LIB34-061-Q1-E1-G11
ccacgggcccgccaagcctctcaacttgctttcctgtgtccaatagcactgcagactccagtactagcctgtccagagcagcaagtgagaggaaacaagccagcattgtaagaggacatgcttctcctccctctctccgtgctgctcctgctcacacagccctggagatccctgtgagcagaaatgacaaccttttctcagaaaatactggccaatgcctgtaccctggttatgtgtagccccctggagagtggcttgcctggtcatgatggacaagatgggagagaatgtccccatggagagaagggggatccaggttcaccaagacctgcaggacgagcacgaacgcctggatgggttggccctattgggccgaaaggagacaatggctttgttggagaacctgg

SEQ ID NO: 6380 - DNA, 354 bp, Bos taurus
  Clone ID: 27-LIB34-061-Q1-E1-G3
agaacatgagcaacgtgggtatttgggaaacttctttactttttaagtatcttttctttaccttagaagtaattaaatgttagtataccttaaaagcatagaagaggttccttttttggcatttgaaagaaagttatctctgaagtaccgtcatgtgtacatttgtgtttacagttttatttttaaaaacttttctggttatataggtttaattataaatgaatacatagtccactgaagagaaatattagcacaaatcaactgactataaaaatctattcacacttttttaggtgtgtcagatgagactataattcagattgaagtctgagtacagttttacatagttatttc

SEQ ID NO: 6381 - DNA, 209 bp, Bos taurus
  Clone ID: 27-LIB34-062-Q1-E1-G11
ccgctcgggccattgtcgccattgaaaacccggctgatgtcagtgtcatatcctccaggaatactggccagcgagctgtgctgaagtttgctgctgccactggagccactcctatcgctggccgcttcactccgggaaccttcactaaccagatccaggccgcattcagggagccaaggcttctggtggtcaccgatcccatggctgac

SEQ ID NO: 6382 - DNA, 345 bp, Bos taurus
  Clone ID: 27-LIB34-063-Q1-E1-G3
tgtcgtgaataccaccgttaaacctaagccagaatgggaaaggagaagacccgcatcaacatcgttgtcactgggcacgtatattcagggaagtctaccacgactggccatctgatctataaatgtggcgggatcgacacgacaacaattgaaaagttcgacaaagaggctgccgaaatgggaaacggctccttcaaatatgcctgggtcctggacaaacttaaagctgaacgtgagcgtggtatcaccaatgatatctccctgtggaaatttgagaccagccattactacgttaccatcattgaggccccaggacacagagacttcatcaaaaacatgagtaca

SEQ ID NO: 6383 - DNA, 323 bp, Bos taurus
  unsure (251): unsure at all n locations; Clone ID: 27-LIB34-064-Q1-E1-G11
tggagcagtgcttggaaaaacatctgccactcgcagaactgcaggaggtcaaacgccttctctatggcaaagagaccaggaagctcgacctgcccggcgctgctctcgaagccgcctccagaggggacttcgagctgcagggctatgcgttcgaggccgccgcggagcagcagaggaggccccggactgtgcgtgtggggctcgttcagaacaggaccccgctccccgcggacacccccgtggtgaaacangtcaccgctctacacagaaccatggaaggcgtcctggaagtggctgccatgtgtggagtcaacatcatctgc

SEQ ID NO: 6384 - DNA, 260 bp, Bos taurus
  Clone ID: 27-LIB34-066-Q1-E1-G3
gacagtacctagtgacatagtgcagacacgcctgcagacattccctgggaaagggcagcagcagccaggtgtgaatgaggcaggatgaattggacgggtttgtacaccttgctcagcggcgtgaatcggcattctactgccattggccgagtatggctctctgtcatcttcatcttcagaatcatggtgctggtggtggctgccgagagcgtgtggggtgatgagaagtcttccttcatctgcaacaccctccagcctgg

SEQ ID NO: 6385 - DNA, 239 bp, Bos taurus
  Clone ID: 27-LIB34-067-Q1-E1-G3
cggacgcgtgggctttggcacaatgaagtgggtgacttttatttctcttctccttctcttcagctctgcttattccaggggtgtgtttcgtcgagatacacacaagagtgagattgctcatcggtttaaagatttgggagaagaacattttaaaggcctggtactgattgccttttctcagtatctccagcagtgtccatttgatgagcatgtaaaattagtgaacgaactaactgagt

SEQ ID NO: 6386 - DNA, 192 bp, Bos taurus
  Clone ID: 27-LIB34-068-Q1-E1-G11
ggagaacttctacctgctcagcaacccctggatccagctttataacaatttctcagactacctacagtacctgcctggaagccatatgaagctactgaaaaatgtgtctgaagtaaaaagttatgctttaaaaagagtgaaggatcaccagacgtcactgtaacccaactgcccccgaggattcttggacac

SEQ ID NO: 6387 - DNA, 215 bp, Bos taurus
  Clone ID: 27-LIB34-068-Q1-E1-G3
ctcaattgtaactgaaaatcagaagtggctgcagattataagttggcttatggaatgtgatggatatgctgtgataggaaacctgaaatgatggttgaatgggttaaaaaaaaactgcataaaatttgctgtaagatatatagacttattttctgtactaaagtattcttataagaaaaataagtatttgtaaaaatggtttcctgtgtcaagta

SEQ ID NO: 6388 - DNA, 218 bp, Bos taurus
  Clone ID: 27-LIB34-069-Q1-E1-G3
cactggtaagatcattctggagtgatatggtggactctgcacagagcttcataacctcttcgtggactttttatcttcaagctgatgatggaaaaatagttatattccagtctaagccagaaatccagtaggctcctgctccaactgtggtgcaggagcctacaaatttgaaagactcatcactaagcaaaatgtcctcaagattctgcaaatgagaa

SEQ ID NO: 6389 - DNA, 387 bp, Bos taurus
  Clone ID: 27-LIB34-071-Q1-E1-G3
cctgggagctatggacctggaagtagtggcacttggaaccccggccgccctgagcccggaagtgctggcacctggaaccccggccgccccgagcccggaagtgctggcacctggaaccccggccgccccgagcccggaagtgctggcacctggaaccccggccgccccgagcccggaagtgctggcacctggaaccccggccgccccgagcccggaagtgctggcacttggaatactggaagctctggatcttcaagttttaggccagatagctcaggtcatgggaacattaggccttccagtccagactggggcacctttagagaggaaggaagtgtaagttcagggacaaagcaagagttccacacaggtaaacttgtcactact

SEQ ID NO: 6390 - DNA, 304 bp, Bos taurus
  Clone ID: 27-LIB34-072-Q1-E1-G11
acgcgtccaaaaactttggcacaatgaagtgggtgacttttatttctcttctccttctcttcagctctgcttattccaggggtgtgtttcgtcgagatacacacaagagtgagattgctcatcggtttaaagatttgggagaagaacattttaaaggcctggtactgattgccttttctcagtatctccagcagtgtccatttgatgagcaagttaaaataatggaccaactaactgaatttggaaaaacaagttttgccgaagaattccaaggcgggtgttaaaagtcaatttaaaatcccct

SEQ ID NO: 6391 - DNA, 417 bp, Bos taurus
  Clone ID: 27-LIB34-072-Q1-E1-G3
aagagaacgatcttcaccgaacgctgagccgcagatctcggtccagtagcaggcatctgaagtccttaaaagactccttgaaaattcggaatgcgaacatcctgaaggaagaggaagagccagtgagaggacaaaagctcattaagaaggaatttgtacaaactggaaaggtgaagttctccatctacctgaaatacctacaagcaataggatggtgctcgatagtcttcatcctcttggggtttgtgatctattatgtggcttttattggatcaaacctctggctcagtgcttggaccagcgactctaaaatatacaatggcaccaactatccatcctctcagagggacctgagagttggcgtctatggagctctgggagtcgcacaaggtctctttgtgttcattagcgaatatc

SEQ ID NO: 6392 - DNA, 405 bp, Bos taurus
  Clone ID: 27-LIB34-074-Q1-E1-G3
acagcaagctcattgtcaacaccattaagaccaccttcggggggaattgctccgccacactggcaacactggagctctacagcgagaacctcatgctcctggtgctccagttcgtgatggacgagagctccagcaaggtgttccttcacagagtcaatctgaaccagaacctgtgtgatgccaaggaaagtagtctcacggccattatcatgtcactgatggcgctgcatgccacagcggcgaactcgtacacatgcaacgctgagcattgtctgcaggtcatcagcaacatctcgctcaatatgtgccgagtgtggctgcatgcgttcctcgtggacagggacaagttcaggcctgtggacgactgccagctggacgagaatagcatgcgtgatcccatcactg

SEQ ID NO: 6393 - DNA, 407 bp, Bos taurus
  Clone ID: 27-LIB34-075-Q1-E1-G11
cgaccacgcgtcaacacatgctcgtcttacgccctaccataacccagttatgaactgcctgtgattgatttgagtgccctgctgaccattcagcacattcatcaactggcataacatccattgggtggtttgcaagataagcagtcgcatctgggcctgtgtttcctgaaagcatcacacctgcagcaaatggaaaatgactgagttgatgtacatttctggattcaggaattagtgtgcctcatgaggacgctcgttgcccaggtgtcctgccagaacgacagaataatcctcacgtttgcccctacaatctgtatgctgagcagctctcaggatcagctttcacttgtccacggagcatcaatcaaagaatctggctgtataagattctaccttcagtttctcac

SEQ ID NO: 6394 - DNA, 135 bp, Bos taurus
  unsure (32)...(33): unsure at all n locations; Clone ID: 27-LIB34-077-Q1-E1-G11
tatagtacgtcgtattagaggggattgatgannactcagagcttattcatctgttttccttttctgttggtgttaaaccaacactctcactaaagaacgtaaatttcgttaaatattttgcttcctttgtttgtg

SEQ ID NO: 6395 - DNA, 441 bp, Bos taurus
  Clone ID: 27-LIB34-078-Q1-E1-G3
ctcgagtcaggcttcgggaagtggatcctgcagactcgagcttcaggatggttcatgcaaagagctggaccctgaagaaacattttgtaggttaccctactaacagtgactttgaactgaagacagttgaacttccacccttaaaagatggagaggtcctgctggaagctttgtacttgactgtggatccttacatgagaattatggcaaaaagcttgaaggagggtgacatgatgatgggagagcaagtggccagagttgtggaaagtaaaaattcagccttcccaacaggaactattgtgctggctccttctggctggacaacgcattccatttctaatggggaaaaactgggaaaagtgcttgcagagtggccagacacgttaccactgtctctggctctgggaacggttggcatgccccggctaacagcctactttg

SEQ ID NO: 6396 - DNA, 382 bp, Bos taurus
  Clone ID: 27-LIB34-079-Q1-E1-G3
tgagtttgttcgaaggagtgttgagcgggcgaaaaagtatgttcttggaaatcctctgaccccaggagtcagtcaaggccctcagattgataaagaacaatatgaaaaatacttgacctcattgaaagtgggaagaaggagggggccaagctggaatgtggcggaggcccttgggggaataaaggctactttatccaacccacagttttctctgatgttactgatgatatgcgcattgccaaagaggagatatttggacctgtgcagcaaatcatgaagtttaagtctttagatgatgtaatcaagagagcaaacaatactttctatgggttatctgcaggaatatttaccaatgatattgataaagccatcacagtctcct

SEQ ID NO: 6397 - DNA, 431 bp, Bos taurus
  Clone ID: 27-LIB34-080-Q1-E1-G11
acccacgcgtccacaaagataccctctcgactaaacaaccaagatagaataaaacaaaacatttaatcccaatttaaagtataggagatagaaatctaagtacggcgctatagagaaagtaccgcaagggaacgatgaaagaaaaaactaaaagtataaaaaagcaaagattaccccttgtaccttttgcataatgaattaactagtataagacttaacacaatgaattttagctaagcagcccgaaaccagacgagctactcacaaacagtttaccaagaactaactcatctatgtggcaaaatagtgagaagatttgtaagtagaggtgacatgcctaacgagcctggtgatagctggttgtccagaaaatgaatctaagttcagctttaaagatacaaaaattcagataaaccccactgtagctttaa

SEQ ID NO: 6398 - DNA, 421 bp, Bos taurus
  Clone ID: 27-LIB34-080-Q1-E1-G3
ataaaagagagcctcacctctgagttcattcatgacatagaccgagaactgaagactgttcaggcggtcctgaccattcccaagctgaagctgagttatgaaggcgaactcacgaagtccgtgcaggagctgaagctgcaatccctgtttgatgcaccagactttagcaagatcacaggcaaacctatcaaacttactcaagtggaacatcgcgtcggatttgagtggaatgaggatggggcgggtactaactccagcccaggggtccagcctgcccgcctcaccttccctctggactatcaccttaaccaacctttcatctttgtactgagggacacagacacaggggcccttctcttcataggcaaaattctggaccccaggggcacttagtactccaactaaatgttcagatacccca

SEQ ID NO: 6399 - DNA, 406 bp, Bos taurus
  Clone ID: 27-LIB34-082-Q1-E1-G3
cagaactgttgagcagatcgtgtaccttgttcattgcggcataatagagccgttgatgaacctcctcactgcaaaggataccaaaattgttctggttattctggatgccgtttcaaatatctttcgggctgctgagaaactaggtgagactgagaaacttggtataatgattgaggaatgtggaggtttggacaaaatcgaagctctgcaaaaccatgaaaacgagtctgtgtacaaagcgtcattaaacttgattgagaagtatttctctgtagaggaagaggaagatcaaaacgttgtgccagaaactacctctgaaggctacacattccgagtgcaagacggctccgctgggaccttcagcttttagatgcgtacccgaggttaacgctgttcgttgtgcact

SEQ ID NO: 6400 - DNA, 429 bp, Bos taurus
  Clone ID: 27-LIB34-083-Q1-E1-G3
gggtccacgcccgcgtccgaagtaaactcctgtctcgatttactcgaaatgagtttaatcttgaaagcaagagcaccattggagtagagtttgcaacaagaagcatccaggttgatgggaaaacaataaaggcacagatatgggacacggcagggcaagaacgataccgcgctataacatcagcatactatcgtggagctgtaggtgccttattggtttatgacattgctaaacatctcacatatgaaaatgtagagcgatggctgaaagaactaagagatcacgctgatagtaacattgttatcatgcttgtgggcaataagagtgatttgcgccatctcagggcagttcctacagatgaagcaagagcttttgcagaaaaaaatggtttgtcattcattgagacatctgctctagactctacaaatg

SEQ ID NO: 6401 - DNA, 321 bp, Bos taurus
  unsure (314): unsure at all n locations; Clone ID: 27-LIB34-084-Q1-E1-G3
cgtccgatttcaacatgtcaggtgagggactgaagaatccttgaaatcatataaaaaggctagaatgttccccaccaatcactgttgatttcaatgcatttaagtgccactcatcttttaagaaaagcaggtggacagccgggtagacatggccaacccgggattgtactgtcctgtgggttaagttacaacctcgtgggcttggctaggtgtggaagaatggaggcctgacgcgaatactagagtgtcatttgaagaccctaatgactaaccgtggattttagtgtcagcaataacaataaagcattttgcanacactga

SEQ ID NO: 6402 - DNA, 283 bp, Bos taurus
  Clone ID: 27-LIB34-085-Q1-E1-G3
agccatgcaatatcacaaactgtatacgatgcattcatcgactttccaaccccatcaggacatttcatcatgatgaaatttccgttccctcctgtgaatctgccgaatctctagagatcctcacaggactattcctaggaatacactacacatccaacagaacatcgagcattctcctctgttacacatatctgacgagacgtaaactacagatgaatcatccgagacatacactcagacggagcttcactgctttttatcggcttatatatgcatgtatgac

SEQ ID NO: 6403 - DNA, 370 bp, Bos taurus
  Clone ID: 27-LIB34-086-Q1-E1-G11
agcaggccaacgcgtccctgacggagctcagcctgcgcaccaacgagctcggcgacggcggcgtgctcctggtgctccagggcctgcagagccccacctgcaagatccagaagctcagcctccaaaactgctgcctgacggaggctggctgcggagtcctgccgggcgtgctgcgctccctgcccaccctgcgggagctgcacctcagcgacaacccgctgggggatgccggcctgcggctgctctgtgaggggctcctggacccccggtgccgcctggagaagctgcagctggagtactgcagcctgacagccgccagctgcgagcccctggccgcggtgctcaaggccacgcgggacctgaaagagct

SEQ ID NO: 6404 - DNA, 437 bp, Bos taurus
  Clone ID: 27-LIB34-086-Q1-E1-G3
ccgggaagaccacgcggccggttaaagatcgcgagcgggcgcccttttattgcctgcggtacatgaatgactaggatgttctggccatcaacaagctcgtcaagatcatccccggcgtggtggatgggatcttcctgcccaggcaccccctggagctgctggcctctgacgactttcaacctgtccccagcatcattggtgtcaacaatgatgagtatggatggatcatccccttgagcgtggacaattctgacactaagatggaaataagcagagagtccgtgaggaatgcctttgcagaattgtcagcaatgacgactatgcctcctgagttttggtaactgttgatggaggaatacatagaggacagtgaagaccagcagaccctccagagacagctccatgagattatgggggactacctttttgtggatcct

SEQ ID NO: 6405 - DNA, 397 bp, Bos taurus
  Clone ID: 28-BOVMS1-001-Q1-E1-G7
aaaaaaaaaaaaaaaaaaaaaaaaaaaaaaaaaaaaaaaaaaaaaaaaaaaaaaaaaaaaaaaaaaaaaaaaaaaaaaaaaaaaaaaaaaaaaaaaaaaaaaaaaaaaaaagggcggccgcccaaaaggatcaaacctaacttacccttgcatgcaacttcaaaccccttcaaaagtgtcaccaaaattcaattcacgggccgtcgtttaaaaacgtcgtaacgggaaaaaccctggcgttacccaacttaacccccttgcaaaaaatccccctttcccaaactggcgtaaaaccaaaaaggcccgcaccaatcccccttccaaaaatttgcccaccctaaatggcaaatggaaccccccctgtaccggcccattaaccccggcggttgtggtggtt

SEQ ID NO: 6406 - DNA, 210 bp, Bos taurus
  Clone ID: 28-BOVMS1-002-Q1-E1-G7
aaaaaaaaaaaaaaaaaaaaaaaaaaaaaaaaaaaaaaaaaaaaaaaaaaaaaaaaaaaaaaaaaaaaaaattaattaaacataaaagaaaagaactcaactcttctatagggtcaacttcatcttcctttctagggcacttttttttcttctgtcgcccctgttttgtctttgcctgtatccaatttccctgcctttcattacatcccc

SEQ ID NO: 6407 - DNA, 473 bp, Bos taurus
  Clone ID: 28-BOVMS1-003-Q1-E1-G7
cggtcggactccgggtcgccgacgcgtccgccccaccttttttttttttttttttttttttttttttttttttttttttttttttttttttttttttttttttttttttttttttttttttttttttttttttttttttttttttggttttttttttaaaaaaaaaaaaaaaaaaaaaaagggggggccccccaaagggttcaaagctaacgtgccggggaagggaaaggcaaacccccccaaaggggcccccaaaatccaattcaggggccgccgtttaaaaacgccggaaggggaaaaacccgggggtacccaaactaaaccccctggaaaaaaaaccccctttcccaaaggggggaaaaaccaaaagggcccgaaccattcgccctcccaaaaaatgggccccccgaaagggcaaaggggaccccccctgaaccgggaaataaacccgggggggggggggggtaaacccc

SEQ ID NO: 6408 - DNA, 428 bp, Bos taurus
  Clone ID: 28-BOVMS1-004-Q1-E1-G11
agttgaaccatgccaaccgcatggctgctgaggccctgaagaactacaggagcactcaagccatcctcaaggatacccagatccacctggatgatgctctgcggggccaggaggacttgaaggagcagctggccatggtggagcgcagagccaacctgctgcaggctgagatcgaggagctgagggccaccctggagcagacagagaggagcaggaagatcgcagagcaggagctcctggatgccagtgagcgtgtccagctcctgcacacccagaacaccagcctgatcaacaccaagaagaagctaaagacagacatcactcaaatccagggagagatggaggacattatccaggaagctcgcaacgcagaagagaaagccaagaagggcatcactgatgcaaccatgatggctgaggagctaaag

SEQ ID NO: 6409 - DNA, 426 bp, Bos taurus
  Clone ID: 28-BOVMS1-004-Q1-E1-G7
atgcgacgtcatagctcttctatagtgtcacctaaattcaattcactggccgtcgttttacaacgtcgtgactgggaaaaccctggcgttacccaacttaatcgccttgcagcacatccccctttcgccagctggcgtaatagcgaagaggcccgcaccgatcgcccttcccaacagttgcgcagcctgaatggcgaatgggacgcgccctgtagcggcgcattaagcgcggcgggtgtggtggttacgcgcagcgtgaccgctacacttgccagcgccctagcgcccgctcctttcgctttcttcccttcctttctcgccacgttcgccggctttccccgtcaagctctaaatcgggggctccctttagggttccgatttagtgctttacggcacctcgaacccaaaaaacttgattaaggtgat

SEQ ID NO: 6410 - DNA, 433 bp, Bos taurus
  Clone ID: 28-BOVMS1-005-Q1-E1-G7
cacgcgtcagaataatcacatccgagtggcagtatcagtccttaggttagtggaacgactcgttcaaagtcacatccacctcctcaaaggtctaaatgtcgtatgtcgatatcggctacttcaacccaacgtcgatgcaatcaaacttttcattacagaaccactacgacccgctacatcttcagcctcaatatttatcctagcacctatcatagctttaggcctagccttaaccatgtgaattctcctaccaataccctatcctcttatcaacataaacctatgagtcctagttatactagccatatcaagcctagccgtatactccattctctgatcaggctgagcttccaactcacaataagcactaatcggagccctacgagcagtagcacaaacaatctcatacgaagtgaccctagcaattatcctg

SEQ ID NO: 6411 - DNA, 380 bp, Bos taurus
  Clone ID: 28-BOVMS1-006-Q1-E1-G11
gaagaactacaggaacactcaagccatcctcaaggatacccagatccacctggatgatgctctgcggggccaggaggacttgaaggagcagctggccatggtggagcgcagagccaacctgctgcaggctgagatcgaggagctgagggccaccctggagcagacagagaggagcaggaagatcgcagagcaggagctcctggatgccagtgagcgcgtccagctcctgcacacccagaacaccagcctgatcaacaccaagaagaagctagagacagacatcacgcaaatccagggagagatggaggacattctccaggaagctcgcaacgcaaaagagaaagccaaaaagggcatcactgatgcagccatgatggctg

SEQ ID NO: 6412 - DNA, 414 bp, Bos taurus
  Clone ID: 28-BOVMS1-008-Q1-E1-G11
ctcactacaactattcctaattataacctttaccgccatggaactaatcttattttatattctatttgaagcaacactagtcccaacactcattattattacccgatgaggaaaccaaacagaacgcctaaacgccggactctatttcctattctatacactagctggctccctacccctattagtcgcactaatttatatccaaaacacagtaggatccctaaatttcctaatattacagtactgagtacaacctgttcataactcttgatctaatgtcttcatatgactagcatgtataatagctttcatagtaaaaataccactatatggcctccacctttgactacctaaagctcacgtagaagcccccatcgcaggctccataatccttgcagcagttctactaaaact

SEQ ID NO: 6413 - DNA, 314 bp, Bos taurus
  Clone ID: 28-BOVMS1-008-Q1-E1-G7
cttatgattctgaggactgttcctccagagcttagctggctctaggggagcatggaggccactgtgcccacaggcagaaccagagttccacgcaatgctcacctgagtcacaggatcccctattactgtattctagctacaatgttatattacatagtataatgagacgatatcaagagtacacatgtaatgatgatgcatattaacattctcataggagtggttagagaagccgatgcctcatttctacattttgtcattagcagtgatcatctaacggttccgtgtatccttacagaaataaagcagcatat

SEQ ID NO: 6414 - DNA, 76 bp, Bos taurus
  Clone ID: 28-BOVMS1-009-Q1-E1-G7
aaaaaaaaaaaaaaaaaaaaaaaaaaaaaaaaaaaaaaaaaaaaaaaaaaaaaaaaaaaaaaaaaaaaaaaaaaaa

SEQ ID NO: 6415 - DNA, 268 bp, Bos taurus
  unsure (259): unsure at all n locations; Clone ID: 28-BOVMS1-012-Q1-E1-G11
atgcgacgtcatagctcttctatagtgtcacctaaattcaattcactggccgtcgttttacaacgtcgtgactgggaaaaccctggcgttacccaacttaatcgccttgcagcacatccccctttcgccagctggcgtaatagcgaagaggcccgcaccgatcgcccttcccaacagttgcgcagcctgaatggcgaatgggacgcgccctgtagcggcgcattaagcgcggcgggtgtggtggttacgcgcagcgtgnacgctacac

SEQ ID NO: 6416 - DNA, 473 bp, Bos taurus
  unsure (460): unsure at all n locations; Clone ID: 28-BOVMS1-013-Q1-E1-G7
atttacaccctgaattaggcactgatgcagataaggaacagtggaaagcggttcacaaacaagtggttgacagtgcttatgaggtgatcaaactgaaaggctacacatcctgggccattggactgtcagtggccgatttggcagaaagtataatgaagaatcttaggcgggtgcatccgatttccaccatgattaagggtctctatggaataaaagaggatgtcttccttagtgttccttgcatcttgggacagaatggaatctcagacgttgtgaaagtgactctgactcatgaagaagaggcctgtttgaagaagagtgcagatacactttgggggatccagaaagaactgcagttttaaagtcttctaatgttgtatcatttcactgtctaggctacacaggattttagttggaggttgtaattcatattgtcctttatatctgatctgtgattaanacagtaatgttaa

SEQ ID NO: 6417 - DNA, 448 bp, Bos taurus
  Clone ID: 28-BOVMS1-014-Q1-E1-G11
agtttgtactttcacatgcaaacagttaaaatgaatacataattaaaatgttaatattgtgatgaggaaagtaggaaatgaacatgaaattttaagtaggtgtcatggaatactactgttgtctgctaaggcattttatgtacttcagtgattttaaaaagcaagtacctattcccttttttggtattattattgcagtttaattatatctgtatctcttcactgaataattttaaaaggcgagtgagaatttgtctcttgttcccaaattgcctcattaattttagtgaacaaaagtctgtacctttttaatgtgaaattattgtgactaaaaagtagttgcagttaatgtttatgatatgtcatgcattgtaatttcctgtggtatttataacattcccattcctttgtagttaaaagtttaaaagagttctatgtactgaatcac

SEQ ID NO: 6418 - DNA, 410 bp, Bos taurus
  unsure (380): unsure at all n locations; Clone ID: 28-BOVMS1-016-Q1-E1-G7
cccacgcgtccgcccacgcgtccgtctgaaaccttatccaagaacttagaagccatcagccaagtctccgtatttctctgtgcaaagtatcatagcttaaataaatgtacaatattcaattgtaatgcatgccttcagttgtaagtagccagatttctctatggtgtcattgaaacatgctactttttaattggccctgtacagtttgcttatttataaatttattgaaaacactgcaggtgttgagtggttaaaaatgtaggcttctagttcataacttcagttattttcctgagtgtgcaaacagctattttgcactgtattaaatgtaatttatttaatgaaatcagaagcagtagacagatgttggtgcaatacanatattgtgatgcatttatatcaataaaatg

SEQ ID NO: 6419 - DNA, 398 bp, Bos taurus
  unsure (380): unsure at all n locations; Clone ID: 28-BOVMS1-017-Q1-E1-G11
tgccgcctgcggcgcccggccaaccctcgttcagaagagaggttttaaaatcaaagatgggaaaatcggagaaaattgccattccccacggccagcttgttcatggtatacccttgtgtgaacaaccaaagataaacagacagaaaaacaaatataacttaccactaaccaagatcacctctgcaaaacgaaatgaaaataacttttggcaggattctgtttcatctgatataattcagaagcaggaaaaaaagcctttaaaaatactgagaatcttaaaattaaccattggagaaatccaccattccaaactgaagtaaccaaaaagggaattatgccggggaacatttagtgatcaacatctcctagtgttctcccanagctcctagtcactggat

SEQ ID NO: 6420 - DNA, 385 bp, Bos taurus
  Clone ID: 28-BOVMS1-018-Q1-E1-G7
aaaaaacaaaaaaaaaaaaaaaaaaaaaaaacaaaaaaaaaaaaaaaaaaaaaaaaaaaaaaaaaaaaaaaaaaaaaaaaaaaaaaaaaaaaacaaaaaaaaaaaaatcaaaaaaaaaaaaaaaaaaaagggctggccaccctaaagtttccatgcttacttccccttcaatgcaaattcataacccttcaattgggtccccatattcaattctatggcccttctttttaaaccttcataactggaaaaacctggagtttccaaactttaacccctttgaagaaaacccccttttcccaaccgggcttattgcctaaaaggcccactccatttgcctttccaaaaatttgccaaccctaaagggtcaatggaaccccccatttac

SEQ ID NO: 6421 - DNA, 295 bp, Bos taurus
  Clone ID: 28-BOVMS1-019-Q1-E1-G7
ctcgtgaagcccagcctaaaaacgtttggtccacctggggctctatccatccttctagttccagttccaaccagagttccaaccaatgggctccagactctgggttctggccaatgaaaaacctcccttacagtctcctcttctttttccccaagctccgcccaccatcgggagctctggctaatggagctcacctggagctgttgctttttctctactcaaagcaacaaataaaagcaatggtggccttaaaaaaaaaaaacatattaccaaaactggaaaaatccgtgttcaa

SEQ ID NO: 6422 - DNA, 401 bp, Bos taurus
  Clone ID: 28-BOVMS1-020-Q1-E1-G11
aaaaaaaaaaaaaaaaaaaaaaaaaaaaaaaaaaaaaaaaaaaaaaaaaaaaaaaaaaaaaaaaaaaaaaaaaaaaaaaaaaaaaaaaaaaaaaaaaaaaaaaaaaaaaaaaaaaaaagggggggccgcccaaaaggttccaaccttacttacccttgaatgcaacttcaaaccccttcaaaagtgtcaccaaaattcatttcacgggccgtcgttttacaacttcttaacgggaaaaaccctggctttacccaacttaatccccttgcagcaaatccccttttccccagttggggtaataccaaaaaggcccccaacgattccccttcccaaaaatttcccaacctaaattgcaaattggaaccccccctttcccggccaataaaccccgccggttttgg

SEQ ID NO: 6423 - DNA, 314 bp, Bos taurus
  Clone ID: 28-BOVMS1-020-Q1-E1-G7
ctcgtttgagatgctcgatgctgcaaagaacaaggtccgggtgaagatcagctatgtaatgattgccttgacagtggcaggatgcgtattgatggttatagagggcaagaaggctgccagaagaaatgagactttaacaagcttgaacctagaaaagaaagctcgtctgagagaagaagctgctatgaaggccaaaacagagtagcagatatatcgttggttggattttgaagacctagaaataatgctgcagcaataggccttactaaaaagaatgtggtgtatgagcttccctatttccactctagagctac

SEQ ID NO: 6424 - DNA, 359 bp, Bos taurus
  Clone ID: 28-BOVMS1-022-Q1-E1-G11
atgcgacgtcatagctcttctatagtgtcacctaaattcaattcactggccgtcgttttacaacgtcgtgactgggaaaaccctggcgttacccaacttaatcgccttgcagcacatccccctttcgccagctggcgtaatagcgaagaggcccgcaccgatcgcccttcccaacagttgcgcagcctgaatggcgaatgggacgcgccctgtagcggcgcattaagcgcggcgggtgtggtggttacgcgcagcgtgaccgctacacttgccagcgcccctagcgccgctcctttcgctttcttcccttcctttctcgccacgtccgccggctttccccgtcaagctctaaatcgggg

SEQ ID NO: 6425 - DNA, 85 bp, Bos taurus
  Clone ID: 28-BOVMS1-022-Q1-E1-G7
aaaaaaaacaaaaaaaaaaaaaaaaaaaaaacaaaaaaaaaaaaaaaaaaaaaaaaaaaaaaaaaaaaaaaaaaaaacaaaaaaa

SEQ ID NO: 6426 - DNA, 375 bp, Bos taurus
  Clone ID: 28-BOVMS1-023-Q1-E1-G11
gagaatgtagcatttttgacataatgtccatttttgtggtgagaaagaatgtgatctatgtctgtgtcaaaattttggtaaacttatacctgtaagtaaatttaaataaaatcctctgttttataaactctaaaacctcaaaaaatgaaataaatcaacatgtaacaaaacaaacgggcagctagctccaaatgatccaagctaacgataacatgcatgataaataccactgcttctatatagtcactcaaattcaattcaatgcccatcattttacacagtcataactggaaaaaccctatcattacccaaattaatcgccatgcaccagatcacactttcgctaactacagtaatagccaagaggcccacacc

SEQ ID NO: 6427 - DNA, 365 bp, Bos taurus; identical to SEQ ID NO: 4275
  Clone ID: 28-BOVMS1-023-Q1-E1-G7

SEQ ID NO: 6428 - DNA, 335 bp, Bos taurus
  Clone ID: 28-LIB188-001-Q1-E1-G11
acagacttctggaggactgtggactgaatgcataccgcagctcagtcccgaacaccaagcagccatacaggagctcatgaactctgcctgaagggccttactaccaccaccagataactaactccatataaacgtttacccttttgttcaagtttctttgttttgtttttgagcaaaagataaccgtagacttgtctgtatgccattcttctgcaaagccacaacagcagaacgataagccctgggcttcaagatggtgtgtaagtggatttcccacccacccgactactgacagaagtcccgtcagccctgcagtaacactgaataatattttt

SEQ ID NO: 6429 - DNA, 322 bp, Bos taurus
  Clone ID: 28-LIB188-001-Q1-E1-G7
acactgaatccagaacatctgggtcaatggggagtgcagcgagaggaagtcccagctgcagatcgtagtgatcaagtcccagacaccgagtcagagaccaagatcctcctgcaggggactccggtggcccaaatgacggaggacgccatcgacggatagcggctgaagcaccttatccaaaccccctccggctgtggggagcagaacatgattggtatgacgcccacggtcatcgccgtgcactacctggacagcaccgaccagtgggagaagttcggcttggagaagcggcaggagtccctggagctcatcagaaaggggt

SEQ ID NO: 6430 - DNA, 420 bp, Bos taurus
  unsure (291): unsure at all n locations; Clone ID: 28-LIB188-002-Q1-E1-G11
acaattcactttcttcagaagtcattttggaaaacagcaaattgccggaaggagtaacaatacattacaagtcttactgcaagaatggggtgaatggaacaggggaaaatgggagaaaatgctctaatatttccattggggatgaggttcagtttgaaattagcataactgcaaataaatgtccaaataagaactctgaaaccattaaaattaagcctctgggcttcactgaggaagtggagattatccttcagttcatctgtgaatgtgagtgccagggtgaaggcatcncaggaagccccaagtgccacgacggcaacgggaccttcgagtgtggggcctgcaggtgcaacgagggacgtgtcgggagacactgtgaatgtagcacagatgaggtgaacagcgatgacatggatgcct

SEQ ID NO: 6431 - DNA, 428 bp, Bos taurus
  Clone ID: 28-LIB188-002-Q1-E1-G7
acagcgccgaatctaccttcgaggggatcctcaaaaacccaagagcagagtccttgaacagcaggtccctctggccgggtggagagccaaagagctggaagctccgagacttgttttttccaaatttctcctgcgccttgctgagaagcttccagatcaagtcttccttgccatccacacttcgggccacgacagcatgagaagggacctgggccaggtggcactccttgaacgcatccactggcgcccgactgttgttcaggcagagaagctcatactggtccctgtcagccttctctggcaagttctcaaacactgtcgtctctttaacaaaagccacgtctccagccccgtcctgcagacactttgaaggcacagaataaccgaagtatgattcccgggaggagcaggcacactggttctccccc

SEQ ID NO: 6432 - DNA, 396 bp, Bos taurus
  Clone ID: 28-LIB188-003-Q1-E1-G7
acccctttcagatgagctccagggactcctgccgcttctccaagccgaacttctcccactggtcggtgctgtccaggtagtgcacggcgatgaccgtgggcgtcataccaatcatgttctgctcaccacagccggagggggtttggataaggtgcttcagccgctctccgtcgatggcgtcctccgtcatttgggccaccggagtcccctgcaggaggatcttggtctctgactcggtgtctgggacttgatcactaagatctgcagctgggacttcctctcgctgcactcccccttgacccagatgttctggattcagtgtacgaacagccacagttttgttgactcttacgccttctggcacgaccttcagggtcttcttgacaccatcactga

SEQ ID NO: 6433 - DNA, 420 bp, Bos taurus
  Clone ID: 28-LIB188-004-Q1-E1-G11
catgatcccgagcgcgatggcggcgggatactgtggcactccgtgaaattagacgttatcagaagtccactgaacttctgattcgcaaacttcccttccagcgtctggtgcgggaaattgctcaggacttcaaaacagatctgcgcttccagagtgcagctattggtgctttgcaggaggcaagtgaggcctatctggttggcctttttgaagacaccaacctgtgtgctatccatgccaaacgtgtaacaattatgccaaaagacatccagctagcacgccgcatacgtggagaacgtgcttaagaatccactatgatgggaaacatttcattctttaaaaaaaaaaaaaaaaatttctcttcttcctgttattggtagttctgaacgttagatattttttttcatggggtcaaaaggt

SEQ ID NO: 6434 - DNA, 385 bp, Bos taurus
  Clone ID: 28-LIB188-005-Q1-E1-G7
acgagagcaggagctgctctatgcccgggcccagctggagctggaagtgagcaaggcccagcagctggctgaggtggaggtgaagaagttcaagcagatgacagaggccctggggcccagcaccatcagagacatggctgtggcagggccggagatgcaggtaaaattgctgcagagcctgggcctaaaatccaccctcatcaccgatggttccacgcccatcaacctcttcaacacagccttgggtttgctggggctcggggctgaggcccagcccccagccaagaagcccaccgggggacccagcgtccaagagggcttgcttcccatctccactgctgcccccctaactcttggaaacaaccaggttgtgccttagctctgt

SEQ ID NO: 6435 - DNA, 440 bp, Bos taurus
  Clone ID: 28-LIB188-006-Q1-E1-G11
gcatgtacccgaccgcgacgggcgcgggataccaacagagtcaatgtcaatgtcagcagccagcgcgcctcccttccccttgctggcaatggagccctcgaagaaccctttggacacagtcagtaagggccagttggtatccaacggcatgatgggtgcaggtggctgaagcaacttggcattagggtcaatgtcggggattgtctccttctctgggtcaaatgtctccttcaggctctcagcttcttcgtctaagccgtgggtagcagctgtgagataggccagtgacttctgcccacagttcttcaggatccgcacccgctcggacacatctcccaggtaaagggcattctgataatggccactcatgtcctttcgtatctcagcaatcttcatcatcttgcgacctgcccgggcggccgctcgaacccatcgaccaa

SEQ ID NO: 6436 - DNA, 396 bp, Bos taurus
  Clone ID: 28-LIB188-006-Q1-E1-G7
ggatactgacctataggttcttgtggaagtattttttcctggaatatctcgtatatttttttctttttttttttcaaactgtcctccattttttctattcatatgactcagcgccatgtcaatcgccatcaagggaatcaaaaggtgaccctataatacataataaccaaaatgcgaaattgtattttaacacatcattttgaatcggtaaacaagtatttcaaagtaaaaagttgaacttttaggccactgttgaactaaacttttgaaatgcacggcttaaagaccccagtcaccgttagcaatgggcgctatacgaaccccctgggaaccgttttccattttttgtaaacactggactcatttaaagtttacccgatcaaaatgcataaaggt

SEQ ID NO: 6437 - DNA, 359 bp, Bos taurus
  Clone ID: 28-LIB188-007-Q1-E1-G7
accgctgcagaggactagagtcatgttgggggaggggctgcagtcccttggccgcccccattcccaagtcaccatcaaacacatcagagcctgccccttcggaaggtgccagcggagatctgggaggctcctcctcagagggctccagccccagtgtcagctcaccaccgccactctgaggacaagagaaggtcaaaatggaggtcattcatggatctgagatggaggctccatgggaagtgacagggtcccaggagataaatcatctctgatgtatgacagaggcatggtagaaagaatgggatcacagttggaaagcagtaagaatccttcttagggaaaatggggccttcttcatg

SEQ ID NO: 6438 - DNA, 398 bp, Bos taurus
  unsure (365): unsure at all n locations; Clone ID: 28-LIB188-008-Q1-E1-G7
actccctaccctcaccttcctttgctaacaccctttcagcgagtgttttcttcctctgcaaaggaaaaacaaattggatttgaaaaatattctcaagtttcatagctgaaatttggggcaaatgtgtccagaccagctagcattctctataaatatcaacaaaagcaggcttggggattctgtgctttgggtccaaggatcctggcaagaaacacatgttgagattcctctagttcagaatttccagggggtggaggtagagccacctcaactgtcttcagcctcagctggctcaattgccaggcttagtggcaactgcccctgccatctcgaagcccatttttcacatttgccctctgctgtgncctccttgcagcttctgtctttggctacagcac

SEQ ID NO: 6439 - DNA, 281 bp, Bos taurus
  Clone ID: 28-LIB188-010-Q1-E1-G7
acttggagtcggtcccgcccagcatcagctcgcccccgggctgggctttcgggtccctgttcaggaagaaggagaagacgttcttgtccaccaacttctgctgcatcaggttgtcgaagacaggcagcacgttgttgacggagatgcgggggtaggccatgcccagaatgccgtcgaacttggccgcgatgaagaccacaccgggctgcttgatggcctccccgaaggtctgcctctgcaccgtgacgccacccgggctggatgaggatgggttacagggt

SEQ ID NO: 6440 - DNA, 406 bp, Bos taurus
  Clone ID: 28-LIB188-012-Q1-E1-G11
acatggataaagctatttatttctatctactagaaaataaagtcatattttttcttaatttaatattggtcattgctaatcagaacacactattgccaggaacacagtagttattgttaaaatcagctgcactagatacaatttgaaaatatccagcaccaggttaattccaataacgaacccaatagattagttaatgctatgagaagactaaagagaaagagaaaagagacgcagacccaggcctggctccacatgctactaactaccagctctcagatgtgtcactgggaacaatacacactccatgcgttttgctacatctccagaagaggtaaggacttgagtccacacggggatgctcgcttgcaagtccttgaggcccacagcctggtgtgtttcacgc

SEQ ID NO: 6441 - DNA, 422 bp, Bos taurus
  unsure (407): unsure at all n locations; Clone ID: 28-LIB188-012-Q1-E1-G7
acattattgaggaggacaagggtgatggatggacaagagctcggagacagaacggtgaagaaggctacgttcccacatcatacatagatgtaactctagagaaaaacagtaaaggttcctgaagagggtttctgaggaaatgggcaagatgttgaaggaggttacatgcagctgcttttggggggggaggtgttagagttgtcaggctcagagagagtgagagaagcaagttgcatgagtgcatgcagacatgattattttttactaacttcattagcatttccatgtgttgttttaaaaaatcattgtaataccaacccttaaatttgtcatttatagttattcatataaaggaaaaaaagccaacaatggctaaccttttttccatctgttttactgatattcanattagaaagaatgca

SEQ ID NO: 6442 - DNA, 394 bp, Bos taurus
  Clone ID: 28-LIB188-013-Q1-E1-G7
actcctggttctgctgctccatctcgcagcgcagctgggccagctgctcctccacactgccaatcagcccctggatctgggacagctgcatgcagtagcggttctctgtctcagccaggctaccctccagggatgctttcatgctgagctgggactgcagttcgatctccagggcctgcaaggtgcgccggagctccgagatctcgctcttgccgctctgcaccagctcgctgttggtggccacctcgcggttcagttcctccgtcttgctaaagaaacagtcctcagtggctggtctggtggacctgctcgcggctggagatgaccctgccatcctgcacctcctccacaatggtgcgcacctggcgggtggtcacgggttctttggtcttgt

SEQ ID NO: 6443 - DNA, 396 bp, Bos taurus
  Clone ID: 28-LIB188-014-Q1-E1-G11
gcaaaacatttggcatatggtgatcagtaaacatttaggaaacaaaagctttatcaaaatgaatacaatttgtggataaaccctgaataaagtggcttttggaagaactggagtttgcagcaaccacctttataaagggatccatccactctcaatggaaaacactcaagcatacctttcactaggttcagaaattaccacaatgtaattaattccaagggcatgggacttaatttatgggcaaactccatacaagagaatgttgtcccagttttccagtcactacatttccaccttatcctactcttgcactgccaggctcctttgtcaatgagattctccaggcgagaatactggagtgggctgtcatgctctcctccaggggatcttcccaac

SEQ ID NO: 6444 - DNA, 442 bp, Bos taurus
  Clone ID: 28-LIB188-016-Q1-E1-G11
acataagagtgtgtctgcgttccaataaaactttatttaaaaaaaaattataaatgaaaagtattctctcttctgagcagtcagtgtttccagccctcaagaaactgatggtgcttccagcgtgtgacagtgaccagagtgtggatcttatcattaagctgtgggcacagcaatgagaactaacacagcatttcccgtatgactgcttatgtgaacatgccctgttacgaagaataatagaggctggaaattcctgtcatcaagggttcagacacttctaggagtttaagtcctgtgtggaaatcaaaatcggctttttctaaggcttctttgtatgtcagctttcttttcgtctggggacacaggatgtttctgacataggacttttgatcttcgagcttcgtagcaatgaagacatctataatccctacttgcagagctt

SEQ ID NO: 6445 - DNA, 420 bp, Bos taurus
  Clone ID: 28-LIB188-016-Q1-E1-G7
accactccaactttcctcaaggtggtctcataattctggaatggtaggtcccgctgatacaaaatgaagacagacaacacaacgtttactctgtagagacatcctaactcctactatgcatgcatggtgatcttgaatgcaactcgtcctaaaaacttgtcacggtcattccgggtttttaggttgggtgatccatcgatcttgcactcaaccattacttctcttacgtcagcatcactaccaaagccgacctggacggcaactagtggctgcaggtagttcccatgcagttttttcccataatatggaaaatattttaaatctatcgttccattggaaggataagttgatagaaatgctgtgctttcgctctttccagtacggttattttacatcacctataccagaaggtcctgactg

SEQ ID NO: 6446 - DNA, 299 bp, Bos taurus
  Clone ID: 28-LIB188-017-Q1-E1-G7
catgaatccgagcgccatggcggccggatacttctcctaagagttgggcacacacttgtccaggccctggtcatcgccagcacacaaggcacagagtctggatttcgagtcagccccaggggcacagctctgactaaagaattcatcaaatgcgcaggagcctgtctggttgacgatcaggcccatggggatgttccagcctgcagtcctgtccacggcggtgtggcacgacttcttgtctttcagagaattccatgtgagcccctcatttgctttcttgacaactgccacggcaaggt

SEQ ID NO: 6447 - DNA, 279 bp, Bos taurus; identical to SEQ ID NO: 3073
  Clone ID: 28-LIB188-018-Q1-E1-G11

SEQ ID NO: 6448 - DNA, 300 bp, Bos taurus
  Clone ID: 28-LIB188-020-Q1-E1-G11
acaatcaccatggatgcacaagtctcatatataaaaatggtgtagtaattgcagaaaacctaggtttatcctcccatatacttcaaatcagctactagatgaggtataatacttaatacactgtagatgcaaggtctatagttgtaattacaatgtaaatgctatgtaaatagttgctgaatgtgtaggatgttcaagtgtttgcatgttggtacttgactgaactttttttcttctttcgaaaggatgtcaacccattggttggctgaatccgtgaatgtggaactcattgagtcgagt

SEQ ID NO: 6449 - DNA, 428 bp, Bos taurus
  Clone ID: 28-LIB188-021-Q1-E1-G7
catgcatccgaccgccatgggggcgggatacatgaagatgatcagatttaccattttgggggggaagaggaagaaaaaaaaaggtgtatttatcatcgctagatgtgctcactgtatgctccattatttatatgcaaggcccgggtgactggaagtgcagttgtcaggcattttaataaactggacagccatttgtttctgcacgacaaggcatctttacacaggagcaatcaggagaaaacaggaaacagccaagcactctgcactgcaacacgccaccttaacagctaaccagcattactcaactgctacacaactgcgcctagtgcacaaaaatacataagagaagagattagaattgtgtttggtaaacaatccttcccaaaaaaaaaaaataaaaatcaagtcttttcacctgaaaagtcctt

SEQ ID NO: 6450 - DNA, 384 bp, Bos taurus
  Clone ID: 28-LIB188-022-Q1-E1-G11
actatggctataccggggctttcaggtgcctggctgaggacgttggggacgttgcctttgtgaaaaacgacacagtctgggagaacacgaatggagagagcactgcagactgggctaagaacttgaatcgtgaggacttcaggttgctctgcctcgatggcaccaggaagcctgtgacggaggctcggagctgccacctggcggtggccccgaatcacgctgtggtgtctcggagcgatagggcagcacacgtgaaacaggtgctgctccaccagcaggctctgtttgggaaaaatggaaaaaactgcccggacaagttttgtttgttcaaatctgaaaccaaagaacttctgttcaatgacaacactgagtgtctggccaaac

SEQ ID NO: 6451 - DNA, 314 bp, Bos taurus
  Clone ID: 28-LIB188-022-Q1-E1-G7
acgagacgaaatcaagaagacggttcctccatgtgtctcccggagtctggagcccgtggctggccagctcagcaactcggtggccaccagactcacagccgtggagagtagcatgaaagagaacatctctaaactgctcaagtccaagaacttgacagatgccattgcccgagcagccgcagacacattacaggggccaatgcaggccgcctaccgggaagccttccagagtgtggtcctgcccgccttcgagaagagctgccaggccatgttccagcagatcaatgacagcttccgactgggcacacaggagt

SEQ ID NO: 6452 - DNA, 399 bp, Bos taurus
  Clone ID: 28-LIB188-023-Q1-E1-G11
actttgcagaggccctggggccactggagagctttgaagcctggcctgatgacttgctcatcagcacctagcccaagtcgggcaccacctgcgtaagcgagatcctggacctgatctaccaggagggtgacctggagaagtgtcagagagcccctgtcttcttgcgggtgcccttccttgagttcagcgcccctggggttcccacaggtgttgagcttctgaaagatacaccagccccacggctcctcaagacacacttgcctctggccctgcttccgaagaccctgctggatcagaaagtcaaggtgatctacatcgcccgcaacgccaaggatgtggccgtctcctattaccacttctatcgcatggccaaggtgcaccctgaccctggcacctggg

SEQ ID NO: 6453 - DNA, 389 bp, Bos taurus
  Clone ID: 28-LIB188-024-Q1-E1-G7
tcccgtacgccatggcggccggataccgcgtggacagcgccctgcccatccagcaccaggactggactggaggaaaggagttcaagtgcaaggtcaacaacaaaggcctctcggcccccatcgtgaggatcatctccaggagcaaagggccggcccgggagccgcaggtgtatgtcctggacccacccaaggaagagctcagcaaaagcacgctcagcgtcacctgcatggtcaccggcttctacccagaagatgtagccgtggagtggcagagaaaccggcagactgagtcggaggacaagttcgagcggccgcccgggcaggtcgatgaggaagcttcgggtgcagaaacaacctcgggcatcccagacctggactccctcccaacc

SEQ ID NO: 6454 - DNA, 409 bp, Bos taurus
  Clone ID: 28-LIB188-025-Q1-E1-G7
actttgcaaaggccctggggccactggagagctttgaagcctggcctgatgacttgctcatcagcacctaccccaagtcgggcaccacctgggtaagcgagatcctggacctgatctaccaggagggtgacctggagaagtgtcagagagcccctgtcttcttgcgggtgcccttccttgagttcagcgcccctggggttcccacaggtgttgagcttctgaaagatacaccagccccacggctcctcaagacacacttgcctctggccctgcttccgaagaccctgctggatcagaaagtcaaggtgatctacatcgcccgcaacgccaaggatgtggccgtctcctattaccacttctatcgcatggccaaggtgcaccctgaccctggcacctgggacagcttcct

SEQ ID NO: 6455 - DNA, 415 bp, Bos taurus
  unsure (406): unsure at all n locations; Clone ID: 28-LIB188-026-Q1-E1-G11
accaaaaaaccttcctcctgatactgcgctgctggacctgcaaaacaacaaaataactgagatcaaagatggagactttaagaacctgaagaaccttcatacactgattctcatcaacaacaaaattagcaaaatcagccctggggcatttgctcctttggtgaaattggaacgactttatctttccaagaatcaactgaaggaattgccagagaaaatgcccaaaactcttcaggagctgcgtgtccatgagaacgagatcaccaaagtgcgaaagtctgtgttcaatggattgaaccagataatcgtcgtagaacttggaacaaaccgctgaagagctcaaggatttaaaaatggacctttcagggaatgaggaagctctcctacattcgcattgctgacacanatataacta

SEQ ID NO: 6456 - DNA, 412 bp, Bos taurus
  Clone ID: 28-LIB188-026-Q1-E1-G7
actcaatgtaaggctgacggtttacttgctgcaagccgtgtatcgtgcagttacattctcccagttgatcacattccaaatggccttcagataatcgggcctgacatttttatactgaaggtaataagcatgctcccacacgtcaatccccagcagggggataagacctgttgttccttgcatgggatcctggttagaacaagcagcaatctgtaagcgtccctgctccttattgaagccgagccaaccccaaccggagccttggacaccaacagatacagcagtcaacttttccttaaatttggcaaaggaaccaaagtcacgtttgatggcttccagcaattccccttggggttctccaccaccgttagggctcagatttgtccagaagatgctgtgattgatatggccc

SEQ ID NO: 6457 - DNA, 366 bp, Bos taurus
  Clone ID: 28-LIB188-027-Q1-E1-G11
acaagcaatttttttttttttttttttttttttttttttttatttttttttttttttttttttttatatttttttttttttatttttttttttatttcatttatatgttatgggacacaggctaaagccttaatggctgaaggaggaccggccccaacaaaggggccccagcaggggccagaaggggccggggccccaagaggggtaaatggggccccggtcccccgtgatccccgaaagggagcataggggaatacagcagaggtctcaaaaggggcaaaggatcccgggctcacaaaggccagggaaggggcccaccaaaatgggcaacagcccctcaaatcgggtcgggttgaagaacacccg

SEQ ID NO: 6458 - DNA, 283 bp, Bos taurus
  Clone ID: 28-LIB188-027-Q1-E1-G7
acctgtgtaatggggatgactgaatccccaccatagcccacgcatctaagacggctgccccgtgctccaactaaaagttcgccacaatcagccctcggctaatagccccctgtgctcatccccgggaggatcacattaacgctgcccggcgcacccgctcttttgggagtgcactttcctaagctaaacgtggctttcgctgctaatccctccttacatccgaagaaatgaccattccaaggattttgaagttgaatctaccacgtggaacacctttgcttcc

SEQ ID NO: 6459 - DNA, 384 bp, Bos taurus
  Clone ID: 28-LIB188-028-Q1-E1-G7
acaaaaaccatggatgctcaagtctcttatataaaaatggtgtagtaattgcataaaacctaggtttatcctcccatatacttcaaatcacctctagattagttataatacttaatacaatgtaaatgctatgtaaatagttgtaaatacaatgtaaatgctatgtaaatagttgctgaatgtgtagcaaattcaagtgtttgctttttggaacttgactgaactttttttcttctttccaaatattgtcaacccatggttggctgaatccgtgaatgtggaactcatggataggagtgccagttgtattgtattctttctttctttattttttggccgtgctgagcagcttgtgggaatcttagttcccaccagggattgaag

SEQ ID NO: 6460 - DNA, 408 bp, Bos taurus
  Clone ID: 28-LIB2809-001-Q1-E1-G7
accccagctggaaattgttcccaatagtgctgaggaacgacttcacagtatgaaagagggaatccatgcccaacagaaagaacctatgataggagtgaatcaggaactggcctacttctaccctgagcttttcagacaattctaccagctggatgcctatccatctggtgcctggtattacgttccactaggcacacaatacactgatgccccatcattctctgacatccctaatcccattggctctgagaacagtgaaaagactactatgccactgtggtgaagagtcaagtgaattctgagggactccacagttatggtctttgatggttctgaaaattccatgctctacatgtcttttcatctatcatgtcaaaccattctatccaaaggcttcaactgctgttt

SEQ ID NO: 6461 - DNA, 472 bp, Bos taurus
  unsure (383),(459): unsure at all n locations; Clone ID: 28-LIB2809-003-Q1-E1-G7
catactttttgtagtcggtgtccagcacaaggactttgttctcattcaaggcatcgatcttgaacaccgcagggatcttggttttttctgcaatgatcttcttctgagcacactcaccgttctcccatttctgcagcaggatctccaggtcgccctcaggggtgggcttcagctcctccacatacactctcaggggggcactctgggcgtccagcagggagatgtcgctggccgccatggccaaggagtactgtccctgtgggtcgtgtggagactggtgttctcaaacctggcatggtggtcacctttgctccagtcaatgtaacaactgaagtgaagtctgtagaaatgcaccatgaagcattgagtgaagcccttcctgnggacaatgtgggctttaatgtcaaaaacgtgtctgtcaaagatgtccgtcgtgggaatggtggctggtgacagcanaaatgatccaccc

SEQ ID NO: 6462 - DNA, 481 bp, Bos taurus
  unsure (387): unsure at all n locations; Clone ID: 28-LIB2809-004-Q1-E1-G11
catggccgcggcatacttcatcatcaagaacagctgcccaaatcaacgtgattccaccatctccgtggaagagaatggggtgtcagcagaaagccggttctcagttcagatgttcaagtttgctggaaattatgacctagttttcctgcattgtgaggtttctctctgtgatttcattaaagaagagtgccaaccgtcttgctcaagaagtcaactccgcagtgaaggggtggctattgatccagcccgagttctagatctgggacccatcactcgcaaaggtgcccagtctcttggtgtcatgagtggaacacccaacactgcagggttcctggtggccttggcccctggttctcctgcctgtcctcctggctgggctgttctganagctcagctgggcatctggccttgaagcttgtgttcttccctctggcgatggcttccagtcaccctgcagctctgctggttctgtcttcaaaca

SEQ ID NO: 6463 - DNA, 449 bp, Bos taurus
  Clone ID: 28-LIB2809-006-Q1-E1-G11
acagcagaaaagcctgaatgggcatatctctctggggatagggcactgctttctggggaacaggcaggactttggactgagaaagggacagcacggactgaggaggaaacatgacagttggaggaagaggctggtgaggctggtgcatccaagactggagcagaggcagaggaaggtgcagattttcaacatcagtgagagtcaggctctggctttcagtaaagggctcaactggatatttagggaagggcatttctttgtgcttaggagccatagcctccttcactttggagactcccattacttcaggctgaaggaaaggcggcaccaccacaggggtttgagtaagaggagggatgttttgtgggaggctgttatggatgggcccagggaagggatagactagagactgtgtctgggcaaaggggtggattttatcctggagttca

SEQ ID NO: 6464 - DNA, 373 bp, Bos taurus
  Clone ID: 28-LIB2809-006-Q1-E1-G7
acaggctacagacccatcctccagggcttccggacctttgccaagaatggtggatgctgtggaggaaatgggaacaacccaaactgctgcatgaaccagaagaaagaccacaccgttactctctcaccatctttattcaacccagaggagttcatgcccctggatcctacccaggaacccatcttccctccagagttgctgaggctgaaagacgttccaccgaagcaacttgccttttgaaggggagcgtgtgacctggattcaagcctccaccttgaaggagttgctggacctcaaagctcagcatcccgaggccaagctggtggtggggaacacagagatcggcattgagatgaagtttaagaatcagcta

SEQ ID NO: 6465 - DNA, 379 bp, Bos taurus
  unsure (366): unsure at all n locations; Clone ID: 28-LIB2809-009-Q1-E1-G11
gccatggcccgggatacaacataaagggctgaatgggcatatccccccggggaaaaggcactgctttctggggaacaggcaggactttggactgagaaagggacagcacggactgaggaggaaacatgacagttggaggaagaggctggtgaagctggtgcatccaagactggagcacaggcacaggaaagtgcagattttcaacatcagtgagagtcaggctctggctttcagtaaagggctcaactggatatttagggaaaggcatttctttgtgcttaggagccatagcctccttcactttggagactcccattacttcaggctgaaggaaaggcggcaccaccacaggggtttgagtaagangagggatgttttg

SEQ ID NO: 6466 - DNA, 307 bp, Bos taurus
  Clone ID: 28-LIB2809-009-Q1-E1-G7
gccgtcggcgcgggatacagaagaaaggcctgaatgggcatatctctctggggatagggcactgctttctggggaacaggcaggactttggactgagaaagggacagcacggactgaggaggaaacatgacagttggaggaagaggctggtgaggctggtgcatccaagactggagcagaggcagaggaaggtgcagattttcaacatcagtgagagtcaggctctggctttcagtaaagggctcaactggatatttggggaagggcatttctttgtgcttaggagccatagcctccttcactttgg

SEQ ID NO: 6467 - DNA, 328 bp, Bos taurus
  Clone ID: 28-LIB2809-010-Q1-E1-G11
ggatacaagctattttttttttgttctttttttcatttgattttttttttctgccttaaaatgtaatttattgaaaagaagatggacaaaatctcagttaatgcacacaattatttgacatgatggcacttacaggagaagtgattcaaaggcttttacaacatttcccatacagaaatttaatgaaaactttaattccctttgactcattggcctttacaccaccatgatactactggaatttaggtaacaagtgttaggaacatttccctttagggagtttccccaaccaaaattccgttaaaaaccccaggagaaagaatgccct

SEQ ID NO: 6468 - DNA, 407 bp, Bos taurus
  Clone ID: 28-LIB2809-010-Q1-E1-G7
gggatacaagacaattgagtatgcaaatgtgtgaccataccacatagttattaaatagcagaacttgcttaaaaacaaggatttgcggacaatgtaaaattctttcattatattactcttgtggtaacatatttatctaattatgatatttaagctttcgtgttttataattgaagtttgattgtttggcacttaggccaaattttaaatcaaaatgaatttacaacttgatgcctttgaagactcaagattaccaccttctaccaagagaagtagtgctagaagttggccattgttaaggaactccttgaattataataacacatattaagacttagttttcattaaaacatacaaaaataaacctcagagtaacttttaaagtctttttcacatggatcattctt

SEQ ID NO: 6469 - DNA, 345 bp, Bos taurus
  Clone ID: 28-LIB2809-011-Q1-E1-G7
gcatggcgcgcggatacaagcttattttttttttttttgtttttttttttcgatatttttttttctttgtattttttgcttgatttttcttttttttctttcttaatcatggcatgatcatggacgtcactggtacgagtatgaatagtgttgcccgctcagacacctaattaccacaggagccggaagctgacagtccattgcttggggtgccttacgactaagctcccacacagtggttacgttgcacgcaacgtccgcttcacactccggaacttaggcgtgccggccgctataagaatgcaggtaacccgcagggagaggccgttcacgtacggggcccac

SEQ ID NO: 6470 - DNA, 387 bp, Bos taurus
  Clone ID: 28-LIB2809-012-Q1-E1-G11
gccatggcggcgggatacaccaaggactcctgagcaggcccgtggaacatgagtcttcccgaggccaacaaggtgaggctatcaaacaacttgaagatggaataacgaggctgatgaatggagaagatgattgtccgtccttgtttagacatcctcttcaggagcaaaaggacagcatttgctgtgcttgaatctaagccagttgtgggctcatccaggaacaagatggatggatcagtaataagctccattgcaatactagtcccttttctttctcctccagaaacaacacggataaactgagttccaaccttggaatctgccactttatccagacctaactcttgaaaaaccttgttaatccgttcatttttttcgtaacttgtc

SEQ ID NO: 6471 - DNA, 421 bp, Bos taurus
  Clone ID: 28-LIB2809-012-Q1-E1-G7
acagcagaaaggcctgaatgggcacatctctctggggatagggcactgctttctggggaacaggcaggactttggactgagaaagggacagcacggactgaggaggaaacatcacagttggaggaacaggctggtgatgctggtgcatccaagactgtagcagaggcagaggaaggtgcagattttcaacatcagtgagagtcaggctctggctttcagtagagggctcatctggatatttagggaagggcatttctttgtgcttaggagccatagcctccttcactttggagactcccattacttcaggctgaacgaaaggcggcaccgacacaggggtttgagtaagaggagggatgttttgtgggaggctgttagggatgggcccagggaagggatacactagagactgtgtctgggc

SEQ ID NO: 6472 - DNA, 152 bp, Bos taurus
  Clone ID: 28-LIB2809-015-Q1-E1-G7
ggtaccaagctagaattccgtgtattctatagtgtcagctagaactcctgtgtatcatacagaaggtcatgtatcaattgtagccgcattccaacgacttatatcataggaaccgaactgtgtgtagctccaggcttaccgacgcataccct

SEQ ID NO: 6473 - DNA, 384 bp, Bos taurus
  Clone ID: 28-LIB2809-017-Q1-E1-G7
gataaagcacaaaggcctgaatgggcatatctctctggggatagggcactgctttctggggaacaggcaggactttggactgagaaagggacagcacggactgaggaggaaacatgacagttggaggaagaggctggtgaggctggtgcacccaacactggagcagaggcagaggaaggtgcagattttcaacatcagtgagagtcatgctctggctttcagtacagggctcaactggatattttgggaagggcatttctttgtgcttaggagccatagcctccttcactttggagactcccattacttcaggctgaaggaaaggcggcaccaccacaggggtttgagtaacacgagggatgttttgtcggaggccgttaggga

SEQ ID NO: 6474 - DNA, 406 bp, Bos taurus
  Clone ID: 28-LIB2809-018-Q1-E1-G11
cgcgtgtcccattacaacacccaatagtgagtcgtaataagtccggagccttctacaaagcagcctagcagtccctgtgaagacaaagacaagaaggagaaatctgcagttcgacctagtccctctccggaaaggagcaacacagggccagaaccaccggctcccactctgctccttgctgagcaacatggcggctccccacaaccccttgcaacaacccccttaagtcaggagccagtgaaccccccttctgaggcttctccagcccagggtcattcaccacctaagtctcctgagaaacttccccaatcttcttcagagagctgcccaccatcccctcaacctaccaaagtttctcggcatgccagctcttcccctgaaagccctaaaccggcaccagctcctg

SEQ ID NO: 6475 - DNA, 381 bp, Bos taurus
  Clone ID: 28-LIB2809-019-Q1-E1-G7
acatgtataggtgggggttgtctactgagtaaggaatactgtttttaaggttctaaagctaaattcaaatgatgcattaatgacccaaaaactcagatctgatggtgtctgaatttctaacagtccttgctttgtgggtatgctgacaacttatctggatgccttacatcttttctaaacagtgttgcctctgaacgtgctctgctccctccctgctccctctttggagcccctttgcaccccagagcctgcagaagtggctggtataaaagggggcctggctagagaatgatcagtgtagctgtttgcaggattcctttctgggcttcattttggaaactttgcttagggctatttttcttaattgcccacatttgatgg

SEQ ID NO: 6476 - DNA, 416 bp, Bos taurus
  Clone ID: 28-LIB2809-023-Q1-E1-G11
gggatacatatctacccgctcctcattcttggagctgcactgaactgccatccacttctgctccgaactgaacgggatctctttctttcggatgtatgaatctttaatatcgcctaagtccatcttcattgccagggccaccgaggcgccctctgttggctgccccatcacggtgtttttttctgatgatggcgttgttggcaacacagcctgcctccactaacttccccaccgagacgttggaaaactgcttaatgacttccttggagggtaaaaggcagacagtcccattgccgttgtagccaactccgctgacctcggcatggagcccatcagatgttacgagttgggtgacagtcatttcgttggcagtcagagtccccgtcttatcggaacagatgacgttgcagcaacct

SEQ ID NO: 6477 - DNA, 350 bp, Bos taurus
  Clone ID: 28-LIB2809-028-Q1-E1-G7
gggataaagcaaaaaggcctgaatgggcatatctctctggggatagggcactgctttctggggaacaggcaggactttggactgagaaagggacagcacggactgaggaggaaacatgacagttggaggaagaggctggtgaggctggtgcatccaagactggagcagaggcagaggaaggtgcagattttcaacatcagtgagagtcaggctctggctttcagtaaagggctcaactggatatttagggaagggcctttccttgtgcttaggagccatagcctccttcactttggagactcccattacttcaagctgaaagaaaggcggcaccaccacaggggtttgag

SEQ ID NO: 6478 - DNA, 377 bp, Bos taurus
  Clone ID: 28-LIB2809-029-Q1-E1-G11
acttcataatcaggaacagctgcccaaatcaacgtgattccaccatctccgtggaagagaatggggtgtcagcagaaagccggttctcagttcagatgttcaagtttgctggaaattatgacctagttttcctgcattgtgaggtttctctctgtgatttcattaaagaagagtgccaaccgtcttgctcaagaagtcaactccgcagtgaaggggtggctattgatccagcccgagttctagatctgggacccatcactcgcaaaggtgcccagtctcttggtgtcatgagtggaacacccaacactgcaaggttcctggtggcctggcccctggttctcctgcctgtcctcctgactgggctgttctgagagctc

SEQ ID NO: 6479 - DNA, 151 bp, Bos taurus
  unsure (67): unsure at all n locations; Clone ID: 28-LIB2809-030-Q1-E1-G7
acagcaaaaaggcctgaatgggcatatctctctggggatagggcactgctttctggggaacaggcangactttggactgagaaagggacagcacggactgaggaggaaacatgacagttggaggaagaagctggtgaagctggtgcaacca

SEQ ID NO: 6480 - DNA, 392 bp, Bos taurus
  Clone ID: 28-LIB2809-031-Q1-E1-G7
gccatgggcgcgggatacagcagaaaggcctgaatgggcatatctctctggggatagggcactgctttctggggaacaggcaggactttggactgagaaagggacagcacggactgaggaggaaacatgacagttggaggaagaggctggtgaggctggtgcatccaagactggagcagaggcagaggaaggtgcagattttcaacatcagtgagagtcaggctctggctttcagtaaagggctcaactggatatttagggaagggcatttctttgtgcttaggagccatagcctccttcactttggagactcccattacttcaggctgaaggaaaggcggcaccaccacaggggtttgagtaagaggagggatgttttgtgggaggctgtt

SEQ ID NO: 6481 - DNA, 343 bp, Bos taurus
  Clone ID: 28-LIB2809-032-Q1-E1-G7
acagcagaaaggcctgaatgggcatatctctctggggatagggcactgctttctggggaacaggcaggactttggactgagaaagggacagcacggactgaggaggaaacatgacagttggaggaagaggctggtgaggctggtgcatccaagactggagcagaggcagaggaaggtgcagattttcaacatcagtgagagtcaggctctggctttcagtaaagggctcaactggatatttagggaagggcatttctttgtgcttaggagccatagcctccttcactttggagactcccattacttcaggctgaaggaaaggcggcacccacacaggggtttg

SEQ ID NO: 6482 - DNA, 318 bp, Bos taurus
  Clone ID: 28-LIB3057-001-Q1-K1-G11
gttctagatcgcgagcggccgccctttttttttttttttttttttttttttttgtgtttttttttttaaagttttaccacattttaattagtaaaacaaaataaaatgaaaataggcttagccatgtttaaacagaactaaatttaattttatatgaaaaaatgccatccaccataacatatttccaataattctgacaaatatttgtcacaacattttgcaaaattctaaggaaaattacaaattggagatttactctaaacatgcatagctatctgactataatttgtgcgcaaaacaccctgaagactttacttg

SEQ ID NO: 6483 - DNA, 383 bp, Bos taurus
  Clone ID: 28-LIB3057-001-Q1-K1-G7
gttccgtgcggacctggtacctcttttgtgaagcggcagctgaggagactccggcgctcgccatggcggacgaaaagcccaaggaaggagtcaagactgagaacaacgatcatattaatttgaaagtggcggggcaagatggttctgtggtgcagtttaagattaagaagcatacaccacttagtaaactaatgaaagcctattgtgaacgacagggtttgtcaatgaggcagatcagattccgatttgacgggcatccaatcaatggaacagacacacctgcacagtttgagatggaagatgaagattcaaatgatgtattccagcagcatacaggaagtgtctactaaaaagggaacctgctactttactccaaaattctg

SEQ ID NO: 6484 - DNA, 375 bp, Bos taurus
  Clone ID: 28-LIB3057-003-Q1-K1-G11
cccacgcgtccgggttcttcggatcatgtctggtggctccgcggattataacagaggacatggcggcccagagggaatggaccccgatggtgtcatcgagagcaactggaatgagattgttgataactttgatgatatgaacttaaaggagtctcttcttcggggcatctatgcttatggttttgagaagccatcagctattcagcagagagctattattccatgtattaaagggtatgatgtgattgctcaagctcagtcaggtactggcaagacagccacatttgctatttccatcctgcaacagttggagattgagttcaaggagacccaagcactagtattggcccccaccagagaactggctcaacagat

SEQ ID NO: 6485 - DNA, 356 bp, Bos taurus
  Clone ID: 28-LIB3057-006-Q1-K1-G7
ctgacgcgtcgagaagaacagtgaccgataggcctctgaacatcctcgacccggctcagggggggccgtccgaggcagcttgcccgtgacagagcctcagactgcctggaagatgccgagactgtgcagcagtcgttcgggcgccctgctgctggccttgctgcttcaagcctccatggaagtgcgtggttggtgcctggagagcaaccagtgtcacgacctcaccacggaaagtaacctgctgtcgtgcatccgggcctgcaagcccgacctcttcgtctagacgccggtgttccccggcatcggctatgagcatccgctgactgagaacccccagaagtacgtcatgggccatt

SEQ ID NO: 6486 - DNA, 361 bp, Bos taurus
  unsure (298)...(299): unsure at all n locations; Clone ID: 28-LIB3057-008-Q1-K1-G11
tgtgtttcttgaaatcatcaccaccatggacagcaaaggttcgtcgcagaaagggtcccgcctgctcctgctgctggtggtgtcaaatctactcttgtgccagggtgtggtctccacccccgtctgtcccaatgggcctggcaactgccaggtatcccttcgagacctgtttgaccgggcagtcatggtgtcccactacatccatgacctctcctcggaaatgttcaacgaatttgataaacggtatgcccagggcaaagggttcattaccatgggccttcaacagctgccatacctnnctcctttctacccctgaagattaagaacaagcccaacagacccaccatgaagtccttatgag

SEQ ID NO: 6487 - DNA, 331 bp, Bos taurus
  Clone ID: 28-LIB3057-008-Q1-K1-G7
ttcccgctcgacccactcgtccggccgggttgagaggagtcgtggccttctctactccccgccatggcgtgtgctcgtcgactgatatcattgtactccgaaaaggcggagtcctctggcaaaaatgtcactttgcctgctgtgttcaaggctcccattcgacccgatattggtaacttcgttcacaccatcttgcgcattaacaacatacagtcctatgctctcattgcattagcatgtcaataaaccagtgctgaatctctgggatccgtcagagctactgctcgatctctcatggttctagctacacatacttactattcccacattt

SEQ ID NO: 6488 - DNA, 430 bp, Bos taurus
  unsure (295),(361),(423): unsure at all n locations; Clone ID: 28-LIB3057-009-Q1-K1-G11
gtttcttgaaatcatcaccaccatggtacagcaaaggttcgtcgcagaaagggtcccgcctgctcctgctgctggtggtgtcaaatctactcttgtgccagggtgtggtctccacccccgtctgtcccaatgggcctggcaactgccaggtatcccttcgagacctgtttgaccgggcagtcatggtgtcccactacatccatgacctctcctcggaaatgttcaacgaatttgataaacggtatgcccagggcaaagggttcattaccatggccctcaacagctgccatacctnctcccttcctacccctgaagataaagaacaagcccaacagacccaccatgaagtccttatgagctngattcttgggttgctgcgctcctggaatgaccctctctatcacctagtcaccgaggtgcggngtatgaa

SEQ ID NO: 6489 - DNA, 437 bp, Bos taurus
  Clone ID: 28-LIB3057-009-Q1-K1-G7
gaagataaagaacaagcccaacagacccaccatgaagtccttatgagcttgattcttgggttgctgcgctcctggaatgaccctctgtatcacctagtcaccgaggtacggggtatgaaaggagccccagatgctatcctatcgagggccatagagattgaggaagaaaacaaacgacttctggaaggcatggagatgatatttggccaggtaattcctggagccaaagagactgagccctaccctgtgtggtcaggactcccgtccctgcaaactaaggatgaagatgcacgttattccgctttttataacctgctccactgcctgcgcagggattcaagcaagattgacacttaccttaagctcctgaattgcagaatcatctacaacaacaactgctaagcccacattcatcctatccatttctgttttaatta

SEQ ID NO: 6490 - DNA, 327 bp, Bos taurus
  Clone ID: 28-LIB3057-011-Q1-K1-G11
ctggagccaaagagactgagccctaccctgtgtggtcaggactcccgtccctgcaaactaaggatgaagatgcacgttattccgctttttataacctgctccactgcctgcgcagggattcaagcaagattgacacttaccttaagctcctgaattgcagaatcatctacaacaacaactgctaagcccacattcatcctatccatttctgagatggttcttaatgatccattccctggcaaacttctctgagctttatagctttgtaatgcatgcttggctctaatgggtttcatcttaaataaaaacagactctgtagcgatgtc

SEQ ID NO: 6491 - DNA, 75 bp, Bos taurus
  Clone ID: 28-LIB3057-011-Q1-K1-G7
gaacgaagggaagaaaagtgaccgagaggccgctgaacatcctcgccccggcgcaacgggagccgcccgaggcag

SEQ ID NO: 6492 - DNA, 338 bp, Bos taurus
  Clone ID: 28-LIB3057-013-Q1-K1-G11
cccggctcgcgccacgcatccgcgtgcatcaatcacatacagtgttcgtttcttcaactcgcatctccctaactggtcagttcaattttcacgggtcgtaaccctaatctttccgaactcaccttccgttcctcacacatctacacccctaaccactcctcagtacactgcctctacaccgcactatctactactctactattccgcttactcctcatccatatggcctaattctcctccactacagatttactgctagcatataatataactagcaactcaactactatcaacactcatatgtaatcttaacccaatcgcatcactcatgtctacac

SEQ ID NO: 6493 - DNA, 252 bp, Bos taurus
  Clone ID: 28-LIB3057-017-Q1-K1-G7
tcgacccacgcgttcgggcggagtacgacttgactactcgcatcgcgcactttttagatcggcatttagtctttccgttgcttgagtttctggccgtaaaagagatatataatgaaaaggagttgttacaagggaaattggatcttcttagtgataccaacattgtagactttgctatggatgtgtacaaaaacctttattctgatgatattcctcatgctttgagagaaaaaagaacaactgttgttgcac

SEQ ID NO: 6494 - DNA, 424 bp, Bos taurus
  Clone ID: 28-LIB3057-020-Q1-K1-G11
gtttagcaccaggcgccccacgaacgttcggtgcgtgacgggcgagggggcggccgcggggtgtgccgcgccccgtgtcccgggacgaagggctctccgcaccggaccccggtcccgactcgcggcgggggcgcgccgcgccgcgccccgggggacgcggtcgacggcccgccggcgtggacggcggtggaccggctatccgaggccaaccgaggctcccgcggcgctgccgtatcgttccgtctgggcgggattctgacttagaggcgttcagtcataatcccacagatggtagcttcgccccattggctcctcagccaagcacatacaccaaatgtctgaacctgctgttcctctcgtactgagcacgattaccatggcaacaacacatcatcagtagggtaaaactaacctgtctcacgac

SEQ ID NO: 6495 - DNA, 432 bp, Bos taurus
  Clone ID: 28-LIB3057-020-Q1-K1-G7
ggcgcgggcagcgccgggaccccacaggggacactgcagtcggagcccgggaggggccgcgccggcaccgtctgaactaggatgtcccgacatgaaggtgtcagctgtgatgcatgtttaaaaggaaattttcgaggtcgcagatacaagtgtttaatttgctacgattacgatctttgtgcatcttgttatgagagtggtgcaacaacaacaaggcatacaactgaccacccaatgcagtgcatattaacaagggtagattttgatttatactatggtggggaagctttctccgtagagcagccacagtcttttacttgtccctattgtggaaaaatgggctatacggagacatctcttcaagaacatgttacttctgaacacgcagaaacatcaacagaagtgatttgtccaatatgtgcagcgttacct

SEQ ID NO: 6496 - DNA, 387 bp, Bos taurus
  unsure (290),(356): unsure at all n locations; Clone ID: 28-LIB3057-021-Q1-K1-G7
cttgaaatcatcaccaccatggacagcattggttcgtcgcagaaagggtcccgcctgctcgtgctgctggtggtgtcaaatctactcttgtgccagggtgtggtctccacccccgtctgtcccaatgggcctggcaactgccaggtatcccttcgagacctgtttgaccgggcagtcatggtgtcccactacatccatgacctctcctcggaaatgttcaacgaatttgataaacggtatgcccagggcaaagggttcattaccatggccctcaacagctgccatacctnctcccttcctacccctgaagataaagaacaagcccaacagacccaccatgaagtccttatgagctngattcttgggttgctgcgctcctggaatgac

SEQ ID NO: 6497 - DNA, 260 bp, Bos taurus
  Clone ID: 28-LIB3057-022-Q1-K1-G7
atcgcagcgagggagctgctctgctacttacgaaaccccgacccagaagcaggtcgtcgacgaatggtttagcaccaggcgccccacgaacgtgcggtgcgtgacgggcgagggggcggccgccttttcggccgcgccccgtgtcccgggacgaagggctcttcgcaccggaccccggtcccgacgcgcggcgggggcgcgccgtgccgcgccccgttggacgcgggcgactgcccgacggctgttactgctgttgaccg

SEQ ID NO: 6498 - DNA, 168 bp, Bos taurus
  Clone ID: 28-LIB3057-023-Q1-K1-G11
ccactcgtcccacacagcctcacgcctgacgtcacccctatataaatggttcgctattcacttgacccagaaagccccacgtaatcattcaatatcaagaggttcaaatcttcgtgttcattttaagaacactcgttaaactttccatgccatatagggtatgcatat

SEQ ID NO: 6499 - DNA, 410 bp, Bos taurus
  Clone ID: 28-LIB3057-024-Q1-K1-G7
gagcttcctggtgaagtgtgtttcttgaaatcatcaccaccatggacagcaaaggttcggcgcataaagggtcccgcctgctcctgctgctggtggtgtcaaatctactcttgtgccagggtgtggtctccacccccgtctgtcccaatgggcctggcaactgccaggtatcccttctagacctgtttgaccgtgcagtcatggtgtcccactacatacattaccttttctctttatatgtacaactaattttattatattttttcctttttcaattatttcatttttctttttttttattgttggtgggtttttttattttctttcttttttttttttttattttgttcttcatttttattttttatttctttttattattttttttttttttttttttattttttttt

SEQ ID NO: 6500 - DNA, 413 bp, Bos taurus
  unsure (328): unsure at all n locations; Clone ID: 28-LIB3057-025-Q1-K1-G11
ccgagaggccagcggacctcggaaccggcagcactcgctctcaaccacccacccaccagtctcggaaccatggcggcagtggcggcagcgtcggctgaattgctcatcatcggctggtacattttccgcgtgctgctgcaggtgttcaggtactccctgcagaagctggcatacacggtgtcgagaaccggacggcacgtgctgggagagcgccgccagcgggcccccaactgaggccccagccccctcccctgggcggccgtgtcaccaggtgctcctgtgccattccaccagcatgggagccagcgccgcgcatgaatggggcgtnccctgtgccctctcgccagaggagcacttgccaaggtcagtgaggggctggtaggcccctggagaagcaacaccgacaatgacga

SEQ ID NO: 6501 - DNA, 368 bp, Bos taurus
  Clone ID: 28-LIB3057-025-Q1-K1-G7
gtcgaggccgaccgctgggcgtggctgctggtgctcagcttcgagtttgggtgcaatgggctcaggatcctcctcccgtccttatcctttctcatgtcccgggtgctgcagaaggacgcagagcaggagtcccaaatgctagccgggatccagggcatgaagcaggagctctccactgtcaacatgatggatgagttcgccagatatgccaggctggagaggaagatcaacaagatgactgataaactcagaactcatgtgaaagcacggacagctcaattggccaagataaaatgggttataagtggagccttctacatattgcatgccgccctgatggtctcgctcatctggaagtattactctga

SEQ ID NO: 6502 - DNA, 290 bp, Bos taurus
  Clone ID: 28-LIB3058-001-Q1-K1-G7
tatccgacgctgacagctcaccccgtgcaggatgctgagaaccctgtgtaccctaataccttgcatgttactaaagcttcaccctattctgatgctccacctgcctactgatagctgtatcagacaagctttgtgcacccagcggctgtcaccgtgcccaccatgtcagctgcatttcctggcgcctcactgcatcttgccatggcccagtctgtggctggtggacctataggttccacaatccccatggcttactattcagttggtcccatctatccacctggttcaac

SEQ ID NO: 6503 - DNA, 343 bp, Bos taurus
  Clone ID: 28-LIB3058-002-Q1-K1-G7
cccacgcgtccgcccacgcgtccggccggaggcgaaccagaactcgtgccacctcctcctgttccttgccatctccgaattcccatctgagattccaagggccgcgccgtgcaatcgaggctctccccgctcaccatatatcggaggctccgcccccgcgcctcgaatccttcgcgagaggtgctgttgtttgccgtgatttgagccgggtggaggtgtctcgcttcttgatcttgagaggtgttcctagttgattgttgggagcgaagaaggcatgataccttctgtgaggatctctcctggctctgcagccttctctggctccagcctacgcttaaaatta

SEQ ID NO: 6504 - DNA, 167 bp, Bos taurus
  Clone ID: 28-LIB3058-003-Q1-K1-G7
ctaacgcgtgggctgacgctcggggatctttctatgtagagtacaagcagctgtactaggacctggctgactgttgccgacgacatttacgggttctagtactggatgataccaatcatgagcatgagtggatggagcaggtatgagagctggtcgaccagcaccag

SEQ ID NO: 6505 - DNA, 444 bp, Bos taurus
  Clone ID: 28-LIB3058-004-Q1-K1-G7
gtcgctagtggctaacagtgtaaactgggccagccctctggtagacacaggatagataactttttggatagcatgtttttttctgttaattagttgtgtactttggcctctgtcatatcttcacaatggtgctcttttcatggggtattagccattcagtcatagcaggtaatttgaagatcttgatttgtttcagaatgatgcacattttgtattttccagcttgtctatcacttgtttggggttgtaccagaaaggtctggagaatgattctttgattatgattctctaacaaatgaaaattggacattaaacaacacaaatgatatgtaaaattggctagttcttgcatctgttgggatttttgaccaatgattccgttctttgcagaaacagatttggtgaattcgaatctcagtttgagtaacatatctgattgttctt

SEQ ID NO: 6506 - DNA, 434 bp, Bos taurus
  Clone ID: 28-LIB3058-005-Q1-K1-G11
aaagtgaaggacttgccacagtggaagcagcggttggactgctctgtgaagtggaccttctgatgactggagagacgggttttcttgctaaaagttaagggacaatgagggcaagagaagaccttgagtcttgaaggcttctctgggtgagagttggacttggtgttcaggcgagtagctcgcatgttggctgccagggtcctggtcacaggctctggggctggggtcctggtcacaggctctggggctggggtcctggtcacaggctctggggcctgagctctcacagtgattaccatgttcttggtggcaggtacctggttcctgtctattgacggctggggctgagtcttgggacccttggttttaagtgtgggtccttgggtcgcagccactgctgcatggttccctgttgccaggccctgaaatccagc

SEQ ID NO: 6507 - DNA, 363 bp, Bos taurus
  Clone ID: 28-LIB3058-006-Q1-K1-G7
ggctcacaagggactcaaggggcacgacgcccagggcacgctttccaaaatcttcaagctgggaggacgagacagccgttccgggtccccgatggcaagacgctgaagcccagctcccctcccagaaccccgtccccagcttcttaatacaaccgcctcgacgctaaccattgtctaaattcccaagtgcagcaggcatccccccaccctgcccacatgcgcgtcctgcaggctcctggccagcggctcaatggagaagacggtgcagctgtcagctcacccttgaagatcagcgaggtccctgagggtccagggtgggcgaccctccacgcccaccttctgccctgggacggccttggacgc

SEQ ID NO: 6508 - DNA, 394 bp, Bos taurus
  Clone ID: 28-LIB3058-008-Q1-K1-G7
aacttttatcacaatccagaactgacaccaacaaaaatattaaaacaaaacaccccttgagaaacaaaatgaacgaaaatttatttacctcttttattacccctgtaattttaggtctccctctcgtaacccttatcgtactattcccaagcctactattcccaacatcaaaccgactagtaagcaatcgctttgtaaccctccaacaatgaatacttcaacttgtatcaaaacaaataatgagtatccacaattctaaaggacaaacatgaacattaatattaatatctctgatcctatttattggatcaacatacctactaggcctattaccccattcattcacaccaacaacacaactatcaataaacctaggcatagccatccccctgtg

SEQ ID NO: 6509 - DNA, 411 bp, Bos taurus
  Clone ID: 28-LIB3058-009-Q1-K1-G7
cttatcaggagtttcctcaattttaggagccatcaacttcattacaacaattatcgacataaagcctctcgcaatgtcacaataccaaacccctctgttcgtatgatccgtaataattaccgccgtactactactactctcgctccctgtattagcatcctgcatcacaatgctattaacagaccggaacctaaatacaaccttcttcgacccggcaggaggaggagaccctattctatatcaacacttattctgattctttggacaccccgaagtctatattttaatcttacttgtgtttggaataatctctcatatcgtgacctactactcatgataattagaaccattcggatatatgggaatagtttgggctataatgtctatcggatttctaggtttcatcgtatg

SEQ ID NO: 6510 - DNA, 434 bp, Bos taurus
  Clone ID: 28-LIB3058-010-Q1-K1-G7
agcacatgcacacaccataccatccacagcacaagagccctgctgtcatcctggtctgggaaacccactcttatcctacaagcctggtcagctacccgcacagggccccattcagcaacacccacagctttgccaactgccttgacgctatcggtcctcctcaactggaacatcgcctatcctttccacttactgccccaaacttgttgctttactagatacatgcaaacgttatgttttagacacaccaaaacagaacatgccaaatgagtgcctttcggaggctggagaggaggggggttccggagtccgacctgccgcctttgggtgtggcctctggccctcgagcgcagcgcctcccggctgaaggccggcgcgcgagcaccgttcacaagcactatttcatgatgtcctgcatgatgtcagtgtgtgtg

SEQ ID NO: 6511 - DNA, 436 bp, Bos taurus
  unsure (416): unsure at all n locations; Clone ID: 28-LIB3058-011-Q1-K1-G7
ctcgggccgcacgtccccctgcccacgggatggcgagtggttcatcaagatgctgagggcggaggtggagaagctggagcactggtgccagcagatggagcgcgaggcggaggactatgagctgccggaggagatcctggagaaaatccgcagtgccgtgggcagcacacaacttctcctgtcccaaaaggttcagcagttcttccgactgtgtcagcaaagcatggaccccactgcgttccctgtgcccaccttccaggacctggcgggtttctgggacctcctgcagctctctatcgaggatgtgaccctcaagttcctggagctacagcaactcaaggccaacagctggaaactcctggagcctaaggaggagaagaaggtccctccgccgataccaaagaagccctcgcggngccggtgtgtgccggtgaag

SEQ ID NO: 6512 - DNA, 407 bp, Bos taurus
  unsure (363): unsure at all n locations; Clone ID: 28-LIB3058-012-Q1-K1-G7
gccgaaaggtgcggggaaagggggtgaggatttttctaaagggtacggacttcttcccaacgtctgccctcccccccctccggctcgccaatctgccacacgtacccagctttttagttcagcttttgaaaataaccacaatcattacaaacctctaccaacgttattctcgttccctgtcccccaagtcaacagtgtgggagtcggggagggagagagagagctaaagggacaatttccaagtcccgcgccccttttccctccggccgccagggtgcctgcaactacacgcatgcgctgcatgatgcgctccccacacgcatgtcgcgcccctcctgcgctccgggaacgcaccgacaaggngcagggggcggggtgattggggaggaatgaacgggcggggtctt

SEQ ID NO: 6513 - DNA, 424 bp, Bos taurus
  Clone ID: 28-LIB3058-013-Q1-K1-G7
cgttggacggacgcgatccgaaggatcggggagcgcgggacgcgagtgcggagctcggttttcggagcgtggctagcagctggcacgatgggcggggagcaggaggaggatcggttcgacggcatgttgctggccatggcgcagcagcacgagggcggcgtgcaggagctggtgaacactttcttcagcttccttcgacgcaaaacagacttctttgttggaggagaagaaggcatggcagaaaagcttatcacacagaccttcaaccaccacaaccagctggcacagaaggcccggcgggagaagcgagctcggcaggagactgagcggcgggagaaggcagagcgggcagccaggttggccaaggaggccaagtcagagacctctgggccccagatcaaagaactgactgatgaggaggctg

SEQ ID NO: 6514 - DNA, 426 bp, Bos taurus
  unsure (279),(382): unsure at all n locations; Clone ID: 28-LIB3058-015-Q1-K1-G7
ggcggcgccagctgacagccgcggagctgaggttgggagccgtggtcaggatggcggaagagcaggagttcgcccgtctctgcaagttgcccacgcagccctcccacccgcactgcgtcagcagcacctaccggagcgcccagcactcccaggcgctgctccgggggctgctggccctgcgggacagcggcatcctcttcgatgtggtcctggtggtggaggggaagcagctcgaggcccaccgcatcctgctggccgcctcctgcgactacttccggngcatgttcgctggggggctgaaggagatggagcaagaggaggtcctgatccatggcgtgtcctacaacgccatgtgccagatcctgcacttcatctacacgtncgagctggagctcagcctgagcaacgttcaggagacactggttg

SEQ ID NO: 6515 - DNA, 440 bp, Bos taurus
  Clone ID: 28-LIB3058-016-Q1-K1-G11
ccggctcgccgcggctttctgtcgcccccgcttcctcccggctctgccggcatgggtccctggtccggctcgcggctcgtcgctctcttgctgctcgtctatggcgctggctccgtgcgcggggacacgcctgccaactgcacctaccccgacctgctgggcacctgggtcttccaggtgggctccagcggctcccagcgcgatgtcaactgctcggtgatgggacccccagaaaaaaaagtggtggtgcacctcaagaagttggatacagcatatgatgactttggcaattccggccatttcaccatcatttacaatcaaagctttgagaatggggtgaatgactacaagtggttcgccttttttaagtataaagaagaaggtggcaaggtaaccagttactgccacgagaccatgactggctgggtccatgacgtgct

SEQ ID NO: 6516 - DNA, 339 bp, Bos taurus
  Clone ID: 28-LIB3058-016-Q1-K1-G7
cattcccattcctttttccctctagtccatttgtccaacccattgagaagccatgatttcacctaaaaatccagggccgtgggacctgtgattctgagatgtcttggcctcctctggccatctcttctgcctccctatgcaggaggcaccacacctaggctctcgcctctcatgccagtgctccatctggccagcactaggagactcctgtgctttttacccttgcacagccccagacacataatggcgatcaggctatagcccatgagcaccatttttcatacaaaaaaatgaaggttcttgagcaattgaaaaaaatgacttattggaacaactgtc

SEQ ID NO: 6517 - DNA, 430 bp, Bos taurus
  unsure (318): unsure at all n locations; Clone ID: 28-LIB3058-017-Q1-K1-G11
acgcttcagtagatctaaccattttctctttacacttagcaggagtttcctcaattttaggagccatcaacttcattacaacaattatcaacataaagccccccgcaatgtcacaataccaaacccctctgttcgtatgatccgtaataattaccgccgtactactactactctcgctccctgtattagcagccggcatcacaatgctattaacagaccggaacctaaatacaaccttcttcgacccggcaggaggaggagaccctattctatatcaacacttattctgattctttggacaccccgaagtctatattntaatcttacctgggtttggaataatctctcatatcgtgacctactactcaggaaaaaaagaaccattcggatatatgggaatagtttgggctataatgtcaatcggatttct

SEQ ID NO: 6518 - DNA, 468 bp, Bos taurus
  unsure (390): unsure at all n locations; Clone ID: 28-LIB3058-017-Q1-K1-G7
cttaaaaactgattttaatctgactatgacactgagcatattcttttaattattcataatttataatgtttaatttaatataatcttaattaaatttagctgttttagtttaagatgtgcgattttgtcctctgcatgtccgaatgaagctataacatgtgccttttcttgcaggttttcctttggaatatggataaatacaccatgatacgaaaactagaagggcatcaccatgatgttgtagcttgtgacttttctcctgatggagcattgctggctacggcatcttatgacactcgagtgtatatctgggatccacacactggagccattctgatggaatttgggcacctgtttccccaaccactccaatatttgctggatgagcanatgacagatgggtacgatctgtatcatttaatcatgatggactgcacgttggcagccttgctgatgataaaatggtga

SEQ ID NO: 6519 - DNA, 457 bp, Bos taurus
  Clone ID: 28-LIB3058-019-Q1-K1-G7
aagccgactggggtactgatcgtggagatcatgtattcggacgcccttaccatgccctgaggaccttagcggtgagcagaggactactagagctgatgatactgtcgtcctgactatcctagcgctttgtgatcgggatacagccgtggtgcatactgtatggtcaaagcacttattctaggcagatcaaacaggttgatgatgaaattcatcaacctctcaggacatttactgtgctaactgttatttaagagtctgtatctggcctgagaccactagcactctgggatttggctgcggattagcatacacttcagagtgtacagcctttgcaggttgccagatgcacaaagataatcaatgctgactcagaggacccgaagtacattatcaatgtgaagcagtttgcgaagtttgtggtggacctcagtgatcaggtagcacctaccgatattga

SEQ ID NO: 6520 - DNA, 431 bp, Bos taurus
  Clone ID: 28-LIB3058-020-Q1-K1-G11
gaagcggatcgggactggttggccaccagcttgaggagttcctaaaccagagctcccgcttctacttctggatcaacggtgaccgcatcgattccctgatggagaatgaccgggagcagagccacgtgatggacgtcatggaggacagcttcacccgggcgtccagcatcatggacgagctcttccaggaccggttcttcctccggaggccccaggacactcagtactactcccccttcagctcgttcccgagggggtcactcttcttcaatcccaagtcccgctttgcccggaacgtgatgcctttccccttgttggaacccttcaacttccacgatgtgtttcagcccttctacgacatgatccaccaggcccagcaggccatggacgcccacctgcagaggactccctaccacttccccacgatggaa

SEQ ID NO: 6521 - DNA, 489 bp, Bos taurus
  unsure (17),(59),(72),(86),(102),(140)...(142),(156)...(158),(175)...(176),(189)...(190),(208)...(209),(230)...(231),(256)...(257),(281),(298)...(299): unsure at all n locations; Clone ID: 28-LIB3058-021-Q1-K1-G7
tccgtgaattcccgggntcgacgccacgtcgtctcgtgtgactttcccatcacgcactngggtctcggggcntttcagtggtcctncacccatatgcctcgngtcgctcgggggcgcgcactcgtcaccattggtcacgnnngccctgcctgtccnnntgaaatcctgggctgtnngtttccagcgtcnncactgtggttagttggtnnggcccattccctcagccaggnnccagtcctgagctcacgggatatgnnagtgtccacccttgtgctctgaanggtggctgtcatgcatnncgtgtgtgcgtctgtccttcccgcccttggctcatcgctcagctcacggacgtggggtcccagatcgtcgcaagagctggaggtgtgatgcacgtggtggggctctgcatggggtagtccacttgtagagacgtcttccagataagttatgggtcggcacataggacatgctcaataaatattttttaat

SEQ ID NO: 6522 - DNA, 461 bp, Bos taurus
  Clone ID: 28-LIB3058-022-Q1-K1-G11
ctcagccgaacgtcaggctgtgatctccactgcacctagcctttgctaccaccaacctctgtggttccttctcactcccagtccagagaaggaatgctctgaagggaaagtccgtcttcaaaaataccaaatcaaaatggaaggaagctaagcattagcctcacgttcaggcttttggattttgccatggatcttaaaacctcaaagagaattcaaaaaaggctaatggaaagcttcaatcgtagggctggctgcttcctgagagaactagaattcctgtctagttctttacttatcaaagcagaggccagccctttggcctttcagcccagttgtatcagagtcctggactgagataaacctgaacgacgaatggagaataagacctgtgccttctgtggatgctccacactgtattcagatagtacacagtataaaatgcacaagtcctgatgtgagat

SEQ ID NO: 6523 - DNA, 450 bp, Bos taurus
  Clone ID: 28-LIB3058-022-Q1-K1-G7
gcttgatggatcacaccattcctgaggtttagaagtcacggcacagtggaaacttcccagaagttctaccgtttacgtctcgggcaactgacctttctattatgcacctgaagctttctaggagccagcgagcatatgctgcatgaggacttcctgtcttacagtaaggctgggaatcttactgttcgatccagcatatcttgttcagacatcacgatagttgtagccttaccctggctttacagttgaaaagacttctacagactagctgctttactggaaacctgatgctttcacaggcttgtgagtagaacgactgcttcaggctcagctctgttagaaccatcaccttgatatcaagcagtgcttacttctgtgctgcatttgcattattactgtcaccataatgcacttagaattacttgtcttcagttctatgtgtgtggtaca

SEQ ID NO: 6524 - DNA, 420 bp, Bos taurus
  unsure (367): unsure at all n locations; Clone ID: 28-LIB3058-023-Q1-K1-G7
gaagtcactgtgccagcacagaacactggtctggggcccgagaagacctccttcttcgaggctttaggcatcaccacgaagatctccaggggcacaattgaaatcctgagtgatgtgcagctgattaagacaggagacaaagtgggcgccagcgaagccacgctgctgaacatgctgaacatctcccccttctccttcgggctggtcatccagcaggtgtttgacaatggcagcatctacaaccctgaagtgcttgacatcacagaggaaactctgcattcccgcttcctggagggcgtccgcaatgttgccagcgtgtgcctgcagattggttacccaaccgtcgcatctgtaccccattctatcnatcaatggggggtttttacaagcgcgtcctggctttgtctgtggagactgatt

SEQ ID NO: 6525 - DNA, 436 bp, Bos taurus
  Clone ID: 28-LIB3058-024-Q1-K1-G7
atgtgccagaaaataaacttcatttggcaaaaacagatgcagaaacactgccagcgttgaaaattaataaagtggatctgcagtgggtgcaggttttggcagaaggctgggcaaccccgctgaacggctttatgagagagagggagtacttgcagtgtcttcatttcgattgtcttctggatgggggtgtcatcaacctgtcagtacctatagtcctgacggctactcaggaagacaaagagaggctggacggctgcacggcatttgcgctgatgtatgagggccgccgggtggctattcttcgcaatccatagttttttgaacacaggaaggatgagcgctgtgccaggcagtggggaacaacatgcatgactcacccctatatcaagatggttatggaacatggagattggctgattggaggagatcttcaagt

SEQ ID NO: 6526 - DNA, 400 bp, Bos taurus
  Clone ID: 28-LIB3058-028-Q1-K1-G11
ccgagtccttgtgactggagcagctggtcaaattgcatattcgctgctatacagtaggggaaatggatctgtctgcggtaaagaccagcctatcattctcgtgctgttggatatcactccaatgatgggtgtcctggatggtgtcctgatggagctgcaagactgtgcccttcccctcctgaaagatgtcatcgcaacagataaagaagagattgcctttaaagacctggatgtggccatttcttggggggctccatgccaaagaaggaatggcatggaaaggaaggaattactcaaaccaaatgtaaaaatcttcaaatgccagggtccagccttggacaaatatcccaagaagtcagttaaggttattgtggtgggaaatccaaccttaccaactgcc

SEQ ID NO: 6527 - DNA, 420 bp, Bos taurus
  Clone ID: 28-LIB3058-029-Q1-K1-G7
agcgaggcggccgaatcttccttcaggatatcaagaaaccagaccgtgatgactgggagaatgggctgactgcaatggaatgtgcgctgtgcttggagagaagtgtgaatcagtcactactggaactgcacaaactggccactgaaaaaaatgatccccatctgtgtgatttcattgagactcattacctgaatgagcaggtggaagccatcaaagaattgggtgaccacataaccaacctgcgcaagatgggggctcctggatctggcatggcagagtacctgtttgacaagcacaccctgggacacagtgagagctaagcctcaggctggtttcccacagccacaggggtgacttctgtggtcatcaaggcagtgcatgcatatttgggttaccttcatcttttctataagttgttac

SEQ ID NO: 6528 - DNA, 414 bp, Bos taurus
  Clone ID: 28-LIB3058-032-Q1-K1-G11
cggacgcgtgggcaggcagcctgagatttggatcatcctcatggtttgggtcggagggctttgttttctcaattggtgttcattctgtctagctaatttaatatattttttcttgttttttttatttattttattattttttattttattttttattttttatttttatttatttttattatttatttttttatttttttttatatattttagtttaatttttaatttttttttttattttatttttttttttttttttttttagtttttttttttttttatcttattttttttttattttttatattatattatttttatatttttttttttatattttatttatttttattattatttttattttattattttattattattttttatttatatttttttttttttttttat

SEQ ID NO: 6529 - DNA, 426 bp, Bos taurus
  Clone ID: 28-LIB3058-032-Q1-K1-G7
cgacccacgcgtccggaaaaacacaagaacactaagaaagcatgctaaggagagcacctaaaaaattgaagcagctaaaaaatgagcagcaatagtcctaggcagaccagtaagtcatgataaatattaatggattaagcaagcttttaacatagatacccttgtcttttatgtttattatattgtattaatttgctttattcttattttttattatatttatttatttattatatattataattattttattattttttttatattttattattatattatttctttatttttatttatatttttattatttttatttttattttttttttatttattatttctttttttaatgtaatattattttatatatttatattttattttatatatattataatatattatatttatttattatttata

SEQ ID NO: 6530 - DNA, 342 bp, Bos taurus
  Clone ID: 28-LIB3058-034-Q1-K1-G7
atcgcgagcggccgtcctttcttttttttctttcttgttactcatattaacattattgcgtctattcccttcccccttatggttaccaaagggggaagggaacagaagggataaattaggagtttgggattaacatgtacacactactatatataaaatagataaccaacaaggacctactgtatagctcacagaactctactcaaaaatctgtagtaagctgtctgagaaaggaatcaaaaaaggagtggacatatccatgtgcataaacattcggcttcacattggaaactaacattgctatagttcacctataaaaaaaaaatcatctatctacaaggg

SEQ ID NO: 6531 - DNA, 425 bp, Bos taurus
  Clone ID: 28-LIB3058-035-Q1-K1-G7
cggacgcgtggggcggccgtggtacctgtttgctgagtttccccagccggctggtgctgcgcgctgggcagaggttatggctcgcttcgccgcccggttgggcgcgcagggccgacgggtggtgttggtcacttccggcggcaccaaggtccctctggaagcccggcctgtgcgcttcttggacaacttcagcagtgggcggcgcggtgctagctcggccgaagccttcttggccgcgggctacggggtcctgttcctgtaccgcgcgcgctctgccttcccctttgcccaccgcttcccgccccagacctggctgtctgttctgcggccctccagccaagcgccttcgggcttgctgagcctggaggcggaggaaaaagcactcccgggcttcgccgcagctctgcggagctaccaggaagctg

SEQ ID NO: 6532 - DNA, 433 bp, Bos taurus
  Clone ID: 28-LIB3058-036-Q1-K1-G7
ttgctaaagaacatgttaggatatcaattccaccagaacacctctctcatagtgataagaagtatgtcatgtctactgatggcaaacccaccctataccttggttttagactttaggtgttcttcaaaagtgaattcctgccacatgcatgtacattgtatttataaagatcatatatgtagcttcccaggaagaaactaagaactatacaacgtagacttggtttggtgagtgagctattgtgcccgatatagacagaaaaacctgaggagaacacggaggggctctcatttttccagtggtttcccgagtcttcagtgcaaatacccagcacatgtttaccttatgaactgaaatgaagattaatttattctagactacaaagctgctttggaatgatgaagtacaggtatactttagagatttttttttt

SEQ ID NO: 6533 - DNA, 431 bp, Bos taurus
  unsure (388): unsure at all n locations; Clone ID: 28-LIB3058-037-Q1-K1-G7
gtacccgggtccccatgaggattagcttgccctgaggaggggtgtggcctcagggacccggggggagggggtgggcatggcacaggcacccctcacctagactgcgggggccccccctccaggctacccccagggctgtacatagctcctccacccccttgaccgcctcatccctctagtgaccgccaagtaggcccgccccttcaggatccgagccaaccatcccatgtcacaaactttggtttggggaacttctttacgtttgtttcatttttttctttttgtacagagaaatattctattcaaagcgtcttttgactgaagtaacttttctggtgctgttcttaacttgttcctttttttaatttatttcccctccctaggcctncccttctggttcccactcactttggcttccctttaccacccgt

SEQ ID NO: 6534 - DNA, 424 bp, Bos taurus
  Clone ID: 28-LIB3058-038-Q1-K1-G11
cggacgcgtgggttttttttttgctacacttgagacgtttattaatgttctgttgtatttacagctttaacatagcaaaccagggtgaattaccacttggcagaaagcacgtcactctacatttataacacattggtctctgctaacacattgtaaaagcaagtagtacagtatgttagggatcatctcaaaagttccacgctaattctttctttgctcctagtacctaatcccctctctactcctagcccctggcctaatcatcaggagacaaaagaaaaagaaaaaagggggcagggattccaatcatatagaaagtgtcgagaattgcaatttattagtcattatgctgcatttgtccttgtcctttctattttacacaatgacaacacctttacaatcccttaggtacacaacacagaat

SEQ ID NO: 6535 - DNA, 413 bp, Bos taurus
  unsure (384): unsure at all n locations; Clone ID: 28-LIB3058-039-Q1-K1-G11
gagaaagtcaactctttaattttattattattatttttttaattttttttttttttttttgctggtgaatgacgagggctgcatcacaggcatgcctgtttgctgagatgttagtgatggagtgagattccagatgctgttggagtctgaagctcttgtaacactctgatctcaactaaacattttgtctttgctttattggcaactcatgaaatgaagcaggttgtcccacatgtatgaaatacagggcagctattgcattttctttatagaatatgaatccttgtagcttgggaggccctctggtttggacaaaaaccctcagttgagacagcaggaaggaaaataagctgaaagctaggatgatattaaaaaacaaaacanataaaaaaacagctctctatccccatatg

SEQ ID NO: 6536 - DNA, 318 bp, Bos taurus
  Clone ID: 28-LIB3058-039-Q1-K1-G7
ctctgacttcaactcaagaaaacagaggtctgttactccccaaaatgttaagtaaaacagtgtacaacatcagtattaaaatgttaaattttacattgtctttaccacttttgatcttctgaacaattttattgagcaaaataagataaaagattacatgtttattttatcttcaggaatgtaaaggtctaattattcaaacagtttttattataaaactaaactctgaaggtgtctacagagttggcttttttctctctttaaatcagtagtctaacaaggattaaaaaagacaaaactctgttcagtgtttctgac

SEQ ID NO: 6537 - DNA, 397 bp, Bos taurus
  Clone ID: 28-LIB3058-043-Q1-K1-G7
gccgacgggacacaggtgtagtgtttactaccgataaacctaagccaaaatgggaaaggagaagacccacattaacatcgttgtcattgggcacgtagattcagggaagtctaccacgactggccatctgatctataaatgtggcgggatcgacatgagaacaattgaaaagttcgagaaggaggctgccgagatgggaaagggctccttcaaatatgcctgggtctatggacaaacttaaagctgaacgtgagcagtggtatcaccattgatatctccctgtggaaatgtgagaccagcaagtactatgttaccatcattgatgccccaggacacatagactgcatcaaacacatgattacaggcacatccgatgctgactgtgctgacctgatcg

SEQ ID NO: 6538 - DNA, 301 bp, Bos taurus
  Clone ID: 28-LIB3058-044-Q1-K1-G7
gggacgtgggcacggcggttgagctgttccggctggacagcctgcacccggacctcaggtacaacgtcagctggaaccgcaacggcagcctcttctgcaccgagtgcaaggacaagagcgtgcgcgtcatctgacccccgccgggggaccctggtgagggagcggaagaaggctcacgagggagcccggaccatgcgggctcatcttcctggccgatggcgatgcgttcaccacatgcttcagccgcatgagcgaagcggcactggcgctctgggaaccagaacacttcggggagcccatg

SEQ ID NO: 6539 - DNA, 217 bp, Bos taurus
  Clone ID: 28-LIB3058-046-Q1-K1-G11
gttctagatcgcgagctggctcgcccttttttttttttttttttttttttttttttttggttttttttttttttttttttttttttttttttttttttttttttttttttttttttttttttttttttttttttttttttttttttttttttttttttttttttttttttttttttttgtttttttttttttttttgttttttgtgttggttttttt

SEQ ID NO: 6540 - DNA, 352 bp, Bos taurus
  Clone ID: 28-LIB3058-046-Q1-K1-G7
gtgtgcctctctgagttagacaacaggtttttgggtatctgtctggcacacagcggcagctgagggaaacagtcaccatcattccctttccttaccccaccaccaaaaagagacacttgtataattagacagtcctgagatgttgctgttccagtcattcgtgtttgacattgtgtagagtaatgcatgcactcgtgtactgtagcctgagaacaaaaccgcagctgcgttagacaaactgcttctcttcagtgacttacagacagcagtagacatagaaccgtgaattacgggcgccttccatctctctcaaaccagaaggatcaaaaagtgttttcccacgcgttctctg

SEQ ID NO: 6541 - DNA, 385 bp, Bos taurus
  Clone ID: 28-LIB3058-047-Q1-K1-G11
gcgacaggacgcggcttctagaaggtctatttaatgcgacggccaatatgatgccagagcgggaaggctctgtggtttgccgtgccgttcgtgcttctgccaggatgccatgcaaatatgcatggagatcttgctccattaggtagcccgaactactcagcatctactctgaatgacaacaccttgctagcagacgctggctctattctggaataacctgctctgggagcagacaccttgttgacacacttgcagaaagagctcgtgaactaagaattgatgaaggaactgacggcgctcatggactagaacatgatcgaggtgaaggcctacaaggaggatcttgagggacaaatagtccgcatgtgccattagacactggccc

SEQ ID NO: 6542 - DNA, 407 bp, Bos taurus
  Clone ID: 28-LIB3058-047-Q1-K1-G7
ctagttctagatcgcgagcggcctcccttttttttttttttttttaacttttggaacggtttaatcaacagaatggaagtatacaaatgaatttcaaaatgaaatcaatgcacccaagagggagatctaacatgagagtatctacagctcacaatgagaatctggtcagatggaagaaggccagagtccaaagcagagagtgaagagggatgcataagagagaggaagggctctgggaccgaaatatcaagacgtgctcatctgatgtcttcaaattccagactccccaaggccacagttggtggtttgggacaaacatggtatttggtcacaaagagcagcagtagagatcggctgtatctggaatggggaaggaggcatgacatctggggagactgtagatagtc

SEQ ID NO: 6543 - DNA, 440 bp, Bos taurus
  Clone ID: 28-LIB3058-048-Q1-K1-G7
cacctcatgtgaagagttgactcattgtaaaaactctgaagctgggagggattgggggcaggaggagaaggggacgacagaagatgagatggctggatggcatcactgactcgatggacatgagtttaagtaaactccgggagttggtgatgggcagggaggcctggcatgctgtgattcatggggtcacaaagagtcggacacaactgaatgactgaactgactgactgactgaagtttacagtataattatttaatttatatacatcatgaaatgattactgcagtaagtttagcaaggaacattttttcatatagatacaaagtaaaaagaaaaaaatatgtttccttgtgatgtgaactctaggaattactctcttaacaactgtcatatataatacacagcagtgttaattatattgatcctgttgtacattaca

SEQ ID NO: 6544 - DNA, 406 bp, Bos taurus
  unsure (2): unsure at all n locations; Clone ID: 28-LIB3058-050-Q1-K1-G7
gncttaactcctggactgccagggaagttcaagccctgtaccttcattttatggctagatggcatcactgactcgatggacgtgagcctcagtgaactccgggagttgatgatggacagggaggcctggcgtgctgcgattcaaggggtcgaaagagtcggacacgactgagcgactgatctgatctgatctgattgctttcattgtaacaaagtagtacatactgattttggaaggatcagataatatagacaaggccctaacccaaaaagatactttggaactagaatttcatctacctttgttgtttattagtttagccacaaagcttgtgggatcttagttccctgaccacgggtagaacctaggccctggcagtgaaagccccaagtcctaaccactgggc

SEQ ID NO: 6545 - DNA, 448 bp, Bos taurus
  unsure (410): unsure at all n locations; Clone ID: 28-LIB3058-051-Q1-K1-G7
acttcatcttgtaattgactctgaattctagattgtgtttgtaacaggattttgcagacatgattcatatttccttcttaaaatatatttctttctgctcgtagttaaacagagaaggagggtctggtgtggcctctctgagattgttaatgatgtaaatttagtccctggtttttttacttccgtctcgtgtcacatgaccgtcgtgcgcatggtgtagaaggatgatgctgagaagtcaaggaactgagcacgcggacgaacagtggccgcgtcaggcgcctttcccccaacccaccctctcccctcagtttggtttttagtctcacccagtctccttgtgaagttggagggaggctgacacaacagcgcgacactaccctgtgccccgcccggccatcacgagcctncgtcctcaagagcggggccggcctgtgcgtggagagtc

SEQ ID NO: 6546 - DNA, 419 bp, Bos taurus
  Clone ID: 28-LIB3058-054-Q1-K1-G11
cgccaggacacaggtgtcgtgaaaaccaccgttaaacctaagccaaaatgggaaaggagaagacccacatcaacatcgttgtcattgggcacgtagattcagggaagtctaccacgactggccatctgatctacaaatgtggcgggatcgacaagagaacaattgaaaagttcgagaaggaggctgccgagatgggaaagggctccttcaaatatgcctgggtcttggacaaacttaaagctgaacgtgagcgtggtatcaccattgatatctccctgtggaaatttgagaccagcaagtactatgttaccatcattgatgccccaggacacagagacttcatcaaaaacatgattacaggcacatcccaggctgactgtgctgtcctgatcgttgctgctggtgttggtgaatttgaa

SEQ ID NO: 6547 - DNA, 393 bp, Bos taurus
  Clone ID: 28-LIB3058-056-Q1-K1-G11
agcatctcttccaccagacccccacgaagtccccacactggcgtcacaaccccccttaggatgaaaatgaggaatagtcaacgtaacgcccaaacgtggctctttaatccccttctaattctgaatatttcgcgtgggtttactataatgtctattaatacatagcctcaatgatgagaggataagaaaaaaaaaagaaaatttcagaaacaaaatctccaaattgctcgacacacacactgcgtcattgagctggttgtgactgagtgacctccattcgtggccacacccaacagtgagagctgtgaccacgggtctcaaggaaagtatgcactgttcttgagtattgaaataaagtaatacacttttaatgaaaaaaaaaaaaaccaaata

SEQ ID NO: 6548 - DNA, 419 bp, Bos taurus
  Clone ID: 28-LIB3058-058-Q1-K1-G11
cggacgcgtggggcagaagcctcagaaaaacaggccattgcttgttgatgttgatctcagcttgtcagcatatgccaatgccaaaaagtattatgatcacaagagatatgctgctaagaaaacgcataagactgttgaagctgctgagaaggcattcaaatcagcagaaaagaaaacaaagcaaaccttaaaagaagtccaaacagttacctcgattcaaaaagcaagaaaagtatattggtttgagaaattcctctggttcattagctcagagaactatctgattattggtggacgagatcagcaacagaatgaaataattgtgaaaagatacttgacaccaggggacatttatgtccatgctgaccttcatggagcaactagctgtgtaattaagattccaacatgagaaccgattc

SEQ ID NO: 6549 - DNA, 447 bp, Bos taurus
  Clone ID: 28-LIB34-001-Q1-E1-G7
aaaaattgagaagctcttcaatgatcttgacgtgctcacaaatttaatcttgttgaattatatcttctttaaagcccagtggaagacgccatttaatcctaaccatacttacgaatcagagttccacgtgagccagaacgagagggtgattgtacccatgatgaccctttacctggaaaccccttacttccgggacgaggagctgggctgcacgctggtggagctcacgtacaccagcaacgacagcgccctcttcatcctccccgatgagggcaaaatgcaggacctggaagccaagctgaccccggagacgctgacgcggtggcgaaactccctgcagcccagacttatacatcgactcaggctgccaaggttttccatctccagccactaccagctgaaagacatcctttcccagctgggtatcaagaaaatcttcaacagcga

SEQ ID NO: 6550 - DNA, 380 bp, Bos taurus
  Clone ID: 28-LIB34-002-Q1-E1-G7
tctatgaccatggaccctgtgacccaccaccacataggcaagatccccaagaccaccatcgccaaggccgtgacccaccacctaggcactccaaagaaagaggtccaggtaaaggacactttcgcttccactggagaccaactggatatattcaccgacttccttcactaaagaaaggtgaagttctccctcttccagaagccaattttcccagcttctcattgccaaaccacaataatcccctacagccagagattcaggccttcccccagtcagcctctgaatcatgtcccgggacattcaacattaagtttctacatatatcaaagttttttgcatatacattaccaaaataaagtctgatttccttgatggggaaa

SEQ ID NO: 6551 - DNA, 383 bp, Bos taurus
  Clone ID: 28-LIB34-004-Q1-E1-G11
gttcctgtgtcgtcttggaggtgactcggcgtgattgaatttgcggcatcttcgcattcactcacaggtcaaaatgcagatcttcgtgaaaaccctgaccggcaagaccagcaccctggaggtggagcccagtgacaccatcgagaacgtgaacgccaagatccaggataaggaaggcattccccctgaccagcagatgctcatctttgccggcaagcagctggaagatggccgcactctttctgattacaacatccagaaagagtcgaccctgcacctggtcctccgtctgaggggtggtatgcagattttcgtgaagaccctgaacggcaagaacatcacccctggaactggagcccagtgacaccatcgaagaacgtgaa

SEQ ID NO: 6552 - DNA, 332 bp, Bos taurus
  Clone ID: 28-LIB34-004-Q1-E1-G7
ggcggatatggatggatagctggggcccgaggagcccctgactacgcatcagccccggtggaaggacagccagccttgggagcaggcgctgggccgcttctgggattacctgcgctgggtgcataccctgtctgaccaggtgcacgaggagctgctcaacacccaggtcattcaggaactgacagcgctgatggaggagaccatgatcgacgtgaaggcctacaacgacgagctggagggacagctatgccccatggcccaggagacacatgcccgcgtgtcaaaggagctgcaggctatcccagcccggctaggctcccacatggaggact

SEQ ID NO: 6553 - DNA, 413 bp, Bos taurus
  Clone ID: 28-LIB34-005-Q1-E1-G11
ggaaaagcaccagttatatatagatgagactgtgaagaataatatcccaactaagcttcgtgtgctccgttcaattctggagaatttgagaagcaaaatacaaaaattagaatcggatgtctcaactcagatggaatactgccgcaccccgtgtactgttacttgcaatattcctgtggtgtctggcaaagaatgtgaggaaatcatcaggaatggaggtgaaacatctgaaatgtacctcattcagcctgaggattctagcaaaccatatagagtatactgtgatatgaaaacggaaaaaggaggatggacagtaattcagaaccgtcaagatggtagtgttgactttggcaagaaatgggattcatataaacaaagatttgggaatattgcaaccaatgcagaagggaaga

SEQ ID NO: 6554 - DNA, 383 bp, Bos taurus
  Clone ID: 28-LIB34-005-Q1-E1-G7
caagagcctgaaagaaatgaatgcttcctgagccacaaagatgatagcccagacctccctaaattgaaaccagaccccaatactttgtgtgatgagtttaaggcagatgaaaagaagttttggggaaaatacctatacgaaattgctagaagacatccctacttttatgcaccagaactcctttactatgctaataaatataatggagtttttcaagaatgctgccaagctgaagataaaggtgcctgcctgctaccaaagattgaaactatgagagaaaaagtactgacttcatctgccagacagagactcaggtgtgccagtattcaaaaatttggagaaagagctttaaaagcatggtcagtagctcgcctgagccaaga

SEQ ID NO: 6555 - DNA, 407 bp, Bos taurus
  Clone ID: 28-LIB34-006-Q1-E1-G7
gccctcgactagagccctggggcatggctgtgtggggcccgggaggtcgccttggcttgcgcgggtgccttggagcccgcaagctattgtgtccccgtttccagagccgcggcccccagggcgtggaagacggggacaggccacagccttcctcgaagactcccaaggtccccaagatctacaccaaaacaggagacaaagggttttctagcaccttcactggagaaagaagatccaaagacgaccaggtgtttgaagccgtgggaactacagatgaattaagttcagccatcgggtttgctatggaattaattgcagaaaagggccacccgtttgtggaagagcttcagaaaatccagtgctccctgcaggacgttggctctgccctggcgactccgcgctcctca

SEQ ID NO: 6556 - DNA, 400 bp, Bos taurus
  Clone ID: 28-LIB34-007-Q1-E1-G11
gcacatgatcaagtaccggtacatcccattcacgcacggcaagaggacatacaagggcaaagaggacgcgggcaagacattcgccagctagacggccacctgccacctcacggcgccttctcttctcacatacagtagttgagtacaagggagttattttctttctaaaaagaagcttcgattacttgtaactgaagtatcaggtttttgaagaaactggcatttaaaccgaatcgcattgatttattttccagccggtcaggtgtgcagacgccggacttgtagtggaacgcaggctgggggacagccgggtggtctggggagggtgggtggccggccggccggctggcggtggggtcaagcccgcagagggatctaggacgcctggctgctgcctctg

SEQ ID NO: 6557 - DNA, 346 bp, Bos taurus
  Clone ID: 28-LIB34-007-Q1-E1-G7
aggctgaatcatccgatacatacacgcaaacggagcttcaatgttttttatctgcttatatatgcacgtatgacgaggcttatattacgggtcttacacttttctagaaacatgaaatattggagtaatccttctgctcacagtaatagccacagcatttataggatacgtcctaccatgaggacaaatatcattctgaggagcaacagtcatcaccaacctcttatcagcaatcccatacatcggcacaaatttagtcgaatgaatctgaggcggattctcagtagacaaagcaaaccttacccgattcttcgctttccattttatccttccatttatcatcata

SEQ ID NO: 6558 - DNA, 368 bp, Bos taurus
  Clone ID: 28-LIB34-008-Q1-E1-G7
aaaataaccacgactataaggttcgggggacgcgaagacctgaagaacgcagtctctggccctgtgttttgggaattggacagaaaatggaagctgaaagtggaaataaagaaaaggcaatggaagaaagcatagaaaagaaaaaagaagaaaaaaagaaacggtctagagttaaacaggtgcttgcagatattgtgaagcaagtggacttctggtttggagatgcaaatctccacaaggatagatttcttcgagagcagatagaaaaatctagagatggatatgttgatatatcacttcttgtgtcattcaacagaatgaaaaaattgaccactgatggaaagttaatagccagagcactaaaaagt

SEQ ID NO: 6559 - DNA, 414 bp, Bos taurus
  Clone ID: 28-LIB34-010-Q1-E1-G11
agatgatttcttgcaacttcgaaaaatttaaaaccatgaaacatctattactgctacttttctgtgcttttatagttcaggcccaatttcctactgactatgacgagggacaagatgacagacctaaggtaggtttgggtgcccgcggtcatcggccctatgacaagaagaaggaagaggcccccagcctgagacctgtgccccctcccatcagcggaggtggctatcgggctcgtcccgccacagcaactgtgggccataagaaagtggagagaaagccccctgacgctgatggctgcctgcacgcggacccggatctgggtgtgttgtgtcctacaggatgtaagttgcaagatactttggtaagacaggagagaccaatccgaaagagtatagaagatttacgttatactg

SEQ ID NO: 6560 - DNA, 344 bp, Bos taurus
  Clone ID: 28-LIB34-010-Q1-E2-G7
gcctcgagcagggagctggtggctcttccatccccagaccagccaagcctgtgagtgacaccccagacagaggaaccagagccatgcggagtctcagcggactgctgttgttacggactgcctgcctggcagtagacgccagctccgtgcccacattgcccgatgacattcaagtgcaggagaacttcgacctgtctatgatctatgggaagtggttcaatgtggccgtgggctccacctgcccatggctgaagaggttcaaggagaagatgaccatgagcacagtggtgttgaaagcggggccgacgagcaaggagatcagcgtcaccagcactcacaggcgg

SEQ ID NO: 6561 - DNA, 356 bp, Bos taurus
  unsure (342): unsure at all n locations; Clone ID: 28-LIB34-011-Q1-E1-G7
attgaggaggtggaggttgcaccccctaaggcccatgaagttcgtattaagatggtggccacaggaatctgtcgctcagatgaccatgtggttaatggatctctggtcacacgtcttcctgtggtcttaggtcatgagggagccggcattgtggagagcattggagaaggggtgactacagtaagaccaggtgataaagtcatcccactctttattccccagtgtggaaagtgcaatgtttgtaaacacccagaagccaacctttgcctgaaatgccagctgaaggagcctcgggggacccttaatgatggtacctgcaggttcacctgcagggggaagccncatccacacttcct

SEQ ID NO: 6562 - DNA, 422 bp, Bos taurus
  Clone ID: 28-LIB34-012-Q1-E1-G11
cagccccgggtcaccatggggattggtcacaacccccgactctgcctggtacccttgatcctgggcctcttgtgtggaggtgtgggcatgacgccattgcctgaggctgggccccaaagcccctgctctctggagggagtagagatcaaaggtggctccttccggcttctcaaggcgggccaggtgctggagtacttgtgtccttctggcttctacccataccccacgcagattcgcacctgcagatccacagggtcctggagcaccctgcagactcaagacagaaagattgtcaagagggctgaatgcaaagcaattcgctgtcccagaccacaggattttgagaatggggagtactggccccgggctgcctactacaatttgagcgatgagatctctttccgctgctatgatggctacac

SEQ ID NO: 6563 - DNA, 395 bp, Bos taurus
  Clone ID: 28-LIB34-013-Q1-E1-G7
ttcgcgcgtcgacccacgcgaccaaatctatgctagagaatatcctgccttcaactgctacacagagactcaggtgtgccagtagtgataagtttggtgatggagctttatgctcagggtcagtatctcgcctgagacattgatttcccaaggcagaatttgtatatgttaagaatactaatgacagatgacatactgagtccatttagtgatgcgtgccattggtgacgtgaactgaaatgcactatatggcattgccatattgtgcatgtaccataatttcaaactaccacagaggaacccaatgttagtcagaacgcattcagtctcacatggctgaagaactctttacaacgtaatgatgaagttgtgtatgacgacgaccatgtgcttat

SEQ ID NO: 6564 - DNA, 278 bp, Bos taurus
  Clone ID: 28-LIB34-015-Q1-E1-G7
ctcaggtctaaagtttcagcttggccatcaagccaagcagacttgcagcagaagccaggagaggccctcctgccccccagccccgggtcaccatggggattggtcacaacccccgactctgcctggtacccttgatcctgggcctcttgtgtggaggtgtgggcatgacgccattgcctgaggctgggccccaaagcccctgctctctggagggagtagagatcaaaggtggctccttccggcttctcaaggcgggccaagtgctggagtacctgtgt

SEQ ID NO: 6565 - DNA, 410 bp, Bos taurus
  Clone ID: 28-LIB34-016-Q1-E1-G11
gaaaattggaaactcagctcttctgttgcagatagtcatcagtggctctgtaagaacccagagggaaagaaccagaaggtttctgtttaatgcatcttgccttatctttttttaatactatgtacaaagattttttacacaaagaaacttaatgctgtattaataaagtcagtgtgtagcttcaattgggggtagtccaaaagtgaagattttgtgaggaataagtgcaaactgttttgggtttttttaattctttgaaattgttgattctttgtgtctgcaatgaaatcgtactccttgacagtcagtagataatatattcctccatctatcaaacttgcattccactatatttatttgtgtttttttgccataagatgagttatctttgtttgaaatctgagacacta

SEQ ID NO: 6566 - DNA, 298 bp, Bos taurus
  Clone ID: 28-LIB34-016-Q1-E1-G7
gtcaatcctatcacatggatcatattgacaacatgagaggggtttcattgtgaattctgttgttgataactggaattttgaaattattcgaaccacggcaagatgcaagagaagaagttgtatctgagaatcacgtttcctttttttttttttaacttactttttattgaaggataattgctcgagaattttgctgtttttctgtcaaacctcaacatgaatcagccataggtgtacgtgtgttccctccttttaaacctccctccctgcctgattagagctgtgtcctctccttaaa

SEQ ID NO: 6567 - DNA, 396 bp, Bos taurus
  Clone ID: 28-LIB34-017-Q1-E1-G11
gcgcgtgcggcgggcgcctcggtgtggacatttgcgttctctgagtgggcggaaggaggctgctggccgctgtgcggacacggaccaggtggaagcaggggccgccggtgcacacccgccagctatgaagcctcctgcagcctgcacaggggatgccctggacgtggtggcgccgtgctcagccgtgaaccacctccggtgggacctgagtgcccagcagatcgccgagcttaccaccgaactcatcgagcagaccaagcgcgtgtatgactgcgtgggcgcccaggagccccaggatgtgtcctacgagaacacgctcaaggcgctggctgacgtggaggtgtcctacacagttcagaggaacatccttgacttcccccagcacgtctctccctc

SEQ ID NO: 6568 - DNA, 409 bp, Bos taurus
  Clone ID: 28-LIB34-017-Q1-E1-G7
gccagagccagaatgaagaccccagccccgggccgcatccacagcatcgtgctggtcctgctctcgctggctgtcctccagaccagcaaggcccaaaaggtccagaatgacattgacatctacagcctcactgtggactctaaggtctcctcccgatttgcccacacagtcatcaccagccgggtggtcaacaaggctgatgccgtgcgggaggccaccttccagatggagctgcccaagaaagcgttcatcaccaacttctccatggtcatcgatggtgtgacctacccaggtaacatcaaggagaaggctgcagcgcaggagcagtacagtgcagctgtggccaggggcgagagtgctggccttgtcagggccaccgggagaaagacagagcagttccaggtgtccg

SEQ ID NO: 6569 - DNA, 377 bp, Bos taurus
  Clone ID: 28-LIB34-019-Q1-E1-G11
ctggagagtggcttgcctggtcatgatggacaagatgggagagaatgtccccatggagagaagggggatccaggttcaccaggacctgcagggcgagcaggaaggcctggatgggttggccctattgggccgaaaggagacaatggctttgttggagaacctggaccaaagggagacactgggccacgtgggcctccaggtatgcctggaccagctggaagagaaggcccctcagggaagcacgggagcatgggacctccaggcacaccaggccccaaaggagagactgggcccaaaggatgagtgggtgccccaggcatacagggcttcccaggcccctcgggtctcaaaggagagaaaggtgcccccggggaaac

SEQ ID NO: 6570 - DNA, 413 bp, Bos taurus
  unsure (182): unsure at all n locations; Clone ID: 28-LIB34-021-Q1-E1-G7
agcggtgttcgtcccctgatcctcgcttttctctgaattcttgtgtcttatttctcattctctcgccgtattgcgctttcagaaaccctgcttgtcaagcgtgtctcgacaagtggtgccgaaatagggacccgaaagtaaatccagcctgagaagctagttcctagccgaggtgaacgtanggaaatctggccagctaggcggaagaggaaagtacttgtttctttcaggccaagagcatcatgcacccttgggtagccatcctgggcctcctactccttctgacagatggtgtaacctcttattctcaagtgactggaagaaccggtgagtctgtcaggctaccctgcttatatactggagaaatcacaactgcatgctggggccgaagggaatgttcttggtggagctgc

SEQ ID NO: 6571 - DNA, 414 bp, Bos taurus
  Clone ID: 28-LIB34-022-Q1-E1-G11
cctgaatgaaggaccttcccaggcactgggtggccactcactgccttgctgctgaccgggcctccacgctgccctgatgtgggcggtgctgagcctcccgctggcctgcctcctggcccaggcatggctggtgcccggttctacccttgcttcccactcgccagaggcccaggcggggttggagactctgttgacccccatggcccaaaacaagaccagccagaccagcgagagacagtgggctccagaggaggaggacgagagggaggaagactccccctggctgttggccgaggggcagcagctctccagtgaggcctccaacttggggttcagcctgctacgtaagatctccctgaagcatgatggcaacgtggtcttctccccactcggcctgccctgggccatggctgc

SEQ ID NO: 6572 - DNA, 392 bp, Bos taurus
  Clone ID: 28-LIB34-024-Q1-E1-G11
ggtcgacacacgcgactaaactgagctcattataatgacttgtatgaagaaatggggaaagtcaggaaaatagatgcttctaaatctgttgatgaagtttttgatgaagttgtgaagatttttgacagggaaggctaactctgaacccgaaagcatccttgaaatcatgcttgaatattgctttgatagctgctgtcacaacccccttttaaggcaattttaatgtttcataattatatctcagttaatggctggaaagtatgtagtaagacaaattaaattttttatcttcaatttaaaaagatttttttttggtcacgggagtagacagtgaatttgagtctaacttcatcttagctatggtgctcacaaaacaaagaacggtattaagt

SEQ ID NO: 6573 - DNA, 351 bp, Bos taurus
  Clone ID: 28-LIB34-024-Q1-E1-G7
tggtgagagtgccctgctggcctggtcctgggtgccggcgtggtgaggaacccagcgctcgaagaggcagccatggggctgctgtctggggacacgctggggcccctggccgtggccctgctcatcttcttgctcttgctggacctgatgcaccggcgctcacgttgggccccacgatacccaccaggccccatgccgctgccggtgctgggcaatctgctgcaggtggacttcgaggacccacgtcccagctttagccagttgcggcgccgtttcgggaacgtgtgcagcctgcagcaggtctggacaccggtagtcgtgctcaacgggcctggcggctgtgcgcgaggc

SEQ ID NO: 6574 - DNA, 419 bp, Bos taurus
  Clone ID: 28-LIB34-026-Q1-E1-G7
agctcacctgctactcgctggccccacagatcaaggtcatcgctccctggaggatgcccgagttctagaaccgcttccagggccgcaacgatctgatggagtatgcgaagcaacatggaatccccgtcccagtcacccctaagaacccgtggagcatggacgagaacctgatgcatatcagctacgaggctggaatcctggagaaccccaagaaccaagcgcctccaggcctctacacaaagacccaggacccgggcaaagcccccagcagcccggacatgctcgagatcgagttcaagaaaggggtccccgtgaaggtgaccaacgtccggggatgggaacacccacagcacagccttggagcttttcctgtacctgaatgaagtccctggcaagcacggcgtgggccgcatcgacat

SEQ ID NO: 6575 - DNA, 412 bp, Bos taurus
  Clone ID: 28-LIB34-027-Q1-E1-G7
attgagtttcaggaagatgtaggaatagtaaaattatataaaaccttttttctagaaattgctagtcatttgacaataggactaaagtaatactagattcattatcagcatttgacgaaccatgtgtacagagtgttttttcaaaggatctatcttgtatttaaacaataccatgagaccaatagacagctatgggcatggagggaagaatacagaaaccagttcaaattttgcagcctattgtttacttctggcacttttacttgttctaaggttaccgttatttaatctttttgttttctcctttatcccaatcttccttttataaaggtttggcttgtattactgcaaagctttggaaaccgattatatcacatatatagatgaactcctgaccgctatcaacgcaaag

SEQ ID NO: 6576 - DNA, 390 bp, Bos taurus
  Clone ID: 28-LIB34-028-Q1-E1-G7
ctggaaacaaatgggggagcaaagagagttacaggaaggcacctacgtgatgttggggggtcccaattttgagactgtggcagagtgtcgcctgctgcggaatctaggggcagatgctgttggcatgagcacagtaccagaagttatagtcgcaagacactgtggacttcgagtctttggcttctcactcatcacaaacagggtcatcatggattatgaaagccagaggaaggccaatcatgaggaagtactagaggctgggaagcaagctgcacagaaattagagcagtttgtctcccttcgtatgggtagcattccagtgtcagggcagaccggttaaccagccccggagtgggttggactctccattagggcatctggggagctgct

SEQ ID NO: 6577 - DNA, 416 bp, Bos taurus
  Clone ID: 28-LIB34-029-Q1-E1-G7
actgactgtattgctaaagaagtcgtagatccaaccaagtgcaacctactggcagaaaagcaatatggcttctgtaaggggccagtcattcagaaagctcttggtggggaggacgtcagagtgacttgcacgttgttccaaacgcagcctgtgattccgcagccccagcccgacggcgccgaggctgaggccccaagcgctgtgccggacgcagctgggcctacgccttctgcagctggcccgcctgtggcctccgtggtggtggggccaagcgtggtagcagttcccctgccgctgcaccgagcacactacgacttgcgccacactttctccggggtggcctcagtggagtcatcctcgggagaagcgttccacgtgggcaaaacacccatagtggggcagcctagcattcctgg

SEQ ID NO: 6578 - DNA, 413 bp, Bos taurus
  Clone ID: 28-LIB34-030-Q1-E1-G11
gtgaaaaccaccgttaaacctaagccaaaatgggaaaggagaagacccacatcaacatcgttgtcattgggcacgtagattcagggaagtctaccacgactggccatctgatctataaatgtggcgggatcgacaagagaacaattgaaaagttcgagaaggaggctgccgagatgggaaagggctccttcaaatatgcctgggtcttggacaaacttaaagctgaacgtgagcgtggtatcaccattgatatctccctgtggaaatttgagaccagcaagtactatgttaccatcattgatgccccaggacacagagacttcatcaaaaacatgattacaggcacatcccaggctgactgtgctgtcctgatcgttgctgctggtgttggtgaatttgaagccggtatctcc

SEQ ID NO: 6579 - DNA, 413 bp, Bos taurus
  Clone ID: 28-LIB34-030-Q1-E1-G7
cacaaaactttggcacaatgaagtgggtgacttttatttctcttctccttctcttcagctctgcttattccaggggtgtgtttcgtcgagatacacacaagagtgagattgctcatcggtttaaagatttgggagaagaacattttaaaggcctggtactgattgccttttctcagtatctccagcagtgtccatttgatgagcatgtaaaattagtgaacgaactaactgagtttgcaaaaacatgtgttgctgatgagtcacatgccggctgtgaaaagtcacttcacactctctttggagatgaattgtgtaaagttgcatcccttcgtgaaacctatggtgacatggctgactgctgtgagaaacatgagcctgaaagaaatgaatgcttcctgagccacaaagatgat

SEQ ID NO: 6580 - DNA, 400 bp, Bos taurus
  Clone ID: 28-LIB34-031-Q1-E1-G7
cgggtctcaccacgcgtccgttttttcaggtgaagaagcactctggctttattgtgatgaaactgggaggaggatctgagccaaactcgcatcaggagtgctggtggggagcgcagcccaggaggctgttcatcctctgggcctgcggaaagtccttggtcgtgctcaattcctccacatctttgtagcagtacagattggggccttggacgaggtacaagcccagaccattggcacatcacgagtgggggcccagatacttctctgtacacagggccccatccactttcgtatggagccaaggaatctctgtccacgtggcttgagctcctaagttcaggtccagcctcgacagcttctggcctgccatgatgtagagctggaaagatccaggacaagt

SEQ ID NO: 6581 - DNA, 406 bp, Bos taurus
  Clone ID: 28-LIB34-032-Q1-E1-G7
caaaactttggcacaatgaagtgggtgacttttaattctcttctccttctcttcagctctgcttattccacgggtgtgtttcgtcgagatacacacaagagtgagattgctcatcggtttaaagatttgggagaagaacattttaaaggcctggtactgattgccttttctcagtatctccagcagtgtccatttgatgagcatgtaaaattagtgaacgaactaactgactttgcaaaagcatgttgctgatgagtcccatgccggctgtgaaaagtcacttcacactctctttggagattaattgtgtaaagttgcatcccttcgtgaaacctatggtgacatggctgaatgctgtgagaaacaagagcctgaaagaaatgaatgcttcctgagccacaaagat

SEQ ID NO: 6582 - DNA, 321 bp, Bos taurus
  Clone ID: 28-LIB34-034-Q1-E1-G11
cactaactcaaatcagaccctccttttgtatagtttggccactcaccctgatgtctaacataaactgcaggacgaaattgaagtgactttccccactatagaccctccgacttatgatgtcctgacacagatggagtatcttgacatggaggtgaatcagactctcatactgttcccaagtactgttagacttaacatgcactgtaagaaagatgtgaatcatccatgtcagtgtcgatacctaatgggacaccagtgacggtgcgaatctccatgcttcacagtgacacaaagctctgaccggatcctgacgatttccat

SEQ ID NO: 6583 - DNA, 429 bp, Bos taurus
  Clone ID: 28-LIB34-035-Q1-E1-G7
aattcatcgatttacatgaattcactacggatccccatcaattatagccatggctttacctgtagatttacttaatgatctttaccatacaaaacagtagtaagatggtatggtgcggaatgctatcagtactaaaataatacctggaataatatatttaatgacattagttaactatgcagccacattcattaatgagcttcactttaactgtgacaagttaactttcagcaaaatgttactagtggacggagctagagaatgatgggagagggtaagagttggtatgaaaaataatttgaaaaactgtttaataagcaatgtcaagaaattacattggtaaaaagggtttaatgcggcatctaaagtacatgtccctgggggccctctgggggtgcgcgtacagcggggacattctaacacaagctc

SEQ ID NO: 6584 - DNA, 376 bp, Bos taurus
  Clone ID: 28-LIB34-036-Q1-E1-G11
ggcttgtgctgcgtggggatattgtaatgccgaccggagactttgatgcgaagcccacttgggcggaccacctggaagacgaaagacaggacgacaggtgtgtcaccagggagctcctcagggggatcgccctggccactggggataccagtccagaacctgagctactgccgggagctccactaccgcctcccagggaggtcatcaatggcaacatcaacacagtgacggagtataagatagatgacgagggcaagatgttcaagattgtccgcaccttcagaattgacacccggaaggcctcgaacgctgttgcaaggacgaacaactggaataagtttgggaactcacaatttggcccaacggggcccaccgt

SEQ ID NO: 6585 - DNA, 242 bp, Bos taurus
  Clone ID: 28-LIB34-036-Q1-E1-G7
actatattaagaaaattggctacaaccccgacacagtagcatttgtgccaatttctggctggaatggtgacaacatgctagaaccaagtgctaatatgccatggttcaagggatggaaagtcacccgtaaggacggcaatgccagtggaaccaccctgcttgaagctctggattgcattctgccaccaactcgcccaactgacaaacccttgcgtttgcctctccaggatgtctataaaatt

SEQ ID NO: 6586 - DNA, 410 bp, Bos taurus
  Clone ID: 28-LIB34-037-Q1-E1-G11
aaagaaagtgaaccaaacagcacagccatgctggaggcactgggctccctggtggctgccctctggaccacgctccgtcctggcattgtcctactgggggcctttgtctttctcctctttgctgatttcctcaaaaggcagcacccaaagaactacccaccagggcccctgcgcctgcccttcataggcaatttcttccacctggacttggggaaagggatcttggttcctcagcaggttgtgaagaaatatgggaacattattaggctagattttggtgtaattcatttcatcgttataactggattgccctatatcaaagaagcccttgtcaaccaggaacaaaactttgtaaaccgccccatgatacctcttcagaaacatatctttaacaataaaggcgtggtcag

SEQ ID NO: 6587 - DNA, 399 bp, Bos taurus
  Clone ID: 28-LIB34-037-Q1-E1-G7
cactaccgctcgctccgaagccgtggtcgaggccgcggccgaaaccagaacccctaccggcgatctcgatctgccttcctgtcctggctctccagcgaggagctgggcctgggagccaacaactatgatagcttcgagatggactggcttgtgcctgccacctgtgagcccatccagagtgtctacttcttctcagaagacaagtactaccgagtgaaccttcgcacacggcgggtggacgctgtgatccctccctacccacgctccatcgcccagtactggctgggctgtccagtccctggccaagcgtagcagcctgagtccaaacagctggtcactgctgctccctgctccagcatcctccttccagctcaataaagatcccttgaccctgagttt

SEQ ID NO: 6588 - DNA, 194 bp, Bos taurus
  Clone ID: 28-LIB34-038-Q1-E1-G11
agcgaacatggcgcttgtcccctgctaggtgctgcgggtggccatcctgctgtcctactgctctatcctgtgcaactacaaggccatcgaaatgccctcgcatcagacctacggagggagctggacattcctgacgttcattgatatggttatcgcagctgtcgtttctggcgtccgtgtgctgactgatcttt

SEQ ID NO: 6589 - DNA, 426 bp, Bos taurus
  Clone ID: 28-LIB34-039-Q1-E1-G7
cgcaaacgcctccaaacagacggcggtgctgggtatcttggaggaggaggtccgagcgtgcaatagctgctgcctgaggacgcaggcacagctgcagacagtcagcaaggagcttacagaggcaaggtcgaagttgttgcagcaggagagtgccctgaaagaactgagcgagcgcgtgacccagaacctggctgaagcggggagggaccgtgagaacattcgcactgagctcttccgggcactggagcaagcccggcttgggaacagctcctgcaaggagtgccccgagtcgtggctgccgttccagggttcctgttacttcttctccacgctgcgggccacgtgggtggaggcacagcagcactgcgagcgctccggcgcgcacctggtgatagtcggaggcctggaagagcaaggtttcctgag

SEQ ID NO: 6590 - DNA, 183 bp, Bos taurus
  Clone ID: 28-LIB34-040-Q1-E1-G7
caagagcaagaagaaaaacaaaagctagcagaaaatgctgaaatgaaatctctagaagaaaagattggctgcttgctgaaattttcaggagacttagatgatcagacgtgtagagaagatttgcacacccttttctcaaatcatggggaaataaaatggatacactttgtcagaggcgccaaa

SEQ ID NO: 6591 - DNA, 383 bp, Bos taurus
  Clone ID: 28-LIB34-043-Q1-E1-G7
agtgagagtgccctgctggcctggtcctgggtgccggcgtggtgaggaacccagcgctcgaagaggcagccatggggctgctgtctggggacacgctggggcccctggccgtggccctgctcatcttcttgctcttgctggacctgatgcaccggcgctcacgttgggccccacgatacccaccaggccccatgccgctgccggtgctgggcaatctgctgcaggtggacttcgatgacccacgtcccagctttaaccagttgcggcgccgtttcgggaacgtgttcagcctgcagcaggtctggacaccggtagtcgtgctcaacgggctggcggctgtgcgcgaggcgctggtgttccgcagtcaggacactgccgaccgt

SEQ ID NO: 6592 - DNA, 319 bp, Bos taurus
  Clone ID: 28-LIB34-044-Q1-E1-G7
ggccgacgcacgcgacaacggacgcatgggttcgggctctctcatcagcataaagcaggtgtctgtctggtgtagcaatgactacctaggaatgactcgccacccacgggtgtgtggagccgtcatatacactttgaaacagcatggtactggagcagggggtactagaaatatttctggaactagtaaattccacgtggacctggagcaggagctggctgacctccatggaaaagatgctgcactcttgttcgcctcgtgctttgtggccaatgactcgaccctcttcactcaggtcaacatgatgccacgctgtgag

SEQ ID NO: 6593 - DNA, 365 bp, Bos taurus
  Clone ID: 28-LIB34-046-Q1-E1-G11
agaaagagcagagcccagaggagacagaggctgaagctagttaacatcagtgtcttggctcccaactggctcccaattcctggtgaaactcctaaagggagactgttaaatcatgaaattaatcaccatccttttcctttgttccaggctgctaccaagtttaacccaagagtcttctcaagaaatcgactgcaacaaccaggatgtatttaaagctgtggacgctgctctgacacaatacaacagtgaggacaagagtggcaaccagtttgtattgtaccgcataaccgaggttgccacgatggataatcctgacacattttagtccttgaggtagcaagtcaatgagggcgaatgtccttttc

SEQ ID NO: 6594 - DNA, 330 bp, Bos taurus
  Clone ID: 28-LIB34-046-Q1-E1-G7
aaccgagattccagatggacacaggcacatgaatggatatggatcgcatactttcaagctggttaatgcaaatggagaggcagtttattgcaaattccattataagactgatcagggcatcaaaaacctttctgttgaagatgcagcaagacttgcccacgaagatcctgactatggcctccgcgatcttttcaatgccattgccacacgcaactacgcctcctggactttagacatccaggtcatgacatttagtgaggcagaaatttttccatgtaagccatttgatcgtaccaaggtttggcctcacggggactatccccgtaatcc

SEQ ID NO: 6595 - DNA, 421 bp, Bos taurus
  Clone ID: 28-LIB34-048-Q1-E1-G11
ccagaactcctttactatgctaataaatataatggagtttttcaagaatgctgccaagctgaagataaaggtgcctgcctgctaccaaagattgaaactatgagagaaaaagtactgacttcatctgccagacagagactcaggtgtgccagtattcaaaaatttggagaaagagctttaaaagcatggtcagtagctcgcctgagccagaaatttcccaaggctgagtttgtagaagttaccaagctagtgacagatctcacaaaagtccacaaggaatgctgccatggtgacctacttgaatgcgcagatgacagggcagatcttgccaagtacatatgtgataatcaagatacaatctccagtagactgaaggaatgctgtgataagcctttgttgggaaaatcccactgcattgctg

SEQ ID NO: 6596 - DNA, 368 bp, Bos taurus
  Clone ID: 28-LIB34-048-Q1-E1-G7
cagtttattaacatcaactatatccctgtgcagttccgggtgctttttgcaaacttggtggctctgttctggtacgcctacctggcctctctggggaattgaaaatgacctgaaaagggtgtcagacatactgatgactggggttggttgaaagaacagaattaagccagccaggctctagatcatgagattcaggatgactcgaacatgatggatggagaaaaagaaatctcttaatgtcagaatcgtgttttaaaaaggcaatcgctgtcctcaggtggtgctgccctagaaacttaaatatagcagagatgatttcacctgtcaccttggattgaattatgatcacaataaactataatgtagca

SEQ ID NO: 6597 - DNA, 422 bp, Bos taurus
  Clone ID: 28-LIB34-049-Q1-E1-G11
agtccgggcggccgacttctccgatcccgccttcctcgcccacacgaaccggcacgtggcccggctcaccaagggcctcatacgagacgcactgcaggacgtggaccccgcgacgcagatgctgctcctcaactgcctctacttcaaagggtcctgggtgaacaaattcccggtggaaatgacgcacaaccacaacttccggctgaacgagcgggaggtggtcaaggtccccatgatgcagaccaagggcgcgttcctggcggccagcgaccaggagctggactgcgacgtgctgcggctggagtacgtggggggcatcagcatgctggtggtggtcccacacaagctgtccgggatgaagaccctggagagccagctgacaccccaagcggtggagcggtggcagaggaacatgacaaaca

SEQ ID NO: 6598 - DNA, 437 bp, Bos taurus
  Clone ID: 28-LIB34-049-Q1-E1-G7
aacagaaacccctaggttatagtttacgtttctgttggatggttggcaactaagaatggaggaagaacaacaaagacatgttctccactttcttatttctcaaaacaatgttatcttcgtctttttaatcttaggtttttaacagattaaacctttaaagcaagaagtgaattctgtcttttcagacccagaaatacacatgaatactttgctatgattacattttagatattcatttatacttttctatatctaagactcatatcttgatttttactatcatatatgaatgaagcctttatatcttgtttttttgccaatcttgaaagatagatgggaaaagataaaagaatgttgtctaactcttgattgcttagaaagtatttccatagtcaatgatggttcaataggcaaaacaggtcctataaacctgaatt

SEQ ID NO: 6599 - DNA, 389 bp, Bos taurus
  Clone ID: 28-LIB34-050-Q1-E1-G7
gaacgaactaactgagtttgcaaaaacatgtgttgctgatgagtcccatgccggctgtgaaaagtcacttcacactctctttggagatgaattgtgtaaagttgcatcccttcgtgaaacctatggtgacatggctgactgctgtgagaaacaagagcctgaaagaaatgaatgcttcctgagccacaaagatgatagcccagacctccctaaattgaaaccagaccccaatactttgtgtgatgagtttaaggcagatgaaaagaagttttggggaaaatacctatacgaaattgctagaagacatccctacttttatgcaccagaactcctttactatgccaataaatataatggagtttttcaagaatgctgccaagctgaagata

SEQ ID NO: 6600 - DNA, 208 bp, Bos taurus
  Clone ID: 28-LIB34-051-Q1-E1-G7
actagttctagatcgcgagcggccgccctttttttttttttttttttttttttttttttttttttttttttttttttttgtttttttgttttgagttttaaagaaaaaggggttaagtgagataacgagaagaaaaaacagagaaaccccaagggccacgtggaagcaacaaaaattactgaagaacgaacacggcgggaaaaggcac

SEQ ID NO: 6601 - DNA, 240 bp, Bos taurus
  Clone ID: 28-LIB34-052-Q1-E1-G11
cggcttgatgcctttaaacagcaccctgaggaaagagcctgtgttcaatgacggactcccagcttgcattttatgtggcattgtgaccattaagccaaatgtgaaggagtttacagaggattcagctatttttgaggatgggacggtgtttaaggccattgactatgtcatctttgcaacaggctatagttatgcctaccccttccttgatgactccatcattaagagcagagacaatga

SEQ ID NO: 6602 - DNA, 235 bp, Bos taurus
  Clone ID: 28-LIB34-052-Q1-E1-G7
tacctgagcccatcatagtttaatagaaggggaccgaaagcatatattacaagccctatttatcaccatcacattaggagtctacttcacactactacaagcctcagaatactatgaagcaccttttactatctccgacggaatttacggctcaactttttttgtagccacaggcttccacggcctccacgtcatcattgggtccaccttcttaattgtctgcttcttccgccaa

SEQ ID NO: 6603 - DNA, 238 bp, Bos taurus
  Clone ID: 28-LIB34-054-Q1-E1-G7
ggcagaaccagcactgcagattatgcttcattcaaggtgacaggtgaaaatgacaaataccgcctgacatatgcttacttcattggtggagatgctggagatgcatttgatggctacgattttggcgatgattctagtgacaagtttttcacatcccataatggcatgcagttcagtacttgggacagtgacaatgataagtatgatggcaactgtgctgaacaggatggatctggtt

SEQ ID NO: 6604 - DNA, 339 bp, Bos taurus
  Clone ID: 28-LIB34-056-Q1-E1-G11
ggagaacagagaagaagtaaaattccaaaggaagtcctctcaccatgtggctgtacctggcagtcctcttgggcctgtactacctcctgcgctggtaccgagagaggcaggtggtgagccacctccaggacaagtttgtcttcatcacgggctgtgactcgggctttgggaaccagctggccaggcagctggacctgcgaggcttgagggtcctggctgggtgtctgacggagcagggggccgagcagctgaggaaccagacatcagacaggctgcagacagtgattctggacgtcaccaggacagagagcatcgctgctgccactgagtgggtgaagg

SEQ ID NO: 6605 - DNA, 227 bp, Bos taurus
  Clone ID: 28-LIB34-056-Q1-E1-G7
gaatattgaagaaggcatcctgaattagtcgtcacattgcgattgacacttgctatggaatactaatccagtcgggaggaatgtcgtatctatgctgcttgtgatccgtgctattctggagtgtttgagaagcttaaggttcttgtggatgcccgtcatcagtgcaccgatcgaaatacttgagcaccctcgtctaatgtggcgtgtacggatcctgtggtgtccgc

SEQ ID NO: 6606 - DNA, 219 bp, Bos taurus
  Clone ID: 28-LIB34-057-Q1-E1-G7
cttttatttctcttctccttctcttcagctctgcttattccaggggtgtgtttcgtcgagatacacacaagagtgagattgctcatcggtttaaagatttgggagaagaacattttaaaggcctggtactgattgccttttctcagtatctccagcagtgtccatttgatgagcatgtaaaattagtgaacgaactaactgagtttgcaaaaacatgtg

SEQ ID NO: 6607 - DNA, 220 bp, Bos taurus
  Clone ID: 28-LIB34-058-Q1-E1-G11
ggatccatcgctcaaaccccgctctcgcaggcagacatgaggacagagagaacttccttcctcctggctctggggctcctggtgtctgggttctgctccagggtccactgcctcccagagaatgtgaccccagaagaacagcacaaagggacgtctgtggatggccactcattagcctccagcaacactgacttcgccttcagcctctacaagcagttgg

SEQ ID NO: 6608 - DNA, 204 bp, Bos taurus
  Clone ID: 28-LIB34-059-Q1-E1-G7
atcactcgctactcttgtgagatgccatattacagcatggaatatgaagggagcgaggtgtatcactgcagtggcaatgggagctgggtgaacaaggtgctgggcatagagccgccaaaatgcattgcagtctgtggcacccccagcgagccttttagatcaacacaaagaatatttggaggctccgattgcgaagattgaaac

SEQ ID NO: 6609 - DNA, 236 bp, Bos taurus
  Clone ID: 28-LIB34-060-Q1-E1-G7
cccaaactctgtcaactgtgtgcggggaaagggacagacaagtgtgcctgctccaaccacgaaccatacttcggctactcaggggcctttaaatgtctgatggagggcgctggggatgtggcctttgtcaagcactcaacggtattcgacaacctgcctaacccagaagacaggaaaaactatgagctgctctgcggggacaacacccggaagtctgtagatgattaccaagaatg

SEQ ID NO: 6610 - DNA, 387 bp, Bos taurus
  Clone ID: 28-LIB34-061-Q1-E1-G7
agtcaaagtgaagaaattcaatgaagcgcgggtaaacggcgggagtaactatgactctcttaaggtagccaaatgcctcgtcatctaattagtgacgcgcatgaatggatgaacgagattcccactgtccctacctactatccagcgaaaccacagccaagggaacgggcttggcggaatcagcggggaaagaagaccctgttgagcttgactctagtctggcacggtgaagagacatgagaggtgtagaataagtgggaggcccccggcgcccccccgtttcccgcgagggggcagggcggggtccgccggccttgcgggccgccggtgaaataccactactctgatcgttttttcactgacccggtgaagccgtggggccaaccc

SEQ ID NO: 6611 - DNA, 186 bp, Bos taurus
  Clone ID: 28-LIB34-062-Q1-E1-G7
ctgtggaagaccttcactgattgcttcaactgcctgcccatcgctgccatcgtggacgagaagatcttctgttgccatggagggctgtccccagacctacagtccatggagcagatccggcgtatcatgcggcccacagatgtgcctgaccagggcctgctctgtgacctgctgtggtctgaccct

SEQ ID NO: 6612 - DNA, 265 bp, Bos taurus
  Clone ID: 28-LIB34-063-Q1-E1-G7
ccgggtgcccccacgcgtccggaatcgagcagggagctggtggctcttccatccccagaccagccaagcctgtgagtgacaccccagacagaggaaccagagccatgcggagtctcaacggactgctgttgttactgactgcctgcctggcggtaaacgccagctccgtgcccacattgcccgatgacattcaagtgcaggagaacttccacctgtccaagatctatgggaagtggttcaatgtggccgtgggctccaactgccc

SEQ ID NO: 6613 - DNA, 455 bp, Bos taurus
  unsure (284): unsure at all n locations; Clone ID: 28-LIB34-064-Q1-E1-G7
cccacgcgtccgaagatacaatctccagtaaactgaaggaatgctgtgataagcctttgttggaaaaatcccactgcattgctgaggtagaaaaagatgccatacctgaaaacctgcccccattaactgctgactttgctgaagataaggatgtttgcaaaaactatcaggaagcaaaagatgccttcctgggctcgtttttgtatgaatattcaagaaggcatcctgaatatgctgtctcagtgctattgagacttgccaaggaatatgaagccacactggangaatgctgtgccaaagatgatccacatgcatgctattccacagtgtttgacaaacttaagcatcttgtggatgagcctcagaatttaatcaaacaaaactgtgaccaattcgaaaaacttggagagtatggattccaaaatgcgctcatagttcgttacaccaggaaagta

SEQ ID NO: 6614 - DNA, 196 bp, Bos taurus
  Clone ID: 28-LIB34-065-Q1-E1-G11
ctcgagcagggagctggtggctcttccatccccagaccagccaagcctgtgagtgacaccccagacagaggaaccagagccatgcggagtctcaacggactgctgttgttactgactgcctgcctggcggtaaacgccagctccgtgcccacattgcccgatgacattcaagtgcaggagaacttcgacctgtcta

SEQ ID NO: 6615 - DNA, 213 bp, Bos taurus
  Clone ID: 28-LIB34-065-Q1-E1-G7
tgccatcctaatgctatcaagctgctgatgtataacaccgaggatcctccagggtcagaagcacttcgcatccggaacgctttgtctgagaagcccatgataagcaccatgtatgccaacaatggctcggtgcttcagggcagctctgtggcttctgtgtatagggggaagcttctcataggcactgtatttcacaaagccctgtactgtgag

SEQ ID NO: 6616 - DNA, 255 bp, Bos taurus
  Clone ID: 28-LIB34-066-Q1-E1-G7
gcctagtgtgagtttgcacctgcggtggggtgggtccggagcccacgcgcgaaaacctagcgagataaagttgcgtctcgattgctgaggcgacagcttatcatattcctcggcgatggcagcttccgggagtggtatggaccaaaaaacgtgggagctacccaacaacatgcaggatgcccagagtgtcgatgaaatctacaaatacgacaggaaacagcagcaagaaatcctgacggcgaagccctggactaa

SEQ ID NO: 6617 - DNA, 203 bp, Bos taurus
  Clone ID: 28-LIB34-067-Q1-E1-G11
gttcatttcagttcagtcactcagtcgtgtccaactctttgcaaccccatggactgcagcacaccaggcctccctgtccatcaccaactcccggagtttacccaaactcatgtctcttgattcagtgatgccatccaaccatctcatcctctgttgtccccttctcctgccctcaatctttcccagcatcagggtcttttcaa

SEQ ID NO: 6618 - DNA, 234 bp, Bos taurus
  Clone ID: 28-LIB34-067-Q1-E1-G7
gccgccatcaaccgccagatcaacctggagctctacgcctcctatgtctacctgtccatgtcgtactattttgaccgtgatgatgtggctttgaagaactttgccaaatactttcttcaccaatctcatgaggagagggaacatgctgagagactgatgaagctgcagaaccagcgaggcggccgaatcttccttcaggatatcaagaaaccagaccgtgatgactgggagaaa

SEQ ID NO: 6619 - DNA, 237 bp, Bos taurus
  unsure (217)...(218): unsure at all n locations; Clone ID: 28-LIB34-069-Q1-E1-G11
cttgcacatttctggactacaaaggcatttcttcctgagatgatgaagaataatcatggccatattgtcactgtggcttcagcagctgggcatactggggtccccttcttactggcttactgttcaagcaagtttgctgctgttggatttcataaagctctgactgaagaattgagtgccttaaaaagaaaccggagtcaaaacaacatgtctctgnnccctaatttccataaacac

SEQ ID NO: 6620 - DNA, 213 bp, Bos taurus
  Clone ID: 28-LIB34-069-Q1-E1-G7
gaaaatcagtcaccggagagattgtccttattaccggagctggacacggtattggcaggcagactgcctacgaatttgccaaacttaagtgcaagctggtcctgtgggatataaataagcatggacttgaggaaacagccaccgaatgcaagagactgggtgcaaaggctcatacctttgtggtagactgtagtaaccgagaaagatatttat

SEQ ID NO: 6621 - DNA, 379 bp, Bos taurus
  Clone ID: 28-LIB34-071-Q1-E1-G11
atgggattccagaagtggagaaggaggcaagatgaagactctactgctgttgatggggctgctgctcagctgggagagtggctgggcaatctcggacaaagagctccaggaaatgtccaccgaggggagtaagtacgtgaataaagaaattaaaaatgccctcaaggaggtgaaacagataaagacccaaatagaacaaaccaatgaagagcgcaaattactgctcagctccctagaggaagccaagaagaagaaagaggacgccctgaatgacaccagggattctgaaaacaagctgaaggcgtcccaaggggtgtgcaatgagaccatgacagccctttgggaggaatgtaagccctgcctcaagcagacctgcatg

SEQ ID NO: 6622 - DNA, 413 bp, Bos taurus
  Clone ID: 28-LIB34-071-Q1-E1-G7
attgataagcacacagtctaccatcccttatgtattaagaatacagttggaggactggaatggcagaaccagcactgcagattatgcttcattcaaggtgacaggtgaaaatgacaaataccgcctgacatatgcttacttcattggtggagatgctggagatgcatttgatggctacgattttggcgatgattctagtgacaagtttttcacatcccataatggcatgcagttcagtacttgggacagtgacaatgataagtatgatggcaactgtgctgaacaggatggatctggttggtggatgaacaaatgtcacgctggccacctcaatggagtttattatcaaggtggcacttactcaaaaacatctactcctaatggttatgataatggcattattttggccacat

SEQ ID NO: 6623 - DNA, 407 bp, Bos taurus
  unsure (357): unsure at all n locations; Clone ID: 28-LIB34-072-Q1-E1-G7
actcggcagtgagcccatctcctgggggatggggtgggctgtgtttccttgacagacgtttgagaggttccagcccccagcacagcggagaccatggcccctcctcagggctctcgggccccgctggaattcggaggacccttgggcgccgcggcgctgatgctgctgctcccggtcactatgttccacctgctactggtggcccgctcgggcccggcgcgcctcctgggcccacccccctacctgccgggactggaggagctgtggagcccgtgggcgctgttgctctgtctcacctggctcggcctgcaggcggcgctctacctcttgccggcgcgtaaggtggctgaggggcangaattgaaggacaagagtcgactgcgcttacccattaacggcttccaggc

SEQ ID NO: 6624 - DNA, 413 bp, Bos taurus
  Clone ID: 28-LIB34-074-Q1-E1-G7
aaatggaacaatactatcacctggtggatacagagctgaactgcacagtgctgcaaatggactacagcaagaatgctctggcactctttgtccttcccaaggagggtcagatggagtgggtggaaggggccatgtcatctaaaacactgaagaagtggaaccgcttactgcggaaggggtgggttgatttatttgttccaaagttttccatttctgccacatatgaccttggagacatccttctgaagatgggcatccaggatgcttttgctgacaatgctgatttttctggactcacaaaggacaatggtcttaaagtttccaatgttgcccacaaggctatgttttacattggtgaaaagggaactgaagccgttcctgaagtcagattcctgaatcagcctgagacaact

SEQ ID NO: 6625 - DNA, 232 bp, Bos taurus
  Clone ID: 28-LIB34-075-Q1-E1-G7
gtcactcgtgttaaacaaccataggcatctcagcctaccctgagagtatgacgaatcaagagagttgaaaactcagagcttactcatctgttttccttttctgtgggtgttaaaccaagactctcactagagatcgtcaatttctttaaatattttgcttcttttgtttgtgctacacctcaataggacatgaaaagactctaacgatgcagagtagtcgtagatactatta

SEQ ID NO: 6626 - DNA, 400 bp, Bos taurus
  Clone ID: 28-LIB34-076-Q1-E1-G11
agaaggactttgctgatcgatttatgtatgaatattccattaattatggacaagctcctctgacacttttagtcggttacaccaagagttatctctctatggtagggtcctgctgtacttcaccaaacccaacagtatgctttttgaaagagagacttcagcttaaacatttttcacttctcaccattatgacaaacagaatctgctcacaatacgctgcttatgggaaggagaagtcaaggctcagccatctcatcaaatttgcccagaaagtgcctactgcacatctggaagatgttctgccacttgctgaagatattacaacaatcctctccaagtgctgtgactctgtctctgaggactgcatcaaggagcttcctgaatatgcagtaaaactctg

SEQ ID NO: 6627 - DNA, 401 bp, Bos taurus
  Clone ID: 28-LIB34-076-Q1-E1-G7
gggatcagggcccttgaatggaccctgccccctcccctcccaccacccagggctgtctgtgctaattctccaggcctcagcctgtttcttagcctgggatctgcgcaggattgagggacgcacaagtcaaccttgagacctttggcccagccggccctaccatgacaaaggagtatcaagatcttcagcatctggacaacgaggagaatgaccatcagcacagaaaaaggccactgcctcctcattcattcagtcggcgtctctgcaccggacccagcctcctcctggtctccatgggccttaacctcctgctgccagtcgttctatgtgtgatcgggtcccaagaactccaagctgcaggaggagctcagcgccctgagagaaaccttcagcaacctcac

SEQ ID NO: 6628 - DNA, 389 bp, Bos taurus
  unsure (22): unsure at all n locations; Clone ID: 28-LIB34-077-Q1-E1-G7
cctatagagagtcgtattaggnaggaaactgcgctgaaggtgtggggatgaactaccgagggaacgtgagcgtcacccggtcaggcatcgagtgccagctgtggagaagtcgctacccacataagccagaaatcaactctaccacccacccgggggctgacctgcgggagaatttttgccgcaacccggatggcagcattactgggccctggtgctacaccacatccccgactctgcggagagaagagtgcagcgtccccgtgtgcggccaggaccgagtcacagtggaggtgatcccccggtcaggaggctccactaccagtcagtcccctctaatggaaacatgcgtcccggaacgcgggcgggagtaccgagggcggctggcggtg

SEQ ID NO: 6629 - DNA, 437 bp, Bos taurus
  Clone ID: 28-LIB34-078-Q1-E1-G11
cctccccgctcacaacttcaacggcagggagcgggtctacttcttcaagggcaaccactactgggaatatgtgttccagcagcagcccagtcaagaggattgtgaaggcagctccctgccggccgcatttaaacactttgccctgatgcagcgggacagctgggtggacatcttccgacttctcttctggggcggttcctatggtggtgctggacagccccagctcatcagccgcaactggtttggtctgccgggacgactggatgcggccatggccggccacatctatgtctcaggctcagctcccagcttcccccgggccaagatgactaagtctgcacgccgccatcgcaaacgctaccgctcgctccgaagccgtggtcgaggccgcggccgaaaccagaacccctaccggcgattccgatctgccttcctgt

SEQ ID NO: 6630 - DNA, 448 bp, Bos taurus
  Clone ID: 28-LIB34-078-Q1-E1-G7
gtcgtattaacagtgtctttccagagcaacaaaacagacaccttaaaaatggctgcacaaagaactttatccttaaatctaaattttcatgggatccaagaagaagagcaggatagagggtgaggaacctcttcagacttgacctctcagaatttaaaggcaaagggaaacaatagggggcagttttcagaggtgggtggtcaccactgggagcttgagtaagaattccttcatgttttttttttttttttttttaagactgtgccttgtggcatgcaggattttagtttcctgaccagggatcaaacccacgccccttgccatggaaggtggattcttaaccactggactaccagtgaagtgggattcactcagtcgtgttcaacgctttgcaaccccacggactatacagtccatggtattctccaagccagagtactggagtggg

SEQ ID NO: 6631 - DNA, 402 bp, Bos taurus
  Clone ID: 28-LIB34-079-Q1-E1-G11
aggttactccgcggtcctgaaatctaggaaaatcgttttcgctccgcttctcctggctgtcaagggcttcccccgtgcagggtgggagtgcagagagtgaaccgtcgcgagatgagcacgatgttcgcagacacgctgctcatcgtttttatctccgtgtgcaccgctctgcttgccgagggtataacttgggtcctggtttacaggacagacaagtacaagagactgaaggcagaagtggaaaaacagagtaaaaaattggaaaagaagaaggaaacaataacagagtcagctggtcgacaacaaaaaaagaaaattgagcggcaagaagagaaactgaagaataacaacagagatctgtcaatggttcgaatgaaatccatgtttgcaattggcttttgt

SEQ ID NO: 6632 - DNA, 423 bp, Bos taurus
  unsure (280): unsure at all n locations; Clone ID: 28-LIB34-080-Q1-E1-G7
aggaaaaagggtcacgtgcttttccgccccacagtgagccagcagcaaacctgccccacgtgctctacaaccttgctgaatggggacttcaaggtgacttacgatgtcaatcgggatgatgcctgtgacctcctggtcgccaataactactttgcccacttctttgctccccaaaacctaaaaaaactgaacaagaatgtggtttttgtgattgacatcagctcctccatggaaggccagaaactgaagcagaccaaggaggcgctccataaaatcctgngggacatgcggccaggggactactttgacctggtcctctttgggtctgcagtgcagtcatggaagggttcgctggtgcaggcatctcctgccaacctggaggcagctcggaacttcgtgcagcaattctccctggccggggct

SEQ ID NO: 6633 - DNA, 428 bp, Bos taurus
  Clone ID: 28-LIB34-082-Q1-E1-G11
agggtggtggctgctttttagatattgataccaagggccatgctttccataaccaccacctcgtagttgcagaaagccctagatgtaatgatagtgtaatcattttgaattgtatgcattattatatcaaggagttagatatcttgcatgaatgctctcttctgtgtttaggtatcctatgccactcttgctgtgaaattgaagtgcatgtagaaaaaaccttttactatacgaaactttacaacacttgtgaaaacaattcaatttggtttacgcacagtgtaatatttctccaggtgtcatccaaaattccccacagacaaggctttcgtcctcattaggtgttggcctcagcctagccatctgggactgttctattaattgctgccaggattttacatccagttacctccagtttctagaacata

SEQ ID NO: 6634 - DNA, 428 bp, Bos taurus
  Clone ID: 28-LIB34-082-Q1-E1-G7
accactgtcgacatctggtatttgaaaaaacagggtctgcaatcacctgacagtgtacagaaaagctcccctctttgtgtagctgacagggccttttggcggaggagaatgtcattgaatcttgacagtgacgtttgcctccagctgcctgacaggcagcaggtcagcagctcaaccccacagaagccagcaccaagtgaagctgaaaaaataaggccaaaatgtgaaaatgaccttcaaattaaatatatgaaattggatatattccccaagtcaatctacacaattgcatttccagcatttgtataaggtacctaattaacagtgatccaaaaataggaattggatttgtgcaaacatggagaaattgacttccataaaatttaagtcaaagaaattttgacccaaaccatatttttattcagctg

SEQ ID NO: 6635 - DNA, 387 bp, Bos taurus
  Clone ID: 28-LIB34-083-Q1-E1-G11
ttcccggctcgacaaacgcgtcagaaattttccatcaaaagcaactatgaactgaatgacaccctctctcagatgggcattaagagaatattcatcgacgctgacctgtcaggaatcacagggaccgcggacctgctagtctcccaggtggtccacggcgctgcgctggacgtggatgaggagggcacggaacgtgctgctgccactggaatcggcatagaaagaacgttcttgacaatcattgtgcgtgtcaacaggcccttcctgattgccgtaattctcaaagacacccagagcatcatctttttggggaaagtcaccaaccccagtgaagcctagagctccgcactgagctgtgggtgccctccctaatgagcaaggtgccca

SEQ ID NO: 6636 - DNA, 395 bp, Bos taurus
  Clone ID: 28-LIB34-083-Q1-E1-G7
atgaaaaccaccgttaaacctaagccaaaatgggaaaggagaagacccacatcaacatcgttgtcattgggcacgtagattcagggaagtctaccacgactggccatctgatctataaatgtggcgggatcgacaagagaacaattgaaaagttcgagaaggaggctgccgagatgggaaagggctccttcaaatatgcctgggtcttggacaaacttaaagctgaacgtgagcgtggtatcaccattgatatctccctgtggaaatttgagaccagcaagtactatgttaccatcattgatgccccaggacacagagacttcatcaaaaacatgattacaggcacatcccaggctgactgtgctgtcctgatcgttgctgctggtgttggtgaa

SEQ ID NO: 6637 - DNA, 413 bp, Bos taurus
  Clone ID: 28-LIB34-084-Q1-E1-G7
aggcgcggcgggcgcggtgctgggcatcgacaatgtgtgtgagctggcggcgcggctgctcttcagcaccgtggagtgggcgcgccacgcgcccttcttccccgagctgccggtggccgaccaggtggcgctgctgcgcctcagctggagcgagctcttcgtgctgaacgcggcgcaggcagcgctgcccctgcacacggcgccgctgctggccgccgccggcctgcatgccgcgcccatggccgccgagcgtgccgtggccttcatggaccaggtgcgcgccttccaggaacaggtggacaaactgggccgtttgcaggttgactccgcggagtatggctgcctcaaggccatcgcgctcttcacacctgatgcctgcggcctctcagacccagcgcatgtggagagcctgc

SEQ ID NO: 6638 - DNA, 395 bp, Bos taurus
  Clone ID: 28-LIB34-085-Q1-E1-G11
caccggcagtaccggcgagcgcgcctcccgccaccccatccgaagccccagctgcggcctcatctccggcctcggccccggtcccggccccagccccagcctcagcctcggccccggctccatcgccggctccggctgcagctccatcgccggctcccgcgtcatcctcagacccggcagcagcagcggctacgaccgcggctccgggccagaccccggcctcagcgccagccccagcgcagacccccgcacagtctctgtcaggccctgctctcccaggccccttccccggcggccgcgtggtccggctgcacccggtcattttggcctccatcgtggacagctacgagcgacgcaacgagggagctgcccgagttatcgggaccctgctggga

SEQ ID NO: 6639 - DNA, 415 bp, Bos taurus
  Clone ID: 28-LIB34-085-Q1-E1-G7
agagttgcccgggactaggagcttaagtgaagagggaagccttattcggtagaaatcaactatgggcatgggcttctgccggggctagccctagagtacggagaaggcgggctttttggttcccctccccgccgagttgggggggcacactaggcctccggacatccccggtctcaagtaggcctcgtctgccggcaagggcgccccaaaggcgggcggcgccatgtcgctggttgcttacgccagcagcgatgaaagtgagccggatgaggctgagccggagccggaggaggaggaggaggcggcggcccctacacctgggcccactttagggggcttgttcgcttctcttcccgcacccaagggtccggccttgctgcctccgcccccccagatgcctggcccaagcctttcc

SEQ ID NO: 6640 - DNA, 437 bp, Bos taurus
  Clone ID: 28-LIB34-086-Q1-E1-G7
cctaactcttcctctgggacggtgtttcggggggcttttcggttataccgattagagacatggagctgatatatcccttataaaagatcttcttcaacttactgagggataacggctacatgcacatccagagcactaatccggacaccgtgggctgtgctctgaatgactctcccgtgggactggctgcctatattctagagaagttttctacctggatgaattcggaattcagagacttggacgatgtacgcctatatacgaacttctccctgaacgacctgctgacaggcatcatgctctactggacaacaggcaccatcacatcctctcagcgcttctacagagagaacctgaggcaagtcaataagcatgacatgttgaacgtgtaggtgtccacgggctttgctgccttcgcctgtgagctgatgcacttg

SEQ ID NO: 6641 - DNA, 434 bp, Bos taurus
  unsure (386): unsure at all n locations; Clone ID: 29-BOVMS1-002-Q1-E1-H1
acgcgtccgaccccacggtgtctaccatgattcactatttgggcccggaggattccctaaggcctagcatttggctcagttggctcagtaacggacattatgacgcggtgtttgatcactcgtatccgaacccggagtatgacacttggtgcaggcagactcaagtgcagagaaaacgcgatgaagaactcgccaaatccatggccatatccctgtccaaaatgtatattgagcaaaatgcatgctcttgaagtgtctgagaccctcgccctgggaaaattgcatacctaatttgtgtttggagagttaaatgaactttaatcagggtaattgcacttttaaactttctagtagatttactgtaggtgtaatgccttaatcatttntttgaatgttttcccctcagagctgaaagttgctgggcacctaaatga

SEQ ID NO: 6642 - DNA, 471 bp, Bos taurus
  Clone ID: 29-BOVMS1-003-Q1-E1-H1
gggtcgagcccgcgtccgggtgacaccaatgtgcctgtatggaatggaattaatggttcctggtgtcccccctgaaaaaatttacacccttgaattaggcactgatgcagataaggaacagtggaaagcggttcacaaacaagtggttgacagtgcttatgaggtgatcaaactgaaaggctacacatcctgggccattggactgtcagtggccgatttggcagaaagtataatgaagaatcttaggcgggtgcatccgatttccaccatgattaagggtctctatggaataaaagaggatgtcttccttagtgttccttgcatcttgggacagaatggaatctcagacgttgtgaaagtgactctgactcatgaagaagaggcctgtttgaagaagagtgcagatacactttgggggatccagaaagaactgcagttttaaagtcctctaatgttgtatcatttcactgt

SEQ ID NO: 6643 - DNA, 354 bp, Bos taurus
  Clone ID: 29-BOVMS1-003-Q1-E1-H9
atgcgacgtcatagctcttctatagtgtcacctaaattcaattcactggccgtcgttttacaacgtcgtgactgggaaaaccctggcgttacccaacttaatcgccttgcagcacatccccctttcgccagctggcgtaatagcgaagaggcccgcaccgatcgcccttcccaacagttgcgcagcctgaatggcgaatgggacgcgccctgtagcggcgcattaagcgcggcgggtgtggtggttacgcgcagcgtgaccgctacacttgccagcgccctagcgcccgctcctttcgctttcttcccttcctttctcgccacgttcgcccgctttccccgtcaagctctaaat

SEQ ID NO: 6644 - DNA, 183 bp, Bos taurus
  Clone ID: 29-BOVMS1-004-Q1-E1-H1
aattctgttcgctgcacgtcgtgacacaacgtcgtgtctgggagggatctgacagttatcaacttaatctgattgcagcactccacacttctcgccaactcgtgtagcaattaacgtcgtcgtatcgttcgcccttcccaacacttccgcagcctcagaggcgactgagacgttccatgtgtc

SEQ ID NO: 6645 - DNA, 472 bp, Bos taurus
  unsure (19),(31): unsure at all n locations; Clone ID: 29-BOVMS1-006-Q1-E1-H1
gtcggcctatcgggtcggncacgcgtccggnggaacagacagccgactctgtccagaggggttctcgccacggcctggaacagtacctctccagatttgaagaagcaatgaagctaaggaaacagctgattagtgaaaagcccagtcaagaagatggaaatacaacagaagaatttgactcttttcgaatatttagattggtgggctgtgctcttcttgcctttggagttagagcttttgtttgcaaatatctgtccatatttgctccatttcttactttacaacttgcatacatgggactatacaaatattttcccaagagtgaaaaaaagataaggacaacattacaaaaagctggacttccaataaccgggaatcctggcgaaatgaaaaatccattaaaggataacttcaacaaaatgggcgaagttttcaaaaatttccgggtccaactttttaactttaacctttg

SEQ ID NO: 6646 - DNA, 173 bp, Bos taurus
  Clone ID: 29-BOVMS1-007-Q1-E1-H9
ggctactccctctaatactaatagctagccaacatcatctatcaaaagaaaacctaacccgaaaaaaactatttattactatgctgatctcactacaactattcctaattataacctttaccgccatggaactaatcttattttaaattccatttgaagcaacactagtccca

SEQ ID NO: 6647 - DNA, 314 bp, Bos taurus
  Clone ID: 29-BOVMS1-008-Q1-E1-H1
aatgcgacgtcctacctcttcgacagtgtcacctaaattcaagtcacgtggccgtcgttttacaacgtcgtgactgggaaaaccctgacgttactcaacgtattcgccttgcaccacatctccctttcgcgagctggcgtaataacgaacatgcccataccgatttcccttcacatcagttgcgcaacctgaatggcgaatgggactctccctgtaccggtacattaagccgctgtggtgtggtggttacgctcagcgttacaccttcaattgccataaccctagcgcccgctcctttcgctttcttcccttcc

SEQ ID NO: 6648 - DNA, 473 bp, Bos taurus
  unsure (386): unsure at all n locations; Clone ID: 29-BOVMS1-009-Q1-E1-H9
cgggtcgtaccacgcgtccgcaccaatccacatcctatccgatgcaaccaacaacttgtgcttttgcaaaagaagtcgatctgaaattcctgtgtagcatttcgcttataaaattcagaaaatagcactttcactgccaacttatagtgggtgagaaattttagtttagatgttttagatcagacaatacgtgggtttcatttctttctttgacgtggtagtttatataacatgaatcatagccaaaacccttttcggggggaatagtcagttgagatcattaatttttttacccccactaaaagatcaagataaacttgtaaataaagccgatagtatatattcacacctgttgtgcacttgggtgagacatatatggccatggnagactagtgtcagatgtgttaacctccccgtggattgtatgttgtagaaaacgcctttcagatgtttgatgggacttgacttcaaag

SEQ ID NO: 6649 - DNA, 405 bp, Bos taurus
  Clone ID: 29-BOVMS1-010-Q1-E1-H1
atgcgacgtcatagctcttctatagtgtcacctaaattcaattcactggccgtcgttttacaacgtcgtgactgggaaaaccctggcgttacccaacttaatcgccttgcagcacatccccctttcgccagctggcgtaatagcgaagaggcccgcaccgatcgcccttcccaacagttgcgcagcctgaatggcgaatgggacgcgccctgtagcggcgcattaagcgcggcgggtgtggtggttacgcgcagcgtgaccgctacacttgccagcgccctagcgcccgctcctttcgctttcttcccttcctttctcgccacgttcgccggctttccccgtcaagctctaaatcgggggctccctttaaggttccgatttagtgctttacggcacctcgacccc

SEQ ID NO: 6650 - DNA, 324 bp, Bos taurus
  Clone ID: 29-BOVMS1-013-Q1-E1-H1
aaaaaaaaaaaaaaaccaaatcaataacaaaataaaaaaaataaaaaaacagaaaatcccaaaacacaacaaaaaaaaaaaaaaaaaaaaaataaaaaaaaaaaaaaagggcggccccccaaaaggatcaaaccttacttacccttgcatgcaacgtcaaagcccttcaaaagtgtcaccaaaattcaattcactggccttcattttaaaacgtctttactggaaaaaccctggctttacccaacttaatccccttgcaaaaaatccccctttcccaaactggcgtaaaaccaaaaaggcccccaacaatcgcccttccaaaaa

SEQ ID NO: 6651 - DNA, 336 bp, Bos taurus
  Clone ID: 29-BOVMS1-013-Q1-E1-H9
gggtcgaccaactcatcagtctgaggtcgcgctagagggtctatccctccggatgcgcgcatgctacgtcaaatgtcttcgacattgtcacgctaaattcacttcactggccgtcgttttacaacgtcttgagtgggaagtccctgacgttaaccatcatatgcgccatgccgtacatcaccctttcgccaactgctctattacagagtatgccctcacgtatcacccttcccaatagtatgcgcaacctgaatggcgaatgggacactcccagtctctgagcactatgcgcggcgcgtgtggtcgctacgcgcagcgtaagcgctacacttgcca

SEQ ID NO: 6652 - DNA, 448 bp, Bos taurus
  Clone ID: 29-BOVMS1-014-Q1-E1-H1
ctccatgcaagagtcctttgtagaaatgagttccagcagttttatgggaaaatctagtatgacacaactggaaagttcaactagtagaatgcttaaagcaggcctaagaggaattccacctaaaattgaagctcttccctctgacatcagcattgatgaaggaaaagttttaacagtagcctgcgcttttacgggtgagcctaccccggaaataacatggtctcgtggtggaagaacaattcacgatcaagaacagcgagggcgattccatattgaaaacacagatgacctgacgactctgatcatcatggacgtacggaaacaagatggtggactgtataccctgagtttaaggaatgaatttggatctgactctgctactgtgaatataaatattcgattcatttaagagggcctgtgctctcacactcagactcattcttaacct

SEQ ID NO: 6653 - DNA, 321 bp, Bos taurus
  Clone ID: 29-BOVMS1-015-Q1-E1-H9
gttctagatcgcgagcggccgccctttttttttttttttacaaggtgtcacttaatttttatttctggtctctcccacccccaggtatcataaataataaagcattttgtctttgacttgactgttaataattttcttccgaagagctcttctaacttcgggtgaagactgtgatcgcttctgaggagagatacccggacgcgtgggcgaggatgaggtggaacgtgtgatcaccattatgcagaatccacgccaatacaagatcccagactggttcttaaacagacagaatgacgtgaagggacggaaatacaaccaagt

SEQ ID NO: 6654 - DNA, 362 bp, Bos taurus
  Clone ID: 29-BOVMS1-016-Q1-E1-H1
atgcgacgtcatagctcttctatagtgtcacctaaattcaattcactggccgtcgttttacaacgtcgtgactgggaaaaccctggcgttacccaacttaatcgccttgcagcacatccccctttcgccagctggcgtaatagcgaagaggcccgcaccgatcgcccttcccaacagttgcgcagcctgaatggcgaatgggacgcgccctgtagcggcgcattaagcgcggcgggtgtggtggttacgcgcagcgtgaccgctacacttgccagcgccctagcgcccgctcctttcgctttcgtcccttcctttctcgccacgttcgccggctttccccgtcaagctctaaatcggggggc

SEQ ID NO: 6655 - DNA, 407 bp, Bos taurus
  Clone ID: 29-BOVMS1-017-Q1-E1-H1
gcggccctttttttttttttttttttttttttttttttggcttatacagtgccctatgctctttatttcctttgcagtagagtaggatagatgataattacagagagaaatgaccaaagacttcacattttgtgcctctcttcagtcatcccatagcatcaggacacgatcactcttcactgatgatttttgtgtgaacctcccggctcttcacccgcagcttgttgacctgggattcagcaatgtcagccctttcctcggcttcctccagctcatgctggagcttgcggaatttagatagatttgtattggattgttcctcagcctcctcagcttgtctcttgtaagatttcactttcgcctgaagtttatctaccaggtcctgaagtctgaaaataattttccga

SEQ ID NO: 6656 - DNA, 382 bp, Bos taurus
  unsure (306): unsure at all n locations; Clone ID: 29-BOVMS1-018-Q1-E1-H1
gttacttcagaatgaatcaaccaatgaacaattgcagatacattaaaagggaagccaagcacgttttcctgattaaagaagaaaattcattgaagctgcacaaaaggtcaatgaactctcttaaaagaacatagtacacgaaagtgaaagactagaagccttaaaacatgctctgcactgcaacatcctaacatcaacaggacaacagcgttctcggatgctagctactctttttaaggacgaaaggtgccaacagcttgctgcttatggaatcctagagaaaatgtacctagacaggatcatcanaggaaaccaacttcaagaatttgctgccatgctgatgcctcaccagaaagcaactacagctgatggttctagcatc

SEQ ID NO: 6657 - DNA, 425 bp, Bos taurus
  Clone ID: 29-BOVMS1-019-Q1-E1-H1
ggaaaaagtaccaaaagaccttcctcctgatactgcgctgctggacctgcaaaacaacaaaataactgagatcaaagatggagactttaagaacctgaagaaccttcatacactgattctcatcaacaacaaaattagcaaaatcagccctggggcatttgctcctttggtgaaattggaacgactttatctttccaagaatcaactgaaggaattgccagagaaaatgcccaaaactcctcaagagctgcgtgtccatgagaacgagattaccaaagtgcgaaagtctgtgttcaatggattgaaccagatgatcgtcgtagaacttggcaccaacccgctgaagagctcaggcattgaaaatggagcctttcaaggaatgaagaagctctcctacatccgcattgctgacacaaatataacta

SEQ ID NO: 6658 - DNA, 402 bp, Bos taurus
  Clone ID: 29-BOVMS1-020-Q1-E1-H1
atttacaccctgaattaggcactgatgcagataacgaacagtggaaagcggttcacaaacaagtggttgacagtgcttatgaggtgatcaaactgaaaggctacacatcctgggccattggactgtcagtggccgatttggcagaaagtataatgaagaatcttatgcgggtgcatccgatttccaccatgattaagggtctctatggaataaaagacgatgtcttccttagtgttccttgcatcttgggacagaatggaatctcagacgttgtgaaagtgactctgactcatgaagaagacgcctgtttgaagaagagtgcagatacactttgggggatccagaaagaactgcagttttaaagtcttctaatgttgtatcatttcactgtctaggctacac

SEQ ID NO: 6659 - DNA, 450 bp, Bos taurus
  unsure (24),(430),(436): unsure at all n locations; Clone ID: 29-BOVMS1-021-Q1-E1-H1
agggactatattcaggatcttggnagcactgccaatatgtctgatgttcaagaagctactaaccagctcctggatgtgaatctttgtgagaaccagatgtctatacaagtgactgaaagtggccccagaagtgagtctgagcacctccaagtcactattggtgccactgtgcctactggttttgagcaaacagctgcagatgaagtgagagagaaattggggtcatcatgcaaaatcagcaaagaccggggcaagatatactttgacatttcagtggacagtctggctcaggttcattgtctgagatcagttgataatttatttgtggttgttcaggagtttaaggattaccagttcaaagaaacaaaggaagaagttctaaaggattttgaggaattggctgggaagcttccatgggtcagacctttanaaatantggaaaataacaca

SEQ ID NO: 6660 - DNA, 437 bp, Bos taurus
  unsure (144): unsure at all n locations; Clone ID: 29-BOVMS1-022-Q1-E1-H1
caaccaagccttcgggaagcaactcaagccatcctcaaagatacccagatccacctggatgatgctctgcggggccaggaggacttgaaggagcagctggccatggtggagcgcagagccaacctgctgcaggctgagatcgangagctgagggccaccctggagcagacagagaggagcaggaagatcgcagagcaggagctcctggatgccagtgagcgtgtccagctcctgcacacccagaacaccagcctgatcaacaccaagaagaagctagagacagacatcactcaaatccagggagagatggaggacattatccaggaagctcgcaacgcagaagagaaagccaagaaggccatcactgatgcagccatgatggctgaggagctaaagaaggagcaagacaccagtgcccacctggagcggatgaagaa

SEQ ID NO: 6661 - DNA, 331 bp, Bos taurus
  unsure (281): unsure at all n locations; Clone ID: 29-BOVMS1-023-Q1-E1-H1
cgtccgctatagaatgctgccctacaggcatgatctttttaacattaattatgtagagagtttaatatttagaccttgcactcaactcatgtacgtgtattgatccattttcagggtttgaatgccggtgtggaaatgtttactgtggtgtacaccgttactcagatgtacacaattgctcttacaattacaaagctgatgctgctgagaaaatcagaaaagaaaatccagtagttgttggtgaaaagatccagaagatttgaactcctgatggaatacanaatcctttgaccatctgcaaactaaaaaactgacttgaggtttttttttc

SEQ ID NO: 6662 - DNA, 466 bp, Bos taurus
  Clone ID: 29-LIB188-001-Q1-E1-H1
atggccgcgggatacagaggaagttgaaccccaagttctattccttcccaaaatgggtaacagaggatttgattagaacagaaaaaaaaaaaacccaaacctgatagtcattctattggcttggccaaaacgttcgttcaggttttaaaaagccaaatgaacattttggtcaacacagtatgatggagcaaagcaggctttttcaaccgtaaactgataccacctgttggtcataaaccctgcagagatccaagtaagtcccatatttcgaagaaagtcagcagagagtgtgaagatatacgaacagaggagaaagctgctgaaggcacaaaggatcccaagaaatttttagtgctgttttcatttaataagccagtagtagagcaacctaaagaccttggctgtgatcacacaagaatgtttttaatggactgctgtggggaaacatgatggacagctggcatcc

SEQ ID NO: 6663 - DNA, 439 bp, Bos taurus
  unsure (361): unsure at all n locations; Clone ID: 29-LIB188-002-Q1-E1-H1
atgggcccggcatactcagtataaggctggacggttaacttgctgcaagccgtttatcttgcatttacattctcccagtttgatcacattccaaatggccttcagataatcgggcctgacatttttatactgaacgtaataagcatgctcccacacgtcaatccccagcacggggataagacctgttgttccttgcaggggatcctggttagaacaagcagcaatctgtaagcgtcactgctccttattgaagccgagccaaccccaaccggagccttggacaccaacagatacagcagtcaacttttccttaaatttggcaaaggatccaaagtcacgtttgatggcttccagcaattcnccttggggttctccaccaccgttagggctcagatttgtccagaagatgctgtgattgatatggcccccaccgttgaac

SEQ ID NO: 6664 - DNA, 277 bp, Bos taurus
  unsure (199): unsure at all n locations; Clone ID: 29-LIB188-003-Q1-E1-H1
agaaggtctagtccctacaatagggaagctgaggggtagcaggagacccactgggacccaatccgagaactgaaacctgctaggctcccctttactcctctccaggtccttccagcgggatgacctgcaagggcaagcccaccttggcttgattgcctggcaactgagaccctgctctggggaagggaagaggtcagangaagccctgcaaatggctggggaggtgggccccatctctgagcaatcagagtaggaggaaagaatgtatgtgcctgat

SEQ ID NO: 6665 - DNA, 384 bp, Bos taurus
  Clone ID: 29-LIB188-004-Q1-E1-H1
ccggatacggaattctacagatctgacactgattacttaagggttgctgctatcagccttgccaactgtgacttctccaaacccaaggaggaaccctagataaaatgccccaacactgtgatgagagcatccagatgttgccatgagaaaccggaaggcagatcttcacagaagccccaagggctcactcctgcacagtgttaggatacaaggttgttgacagctcctgtctcactgcagcctctaacacttggtcagtcactctccgccttagcactttgttcactgtcctgtgtcatagctcttagctcgctctacccttttcctgaaaagtatgtgggctgaaggtggtttcatttattgtttttttattgtatatctttt

SEQ ID NO: 6666 - DNA, 315 bp, Bos taurus
  Clone ID: 29-LIB188-007-Q1-E1-H1
gccatgggcgcgggatacataataatcactagcacccgaaaggagggccataggttctcttttattagcatcttgatcctttccatcttttttttcattctcctggttggcatctttcatgttgcgattttttactgcttgttcctctttggacgccattgctcctgggcctatccttgctgtctcctgctcctcccgattcttgctgcaagtgtgccgctgcaacacttcgactcgcagacctgctcccctcgcgcctgccactattgggggccgccccggcccgcacttccctcagtgccaggcggagcaggt

SEQ ID NO: 6667 - DNA, 232 bp, Bos taurus
  Clone ID: 29-LIB188-007-Q1-E1-H9
acgacaatgaatttggctacagcaacagggtggtggacctcatggtccacatggcctccaaggagtaaggtccctggacccccagccccagcaggagcacgagaggaagagttcctcagctgctggggagtcctgccccatctccgccacactgagaatctcctgacttccacatgtttccatctctaaggccctgaggaaggggaggggcttagggagccctgccttgtgt

SEQ ID NO: 6668 - DNA, 270 bp, Bos taurus
  unsure (146): unsure at all n locations; Clone ID: 29-LIB188-008-Q1-E1-H1
ccatggcggcgggatacaaaccagaccgcaatgagcttgatgcataaagccacgtgctcgaagaggatgaggaaggccaggcggatcgccaggagggaccactgctgctctgagaagttggagtcctgcactcggtcacattctcncagccctcgattttggcaggatcctggaagtctttggtgtagaacacagacaggctgtggttgacatagccggtgaagcagtcgacttcagactgggcccctctccggcaggggccatagcggt

SEQ ID NO: 6669 - DNA, 407 bp, Bos taurus
  Clone ID: 29-LIB188-009-Q1-E1-H1
acagccggccagtgccatcctgtatgactactacaaccctgagcacaagtgttctgtgttttatggggcaccacgtaagagcaaactcttgtccacgttgtgctctgcggatgtctgccagtgtgctgaggggaagtgccctcgacagcgccgggccctggagcgtgggcagcaggacttggagggttaccggatgaaattcgcctgctactctccccgagtggactacggcttccaggttaaggttctccgagaagacagcagggctgctttccgcctctttgagacccgtatcacccaagtcctgcatttcaccaaggatgccagggccaccgctgatcagaccagaaacttcctggtccgagcctcttgccgccttcagttggaacctgggaaagaatatctga

SEQ ID NO: 6670 - DNA, 450 bp, Bos taurus
  Clone ID: 29-LIB188-009-Q1-E1-H9
tggccgcgggatacaattccctttcatcagaagtcattttggaaaacagcaaattgccggaaggagtaacaataaattacaagtcttactgcaagaatggggtgaatggaacaggggaaaatgggagaaaatgctctaatatttccattggggatgaggttcagtttgaaattagcataactgcaaataaatgtccaaataagaactctgaaaccattaaaattaagcctctgggcttcactgaggaagtggagattatccttcagttcatctgtgaatgtgagtgccagggtgaaggcatcccaggaagccccaagtgccacgacggcaacgggaccttcgagtgtggggcctgcaggtgcaacgagggacgtgtcgggagacactgtgaatgtagcacagatgaggtgaacagcgaagacatggatgcctactgcaggaaagaaaaca

SEQ ID NO: 6671 - DNA, 426 bp, Bos taurus
  Clone ID: 29-LIB188-010-Q1-E1-H1
acacccccatccccaaccccacttgaaagaaatgcccagggattgggctgctggaagggcaatatggacccattcaaatttcctaccaggtgccaatccctcttagccctggggatgcccttagcagggggctgttccctggcaggtggggtgaagaggaagattgagggtcaggaagatggacgtgtggcttttgttagaagctgcccatcacacacctcagggaggtgagacgcttctcagtggggactagaacagtccaattcttgctgattattaactgggccctcatttcagaaagcaatgctgtttttatcaactggatctgactttgaaaaataaaacacaaaaaactcccaaaaaaggaatagaaaatttttatgcaaaaaaaaagattccaatgaaacaatcaataacacattgcat

SEQ ID NO: 6672 - DNA, 335 bp, Bos taurus
  Clone ID: 29-LIB188-011-Q1-E1-H1
actgcttcactgaccacctgctgatctgtgactgcttgggcttcgcttgcaaagtcatccttcatttcgttgacaaaaatggtgctatgccgcctgtctctcgatccgcggtagaaccatgcgacgtccactcgatcagcacgattggttcgtagaaatggtggcagcaacttgcagcaagtccatgcacactgggtcttggaagctatcgtggtcaatccatgagaatctaccttccatcttccaacagataggaaggtcgtcatgttggagttctagtactagagtgtgtgcattgtggtctaccacgtcagataactccaatcgcatttgtc

SEQ ID NO: 6673 - DNA, 415 bp, Bos taurus
  Clone ID: 29-LIB188-012-Q1-E1-H1
gccataggcgcgggatacacgggcaagatgggccgcctgaagagctacgagaaccagaaaccccccttcgacgccaagaacccattcctggctgttgtcaccaccaaccggaagctgaaccagggaaccgagcggcacctcatgcacctggaattagacatctcggactccaaaatcaggtatgagtctggggaccatgtggctgtttatccggctaatgactctgccctggtgaaccagcttggcgagatcctgggtgccgacttggacatcatcatgtccctgaacaaccttgatgaggagtccaacaagaagcaccccttcccctgccccacctcctaccgcacggccctcacctactacctggacatcaccaacccgccacgcaccaacgtgctctacgagctggcgcagt

SEQ ID NO: 6674 - DNA, 422 bp, Bos taurus
  Clone ID: 29-LIB188-013-Q1-E1-H1
acttatgatcggccagcccaccgggcactttgacaagcttgttgttgttcaaatgaagttccctcaaatgaggagtgttggccaaagagccattgtcaaccgcagagatgctgttgaaactcagtcccaacttagccaaattattcagtcctttcaggctagctgcatcaactttggtgattttgttgccatcgagatgtaattcagtaagggaaggaggaagaccttgagggatggtagttatatttgtgtcagcaatgcggatgtaggagagcttcttcattccctgaaaggctccattttcaatgcctgagctcttcagcgggttggtgccaagttctacgacgatcatctggttcaatccattgaacacagactttcgcactttggtgatctcgttctcatggacacgcagctcctga

SEQ ID NO: 6675 - DNA, 423 bp, Bos taurus
  Clone ID: 29-LIB188-013-Q1-E1-H9
gtgaataaagaaattaaaaatgccctcaaggaggtgaaacagataaagacccaaatagaacaaaccaatgaagagcgcaaattactgctcagctccctagaggaagccaagaagaagaaagaggacgccctgaatgacaccagggattctgaaaacaagctgaaggcgtcccagggggtgtgcaatgagaccatgacagccctttgggaggaatgtaagccctgcctcaagcagacctgcatgaagttctacgcgcgggtgtgcagaagcggatcgggactggttggccaccagcttgaggagttcctaaaccagagctcccccttctacttctggatcaacggtgaccgcatcgattccctgatggagaatgaccgggagcagagccacgtgatggacgtcatggaggacagcttcaccggg

SEQ ID NO: 6676 - DNA, 131 bp, Bos taurus
  Clone ID: 29-LIB188-014-Q1-E1-H1
acttgctgttgccctgtttggaggcccggttggtctcaactttccggttgatggtgctgccgtctgccttcaaaaccacggtcacgctacccgggtagaattcgctgatgagacacaccagggtggccttg

SEQ ID NO: 6677 - DNA, 394 bp, Bos taurus
  Clone ID: 29-LIB188-015-Q1-E1-H1
ccatagcggcgggatactatttctgctacaaggcaatcctggagtttgcagagagggagggcatggtgccccccagccacaacctcctggccatggagggtcagtaactgtcccacgagcctcctgtctgctggccagccatccttaaactaccctggacactgctgagcctgtaggttgccatcagttacgctgaagccatggaccaacctctttcttgtgtctcccggcgcacgcgtgcacgcaaggcagcctttccctttggctagatagatgtggtgaaattgcctctggaaagggccagcagcaatgtgttcttaattcctagcacctgctatcgaactgtgccttattaaaaccaaattgtggctatcgatatttgccaaagggcccg

SEQ ID NO: 6678 - DNA, 280 bp, Bos taurus
  Clone ID: 29-LIB188-016-Q1-E1-H1
actctgagctgggcagtgtcaggatgctgctgaggctgtacgtgcttttcatgctgtcctggtctgtgaaactgttttggaagttgctgctgctctgagtaaccccatccactttccacttgacattgatatccttggggtacaaatcattcaccaagcacacgacagacacagttccggtcttcaactgctcatcagatggtttgaataggaatacggatggctcagcatcagaccgagtgatttccaccttggacccgccgccgaacgtaattggtgt

SEQ ID NO: 6679 - DNA, 304 bp, Bos taurus
  Clone ID: 29-LIB188-018-Q1-E1-H1
ctatcgcttcttctatgagttatgacatacgatactgcctaacctcagttattacgaatttgcgatagtcctgctgccctatatgtggagtcatgtcgattacctgaagcatactgttaagggctgttactcgcatccttgtgggttaaaaccttttaggtcaaagaactccagatatgtcagcctctcacttagaccgcctattcttgtgagggtctctagcataaaggccctgcctgcaatagggctgacttgcctcttcacagccgagcctgaccacgtgatgagtttccaaggtggtccc

SEQ ID NO: 6680 - DNA, 388 bp, Bos taurus
  Clone ID: 29-LIB188-019-Q1-E1-H1
cgggatacaagcttatttttttttttttttttttttttttttttttttttttttttttttttttttttttttttttttttttttttttttattttttttttttttttgagcacaggtttaggcctttattgctgaagggggagcggccccaagcaggaggccccaaaaggggcctgaaggggcctgggtcccaaaaggggtgaatgtggccccggttcccccgggccccctgatggggcaggcggggataacatcgtctgtccccaaaggggcaaaggcccccgggctcccaaaggccccggaaggggctcacctaaatgtggcaatgcccccccaactgggtagggttgaaggacagccggatttccatgggcagggccttgagggc

SEQ ID NO: 6681 - DNA, 283 bp, Bos taurus
  Clone ID: 29-LIB188-019-Q1-E1-H9
accccaagctggcagctctgaaccctgaatccaacacagctgggctggacatatttgccaaattctctgcctacattaagaattcaaacccagcactcaatgacaacctggagaaggggctcctgaaagccctgaaagtattagacaattacctgacatcccccctcccagatgaagtagatgagaccagtgctgaggatgaggggatctctcagaggaaatttctggatggcaatgagctcactctggctgactgcaatctgttgcccaagctccacatagt

SEQ ID NO: 6682 - DNA, 406 bp, Bos taurus
  unsure (61),(181),(190),(195): unsure at all n locations; Clone ID: 29-LIB188-020-Q1-E1-H1
gggatactggcgtcacaccttcaacagcttccccttgttcatgatcatgtaggtgtagtancggatcttggcttgctcgccggggtccgtgcgcaggtggaagttgacgttgagagtctccccaggcttgagctccacgcggggcacagagaggtgcaggtagttattggagttcccctgngtgttgtanggtanggcctgcatggtcctggtggcctgtcgactctcctgtccagccgctcctgcacacgcactcgccacagtcacagtcgccattatctccgcagaacagccccttgtgtctcacgcaggagaagttgtcacactggcagtaaggcccgtaaatgtttccgtaaggggacaagtggcagacacactgcccgcaattacaatcgcctctcccact

SEQ ID NO: 6683 - DNA, 400 bp, Bos taurus
  Clone ID: 29-LIB188-021-Q1-E1-H1
cgccatggcggcgggatacatatgtaactcgagctttcggtcaaggaaccaaggtagagatcaagaggtctgatgctgagccatcggtcgtcgtcttcagaccatctgatgagcagctgaggaccggcactgtctctgtcatgtgcatggtgaatgatttctaccccaaagatatcactgtcaagtggaaagtggatggggttagtcatagcagcagcagcttccaatacagtttcacagaccaggacatcaagaaaagcacctacagcctcagcagcatcatgacactgcccagctcatagtacagagctaaggcacaacctgtttgtatccaagagttatgggggcagcagtggatatgggaagcaagccctcatggacactgggtccccccgtgggc

SEQ ID NO: 6684 - DNA, 409 bp, Bos taurus
  Clone ID: 29-LIB188-021-Q1-E1-H9
atggcggcgggatactcttgggcagatgggcaaagggatccttggccttcggctcggcagccagcgcctgctcacattcatccagctcctcctcaggagcgggggcagccgccttcttctcctctttgccctccttccgctctgcctggggcttcagcttctcttctcgagaacctttctccttccgtggggtgtcctttttaggctggctctctgcaaactttttagcatcaaactgggccattttctcacagagtttcacctctcccaagacagcccggaactggggctggttaatgcaggtgaggaaccagcggttggtattagggaaggcctggcggaaagaaggctccagaacctgtttgtaaagccacaacagggtgcagacaactgttatgtcagccagcgt

SEQ ID NO: 6685 - DNA, 401 bp, Bos taurus
  Clone ID: 29-LIB188-022-Q1-E1-H1
cggaggccatgtaggccggatactactttgaacgtgatcatgtggctttgaagaactttgccaaatactttcttcaccaatctcattaaggaaaggaacattcttagaaactgatgaagcctcaaaaacagcgaaggggccgaatcttccttcaaggatatcaagaaaaccagaccgtgatgactgggagaatgggctgactgcaatggaatgtgcgctgtgcttggagagaagtgtgaatcagtcactactggaactgcacatactggccactgaaaaaaatgatccccatctgtgtgatttcattgagactcattacctgaatgagcaggtggaagccatcaaagaattgggtgaccacataaccaacctgcgcaagatggggggctctggatctggca

SEQ ID NO: 6686 - DNA, 75 bp, Bos taurus
  Clone ID: 29-LIB188-024-Q1-E1-H1
actccgtgtggattgggggctccatcctggcctcgctgtccaccttccagcagatgtggatcagcaagcaggagt

SEQ ID NO: 6687 - DNA, 365 bp, Bos taurus
  unsure (128),(287),(291),(295): unsure at all n locations; Clone ID: 29-LIB188-024-Q1-E1-H9
gccggagaccattctcacattaaaaccctggtgctaatataactttatagccttaacccttgtaaaggacaatctggacctcatctccagcccccacccctagcattcagtcataatgtgattcctanagagggtggggggagccaagtgaaagggtgctcgggcccaatggccttcactccggaaagctgtgcccggcatcgtcactgactatcctgtaaggaacaccaccaggtcctggcttcagcccagggaaagaaaggagtgttgcaaaagggactccagangcangcangcaactgcttccatttactgtggggggggttctccccacaacctaagtgaggagcaaccctcacccgcgg

SEQ ID NO: 6688 - DNA, 449 bp, Bos taurus
  unsure (301): unsure at all n locations; Clone ID: 29-LIB188-025-Q1-E1-H1
gcaatgggcgcgggatacccacatagacatttcgtgcgtgttctaggaagaatcggagatctggaaggggaaattgcaaccatcctggtggagaacagcatctcagttgtccccttttccgaagctcagatgtgtgagatgccagtcaacacaccggaaaatccctggaaggtaagttcgcaagaggaacgagaacgtgaagacctgaggaaaacccacctggtgttcagcatcgaccccagcggctgtgaagacgtggatgacaccctttcagtccgagccttggataatggcaacctgnagcttggagtccacattgcagatgtgacgcactttggtagcacacactcctatattgacattgaagctaggacaaggggcacacttactacttagcggaccgtcgcttatgacatgctgccgccatcctcagcgctgacgtgtgctcc

SEQ ID NO: 6689 - DNA, 447 bp, Bos taurus
  unsure (405): unsure at all n locations; Clone ID: 29-LIB188-025-Q1-E1-H9
tccagccgctatgggcccgggctacacaacagcaacactacataaatgccgcagatgcagaatactgttttcttgctctatttacacagcggatatacctactctaacaaaggaggtggggggaaatgcacaggaaactcaggccaatggggagcgagaagagaacgaagaagtgcagcgcatgcgtcagtcgatgtgtaacagtcagaagcggaacagttcagaacaaagcctgccctgtcaaaggaagagctaaaagacagttatataaaaatcaaggtgggctttcagactggctaacacaacaacattccatgagtagatggtattgtctgattgtatttttgtttatccatttcattgggagcaaggacaaaaatgtaaaatctacaccttgcttatcangactgttgaaagagtgctctgccttttaaaaaaatttggggg

SEQ ID NO: 6690 - DNA, 262 bp, Bos taurus
  unsure (131): unsure at all n locations; Clone ID: 29-LIB188-027-Q1-E1-H1
ccaacaacaactccccccccggcctggctttccggtccccgttcaaggaaaaagaaaaacttcttgtcaacaacttcggctgcatcaaggttgtcgaaagacaggcagcacgttgttgacggagatgcggnggtaggccatgcccagaatgccgtcgaacttggccgcgatgaagaccacaccgggctgcttgatggcctccccgaaggtctgcctctgcaccgtgacgccacccgggctggatgaggatgggttacagggt

SEQ ID NO: 6691 - DNA, 366 bp, Bos taurus
  Clone ID: 29-LIB188-028-Q1-E1-H1
accagcatttgtctttttgtgaagccaatatcagaagacttgcactctttaacacattctttataaaatgtatacattcttcagaactatttaaagaggagtgttcctgcatgcagataatcatggttttgtttgcctctgtagattactaaagcaaattgtttcatttatttttttaaatgccctttgatgtttcaaaacaaaaaggaactctaattcaattgactgactttaagatcaggcatatctacagtcttgagaagcactttgagcagatggtcgcctgggttttccaaggaggtgtgtgctgggggtggtcttcaagtggcacacagcccctcccaacacttttgtatcactagtgcg

SEQ ID NO: 6692 - DNA, 478 bp, Bos taurus
  Clone ID: 29-LIB2809-003-Q1-E1-H9
cgacgtctatgctcgccgcagccatggcctagggatacttgtacttgtgtaggtgggggttgtctactgagtaaggaatactgtttttaaggttctaaagctaaattcaaatgatgcattaatgacccaaaaactcagatctgatggtgtctgaatttctaacagtccttgctttgtgggtatgctgacaacttatctggatgccttacatcttttctaaacagtgttgcctctgaacgtgctctgctccctccctgctccctctttggagcccctttgcaccccagagcctgcagaagtggctggtataaaagggggcctggctagagaatgatcagtgtagctgtttgcaggattcctttctgggcttcattttggaaactttgcttagggctattttccttaattgccaaaatttgatggaggtaaaaaggaatttggaaggaattggattaataataataattttttttttttt

SEQ ID NO: 6693 - DNA, 492 bp, Bos taurus
  Clone ID: 29-LIB2809-005-Q1-E1-H9
ttgtgccgacggcttatgctcgccgtagccatggccagccgatacaggacgcttccagaagccatacttccaggagcacaatccctgtcttcggcaggatgacagcctggtgtagcgtcacgtcctcgaatactacaggcgtgtgctccacgttctggtccagggctcgggccagtgtcttccagaccaggcacaggtagccagtgcccgggaagatgatgcgaccgtcgatgcagtgatccaccagatagtggtcaggggactcggggttgatgtctgtggggcctgggccttagtgccaccgctgtggaggaagccaccccgcccccctgcccgcctgcattgcaaggactcaccgatcttatagatggtggcagaggagctactggagccactggggaagtcctcagcagtgggcacatcccaggtctggctgtggtcccacttgatgtgggggggaaatgaaggggggtgccccggggagctgggaac

SEQ ID NO: 6694 - DNA, 370 bp, Bos taurus
  Clone ID: 29-LIB2809-007-Q1-E1-H9
ggcccgggacacaactaactttgaagttgatattaatagaaattattccaaaattattcttaggtcacaaataactactatcccacataaaaagggaaaaatcccacccaattaaggaaaaggtatcctgtgtatgtttccatggcaatgagtttatgcattctcagattttgtccggctagttatccaccctttatctgatgcatttattccatctctcagagagaaccatatagattcctgacggcatccaggacacgtggctcgtggtggacacacttcatggtggatactgctactataaaaatactcagaacttaagagaattccaagatgctttataaaaagcattagtcatgcctcaaaactg

SEQ ID NO: 6695 - DNA, 420 bp, Bos taurus
  unsure (283),(285),(288),(295),(310),(324),(343),(346),(384): unsure at all n locations; Clone ID: 29-LIB2809-008-Q1-E1-H1
atgctaagactaagtcatgaaagttaagttaatcctccttttcttcccccgaaggaatctgctgaagttgccacagaggaagttaagattactgtggacgataagcactaccagaaagcactgaatgaaatcagtcagttttagcggaggtgggccgagtatctccagtagctgtatcagggtccaattgttttgggggagggggtgggggtaggagaaaggcggttcccggggggggcgctctgaagagggaggagggcgccaccagtgaggaggggggcananaanacctttnacatggaatcaacanaagtattcactaanaaaactaaactgactgaanaanaaaagaatcgcctaaattttctgaaaaaaatcagccancgttaccagaaattcgccttgccccagtatctcaag

SEQ ID NO: 6696 - DNA, 181 bp, Bos taurus
  Clone ID: 29-LIB2809-009-Q1-E1-H1
ctccgaccgaatggggcgggatactccttgaaggtagcggccagcgacatctccctgctggacgcccatagtgcccccctaagagtgtatgtgtaggagctgaagccgaaccctgagggcgacctggagatcctgctgcagggatgggagaacggttaatgtgctcacaacaagatcattg

SEQ ID NO: 6697 - DNA, 244 bp, Bos taurus
  Clone ID: 29-LIB2809-011-Q1-E1-H1
gccatgggcgcgggataccaccacaggggtttgagtaagaggagggatgttttgtgggaggctgttagggatgggcccagggaagggatagactagggactgtgtctgggcaaaggggtggattttatcctggagttcatcctctgtttgctgctgttcctcactctgaaacttctcaattttcttattgatgcgtgtaatagattcctcactgcttgaaaggctttccacaatctcaccaggt

SEQ ID NO: 6698 - DNA, 325 bp, Bos taurus
  Clone ID: 29-LIB2809-011-Q1-E1-H9
gccatagcggcgggatacctttaagattctggaattaactgcttccacctgggaaaggttggactggacgatcgatcatgcacattttcatagctaccactttacgtcatacaaccagcaagtttggaatggtgcatcaataagacacatcgcagactatttcctgaattatttatactcgccctgtcagtttaaattgagtatcctgggtttatatggtggtttcatacaaatctagctgatgattaattcaaatccattccctactcattctgagtgtacaaaagaattttccttcccccctaaaattcattttccagttcga

SEQ ID NO: 6699 - DNA, 353 bp, Bos taurus
  Clone ID: 29-LIB2809-012-Q1-E1-H1
gataccccagctagaaattgttcccaatagtgctgaggaacgacttcacagtatgaaagagggaatccatgcccaacagaaagatactatgataggagtaaatcaggaactggcctacttctaccctgagcttttcagacaattctaccagctggatgcctatccatctggtgcctggtattacgttccactaggcacacaatacactgatgccccatcattctctgacatcccgaagcccattggctctgagaacagtgaaaagactacgatgccactgtggtgaagagtcaagtgaattctgacggactccacagttatggtctttgatggttctgaaaattccatgctct

SEQ ID NO: 6700 - DNA, 338 bp, Bos taurus
  unsure (21),(43),(47): unsure at all n locations; Clone ID: 29-LIB2809-013-Q1-E1-H9
ggcatatctctctggggatanggcactgctttctggggaacangcangactttggactgagaaagggacagcacggactgaggaggaaacatgacagttggaggaagaggctggtgaggctggtgcatccaagactggagcagaggcagaggaaggtgcagattttcaacatcagtgagagtcaggctctggctttcatggaggggaagggatgggccgggagaggaactaagctggctggttgtttcttgcttctcccatcaaacagcgagcctcaagcctcggcgcgactttgctacccggggcattgacctcatccccagccagccagccctcct

SEQ ID NO: 6701 - DNA, 444 bp, Bos taurus
  unsure (44),(428): unsure at all n locations; Clone ID: 29-LIB2809-014-Q1-E1-H1
gatccagcagaaaggcctaaatgggcatatctctctggggatanggcactgctttctggggaacaggcaggactttggactgagaaagggacagcacggactgaggaggaaacatgacagttggaggaagaggctggtgaggctggtgcatccaagactggagcagaggcagaggaaggtgcagattttcaacatcagtgagagtcaggctctggctttcagtaaagggctcaactggatatttagggaagggcatttctttgtgcttaggagccatagcctccttcactttggagactcccattacttcaggctgaaggaaaggcggcaccaccacaggggtttgagtaagaggagggatgttttgtgggaggctgttatggatgggcccagggaagggatagactagagactgtgtctgggcaaangggtggattttatcct

SEQ ID NO: 6702 - DNA, 369 bp, Bos taurus
  Clone ID: 29-LIB2809-016-Q1-E1-H1
ggcctgaatgtgcatatcactctagagatagggcactgctttctggggaacatgcatgactttggactgcgaaagggacaccacggactgacgaggaaacatgagagttggaggaagaggctggtgaggctggtgcatccaagactggagcacaggcagaggaaggtgcagattttcaacatcagtgagagtcatgctctggctttcagtaaagggctcaactggatatttagggaagggcatttctttgtgcttatgagccatagcctccttcactttggaaacgcccattaattcacgctgaacgaaaggcgggaccagcacacgggtttgcgtaagacgagggatgttttgtgggacgcctttagg

SEQ ID NO: 6703 - DNA, 434 bp, Bos taurus
  unsure (381): unsure at all n locations; Clone ID: 29-LIB2809-019-Q1-E1-H1
gggcccgggctactttgcacttcactgtccatcccagacctactcagctcccaccgtgcctaagaaaacgggatggcttgaggactgggtgccagagacccctgggcgggggcgaggaagaggagggagggagaggtgactgggagggagacactgcctgcccccaggtcagctacaatcaggagggcgggcggaggaggcagcaggtccacagaaaggagcagctgccccagggcccctccggtcacttcggccaggcctaccactaacagcccagcagctccactcgcagggtgatacggttgtgccaggccacgggctggatccgcacgaagcgagcctggaacggcgtctcaaatatgttcttcttgtgggaattantgtccaaggtaccaagggaaaatcttgctttctgaggcccccgggtccttgta

SEQ ID NO: 6704 - DNA, 309 bp, Bos taurus
  Clone ID: 29-LIB2809-020-Q1-E1-H9
gggacaccccagatggaaaatgttcccaatagtgctgaggaacgacttcacagtatgaaagagggaatccatgcccaacagaaagaacctatgataggagtgaatcaggaactggcctacttctaccctgagcttttcagacaattctaccagctggatgcctatccatctggtgcctggtattacgttccactaggcacacaatacactgatgccccatcattctctgacatccctaatcccattggcctctgagaacagtgaaaagactactatgccactgtggtgaagagtcaagtggattctgga

SEQ ID NO: 6705 - DNA, 417 bp, Bos taurus
  Clone ID: 29-LIB2809-022-Q1-E1-H1
gccaagggcgcgggatactctgtgaatggtgagagactgggcacctacatgggccataccggagctgtgtggtgtgtggacgcggactgggacaccaagcatgttctcactggctcagctgacaacagctgtcgtctctgggactgtgaaacagggaagcagctggccctgctcaagaccaattcagcagtccggacctgtggctttgactttgggggcaacatcatcatgttctccacagacaagcagatgggctaccagtgcttcgtgagcttctttgacctgcgggatccaagccagatcgacagcaatgagccctacatgaggattccttgcaacgactccaagatcaccagtgccgtttggggacctctgggagagtgcatcatcgcaggccacgaaggtggagagctcaac

SEQ ID NO: 6706 - DNA, 402 bp, Bos taurus
  Clone ID: 29-LIB2809-027-Q1-E1-H9
ctagatttggaattgatattaatagaaattattccaaaattattcttacgtcacaaataactactatcccacataaaaacggaaaaatcccacccaattaaggaaaacgtatcctgtgtatgtttccacggcaatgagtttatgcattctcacattttgtccggctagttatccaccctttatctgatgcatttattccatctctcagagagaaccatatagattcctgacggcatccaggacacgtggctcgtggtggacacacttcatggtggatactgcctactataaatatactcagaacttaagagaattccacgatgctttaccgaaagcattagtcatgcctcaaaactgccctttgaagtacgtcagtattattatcccagtttaacacaacga

SEQ ID NO: 6707 - DNA, 235 bp, Bos taurus
  Clone ID: 29-LIB2809-028-Q1-E1-H1
atagcggccagcgacatctccctgctggacgcccagagtgcccccctgagagtgtatgtggaggagctgaagcccacccctgagggcgacctggagatcctgctgcagaaatgggagaacggtgagtgtgctcagaagacgatcattgcagaaaaaaccaagatgcctgcggtgttcaagatcgatgccttgaatgagaacaaagtccttgtgctggacaccgactacaaaaagt

SEQ ID NO: 6708 - DNA, 375 bp, Bos taurus
  Clone ID: 29-LIB2809-029-Q1-E1-H1
tgctccgaaagccatgggcgcgcgatacagcagaaaggcctgaatgggcatatctctctggggatagggcactgctttctggggaacaggcaggactttggactgagaaagggacagcacggactgaggaggaaacatgacagttggaggaacaggctgtttgtacaagctttttttgggtttgtgtttttgttttttttgccttaaaatgtaatttattgagaagaagaaagacaaaatctcagttaatgcacacaattatttgatatgatggcacttacgggagaagtgattcaaaggcttttaagacattttccatacagaaatttaatgaagactttaattcccttcgactcagtggcctttataccagca

SEQ ID NO: 6709 - DNA, 471 bp, Bos taurus
  Clone ID: 29-LIB2809-030-Q1-E1-H1
gcatgctccctaccgccaagggcccgggatacttgtaattgtgtaagtgggggttgtctactgagtaaggaatactgtttttaaggttctaaagctaaattcaaatgatgcattaatgacccaaaaactcagatctgatggtgtctgaatttctaacagtccttgctttgtgggtatgctgacaacttatctggatgccttacatcttttctaaacagtgttgcctctgaacgtgctctgctccctccctgctccctctttggagcccctttgcaccccagagcctgcagaagtggctggtataaaagggggcctggctagagaatgatcagtgtagctgtttgcaggattcctttctgggcttcattttgggaactttgcttacggctatttttcttaattgcccacaattgatggagggttaaacggaattttgaaggtatttgatttattattattattttttttttt

SEQ ID NO: 6710 - DNA, 406 bp, Bos taurus
  Clone ID: 29-LIB2809-030-Q1-E1-H9
acagcagaaaggcctgaatgggcatatctctctggggatagggcactgctttctggggaacaggcaggactttggactgagaaagggacagcacggactgaggaggaaacatgacagttggaggaagaggctggtgaggctggtgcatccaagactggagcagaggcagaggaaggtgcagattttcaacatcagtgagagtcaggctctggctttcagtaaagggctcaactggatatttagggaagggcatttctttgtgcttaggagccatagcctccttcactttggagactcccattacttcaggctgaaggaaaggcggcaccaccacaggggtttgagtaagaggagggatgttttgtgggaggctgttatggatgggcccacggaagggatagactag

SEQ ID NO: 6711 - DNA, 437 bp, Bos taurus
  unsure (367),(370),(411),(422): unsure at all n locations; Clone ID: 29-LIB2809-032-Q1-E1-H1
gccaagggcccgggatacagcagaaaggcctgaatgggcatatctctctggggatagggcactgctttctggggaacaggcaggactttggactgagaaagggacagcacggactgaggaggaaacatgacagttggaggaagaggctggtgaggctggtgcatccaagactggagcagaggcagaggaaggtgcagattttcaacatcagtgagagtcaggctctggctttcagtaaagggctcaactggatatttagggaagggcatttctttgtgcttaggagccatagcctccttcactttggagactcccattacttcaggctgaaggaaaggcggcaccaccacaggggtttgagtaaganganggatgttttgtgggaagctgttatggatgggcccaaagaanggatagactanagactgtgtctgggc

SEQ ID NO: 6712 - DNA, 332 bp, Bos taurus
  unsure (10),(73),(99),(299): unsure at all n locations; Clone ID: 29-LIB2809-032-Q1-E1-H9
cgcatggccncgaccgccatgaggcgcgggatacagcagaaaggcctgaatgggcatatctctctggggatanggcactgctttctggggaacaggcangactttggactgagaaagggacagcacggactgaggaggaaacatgacagttggaggaagaggctggtgaggctggtgcatccaagactggagcagaggcagaggaaggtgcagattttcaacatcagtgagagtcaggctctggctttcagtaaagggctcaactggatatttaaggaagggcatttctttgtgcttangagccatagcctccttcactttggagactccca

SEQ ID NO: 6713 - DNA, 187 bp, Bos taurus
  Clone ID: 29-LIB3057-002-Q1-K1-H9
cttaagctcctgaattgcagaatcatctacaacaacaactgctaagcccacattcatcctatccatttctgagatggttcttaatgatccattccctggcaaacttctctgagctttatagctttgtaatgcatgcttggctctaatgggtttcatcttaaataaaaacagactctgtagcgatgtc

SEQ ID NO: 6714 - DNA, 304 bp, Bos taurus
  unsure (193): unsure at all n locations; Clone ID: 29-LIB3057-004-Q1-K1-H9
gaatggtttagcaccaggcgccccacgaacgtgcggtgcgtgacgggcgagggggcgggcgtctttccggccgcgccccgtgtcccgggacgaagggctctccgcaccggaccccggtcccgacgcgcggcgggggcgcgccgcgccgcgccccgggggacgcgggcgacggcccgccggcggtgacggcggnggaccggctatccgaggccaaccgaggctcccgcggcgctgccgtatcgttccgcctgggcgggattctgacttagaggcgttcagtcataatcccacagatggtagcttc

SEQ ID NO: 6715 - DNA, 458 bp, Bos taurus
  Clone ID: 29-LIB3057-005-Q1-K1-H1
ggtttatgaccttaataaagtgtaattatgtattaccagcagggtgtttttaactgtgactattgtataaaaacaaatcttgatatccagaagcacatgaagtttgcaactttccaccctgcccatttttgtaaaactgcagtcatcttggaccttttaaacacaaattttaaactcaaccaagctgtgataagtggaatggttactgtttatactgtggtatgtttttgattacagcagacaatgctttcttttccagtcgtctttgagaataaggaaaaaatcttcagatgcaatggttttgtgtagcatcttgtctatcatgttttgtaaatactggagaagctttgaccaatttgacttagagatggaatgtaactttgcttacaaaaattgctattaaactcctgcttaaggtgttctaaatttctgtgagcacacttaaagcgaaaaataaa

SEQ ID NO: 6716 - DNA, 309 bp, Bos taurus
  Clone ID: 29-LIB3057-006-Q1-K1-H1
atggaacaggagcagcttgagagagagagacaagaacgggaacgttaggatcgcctggagcggtagagacaagagcggtagaggctggagagactggaccgggaaaggcaggaacgagagcggcaggagcaactagagagggagcagctggagtgggagcgagagcggagaatatcaaatgccgctgcccctgcctctgtggagactcctctaaactctgtgctgggagactcctctgctcctgagccaggcttgcaggcagcctctcagccggccgagacttcagcccagcatggcattgtcttggga

SEQ ID NO: 6717 - DNA, 431 bp, Bos taurus
  unsure (388): unsure at all n locations; Clone ID: 29-LIB3057-007-Q1-K1-H1
ccggcggcaagccgagacgcgcccccagcccatcatggcccggctcttccgggcatccggccgtctctccctgctcctggccggcttcattcccccgagccagggacaggagaagtcgaagacggactgccacgctggtgtgggtggcaccatctatgagtacggggccctcaccatcgatggggaggagtacatcccctttaagcagtacgctggcaaatacatcctcttcgtcaacgtggccagctactgaggcctgacgggccagtacgttgaactgaatgcactgcaggaagagcttgaaccatttggtctggtcattctgggcttcccctgcaaccaatttggaaaacaagaaccaggagagaactcggagatcctagccacncttcaagtatgttcgaccaggtgggggcttcacccccaatttc

SEQ ID NO: 6718 - DNA, 420 bp, Bos taurus
  unsure (232): unsure at all n locations; Clone ID: 29-LIB3057-008-Q1-K1-H1
gtttgggctataatgtcaatcggatttctaggtttcatcgtatgagcccaccatatattcactgtcggaatagacgtcgacacacgagcctacttcacatcagccactataattattgctattccaaccggggtaaaagtcttcagctgattggcaacacttcatggaggtaatatcaaatggtctcctgctataatgtgagccctaggctttattttcttatttacagtanggggtttaactggaattgtcttagccaactcttccctcgatattggtcttcacgacacatactacgttgtcgcacatttccactatgttttatcaataggagctgtatttgctattatagggggatttgttcattgattcccactattctcaggttatactctcaacgatacatgagccaaaatccac

SEQ ID NO: 6719 - DNA, 399 bp, Bos taurus
  unsure (304): unsure at all n locations; Clone ID: 29-LIB3057-009-Q1-K1-H1
ggtgaagtgtgtttcttgaaatcatcaccaccatggacagcaaaggttcgtcgcagaaagggtcccgcctgctcctgctgctggtggtgtcaaatctactcttgtgccagggtgtggtctccacccccgtctgtcccaatgggcctggcaactgccaggtatcccttcgagacctgtttgaccgggcagtcatggtgtcccactacatccatgacctctcctcggaaatgttcaacgaatttgataaacggtatgcccagggcaaagggttcattaccatggccctcaacagctgccatacctnctcccttcctacccctgaagataaagaacaagcccaacagacccaccatgaagtccttatgagcttgattcttgggttgctgcgctcctggaatg

SEQ ID NO: 6720 - DNA, 392 bp, Bos taurus
  Clone ID: 29-LIB3057-010-Q1-K1-H9
ctttccgtaatgcaaaataactcatttccaaaatactgctttggtattttggtaaaaaggtgtaggagcttgttacactggggtgagaaagagaaatcaagagaaataaaaaagcagaggaatgggacctactgtagtccccaagtactgttaaatatcttattggacaagggcttgataaaaaaaatccttttaaggatattggatgatcacagctgagcactcaggaacttggatggagaatgctgctaggctcttggttttaattcatgctacctgaaaagtaagacaagcttttgctaactggacacacttttcagtaactgaaggaatgaaatgaatgccaaatgtttcccctggggctgtcctgtctcttcagaagaacgtggtca

SEQ ID NO: 6721 - DNA, 434 bp, Bos taurus
  Clone ID: 29-LIB3057-011-Q1-K1-H1
aaacaatttgcaagcctttcaaacagcagcatcaacttacatggtggaaatagtaaacctatattttcataattctatgtgtatttttattttgaataaactgaaagaagttttgggttttttaattttttctctccccgactcaaaatgtattgtcatttaatatagcctcttttaaaaaaatctgctaggtttaaaaataaataaataaaaatcagaagcctatctttactttaaatctgtcctgtaaaatctttatacatcaagtgaaaagtgagactgccagatatataccattaacttggactaactagctatgggagacttaagggatgtttcctggtgtagatgcgcttttcattcctttctctatatagatcaactctgttggtatttttaagtctcacatttctcaaagggtatatattctggat

SEQ ID NO: 6722 - DNA, 171 bp, Bos taurus
  Clone ID: 29-LIB3057-013-Q1-K1-H1
aacctatgctccctcttctcttccatatctttcctccttggctgtattctgacttataagctttcaatcataatcccacatattgtatcttctccccatttactcctcaaccaatcacatacaccaaatgtcttaacctgcggttccttctcctactgatcatgattacca

SEQ ID NO: 6723 - DNA, 351 bp, Bos taurus
  Clone ID: 29-LIB3057-014-Q1-K1-H9
ggggctcagcggaattttgagacctcgccgtcagctccgggacatggcgacccccaacgggccccgggtgccctgcccccaggccgcagtcgctcgggctcttctattcggcttagtcctcatccagggggccggagtcgccggcactacagatgtagtggtagcatataatataacttggaagtcaactaatttcaagaccattttggagtgggaacccaaacccatcaatcatgtctacactgttcagataagccctagattaggaaactggaaaaacaaatgcttttacacaacaaacacggaatgtgatgtcactgatgagaatgtgaaaaatgtgagagagacata

SEQ ID NO: 6724 - DNA, 420 bp, Bos taurus
  Clone ID: 29-LIB3057-015-Q1-K1-H1
tcccaatcgacccactcgtccgctgactgccatcatcttcgtggttgctttcagcatctacaacatgaccattcgttattgcaaggttaccaacctactgctggatgctctgaacctattcaagagcatctttaataacatatagctcctcaccatctctctgattcttttcctcaaactcattatctcctatacccatattcttactgaattgatatctcataatcttaacacacttattgaccctgtttctatccattactattacacattttatattcactacctcattctgccctatgttctttattaatttttctactataaaactgatatttctatatctttatttctttctttttttgaactttgctcttttattcttatacttctttactatttccatttaattattctttt

SEQ ID NO: 6725 - DNA, 434 bp, Bos taurus
  Clone ID: 29-LIB3057-016-Q1-K1-H1
aaaacctttgtgacttacaccgtctatgtcagcatgattgccttagaaagaccggatcgcagggtaaaggtgattaaaggggcagagatcctctacgaatgccgttactctgttttcttccagtcgttagctattgtggaacaggaaatgaaaaaggactggctttttgcacctcattatcgatactacgtaagagaaatgcgaattcatgcgtacagccagctgctggaatcgtacaggtcattaaccctgggctatatggcagaagcttttggtgttggtgtggagttcattgatcaggaactctccaggtttattgctgctgggaggctacactgcaaaatagataaagtgaatgaagtagtggaaaccaacagacctgacagcaagaactggcagtaccaagaaactatcaagaaaggagacctgctatt

SEQ ID NO: 6726 - DNA, 272 bp, Bos taurus
  Clone ID: 29-LIB3057-017-Q1-K1-H1
agggtaagtgccctctgttcaatgcccccagccatgcccagagctcatgccaggctcctgcagtgactgccgtgccctccccaggccccacgtgcatggacgcttcctaggtgcgtgcccgctccttgctgaagtctacagaggagatggggccttaatcaggcctgtgaaatgcctgcccctggaaggccgccaggctggcagagttccagaagactctgggaactctggagtgaagttctcagacgccaggtctacagggactggacgcc

SEQ ID NO: 6727 - DNA, 415 bp, Bos taurus
  Clone ID: 29-LIB3057-017-Q1-K1-H9
tcgcaacgcctgcctccgagcagcatctgcgccgcggccgccgagggtttctctggccagtgttgccggcacctgtctgcagcatggggaatatctttgcaaacctcttcaagggcctttttggctaaaaagaaatgcgcattctcatggtggtcctagatgctgctggaaagaccaccatcctgtacaaactgaatctgggtgaaattgtgaccaccattcccactattggcttcaacgtggataccgtggagtacaagaacatcagcttcactgtgtgggacgtgggtggccaggacatgatccggcctctgtgtcgccactactttcaaaacacacatggtctcatctttgtgagcgacagcattgacagatagcgtttgaatgaggcccgtgtgtgtctcatgaggatgtt

SEQ ID NO: 6728 - DNA, 347 bp, Bos taurus
  Clone ID: 29-LIB3057-019-Q1-K1-H1
cgactcttagcttgtcggggacagtaaccgggacccgtgtctactcctgttgcctgcgcctgctgacccgtagccaccatgcgtgagtgcatctccatccacgttggccaggctggtgtccagatcggcaatgcctgctgggagctctactgcctggaacacggcattcagcccgatggccagatgccaagtgacaagactattgggggaggagacgactccttcaacaccttcttcagtgagacaggggctggcaagcatgtgcccagggcagtgtttgtagacctggaacccacagtcattgatgaggttcgcactggcacctaccgccagctcttccaacctga

SEQ ID NO: 6729 - DNA, 290 bp, Bos taurus
  Clone ID: 29-LIB3057-020-Q1-K1-H1
ctggtgctgctttcaccactgacgccccaggctgtagtcaccctgctccagggctccagacatgccttcggtggtggtgggaaggctgctccaggcagccaccaactaccgcaatgggcacacgggccagctctcagccatcacagtgtttctgctctttggagggtccctggcccgaatcttcacctccattcatgaaactggagatcccctcatggctggaacctttgtagtctcttctctctgcaacggcctcatcgctggccaggtcctcttctactggaaatgcc

SEQ ID NO: 6730 - DNA, 420 bp, Bos taurus
  Clone ID: 29-LIB3057-021-Q1-K1-H1
ggtactctgagtatcgcttccctgaagagctcacccagaccttcatgagttgcaacctcatcactggaatgttccagcgattggacaaactgaggaagaatgcctttgccagtttcattctctttggaaccaacaatagcagctccatttctggggtctgggtctttcgaggccaggagcttgcttttccgctgagtccagattggcaggtggactacgagtcatacacatggcggaaactggatcccggcagcgaggagacccagacgttggttcgagaatacttctgctgggaaggggccttccagcatgtgggcaaagccttcaatcagggcaagatcttcaagtgaatacctcttgccatcgcccagctgcctgcacctgcccttcggggagaatgggggtcattaaaggaaactg

SEQ ID NO: 6731 - DNA, 405 bp, Bos taurus
  Clone ID: 29-LIB3057-022-Q1-K1-H1
accgctgactattctcaaccaaccataaagatattggtaccctttatctactatttggtgcttgggccggtatagtaagaacagctctaaaccttctaattcgcgctgaattaggccaacccggaactctgcttggagacgaccaaatctacaacgtaattgtaaccgcacacgcatttgtaataatcttcttcatagtaataccaatcataattggaggattcggtaactgacttgttcccctaataattggtgctcccgatatagcatttccccgaataaataatataagcttctgacttcttccttcctcattcctactacttctcgcattctctatagttgaagctggggcaggaacaggctgaaccgtgtacccttccttagcaagcaaactagcccatg

SEQ ID NO: 6732 - DNA, 270 bp, Bos taurus
  Clone ID: 29-LIB3057-023-Q1-K1-H1
tcggtttaagaagaaatttgcctgcaatggtactgtaattgagcatccataatatggagaaggaattcagctacagggtgaccagcgcaagaacatatgccagttcctggtagagattggactggctaaagactaccagctgaatgttcatgggtgttaagtgcttttggctgattgaagcttaagtgaggatttccttgcaatgatgagaattttacttctgtcccttgtcacaagtttaaaaacctcatagtttgtataatgtatcca

SEQ ID NO: 6733 - DNA, 444 bp, Bos taurus
  Clone ID: 29-LIB3058-002-Q1-K1-H1
gcaaaaaggagaggccgagaagcgctttagcgataagagtggtgcacccgtagcggcacggcatggcggccacggcgtactccgtggcgctcctcggcggcgcacgcctgccggccgccctcctccctcggcgcagcagcgtgtgccaccaccagcttcgcctccaagacgcaccgaggctctccctgcaccgtgccagggccgcttccgaggacacgtcggcctccggcggcgacgagctcatcgaagacctcaaggcaaagtgggacgccgttgaggacaagcccaccgtcctcctgtacggcggcggcgccgtcgtggcgctatggttgacgtccgttgttgtcggcgccatcaacgccgtgccgctgctccccaagatcctggagctcgttggcctcggctacaccggctggttcgtgtaccgctacctcctcttcaagg

SEQ ID NO: 6734 - DNA, 433 bp, Bos taurus
  Clone ID: 29-LIB3058-002-Q1-K1-H9
cggacgcgtgggcggacgcgtgggttcgtactggaaatcagaatcaaacgagcttttacccttttgttccacacgagatttctgttctcgttgagctcatcttaggacacctgcgttatcttttaacagatgtgccgccccagccaaactccccacctgacaatgtcttccgcccggatcggcccggcgaggccgggccttggagccaaaaggaggggcggtgccccgcttccgacccacggaataagtaaaataacgttaaaagtagtggtatttcacttgcgcccggaggctcccacttatcctacacctctcaagtcatttcacaaagtcggactagagtcaagctcaacagggtcttctttccccgctgattccgccaagcccgttcccttggctgtggtttcgctggatagtagacagggacagtggg

SEQ ID NO: 6735 - DNA, 371 bp, Bos taurus
  Clone ID: 29-LIB3058-003-Q1-K1-H1
gccatcccgtggcataaacccagatgaggctgtggcatatggtgccgctgtccaggctggtgtgctctctggtgatcaagatacaggtgacctggtactgcttgatgtatgtcccctgacacttggtattgaaactgtgggaggtgtcatgaccaaattgattccaaggaacactgtggtgcccaccaagaagtctcagatcttttctacagcctttgatattcaaccaactgttgccatcaaggtctattaaggtgaataacccgttactaatgcaaatcactttccggaaacttctaccttgtgtgcactatttgatactccctagggggtcccacaaattgagagtcacctttgagatatatgtgaat

SEQ ID NO: 6736 - DNA, 370 bp, Bos taurus
  Clone ID: 29-LIB3058-004-Q1-K1-H9
cagcacgtctctggagagattatgggaggccacgccatccgcatcctaggctggggagtggagaacggcaccccctactggctggtcggcaactcctggaacactgattggggtgacaatggcttcttcaaaatcctcagaggacaggaccactgtggaatcgagtcggaaatcgtggctggaatgccgtgcactcatcagtactagaagatctgatctgcttgggggcctgtctgctggcccagggccagttttcccctaaatacagccacttggactggggatgaggtggggggactggggggagtgggatgtctcttatttttagaattacgataagatctcacggtttgtagacagggtctgagca

SEQ ID NO: 6737 - DNA, 273 bp, Bos taurus
  Clone ID: 29-LIB3058-006-Q1-K1-H9
cggacgcgtgggcggacgcgtggggcacggcgacctggagctggcagcaaagttcgtcaatcagcggaagggggagtccagacgagcagcccagggctggctgaaggaagcccgcgtgaccctggaaaccaggcagatagtggagattctgacagcatatgccagtgctgtggggatagggaccactcaagtgcaacagcaggaaggcctatgaagagttccgtaaagtcatgttctatatcagaggaaatcggctgtaataccttaagggtt

SEQ ID NO: 6738 - DNA, 347 bp, Bos taurus
  Clone ID: 29-LIB3058-007-Q1-K1-H9
gcatcaagaagatattcgccttatatacaccttttatctagctactatttgatcaacagattgggaagcacactaggatgcccagattttggctctcttatatgtcaactctgaccattctatggtggttgaaggaatgtctcgggaagtcattaatcgtaaccataatctttttatatagggttatttggttccaactgatgatataccatgttattattttacaacctcctgagggataatatctgaataatgattattaaatgccactctctacttcataatatgttaccaataaagttttactttgaaacctatattcatttcctatatcggatgaatatact

SEQ ID NO: 6739 - DNA, 418 bp, Bos taurus
  unsure (379): unsure at all n locations; Clone ID: 29-LIB3058-008-Q1-K1-H1
gttctagatcgcgagcggccgcccttttttttttttttttaattattcaggtttattgagatataattgacatatagcactgtatacatttagggtgtacagcataatgatttgacttacatcttctgtaaaatgattgccacaataagttaatatccaacatctcatatagattaaaaaacaaaaatttttttaaccttgtgaagagaatctgtaggatctactctctggacaaaattcatttgcttctctatgaactagactcacttgcattactattagttttcaacaatttgcagacctgtaaaatatctgtaagacaagggaagaaaggccccctttacaatcatatgatatcagaagggtccactagaacctncttgaacccactcagaggacaccccagagttgttttgcc

SEQ ID NO: 6740 - DNA, 433 bp, Bos taurus
  Clone ID: 29-LIB3058-011-Q1-K1-H1
ctcaggaaaaaaagaaccattcggatatatgggaatagtttgggctataatgtcaatcggatttctaggtttcatcgtatgagcccaccatatattcactgtcggaatagacgtcgacacacgagcctacttcacatcagccactataattattgctattccaaccggggtaaaagtcttcagctgattggcaacacttcatggaggtaatatcaaatggtctcctgctataatgtgagccctaggctttattttcttatttacagtagggggtttaactggaattgtcttagccaactcttccctcgatattggtcttcacgacacatactacgttgtcgcacatttccactatgttttatcaataggagctgtatttgctattatagggggatttgttcattgattcccactattctcaggttatactctc

SEQ ID NO: 6741 - DNA, 438 bp, Bos taurus
  Clone ID: 29-LIB3058-013-Q1-K1-H1
aggtattatgcctttgacgaggccttcgtgcgggaggtgctgggcaaaaagctgtctaagggcaccaagaaagacctggatgatatcagcaccaaaacaggcatcaccctcaagagctgccggagacagttcgacaactttaagcgcgtcttcaaggtggtggaggaaatgcggggctccctggtggataacatccagcagcacttcctcctgtccgaccggctggccagggactatgcagccatcgtcttctttgccaacaatcgctttgagacagggaagaaaaaactgcagtatctgagctttggggactttgccttctgtgctgagctcatgatccaaaactggaccctcggagccgtcgactcccaggtggatgacatggacatggacttggacaaggagtttctccaggacttgaaagagctgaaggtgctt

SEQ ID NO: 6742 - DNA, 378 bp, Bos taurus
  unsure (15): unsure at all n locations; Clone ID: 29-LIB3058-015-Q1-K1-H9
tagatcgcgagcggncggcctttttttttttcttctttttttaagatagaaagattttggttattaatgaccccaaccgtgtttctttagatacaggagttttgaactcaaatacttagagaaaacaagttaagattgcattatgctgcaactcattaccagtgacatattgcaaagcaaaacagcttggaaaagaaggggcaggaaaggggagtgagggagggaagataaagaaaaggaattaagttgatcaagtggaattctgttttttcctttaattcttgggaaccatgaagtccttgcaagcacagttctgttttgcagattattttccaaacgtgttcaagatggaaccaaaacggagaattcctttagaac

SEQ ID NO: 6743 - DNA, 466 bp, Bos taurus
  Clone ID: 29-LIB3058-019-Q1-K1-H1
gacaaggtcctggaggtgcctccggttgtgtactcccggcaggagcaggaggaggagggccggaagcgctacgaggcccagaagctggagcgcatggagaccaagtggcgcaacggggacattatccagcctgtcctgaacccagagccgaacacggtcagctacagccagtccagcttgatccacctggtggggccttccgactgcaccctgcacggcttcgtgcacggaggggtcaccatgaagctcatggacgaggtggctgggatcgtggccgcacgtcactgcaagaccaacatagtcacggcctccgtggacgccattaacttccacgacaagatccgaaaaggctgtgtcatcaccatctctggacgcatgaccttcaccagcaataagtccatggaaaatgaggtcttggtggacgctgaccccgtggtgaacaaacttgtgaagcgctaccgggccg

SEQ ID NO: 6744 - DNA, 433 bp, Bos taurus
  Clone ID: 29-LIB3058-019-Q1-K1-H9
agcttctggtcttacgttgagatctttaatccattttgagtatatttttgtatatggtgatccagcaatcccactgctgggcatacacactgaggaaaccagaagggaaagagacacgtgtaccccaatgttcatcgcagcactggttataatagccaggacatggaagcaacctagatgtccatcagcagatgaatggataagaaagctgtggtacatatacacaatggagtattactcagccattaaaaagaatacatttgaatcagttctaatgaggtggatgaaaccgagcctattatacagagtgaagtaagccagaaggaaaaacaccagtacagtatactaatgcatatatatggaatttagaaagatggtaacgataactctgtatacaagacagcacaagagacactgatgtatagaacagtct

SEQ ID NO: 6745 - DNA, 320 bp, Bos taurus
  Clone ID: 29-LIB3058-020-Q1-K1-H1
gtgccttcctactcgtcccacagctgctggaatatgagccacgctctggggagcaagttccccttctcctgaagatgaagaggagcaaactggcactaagcaaggccatcgagagtggggatactgatctggtgttcacagtgctgctgcacctgaagaatgagctgaaccgaggagattttttcatgacgcttcggaaccagcctatggccttaagtttgtaccgacagttctgtaagcatcatgagctggagacactgaacgacctttacaaccaggatgacaaccaccaggagctgggcagcttccacatccgagcc

SEQ ID NO: 6746 - DNA, 457 bp, Bos taurus
  Clone ID: 29-LIB3058-021-Q1-K1-H9
gttgatattttgataatcaatctctgatcttgcatggataccatgtttcttaaaagaattagtattttgggttatgcactgcttatggttgtaggattggggacttgtttatagaatcatagaaatgattttctataatactttcttttaaataaaaatgtactgggatgtaatatgaagatataatataatatgcagtgcattatccaaaaaaagtagataattggtggaataggatgtagtgatgataatacctttttgtttttaattttcagtattcatgccatagtaaaatattactgtttggaaactttggtatattcttgtggctactctttttaattgaactgagcttgtgttgggcagctctcttttggggtatgcttgtgtactttttaacagaggtgttaaagtctagcctgactccatgtcctgaaagaacatatcagtatttaag

SEQ ID NO: 6747 - DNA, 424 bp, Bos taurus
  unsure (335),(415): unsure at all n locations; Clone ID: 29-LIB3058-023-Q1-K1-H1
cggacgcgtgggttgggggctttgatacggaggccgacgagttctctgacttcgaccgcctgcgcacggccctgccggcctctgggagcagcacaggggagctggagctgcttgccggagaggtgcccgcccgcagccctggcgccttcgacatgagcggggtcgggggctctctggctgaggctgtggggagccccccgcccgcggccgctccgacccccacgccgcccacgcgcaagacgccagagtcttttctgggccccaacgcggctctggtggacctggactcgctggtgagccgggccgggccccgcggtgcccggggccaaggcctncaatcctttcttgccaagcggagccccgggcaccgggccccttccaaatttttccaccaaccccttccagcctgcgcccnccgcgacgc

SEQ ID NO: 6748 - DNA, 405 bp, Bos taurus
  Clone ID: 29-LIB3058-023-Q1-K1-H9
gctggctgttcggttttccgaggagcggctgctactggtggcctttttgcagatatagggttgtcactgaacactggccctagagaagctcagccatcaatatgtccaagtacaaactgattatgttaagacatggagagggtgcctggaataaagagaaccgcttttgtagctgggtggatcagaaactcaacagtgatggactacaggaagcgcggaactgtgggaagcaactcaaagcactaaactttgagtttgatctcgtgttcacatccatcctgaaccggtctatccacacagcctggctgatcctggaagagctggggcaggagtgggttcctgtggagagctcctggcgtctcaacgagcgtcactacggagccttgatcagtctcaacagggagc

SEQ ID NO: 6749 - DNA, 432 bp, Bos taurus
  Clone ID: 29-LIB3058-025-Q1-K1-H1
gccgcacctccagtccctgcagctggactccaaccgcctcacctacgtcgagccccggatcctcaactcctggaagtcgctgaccagcatcaccctggccgggaacctctgggactgtgggcgcaacgtgtgcgccctggcctcctggctcagcaacttccaggggcgctacgatggcaacttgcagtgcgccagccccgagtacgcgcagggcgaggacgtcctggacgccgtgtacgcgttccacctgtgtgaggagggagccgagcccaccagcggccacctgctctcggccgtcaccaaccgcagcgacttggggttccccgccggcccggccaccacactcgctgacgacagggaggggcagcccgacagcacgcccgagcctgtcaccgtggctctccccggcgaacacgctgagaatgcggtgca

SEQ ID NO: 6750 - DNA, 366 bp, Bos taurus
  Clone ID: 29-LIB3058-027-Q1-K1-H1
accgttcggattcccggtcgaccgcagcgtccggggacatcacctactgtgagctcaatgctcgctttggcctgcgtgccatcgtggccgatggtgtcaccttcaagagtggcagcagctacctggcgctcgccacactccaagcttatgccttcatgcacctcttcttccagttcaagaccacagcccccgacgggctcctcctgttcaactcaggcaatggcaacgacttcattgtcatcgagctggtcaaggggtacatccactacgtgtttgacctgtggaatggcccgtccttgatgaaggggaactcagactaaccagtcaatgacaaccagtggcacaactttgttgtgtccaaggacc

SEQ ID NO: 6751 - DNA, 169 bp, Bos taurus
  Clone ID: 29-LIB3058-030-Q1-K1-H1
gaaggggccgggagaggccgcgttcagtcggatcccggcagcagctgcagcgcctctcgtcttgtaggctctcctagctatcgccttttcgcttccggaaacatggcctccggtgtggctgtctctgatggggtcatcaaagtgttcaacgacatgagagtgcgtaagt

SEQ ID NO: 6752 - DNA, 346 bp, Bos taurus
  Clone ID: 29-LIB3058-032-Q1-K1-H1
gctatgggttgtcatggaatatttggctggaggttctttgacagacgtggtaacagaaacttgcatggacgaaggtcagattgcagctgtgtgccgtgagtgcctgcaagctttggagtttctgcattcgaaccaagttattcatagagacatcaagagtgacaacatcctgttgggaatggatggctctgtcaagttaactgattttggattttgtgctcagatcaccccagagcagagcaaacggagcaccatggtgggaacaccgtactggatggcaccagaggttgtaacccggaaagcctatgggcctaaagttgacatttggtccttgggcatcatggcc

SEQ ID NO: 6753 - DNA, 221 bp, Bos taurus
  Clone ID: 29-LIB3058-034-Q1-K1-H9
aaacaaagcagcccaaccaaaaacaccaccagacagaaaacacgacacacaacacacaaaacacaccgcaacccacaaacacaaagaaaaaacaagaaacacagcacgccaccgaccaacacaaaagacccacgcgaacacaccagcaaccccaaccaccgaacacgcaccagacgccaagccccagacccaaccaacaaccaacaaaacacaaaccaaaa

SEQ ID NO: 6754 - DNA, 430 bp, Bos taurus
  Clone ID: 29-LIB3058-035-Q1-K1-H9
tcgaaggaatggtatcgtatgtccgctatcttgaatctccactctttcgacccctttgctgatgcaagtaagggtgatgatctgcttcctgctggcactgaggattatatccatataagaattcaacagagaaacggcaggaagacccttactactgtccaagggatcgctgatgattacgataaaaagaaactagtgaaggcgtttaagaagaaatttgcctgcaatggtactgtaattgagcatccagaatatggagaagtaattcagctacagggtgaccagcgcaagaacatatgccagttcctggtagagattggactggctaaggacgaccagctgaaggttcatgggttttaagtgcttttggctcactgaagcttaagtgaggatttccttgcaatgagtagaatttcccttctgtcccttg

SEQ ID NO: 6755 - DNA, 387 bp, Bos taurus
  Clone ID: 29-LIB3058-036-Q1-K1-H1
tgaggtttgggggtcacatggccccgtttgcagttgggactgagccctattggaggaaagcaaggcagggccctgacctcacatccagcccggagcaaggggccctcattgctccagacccgattcccaccccacccccggggtgaggtcccagcagggatcagtcccagtatcctcttcccaacaggcctgggggcagccctccccctgcccagaccctttccaccctccagcccctcctgccctgcctgctgccctctctccaggccccttccacccacacacagtgaaataaaagcctcccaccccgcaaaaaaaaaaaaagcaaaaacccaaaacatgtttaaccttatgaactgaaatgaaaaaaaaaaaaagggcggccgc

SEQ ID NO: 6756 - DNA, 423 bp, Bos taurus
  Clone ID: 29-LIB3058-036-Q1-K1-H9
tctagatcgcgagcggccgcccttttttattttttttattacgtaaggttttcttttagttaaaagatcattcacaaaataccatatccatagatttactttctgtcatatagctgaatgtgttaagtgtttggaattccattcttacatttaaaagtcaactggattgcccagaagtttagatgaatttgttttgttcttaatcttttccacattggagatgtaagtaggtcatctgaaagcatcaggtttgattacaaccacataatgcatgtctttctttaggtaagtattggtgttacacaaatggttcttatctcagaagcaaagatgacaggtggaaggaaggacaggaggcagagttctgtgaattgctgagacctggggacagggagaagccgagggcggcagctaacgaggagc

SEQ ID NO: 6757 - DNA, 431 bp, Bos taurus
  Clone ID: 29-LIB3058-037-Q1-K1-H1
acagaatgcaaaggaacatgctgtggtttatttcttcagcctcagtacatcactggagacacaggacctctgaccatctgatttcccaataaagaaaaacccctcttctgaggctgctttcccgaaactccccttgcatctttccctcttcatctgtccatctcttatctgagcatcctacatttatcctgtgttctgcctttgttttaattttgactcagcctacagcagaagggttctctgggtccccagtttccagttgacagtatatccttgacttcccccaccccccaacctctctacatctcccttgtggttctctggccacctgtgcatgcatgtgtacttctgcctggatctgtggtatgtgcgggtgcgtgtgcatgaatctgtcacatagagggagcctgagctagagcctcaagagcatt

SEQ ID NO: 6758 - DNA, 344 bp, Bos taurus
  Clone ID: 29-LIB3058-037-Q1-K1-H9
cgtgtgactacaaatcggctcacaaggtactcaaggggcacgacgcccagggcacgctgtccaaaatcttcaagctgggaggacgagacagccgttccgggtccccgatggcaagacgctgaagcccagctcccctcccagaaccccgtccccagcttcttaatacaactgcctcgacgctaaccattgtctaaattcccaagtgcagcaggcatccccccaccctgcccacatgcgcgtcctgcaggctcctggccagcggctcaatggagaagacggtgcagctgtcagcttacccttgaagatcagcgaggtccctgagggtccaaggtgggcgaaccttc

SEQ ID NO: 6759 - DNA, 430 bp, Bos taurus
  Clone ID: 29-LIB3058-038-Q1-K1-H1
gaagtgtactcatctctgcgtagggagtatcagtagtgtgaaagagaaggcgttggtgggtttcaatccctggagcctggccttgacggctgccctgatccccgccctgtggttttgttgtgggcatcactcaccacagatcccaagtgtccctgggtggcacagggaatccgaacttctcagaaactaggggcagatcagatccactgtggtggtctaacacagagtttcttttaaatgcggtctaatgcggagtttcttttaaatgcttcaaagacgtgtccttaaaatttcagcctgcttattaaccagtgagccattgtgcttagaaccagtgctggaaaaatgtttttttaaaattgccaaaaagttaaatgaaaatgtactatataaagcaaagctgtatatactaaacattttttagcagagt

SEQ ID NO: 6760 - DNA, 202 bp, Bos taurus
  Clone ID: 29-LIB3058-040-Q1-K1-H1
aagacccgggagacgaccccaccctgagcgcaaggacaggcaccaaccaggcagaaccccggacagagacctctgaagatgacacgggagacaaggcccctaacagggtcaaacccatcaaaaaagtgcccaaacccgagccaccggattacacgacgctgaagacccgctccaagaagaagacctttgcaaggggcgactc

SEQ ID NO: 6761 - DNA, 424 bp, Bos taurus
  unsure (287): unsure at all n locations; Clone ID: 29-LIB3058-041-Q1-K1-H1
catggagctgctttagctgacccggcgttgccgttagcttccgagatgagcgctgccgaggccgaccgctgggcgtggctgctggtgctcagcttcgtgtttgggtgcaatgtgctcaggatcctcctcccgtccttctcctttttcatgtcccgggtgctgcagaaggacgcagagcaggagtcccagatgcgagccgagatccagggcatgaagcaggagctctccactgtcaacatgatggatgagttcgccagatatgccaggctggagaggaagatcaacangatgacggataaactcaaaactcatgtgaaagcacggacagctcaattggccaagataaaatgggttataagtgttgccttctacatattgcaagccgccctgatggtctcgctcatctggaagtattactctgtcc

SEQ ID NO: 6762 - DNA, 443 bp, Bos taurus
  unsure (281),(410): unsure at all n locations; Clone ID: 29-LIB3058-043-Q1-K1-H1
cctggagaaggatccccagcaggaagacttcttacagggcagaatgcctgggaacccatatagcagcaacgagccaggcatcgggcccctcatgcgggacataaagaacaagatctgccaggactgtgacttggtggctctgctggaggatgacagcgggatggagcttctagtgaacaataaaatcattagtttggacctccccgtggctgaggtttacaagaaggtctggtgtaccacaaatgagggagagcccatgaggattgtttatcggatgcggnggctgctgggggatgccaccgaggagtttattgagtccctggactccaccacagatgaagaagaggatgaagaagaagtgtacaagatggctggtgtgatggcccagtgtgggggcctggagtgcatgnctaacaggctggcagggatcaaagatttcaagc

SEQ ID NO: 6763 - DNA, 429 bp, Bos taurus
  unsure (97),(104),(109),(405): unsure at all n locations; Clone ID: 29-LIB3058-045-Q1-K1-H9
cgacgagcggacccgtggacgcgcgaactaggcggaatctgccatgttcctgggtaactcgttcttgaaaggtggcggaggcggcggaggaggcggnggcctgngcggnggtctagggaatgtgcttggaggccttatcagcggggctggaggcggcggcggaggcggcggcggcggcggcggtggcggcggcggaaccgccatgcgcatcctgggcggggtcattagcgccattagtgaggcggctgcgcagtacaacccagagcccgtgccccctcgcacacattactccaacattgaggccaatgagagtgaggaggtccggcagttccggaggctttttgcccagctggctggagatgacatggaggtcagcgccacagaactcatgaacattctcaacanagtggtgacccgacattctgatct

SEQ ID NO: 6764 - DNA, 432 bp, Bos taurus
  Clone ID: 29-LIB3058-047-Q1-K1-H1
aaataaatgtagtgcaaatagttgacatatgacttgggtccagagtctatagagaacagcttggaactcaatcaagaaacagtaactcagtgaaaaacatcagcaagtgatttgaactgatactttctttaccagaagatgtttggatggctggtcagcaaatgaaaagacacttaatattatcagtcagagagaaatgctgattaaaaccacaaggagataccagtacacacccaccagaatagctgagtgtaaaaagactgaaaatatcaagtgtcaccaagaatgtagagcaacaagaagcacacactgctggtgggaaggtaaaatggtacaataactctggaaaacaatttgacagtttcttataaagttaagtatatacttatgataggacctagaaattctaagtatttacccaaactgaaaaca

SEQ ID NO: 6765 - DNA, 430 bp, Bos taurus
  Clone ID: 29-LIB3058-049-Q1-K1-H1
atgaaattaaaagatgcttactccttgtttggaaagttatgaccaacctggacagcatattgaaaagcagagacgttactgtgtcaacaaaggtctgtctagtcaagacagactatgccaaagccaaagccaaaaagactatggcttttccagtggtcatgtatggatgtgagagttggactataaagaaagctgagcgctgaagaattgatgcttttgaactgtggtgttggagaagactcttgagagtcccttggactgcaaggagatccaaccagtccatcctaaaggaaatcagtcctgaatattcattggaaggactgatactgaagctgaaactccaattactttggctgcctgatgcgaagagctgactcatttgaaaagaccctgatgctgggaaagattgagggcaggagaaggggatgac

SEQ ID NO: 6766 - DNA, 415 bp, Bos taurus
  Clone ID: 29-LIB3058-051-Q1-K1-H9
atccattgcctacactctgaccagcaactatcccggagatcacacccttcctgctgttcatcatggccaacatcccactgcctctgggcaccatcaccatcctctgcatcgacctgggcaccgacatggtccctgccatctcattggcgtacgaggctgccgagagtgacatcatgaagagacagcccaggaacccacgcactgacaagctggtcaatgagagactcatcagcatggcctacggacagatcggaatgatccaggctcttggtggcttcttctcctactttgtgatcctggcagaaaatggcttcttgcctggcaacttggtgggcatccggctgaactgggatgaccgcacggttaacgacctggaggacagttatggacagcagtggacctatgagcagaagaa

SEQ ID NO: 6767 - DNA, 322 bp, Bos taurus
  Clone ID: 29-LIB3058-052-Q1-K1-H9
agcattgattacaccttttccccacgatgaccccacactggcgtgacaaccccccttaggatgaaaatgacgaattgtccacgtaacgcccaaacgtggctctttaatccccttctaattctgaatatttctcgtggggttactataatgcctattaatacataggcttaatgatgagaggattagaaaaactaaagaaaatttcagaaaccaaattttcaaattgctcgtcacacacaatgggtcattgaactggttgtgactgattgaacttcatttgtgggaccacccaacagagtgagcttttaccacgggtcttaat

SEQ ID NO: 6768 - DNA, 424 bp, Bos taurus
  Clone ID: 29-LIB3058-053-Q1-K1-H9
attttaaccagtttatcaaagctaatgtgaagtggggtcgtgatgatattgaaaatatagcaagagaagtagaaggaaaaactccagaagaagtcattgaatactcagctgtgttctgggaaagatgcaatgagctgcaggacatagaaaagattatggctcagattgaaagaggagaggcaagaattcagagaagaattagtatcaaaaaagcacttgacacgaagattggacggtacaaagcaccttttcatcagctgagaatatcttatggtactaacaaagggaaaaactacactgaggaggaagaccgcttcctgatctgtatgcttcacaagcttggattcgacaaggaaaacgtgtatgatgagctgcggcagtgcattcgcaactctcctcagttcagattcgactggtttctaaa

SEQ ID NO: 6769 - DNA, 441 bp, Bos taurus
  Clone ID: 29-LIB3058-056-Q1-K1-H1
actttgtttacagataaagattttaagactaggtggaattgctcactttcttagtaggctaatggatccaccatcgaatgaagcagtgttactctccataaaacacctgatggaactgaatgctctggataaacaagaagaattgacacctcttggagttcacttggcacgattaccagttgagccacacattgggaaaatgattctttttggagctctgttctgttgcttagacccggtactcaccattgctgctagtctcagcttcaaagatccctttgtgattccactgggaaaagaaaaggtcgcagatgcaagaagaaaggaattggcataggatactaaaagtgaccacctgactgtcgtgaatgcatttaagggatgggaaaaagctaaacaacgtggtttcagatatgaaaaagactattgctggaaatattt

SEQ ID NO: 6770 - DNA, 392 bp, Bos taurus
  unsure (357): unsure at all n locations; Clone ID: 29-LIB34-001-Q1-E1-H1
caaacctacgcttagcaatttctgcagaaagcatccctaaaggcactcagcaagacaccaccaaactgaccgcatcaaagagaaatttcatcatctacagagggctcctcttcaggtgttcctgcaaagcttggtgtgaagacagctttccaggcttacgtgtcttgcatgatgttcctgctgcaaggtgcccagatgctgcagatgctggagaaatccttgaggaagagccttcctatgtccttaaaggtttatgggaccgtcatgcacatgaaccatggaaacccattcaatctaaaggccctggtggacaagtggcctgattttcagaccgtggttatccgccctcaggagcangacatgaaagatgaccttgatcactacactaatac

SEQ ID NO: 6771 - DNA, 224 bp, Bos taurus
  Clone ID: 29-LIB34-002-Q1-E1-H1
caaaccacactatctccactcgctcagacctgtggaagattagcgaccatgatttccaatgggataggaaccgtcaccgctggaaaaaggagtatatgtcttctccctttgctgcttattggcctctggggctgtgtgacctgtcatcggagccctgtggaagacgtctgcacagccaaacctcgggacattcctgtgaatcccatgtgtaattaccgttcctc

SEQ ID NO: 6772 - DNA, 400 bp, Bos taurus
  Clone ID: 29-LIB34-003-Q1-E1-H9
cgacgcaggtggaccatgtggactttggtgagctgggtggccttagtgacagggctggtggttggaaaacagtgcccagacggtcagctctgccctgtggcctgctgcctggacccgaatggagccacctacagctgctgcaatcccgttcaggaccagcggccgtctgtgctgagccagcgtctgggccgaccctgccaggccgatggccactgcgctcctggctactcctgcatcctcactgtctcagggacctccagctgctgcccgttcccagaggctgtgtcatgtggggatggccgccactgttgcccccgggggcttccactgcaacgctgacgggcggtcctgcttccaaagatcagataccaagcccctggatgccgtcaagtgccccgac

SEQ ID NO: 6773 - DNA, 408 bp, Bos taurus
  Clone ID: 29-LIB34-005-Q1-E1-H1
ttcagcgatagttatgacctcccggttacgtgcgttgggtggaagaattaataacatacgcacctcagaattacccaaagaaaaaacgcgatcagaagtcatctgtagcgtccgctttttagatggcttggtacagacctttaaagttaacaaacaagataccggtcaagttctcctggacatggcttacaactacctgggtgtgactgagaaggagtatttcggtttacagcatggtgatgactcactggactctcctagatggcttgaagcaagcaaacccatcaggaagcagttaaaaggaggtttcccctgtaccctgcattttcgagtaagattttttatacctgatcccaacacactgcagcaagaacaaaccaggcatttgtatttcttacaactgaagat

SEQ ID NO: 6774 - DNA, 368 bp, Bos taurus
  Clone ID: 29-LIB34-006-Q1-E1-H9
actagttctagatcgcgggcggatgtacatgagactgtgaagaataatatcccaactaagcttcgtgtgctccgttcaattctggagaatttgagaagcaagatacagaaattaggatcggatgtctcaactcagatggaatactgccgcaccccgtgtacagttacttgcaatattcctgtggtgtctggcaaagaatgtgaggaaatcatcaggaatggaggtgaaacatctgaaatgtacctcattcagcctgaggattctagcaaaccatatagagtatactgtgatatgaaaaccggaaaaggatggatggcagtaattcagaagcgtcaagatggtaatgttgactttggcacgaaatggga

SEQ ID NO: 6775 - DNA, 359 bp, Bos taurus
  Clone ID: 29-LIB34-007-Q1-E1-H1
atcatggtgctcgattagttgtcatacctttaattagtactctctcgcttattctttgggatttcttctacctttttcaaaggaaaaatggatgagttttatgtagttgatgagatccaaatgatgcgtatttcagagtctggtgattataatgggtttttaaacatttggtaccaaattatattgtttcacagtagtaattagaatgaaaatctggaagctagtttctgtgaattatctactgattttatatcatcaggaagctccatacttgctaatttcaccaataaatcaatttactattcattaaccaacaaattgtgttctgagaatcctatcacgaattggggaatttaaaa

SEQ ID NO: 6776 - DNA, 424 bp, Bos taurus
  unsure (418): unsure at all n locations; Clone ID: 29-LIB34-008-Q1-E1-H1
gccaacgatgacaatgtcactcaggtgcggactttctatttgaaagtgctgaatgaggagcagaggaaacgcctgtgtgagaacattgcgggccatctgaaagacgcacagctttttatccagaagaaagcggttaagaacttcagcgatgtccatcctgaatatggctcccgcatccaggctcttttggacaaatacaatgaggagaaacctaagaacgcagttcacacctatgtgcagcatgggtctcacttgtctgcaagggagaaagctaatctctgagggtcggaggcctggccctgcaccacgttgccgtccgcttgtgaagcagagcatggtgttcacacctgtacccacggatcgctggatggaagattctcctgcactagacatgcaaatgcaagtttgtgtctgtaanatgata

SEQ ID NO: 6777 - DNA, 404 bp, Bos taurus
  Clone ID: 29-LIB34-008-Q1-E1-H9
cgacatactggaagactgggtctgggagatggtagccgcactgaagtctcagctggcccagtcagtgaatgtggggctggcagaatgggtcaccctggctcacaaccactacaccactgccgtccgcaacactcgcctcgtcggccaggagatcgcagctcttctccagtggctgcaggaatctgttcaattttctccaagccatgttcatctaattgggtacagcctgggtgcacatgtctcaggattcgctggcagttacatgagcagaaagcacaagattggaagaattacagggctggacgccgcaggccctttgtttgaaaaagcctccctcagtgaccggctttcaccagatgatgccaattttgtggacgccattcacacctttacctgggagcaca

SEQ ID NO: 6778 - DNA, 388 bp, Bos taurus
  Clone ID: 29-LIB34-009-Q1-E1-H9
agagagatgggcgagcgccgttccgaagggacgggcgatggcctccgttgccctcagccgatcgaaagggagtcgggttcagatccccgaatccggagtggcggagatgggcgccgcgaggcgtccagtgcggtaacgcaaccgatcccggagaagccggcgggagccccggggagagttctcttttctttgtgaagggcagggcgccctggaatgggttcgccccgagagaggggcccgtgccttggaaagcgtcgcggttccggcggcgtccggtgagctctcgctggcccttgaaaatccgggggagagggtgtaaatctcgcgccgggccgtacccatatccgcagcaggtctccaaggtgaacagcctctggcatgttgggac

SEQ ID NO: 6779 - DNA, 307 bp, Bos taurus
  Clone ID: 29-LIB34-010-Q1-E2-H1
attccttggagccttccctgatcttctttggggtccctggctccagagaccactcttcccagcccagctctgcaccccctcacagccacagcagccaccttggaatctacgtggatcatgttttctgtgtttggactccccatccccatctcggccacagaacttctcctggcctctggcgtcttctgcctggtgttctgggtggtcaggacctggcgggctcgggtccctcaaggcctgaagagtcccccggagccctggggctggcccctgctcgggcacatgctgatgttggggaagaacccac

SEQ ID NO: 6780 - DNA, 379 bp, Bos taurus
  Clone ID: 29-LIB34-011-Q1-E1-H1
aactgtttgcctcagtgcaaggtccacatcgcaagcctccgcttagcaatttctgcagaaagcatccctaaaggcactcagcaagacaccaccaaactgaccgcatcaaagagaaatttcatcatctacagagggctcctcttcaggtgttcctgcaaagcttggtgtgaagacagctttccaggcttacgtgtcttgcatgatgttcctgctgcaaggtgcccagatgctgcagatgctggagaaatccttgaggaagagccttcctatgtccttaaaggtttatgggaccgtcatgcacatgaaccatggaaacccattcaatctaaaggccctggtggacaagtggcctgatttttcagacgtgggtatccgccct

SEQ ID NO: 6781 - DNA, 390 bp, Bos taurus
  Clone ID: 29-LIB34-011-Q1-E1-H9
tctgaagctgccgtaaagcttatcaatgaatatgtgaagaataaaactcatggaaaaattgagaagctcttcaatgatcttgacgtgctcacaaatttaatcttgttgaattatatcttctttaaagcccagtggaagacgccatttaatcctaaccatacttacgaatcagagttccacgtgagccagaacgagagggtgattgtacccatgatgaccctttacctggaaaccccttacttccgggacgaggagctgggctgcacgctggtggagctcacgtacaccagcaacgacagcgccctcttcatcctccccgatgagggcaaaatggcaggacctgaaagcaaagctgaccccggagacgctgacgcggtggcgaaactccct

SEQ ID NO: 6782 - DNA, 383 bp, Bos taurus
  Clone ID: 29-LIB34-012-Q1-E1-H1
agagcctcagcagcgatgcgtttcttgactgtcgcgttcctgttcctggcactcagtgcctccgccctggccgagccggtgaaattcaaggactgcggttcttgggtcggagttataaaggaagtgaatgtgagcccatgtcccacccagccttgcaaactgcacagaggacagtcttacagtgttaatgtcacgttcaccagtaatactcagtctcaaagtagcaaggctgtggtacatggcattgtgatgggcatcccagttccctttcccattcctgagtctgatggttgtaagtctggaatcagatgccccatcgaaaaagataagacctataactacgtgaacaaactacccgtgaagaatgaatacccctccataaa

SEQ ID NO: 6783 - DNA, 365 bp, Bos taurus
  Clone ID: 29-LIB34-013-Q1-E1-H1
aaataatatattttatagatttatttatgaaacagagcatcacaatggcatagcagaattactggaaatattgggaagtataattaacggatttgccttaccactaaaagaagagcacaagattttcttattgaaggtgttattacctttgcacaaagtgaagtctctgagcgtctaccatccgcagctggcctactgcgtggtgcagtttttagagaaggacagcaccctcactgagccggtggtaatggcacttctcaagtactggccaaagacccacagtccaaaagaagtcatgttcctgaacgaattggaagagattctggatgtcattgagccgtcagagttcgtgaagatcatggagc

SEQ ID NO: 6784 - DNA, 346 bp, Bos taurus
  Clone ID: 29-LIB34-013-Q1-E1-H9
ggctgcaaggccccctgctttagaggggacgggggcatagtccgacagcggggcgtggtagggcgtgcgatggcgggagatggagccccgggttagggtcgtggctcgccggacgtaagtgcagctgactcggagctgggacggcaatggggcgttgatggcgtcttacctgtctcagatgctcatccgtcacattggagccaactttgaactctcgctgacttcgggctcccggggggaccagaacttgatgccatgggatgctgtgcgggcttaacgcggcacctttccgattccgagggggaggagacatacctggtagctcggactctgctacgagacagtc

SEQ ID NO: 6785 - DNA, 409 bp, Bos taurus
  unsure (234): unsure at all n locations; Clone ID: 29-LIB34-014-Q1-E1-H1
cgtggaagtcggtccggatggctagctgcgggatggcgcgccggaacccgctggataataaagtggccctagtaacggcctccactgatgggatcggttttgccatcgcccggcgtctggcccaggacggggcccacgtggtggtcagcagccggaagcagcagaatgtagaccgggcagtggcaacgctgaaagcggaggggctgagcgtcacgggcaccgtgtgccacgtanggaaggctgaggaccgggagcggctggtggccacggctgtgaagcttcatggcggcgtggacatcctgatctccaatgctgccgtcagccctttctttggaagcttgatggatgtccccgaggaggtgtgggacaagattctggacgttaacgtgaaggccacggccctgctgac

SEQ ID NO: 6786 - DNA, 296 bp, Bos taurus
  Clone ID: 29-LIB34-015-Q1-E1-H1
aacaccagacgccccacgaacgtgcggtgcgtgacgggcgagggggcggccgcctttccggccgcgccccgtgtcccgggacgaagggctctccgcaccggaccccagtcccgacgcggggcggtggcgcgccgcgcagacgccgccggggacgccggcgacggcccgcctgcggggacagctggggaacacgtatccaaagccaaccgacgctccagcgggactgccgtatcattacactctgcgcgggattctgacgtaaaggcgtgcagtcagaaacccacatatagccagct

SEQ ID NO: 6787 - DNA, 365 bp, Bos taurus
  Clone ID: 29-LIB34-015-Q1-E1-H9
attgtatctgagctgtcagcccctacaaggaaaaagcctcttctggtggatgctgagcttcctctgagctgcttaagtctccactggtctggcaaacacacctttctgccttgctatcacaaaaggaatgtggatttgtgtgtgttcccttcccagtcccttatctgatcctcagggaatctgcctgctttccttccatggggatgggaggatttcagtacaaagggaaattcttgtcaggcatttatgaaaggctgattatgtatggcaagatatggaaaattcccaaactgtcccagtgttttttttttttttgatcactgtcttaattactgagtggcctctattaggtgactatgaataag

SEQ ID NO: 6788 - DNA, 404 bp, Bos taurus
  Clone ID: 29-LIB34-016-Q1-E1-H1
ggcagcgccggcgtgacccacccgccatgctccccccagcgctcgtcttgctgttggggtttctctgccacgttgctatcgcaggacgaacctgccccaagccagatgagctaccgttttccacggtggttccactgaaacggacctatgagcccggggagcagatagtcttctcctgccagccgggctacgtgtcccggggagggatccggcggtttacatgcccgctcacaggactctggcccatcaacacgctgaaatgcatgcccagagtatgtccttttgctgggatcttagaaaacggaacggtacgctatacaacgtttgagtatcccaacaccatcagcttttcttgccacacggggttttatctgaaaggagctagttctgcaaaatgcactgag

SEQ ID NO: 6789 - DNA, 405 bp, Bos taurus
  Clone ID: 29-LIB34-017-Q1-E1-H1
tgcaggacctggaagccaagctgaccccggagacgctgacgcggtggcgaaactccctgcagcccagacatatagatgaactcagcctgccaaggttttccatctccagtgactatcagctgagagacatcctttcccagctgggtatcaagaaaatcttcaccagcgatgcggacttctcaggaatcacaaatgaccacaagctggcagtttcccaggtgatccacaaggccgtgctcgacgtgggcgaggagggcacggaaggagctgctgtcacggctgtcataatgtttacttcattaccgttgcacgcgctaaatatcagtttcaacaggccctttctgctttccatattctgcaaagagactcagagcatcatctttttgggcaaagtcacgaacccca

SEQ ID NO: 6790 - DNA, 350 bp, Bos taurus
  Clone ID: 29-LIB34-018-Q1-E1-H1
aggaacatgcgccgcaagatagtcctgcgcgtgagcgccaaaggggagggggctttccccggcgctccacgtgtccctgcagcaaaggcacgccgcaccgtacccgggtcaccactcgcggctgatgccccacacgcgtctactcggagggaactcacgacagaacattttgtgggacaatggaaggtgtcctttcattaggaaacttccgatcaaccgtactcagcctccaattcttactgagttgaattcgcatcatatccgcgttcagtcatatctcgcacacacggctaccttctcgtcaactggctcctcaaacccttcacatacacctaaatgtctgaacactg

SEQ ID NO: 6791 - DNA, 386 bp, Bos taurus
  Clone ID: 29-LIB34-018-Q1-E1-H9
gccatggtgacctacttgaatgcgcagatgacagggcagatcttgccaagtacatatgtgataatcaagatacaatctccagtaaactgaaggaatgctgtgataagcctttgttggaaaaatcccactgcattgctgaggtagaaaaagatgccatacctgaaaacctgcccccattaactgctgactttgctgaagataaggatgtttgcaaaaactatcaggaagcaaaagatgccttcctgggctcgtttttgtatgaatattcaagaaggcatcctgaatatgctgtctcagtgctattgagacttgccaaggaatatgaagccacactggaggaatgctgtgccaaagatgatccacatgcatgctattccaaagtgttt

SEQ ID NO: 6792 - DNA, 355 bp, Bos taurus
  unsure (160): unsure at all n locations; Clone ID: 29-LIB34-019-Q1-E1-H1
gcatgtgccaacgtgctgagtgacctttacgcgatgggcattactgagtgtgacaacatgttgatgctactcagcgtcagccagagtatgcctgaggaggagcgagaaaagataacaccactcatgatcaaaggctttcgagatgctgccgaggaagganggactgcagtgactggtgggcaaacggtggtaaacccttgggattatcatcggtggagttgccactgtagtatgtcaaccaaatgaattcatcctgcctgacagttgcgttgttggggatgtgcccctgttaactaaacccctaagaactcaagttgccgtcaatgcccaacaatggctggataatcctgaacga

SEQ ID NO: 6793 - DNA, 401 bp, Bos taurus
  Clone ID: 29-LIB34-020-Q1-E1-H9
ggcaggaccgccgtggcgccgggagcagcgactcggagggagcgtgaggcgacgctggctgcgggcacccggtgacagcgcgagaggtactagcttttacaagtttgcaccatgcgtgagtataagctagtcgttcttggctctggaggcgttggaaaatctgctctgactgtacagtttgttcaaggaatttttgttgaaaaatatgatcctacgatagaagattcttatagaaagcaagttgaagtagatgcacagcagtgtatgcttgaaatcttggatactgcaggaacggaacaattcacagcaatgagggatttgtacatgaaaaatggacaaggctttgcgttagtttattccatcacagcacagtccacatttaatgatttacaagatctgag

SEQ ID NO: 6794 - DNA, 412 bp, Bos taurus
  Clone ID: 29-LIB34-020-Q1-E2-H9
ggcaggatcgccgtggcgccgggagcagcgactcggagggagcgtgaggcgacgctggctgcgggcacccggtgacagcgcgagaggtactagcttttacaagtttgcaccatgcgtgagtataagctagtcgttcttggctctggaggcgttggaaaatctgctctgactgtacagtttgttcaaggaatttttgttgaaaaatatgatcctacgatagaagattcttatagaaagcaagttgaagtagatgcacagcagtgtatgcttgaaatcttggatactgcaggaacggaacaattcacagcaatgagggatttgtacatgaaaaatggacaaggctttgcgttagtttattccatcacagcacagtccacatttaatgatttacaagatctgagagaacagatac

SEQ ID NO: 6795 - DNA, 345 bp, Bos taurus
  Clone ID: 29-LIB34-021-Q1-E1-H1
gcgccccgctgcggccctggctcttctgcccggtgcagcgctccttcgcctcgagcgcagcctttgagtacatcatcacagcaaagaagggaaggaacagcaacgtggggttgatccagctgaaccgccccaaggccctcaatgcgctctgcaacggcctgatcgtggagctcaaccaggcactgcaggccttcgaggaagacccagccgtgggggccattgtcctcacaggcggggagaaggtatttgcagctggagccgacatcaaggaaatgcagagcctcacgttccaggaactgttactctggcgggtttttgagccacggggaacagctcacacgtgtc

SEQ ID NO: 6796 - DNA, 223 bp, Bos taurus
  Clone ID: 29-LIB34-021-Q1-E1-H9
ccccacgatcgtgcggtgcgtgacgggcgagggggccgccacctttccggacgcgccccgtgtcccgggacgatcggctctccgcaccagaggcgggtcccgacacgcggcgggggcgcgccgggcggcaccaccggggacacgtgcgagcgactgccggcggggactgcaggggaccggcgatctgaggccaaccgctgctcctccggcactgccgtagcgt

SEQ ID NO: 6797 - DNA, 341 bp, Bos taurus
  Clone ID: 29-LIB34-025-Q1-E1-H9
agagctttactccttttaacagatttcattggcatagctctgggtggctatccagttttttgaaaatgtgctcagccagaaaggcccaaatccacgcagctgtggtaaagttacagttctgtggtttcatgttagttaccttatagttactgtgtaattagtgccgcttaatgtatgttaccaaaaataaatatatctaccccagactagatgtagtattttttgtataattggatttcctaatactgatatttgtcatcttcacagaaagtgtattggttttttttttttttttttttttaaagaaagtgtatttgaaaataaagtcagatgggaaattc

SEQ ID NO: 6798 - DNA, 411 bp, Bos taurus
  Clone ID: 29-LIB34-026-Q1-E1-H1
tgaagctggtgcagaccagagccattctcaactacattgccaccaaatacaacctctacgggaaagacatgaaggagagagccctgattgatatgtattcagagggtgtggcagatttgggtgaaatgatcatgcattttccactgtgcccacctgctgaaaaagatgccaagctgaccctaatccgagaaaagacaacaaaccgttatctccctgcatttgaaaatgtgctgaagagccatggacaagactacctggtgggcaacaagctgagcacggctgacatccacttggttgaacttctctactatgtggaagagctgggaccccagccttttgggcaacttccctctgctaaagggcctaaaaagcagagtcagcaatatcccgggccgtaagaaatttctgcag

SEQ ID NO: 6799 - DNA, 412 bp, Bos taurus
  Clone ID: 29-LIB34-026-Q1-E1-H9
agatgatgaggctacaaggaaggcttattacaaggagttccataaggtggtggaatactctgatgtgattctggaagtcctggattccagggacccattgggctgccgctgcttccaaatggaggagactgtcctacgggcagaagggaacaagaagctggtcctggtcttgaacaagattgacctggtccctaaggaggttgtggagaagtggctagaataccttcggaatgagctgccaactgtggctttcaaggccagtacccagcatcaggtcaaaaacctgaatcgctgcagtgtgccagtggatcaagcctccgagtcactgctgaagagcaaagcctgctttggagctgaaaacctcatgagggttctggggaactattgccgccttggtgaagtgcgcacccag

SEQ ID NO: 6800 - DNA, 341 bp, Bos taurus
  Clone ID: 29-LIB34-027-Q1-E1-H9
cgggtcgaccacgcatccgtctaaatcacgatcagacgcccctatcgtcagaatgtgaccttgtctaaagttgagtcggacagagaacactttgttgacctgctgctcagcaagcacttcaggaccttcatgcgtgctgcctcctggaatggcacaaagaacgtgggggtgtccttctatgctgacaagccggaggtgacccaggagcataagacagagttcttagatgtcatcaagtgcataggcatccaggaatcagaaatcagatacactgacgagaagaacgattcgtgtgggcccctggaaaagcagcatgaggaggaaaggaagaatgagacaga

SEQ ID NO: 6801 - DNA, 398 bp, Bos taurus
  Clone ID: 29-LIB34-028-Q1-E1-H1
ccttttctcagaaaatactggccaatgcctgtaccctggttatgtgtagccccctggagagtggcttgcctggtcatgatggacaagatgggagagaatgtccccatggagagaagggggatccaggttcaccaggacctgcaggacgagcaggaaggcctggatgggttggccctattgggccgaaaggagacaatggctttgttggagaacctggaccaaagggagacactgggccacgtgggcctccaggtatgcctggaccagctggaagagaaaggccctcagggaagcacgtgagcatgggacctccagggcacacaggccccaaaggaaagacggggccaaaggaggagtgggtgcccaggcatacagggcgtctcaggcccctcgggtct

SEQ ID NO: 6802 - DNA, 404 bp, Bos taurus
  unsure (65): unsure at all n locations; Clone ID: 29-LIB34-029-Q1-E1-H1
gctctatgggcgtgagccgcagcttcgggaaagcctgctggaggaattcagggaggtggccctgngtgtgggcatccccgaagatgccatcttcacaatgcccgacagaggtgaatgtgttcctggagagcaggatccagtgcccactccagtctcgagggctcggcgggctgtgctgacccaggaagaggaaggctctggggctggacaaccagtaactaatttcagcaagaaagcagattcctgccagctggactactcacaagggccttgcctggggctgttcaagaggtatttctataacggtacatccatggcctgtgagaccttcttatatggcggctgcatggggaatggcaacaacttcctctcggagaaggagtgtctgcagacctgccggactg

SEQ ID NO: 6803 - DNA, 404 bp, Bos taurus
  Clone ID: 29-LIB34-029-Q1-E1-H9
tggactctatggatgaagatgttctctatcacttggatttaggaacaaaaacacacaacctaccagaaatgtttggggatgtaaagcatggcatgggcatcccctccatttctattatgcttcatgaactcattaaattactataccatgcccgatgctctgacgttatcattatcagaatcggcacatcagggggaatagggattgcacctggatctgttgtaataacagatgaagctgtagactccttctttaagccccggtttgaacaggtaatcttggacaacattgtcaccagaagtactgaacttgacaaagaactggctgaggaaatattcaactgtagcaaagaaatttccaacttcccaaacctcattggacatacgatgtgtacttatgatttt

SEQ ID NO: 6804 - DNA, 405 bp, Bos taurus
  Clone ID: 29-LIB34-030-Q1-E1-H1
gaataattaccaaaccagtgtagacaaagatctacgaactttggcaggcatcttacatcacgttgagaacaaaacatcagaagccagagagctggtcaaagcaatccatatcagcgataaccctgatcaaccatcaaagccaaataacatagagagtgctaccaagaattccaagagtatgatggaagaaattatgaaatatgaaacactgataacaacacatgaatcaacaattcgatttttgcaagaaatatataactcaaatagtcaaaaaatcgttaacctaagagataaagtggtccagcttgaagcaaactgtcaagagccttgtcaagatacagtgaaaatacatgatgtaactgggagagattgccaagatgttgccaataaggaggccaaagagag

SEQ ID NO: 6805 - DNA, 414 bp, Bos taurus
  unsure (390): unsure at all n locations; Clone ID: 29-LIB34-031-Q1-E1-H1
gtgaaggaaaatgaggccttgctgctccgattcaagtattacagcttttttgatttgaatccaaagtatgatgcaatcagaatcaatcagctttatgagcaggccaagtgggctattctcttggaagaaattgaatgcaccgaagaagaaatgatgatgtttgcagccttgcagtatcatatcaataagctgtcgatcatgacgtcagagaatcatctgaacaacagcgacaaagaagttgatgaagttgatgctgccctttcagacctggagattactttggaaggggggaaaacatcaacaattttgggtgacatcacttccattcctgaacttgctgactatattaaagttttcaagccaaaaaagctgactctaaaaggttataancagtattggtgtacctttaaagat

SEQ ID NO: 6806 - DNA, 422 bp, Bos taurus
  Clone ID: 29-LIB34-031-Q1-E1-H9
gagaggtagaaagagctcatcgtcatgacaggaaagtttctgtggtttgaagggatacccttcccaagtgtggattactcacctgaactcctgagagaggtacaggagagttttcttattaaagatgaagatgtcttactgctgactttccccaaatcaggaacgaactggttgattgaaactgtctgcctgatttactccaagggggatcccaagtgggtccaatctgagcccatttgggaccgctccccctgggtagagactaagcatgggtatgaattactaaaggagaaggaaggcccacgtctcatcagttctcacctccccatccaactcttccccaagtctttcttcaaatccaaggccaaggtgatctaccttgtccgaaatcccagagatgtgtttgtgtctgggtacttttt

SEQ ID NO: 6807 - DNA, 365 bp, Bos taurus
  Clone ID: 29-LIB34-033-Q1-E1-H1
gggccacccccgcggcgcgcatggggcatggaggcggcggccggcgccggccgcggggcgcccccgggacccccgagagccgccgccgtcccatgtttcggcatttcggtggaccaggacgacatcctcccgggcgccctgcgcctcatccgggagctgcggccgcgctggaagcccgaacgagtccggaccaagcgcttcactgacggcatcaccaacaagctggtggcctgctacgtggaggaggacatgcgggactgtgtgctggtccgagtctatggggagcggacggagctgctggtggaccgtgagagcgaggtccggaacttccagctgctgcgggctcacggctgtgcaccgaaact

SEQ ID NO: 6808 - DNA, 416 bp, Bos taurus
  Clone ID: 29-LIB34-035-Q1-E1-H1
cacaggtgttgagcttctgaaagatacaccagccccacggctcctcaagacacacttgcctctggccctgcttccgaagaccctgctggatcagaaagtcaaggtgatctacatcgcccgcaacgccaaggatgtggccgtctcctattaccacttctatcgcatggccaaggtgcaccctgaccctggcacctgggacagcttcctggagaagttcatggccggggaagtgtgctacgggtcctggtaccagcacgtgcaggagtggtgggagctgagtcacacccaccctgttctctacctcttctacgaggacataaaggaggaccccaaaagggagattcagaagatcctggagtttatagggcgctccctgcctgaggagactgtggatcacattgtccagcgcacatctt

SEQ ID NO: 6809 - DNA, 414 bp, Bos taurus
  unsure (404): unsure at all n locations; Clone ID: 29-LIB34-035-Q1-E1-H9
caggcggcggctctggatccactgcccacatcccgctctcgcaggcagacatgagggcagagagaacttccttcctcctggccctggggctcctggtggctgggatccgcagtgtccactgcctcccagagaatgtggtggtgaaggaccagcacagaagggtggatggccacacgttagcctccagcaacaccgacttcgccttcagcctctacaagcagttggctttgaagaaccccaataagaatgtcatcttatccccgctgagtgtctccatagccttggccttcctgtctctgggggcccgtggctccaccctgacagagatcctggaaggtctcaagttcaacctcacagagatccaggagaaagaaatacaccatagctttcagcacctcctgcangcgctcaatc

SEQ ID NO: 6810 - DNA, 429 bp, Bos taurus
  Clone ID: 29-LIB34-038-Q1-E1-H1
gaggaaagaaccagtccagagggattgcctcagaccacactatctccactcgctcagacctgtggaagattagcgaccatgatttccaatgggataggaaccgtcaccgctggaaaaaggagtatatgtcttctccctttgctgcttattggcctctggggctgtgtgacctgtcatcggagccctgtggaagacgtctgcacagccaaacctcgggacattcctgtgaatcccatgtgtatttaccgttcctcagagaagaaggcaactgagggccaaagctccgagcagaagatccctggggccaccaaccggcgggtctgggaactgtccaaggccaattcccactttgccactgccttctatcagcatttggcagactccaagaataacaatgacaacattttcctgtcacccctgaatatctcc

SEQ ID NO: 6811 - DNA, 428 bp, Bos taurus
  Clone ID: 29-LIB34-039-Q1-E1-H9
cgggtccacgcacgcgtctgtaattcattggacaacccgaagtctatattttaatcttacctgggtttggaataatctctcatatcgtgacctactactcaggaaaaaaagaaccattcggatatatgggaatagtttgggctataatgtcaatcggatttctaggtttcatcgtatgagcccaccatatattcactgtcggaatagacgtcgacacacgagcctacttcacatcagccactataattattgctattccaaccggggtaaaagtcttcagctgattggcaacacttcatggaggtaatatcaaatggtctcctgctataatgtgagccctaagctttattttcttatttacagtacgggggttaactggaattgtcttagccaactctttcctcgatattgtttcttcacacacatac

SEQ ID NO: 6812 - DNA, 384 bp, Bos taurus
  Clone ID: 29-LIB34-040-Q1-E1-H1
gggacgacacacgcgtccgtcacgcatcgtgataaaccagccggtatcacaatgctactaacagactggaatggaaacactagcttcatcgactcggcacgacgacgagatcccattcgatatcaagatttagtctgagtctttggactgcccaacagtctagatattaatcgttaactgggtttggaataatctctcatgtcgtgacctactacgcaggattcaattacaccatcggatatatgggaatagtttgggccacaatgtcgatccgatgtctacgtttcaacgtatgagcccaacatataatcactgtccgaagagacttcgagggacgagccgacttgagatcagccactaggattagtgcgattcccatcgggg

SEQ ID NO: 6813 - DNA, 360 bp, Bos taurus
  Clone ID: 29-LIB34-040-Q1-E1-H9
atcctagtctatcataaactgcttaagtttgtacaattttactttttgtgttaatggtgtgtgctccttctctcccctgccccccaccttttagtccgtcacttccaattttgtggaatatgttaagaaaaatggatttttagagaagaaaaggaaagactgaatttctttgcgttatgtgcatatacagactggatttttttttttttaacagtttccccaaaggaatgtgtcttgcctcttactgacatttggtatgtgtcagtcattggactatttcttacttactttccaagtatttcaaaagcctgtgagaactacaggatttgataaagattttgaacaccggggaaacccaaa

SEQ ID NO: 6814 - DNA, 294 bp, Bos taurus
  Clone ID: 29-LIB34-041-Q1-E1-H1
aaatgctgtgcatctgatgacaagcattcatgcattgctgtggagggtccaaaacttgttgtttcatctcaatcaacgttaatctgtacacgacacacccacaggcatctcagcctaccctgagagtgtgaggttagaagagacatgcaaacgcagcacttaatcacctgccatccttgtcggttggggttaattccgcactctcactaccgaacgtgaatttcattaactgttgtgcttctattgtgcgtgccacgattaattgtttctgcatgtactctggaaagttcacct

SEQ ID NO: 6815 - DNA, 424 bp, Bos taurus
  Clone ID: 29-LIB34-041-Q1-E1-H9
gatcccccaagggcaccatggccgccctgggcatcacggtcgccctgctggtgtggatggccaccctgctgttcatctccatctggaagcacatctacagcagctggaaactgccccctggccctttcccactgcccatcatcgggaatcttttacagctggatattaagaacattcccaaatccttcaccaggctggcggagaggtacgggccggtgttcaccctgtacctgggctctcagcgtgccgtggtcgtgcatggctacaagcccgtgaaggaggtcctgcttgactacaagaacgagttttctggcagaggagaaaaccctgggttccagatgcacaagaacaatgggatcattttcaacaatggatcaacctggcgggacaaccgcgggtctcgttgacaccctccgtgacttag

SEQ ID NO: 6816 - DNA, 350 bp, Bos taurus
  Clone ID: 29-LIB34-042-Q1-E1-H1
ggtcgaccacgcgtccgatgaaacatcggggatgtacctcattcagccggaggattctagcaaaccatatagagtatactgtgatatgcgaacggaaaaaggaggatggacagtaattcataaccgtcaagatggtaatgttgactttggcaagaagtgggatgcacataaacacagatttggaaatattgcaaccaatgcagaagggaagacatactgtggtgtaccaggtgactattggctcggaaatgacagaattagccagcttaccaatatgggacccacagatcttttgactgatatggaagactggaaacgcgataacgtgacagcactctatgaacgattta

SEQ ID NO: 6817 - DNA, 367 bp, Bos taurus
  Clone ID: 29-LIB34-043-Q1-E1-H1
aggacgcgtgggtaaggtgacggcactctatgaaggatttactgtacagaatgaggccaacaaatatcaactgtcagtgagcaaatacaaaggaacagctggcaatgccctcatagaaggggcttctcaactggtgggagaaaaccggaccatgaccatccacaacagcatgttcttcagcacatacgacagagacaacgacggctggaaaactacagatcccagaaagcagtgttctaaagaaaatggtggtggatggtggtataaccgatgccattcagccaatcgcaatggcagatactactggggtggagcgtacacctggggacatgggaaagcacggcacagaccaatgaatggtgtggat

SEQ ID NO: 6818 - DNA, 385 bp, Bos taurus
  Clone ID: 29-LIB34-043-Q1-E1-H9
cgccgccgccgccagcccgcgcggctggagcccaggcaggcagcccgcggcccgcgccgtcggggctccgggcgcggctatggagctgtggccgtggctgatcgcggcgctgctgctgctgctgctgctggcgcagctgagccgctcggcccgcttctacgccaagatcggcctgtactgcgccttctgcttcacggcctcggcgatggccgcggtcgtctgcctgctgcgccacgggggccggacggtggagaacatgacgatcatcagttggttcgtccggtccttcaagtacgcatatggcctccgctttgacgtcaaaggccgtgagacgctgggacaggaacggccctgcgtcatcatctccaaacaacagagcatcctg

SEQ ID NO: 6819 - DNA, 257 bp, Bos taurus
  Clone ID: 29-LIB34-044-Q1-E1-H1
cccatggtgagatcgcagactgctgagttacactggaccctgagcactgggaacggttcctgctgcatcttgatgctggcgatgccatcctcaactcactggatctgccactacgttgggagctcagtttagtgcagatttcccgaagttttggggactgcagctagccgcaagtgctacaagacatccctactttcattcagcaaagggccttcactacgcagatcccctctaattcaggtgttcaagacatgcgc

SEQ ID NO: 6820 - DNA, 445 bp, Bos taurus
  Clone ID: 29-LIB34-045-Q1-E1-H9
ggagaacagagaagaagtaaaattccaaaggaagtcctctcaccatgtggctgtacctggcagtcctcttgggcctgtactacctcctgcgctggtaccgagagaggcaggtggtgagccacctccaggacaagtttgtcttcatcacgggctgtgactcgggctttgggaaccagctggccaggcagctggacctgcgaggcttgagggtcctggctgggtgtctgacggagcaaggggccgagcagctgagggaacagacatcagacaggctgcagacagtgattctggacgtcaccaagacagagagcatcgctgcggccactgagtgggtgaaggagtgtgttggggaacagaggctctggggtctggtcaaacaatgcaggatttttcactcacatggctatgctgagtggataaagattgagacctacagggataccct

SEQ ID NO: 6821 - DNA, 193 bp, Bos taurus
  Clone ID: 29-LIB34-046-Q1-E1-H1
caattcatcaattagactttcacatagtatggaaaaaactcaatctgtatgtattaatataacttttgaccaagccagccctataacagttatatgcagctggctccaggcagaagcacgtatgaactggccgatcactgaagctggcatcatttctctgaaggtccctgatctctgggcaatgatatttttt

SEQ ID NO: 6822 - DNA, 418 bp, Bos taurus
  Clone ID: 29-LIB34-047-Q1-E1-H1
gtctgtgctctgcactccacattacagaccggggaggatgaggcccgctgtccgcgctctgttagcctgcgcggttctggggctgtgtctggcggaccctgagagaactgtgagatggtgcaccatttcaactcatgaggccaataagtgtgccagttttcgtgaaaatgtgcttcgtatcttggagagtggtccttttgtctcctgtgtgaagaaaacctcacacatggattgcatcaaggctatctcgaataacgaagcagatgctgtgacgttggatggaggtttggtgtatgaggcaggcctgaacccaacaacctgaaccctgtggtggcagagttccatgggacagaagacagcccacaactcactattatgctgtggcggtggtgaagaaggacactgacttcaagctgaa

SEQ ID NO: 6823 - DNA, 326 bp, Bos taurus
  Clone ID: 29-LIB34-048-Q1-E1-H1
cggaccttgtgactttagggttcgagctgcacggtgaccacgccgtgttacgaggcggtcatacactcgtcctagggccacaatgtcgcatccatccccccaggctaagccttccaaccccagtaaccctcgagttttcttcgacgtggacatcggaggggagcgagttggtcgaattgtcttagaattgtttgcagatattgtacccaaaactgcagaaaattttcgtgcattgtgtacaggagaaaaaggcattggacccaccactgggaaacctcttcatttcaaaggatgtcctttccatagaattattaagaaatttatga

SEQ ID NO: 6824 - DNA, 422 bp, Bos taurus
  Clone ID: 29-LIB34-049-Q1-E1-H1
atgatttcttgcaacttcgaaaaatttaaaaccatgaaacatctattactgctacttttctgtgcttttatagttcaggcccaatttcctactgactatgacgagggacaagatgacagacctaaggtaggtttgggtgcccgcggtcatcggccctatgacaagaagaaggaagaggcccccagcctgagacctgtgccccctcccatcagcggaggtggctatcgggctcgtcccgccacagcaactgtgggccagaagaaagtggagagaaagccccctgacgctgatggctgcctgcacgcggacccggatctgggtgtgttgtgtcctacaggatgtaagttgcaagatactttggtaagacaggagagaccaatccgaaagagtatagaagatttacgtaataatgtggactctgt

SEQ ID NO: 6825 - DNA, 428 bp, Bos taurus
  Clone ID: 29-LIB34-050-Q1-E1-H1
catggaaaatatttaacacaaacaacctatggatctctcttgctgcagttaaaagactgcaggagcagaatgctattgacatggaaatcattgtaaatccaaagactttggatggaggcctgaatgttattcagttagaaactgcagtaggggctgccattaaaagttttgagaactctctaggtattaatgttcctagaagccgttttctgcctgtcaaaaccacatcagatctcttgcttgtgatgtcaaacctctacagccttaatgcaggatctttgacaatgagtgaaaagcgggaatttcctacagtgcccttggttaaattaggcagttctttcacaaaggttcaggattatctaagaagatttgaaagtataccagatatgcttgaactggatcacctcacagtttcaagagatgtgaca

SEQ ID NO: 6826 - DNA, 401 bp, Bos taurus
  Clone ID: 29-LIB34-050-Q1-E1-H9
ttccggagcgacccacgcgtccggcgagaggaggggaaggtaccagttacttcctggacttctctgtgaggaactgttccagtcaccagtttcccagacactctcagatctttggattctgcagagcagatttgttctgtgatgtagaagcctctgacttggaaaccccaaaagacattgtcacaaactgtgaagtcatcaaccttaaggaacatagaaacttcagtgctgtgcaacatcatttatgccgtcccttccactctggcgagcatgagcattctcctgctggaaggcctccatttaagcccagtggatctaaagatcatggtcatccccaggagtcatataactttagatgcacatctcctctagaacacaaaattcactcagacagttcacca

SEQ ID NO: 6827 - DNA, 252 bp, Bos taurus
  Clone ID: 29-LIB34-051-Q1-E1-H1
cggggccacccacgagtccggtctgcttgggcagccctcctgctgctctggggtctgtccctgagcccagtgactgagcaggcgacgttctttgaccccaggccatccctgtgggccgaggccggctcaccgctggcaccctgggccgatgtgacgctgacctgccagagcccgctgccgacccaggagtttcagctcctcaaggatggcgtgggccaggaaccggtgcacctggagtcccctgcccatgaa

SEQ ID NO: 6828 - DNA, 245 bp, Bos taurus
  Clone ID: 29-LIB34-051-Q1-E1-H9
gaagaggtttctcagtttctgcagagttgcactggtttccgcctccgaccagtcgctggcctgctttcttctcgggatttcttgggtggcctggctttccgagtcttccactgcactcagtacatcagacatgggtctaagcccatgtatacaccagaaccggacatatgccatgagctcttgggacatgtacctttgttttcagatcgcagctttgcccagttttcccaggagatcggccttgc

SEQ ID NO: 6829 - DNA, 241 bp, Bos taurus
  Clone ID: 29-LIB34-052-Q1-E1-A8
caagatcaatcatgacgacttacagcgacaaaggagagaagcctgaaagaggccgattcctccactttcactctgtgaccttctgggttggcaatgccaagcaggctgcgtcatattactgcagtaagctgggctttgagcccctagcctacaagggcctggagaccggttcccgggaagtggtgagccatgtggtcaagcaagggcagatcgtgttcgtcttctcctctgccctcaaccc

SEQ ID NO: 6830 - DNA, 243 bp, Bos taurus
  Clone ID: 29-LIB34-054-Q1-E1-H1
ggagctagttctgcaaaatgcactgaggaagggaagtggagcccagaccttcctgtctgtgcccctataacctgccctccaccacccatacccaagtttgcaagtctcagcgtttacaagccgttggctgggaacaactccttctatggcagcaaggcagtctttaagtgcttgccacaccacgcgatgtttggaaatgacaccgttacctgcacggaacatgggaactggacgcagttgcca

SEQ ID NO: 6831 - DNA, 398 bp, Bos taurus
  unsure (378): unsure at all n locations; Clone ID: 29-LIB34-056-Q1-E1-H1
cccgggtcgacacaagcgtctaaaatgcatcataatatacaggagaattgtattgatcttgttgggcgtattgctgataggggagctgaatatgtgtctgcaagagaatggatgaggatttgctttgaacttttagagctcttaaaagcacacaaaaaagctattcgtagagccacagtcaatacatttggttatattgcaaaggccattggccctcatgatgtattggctacacttctcaacaacctaaaagttcaagaaaggcagaacagagtttgtacaactgtggccatagctatcgtcgctgaaacatgttcacccttcacagtactacctgccttaatgaatgaatacagagttcctgaactgaatgttcanaatggagtgttaaagtcacg

SEQ ID NO: 6832 - DNA, 246 bp, Bos taurus
  Clone ID: 29-LIB34-057-Q1-E1-H1
cccgggtcgacccaagcgaccgcgccgccgctcgaacatggcggccgagatccactccaggccgcagagcagccgcccggtgctgctgagcaagatagaggggcaccaggacgccgtcacggccgcgctgcttatccccaaggaggacggagtgatcacggccagcgaggacaggactatccgagtatggctgaaaagagacagcggtcagtactggcccagcatttaccacacaatggcctctcc

SEQ ID NO: 6833 - DNA, 230 bp, Bos taurus
  Clone ID: 29-LIB34-058-Q1-E1-H1
aggtgggtttcctgaaatcaacacacctgcaacagacggagtatgactgacttgacgtacatttctggattcaggaatgagtgtgcctcaaatgatactcgttgcacagctgccctgccaaatggacagaataatcctcaaatttgcccctattctctgtacgctgagcatctcgcacgatcacctttcacttgtccacatgagcacgagtagaagaggctggctgttca

SEQ ID NO: 6834 - DNA, 205 bp, Bos taurus
  Clone ID: 29-LIB34-059-Q1-E1-H1
ccgcagagtgccggagcggctacaccatggcgcgcgtccgaggcccgcggctgcctggctgcctggccctggctgccctgttcagcctcgtgcacagccagcatgtgttcctggcccatcagcaagcatcctcgctgctccagagggcccgccgtgccaacaagggcttcctggaggaggtgcggaagggcaacctggagcgaga

SEQ ID NO: 6835 - DNA, 176 bp, Bos taurus
  unsure (16): unsure at all n locations; Clone ID: 29-LIB34-062-Q1-E1-H1
agagacccccccagcnaaagagtttcctgctggtctgtggagctgtagttctggaaggagctacacccaccaccccctgccgccgccctgtgtgccgatggctgccacccagtgaccacagggccactctgggtcctggaacattgtagggagaggtatttgcactccaataaaat

SEQ ID NO: 6836 - DNA, 211 bp, Bos taurus
  Clone ID: 29-LIB34-062-Q1-E1-H9
gcctgatcaagagatggtgtctgcctctgaatggtacctgaagaacttgcagttccaccgtttctggtccgtggatgacacgcaggtgcacacggagtacagctctctgcggtccgtcgtggtggccaattatgaggaatccatcaagatgcccattaatgagccagcaccgggcaagaagaagtcccagatccaggaatatgtggactat

SEQ ID NO: 6837 - DNA, 350 bp, Bos taurus
  Clone ID: 29-LIB34-063-Q1-E1-H1
ctggacgaggacagcttgaccatggacttagagttcaggattcaagagacgacgtgcaggagggaatctgaggcagaccccgccacctgtgacttccagaggggctaccacgtgcccgtggccgtttgcagaagcaccgtgcggatgtctgctgaacaggtgcagaacgtgtgggttcgctgccactggtcctccagctctgggtccagcagcagtgaagagatgttttttggggatatcttgggatcctctacatcaagaaacagttacctgcttggcctcactcctgacagatccagaggtgaaccactttatgaaccatcacgtgagatgagaagaaactttcctct

SEQ ID NO: 6838 - DNA, 239 bp, Bos taurus
  Clone ID: 29-LIB34-065-Q1-E1-H1
ccgggtcgacccaagcatccggcagaggacgggccgaccatcaagttctgtcaggagctggcgaggaagcacggcatggtggtggtgtctcctgtcctggagcgagactcggaccacggggacgtcctgtggaacacggctgtggtcgttgccagctccggagcggtcctgggcaagacgaggaagaaccacatccccagagtgggcgacttcaacgagtccacatactacatggaggg

SEQ ID NO: 6839 - DNA, 259 bp, Bos taurus
  Clone ID: 29-LIB34-066-Q1-E1-H1
aagaacttaggcaacttcctggtttggctgcttggaggctgcttctcctttactgggaagatgcaggatcacggcagcctcccctcagttctggatgtgcatgtcaacgttgctgggagaagctctgtgctgggaaaagtgaaaagcaggaaggccagatggtccgtgaggccctcggacatgtccaacaaaactttcaatcccatccgggccattgtggacaacatgaaggtgaagccaaatccaaacaagaccatga

SEQ ID NO: 6840 - DNA, 240 bp, Bos taurus
  Clone ID: 29-LIB34-067-Q1-E1-H1
ctgtcataaagaagctggagatgaccaagttccatcccactcacctgacgatgcctcgcatcaaagtgcagagcagtcaggacatgctggattactttgacttcatctacgacgtcaacctgtgcgggctgacggaggacccagacgtgcaggtgtctgggatccggcaccaggccaccctggagctgacggagagcggggtggaggcgactgcggcctcggtcgtctccgtggcccgca

SEQ ID NO: 6841 - DNA, 189 bp, Bos taurus
  unsure (54),(111): unsure at all n locations; Clone ID: 29-LIB34-068-Q1-E1-H1
acaactcaatgtaactgagacacactgtatcacccatctgcatgtcactgtcanatgagagcggatcaagaaagaacaaggaccactcatgggcatggctgggaccatggnaagcaaataagattacatggccttggccttggccataaacataagcatgaccaaggtcatgggcaccatagaagtcat

SEQ ID NO: 6842 - DNA, 194 bp, Bos taurus
  Clone ID: 29-LIB34-068-Q1-E1-H9
agaacatcacgttgaaatagaatatgactaagtcattttgccctgagctgttcattctgttaacacacaaagtttcagaaactttcctgaaattttcttctcgttttctcttaccgtatttattaattttaagtctttctttaaggatatttagctctgaatggcaattaaaactcactttggactgtattccc

SEQ ID NO: 6843 - DNA, 230 bp, Bos taurus
  unsure (137),(196): unsure at all n locations; Clone ID: 29-LIB34-070-Q1-E1-H1
tttcttgcaacttcgaaaaatttaaaaccatgaaacatctattactgctacttttctgtgcttttatagttcaggcccaatttcctactgactatgacgagggacaagatgacagacctaaggtaggtttgggtgcncgcggtcatcggccctatgacaagaagaaggaagaggcccccagcctgagacctgtgcnccctcccatcagcggaggtggctatcgggctcgt

SEQ ID NO: 6844 - DNA, 253 bp, Bos taurus
  Clone ID: 29-LIB34-070-Q1-E1-H9
cgagcccgcgtacggccgtatgaagcgggtgacccagaaggaggagctggaaaagcagaaggcggagctgcagcaggaggtggagaagctggcctccgagaatgccagcatgaagctggagctcgatgccctgcgctccaagtacgaggccctgcagaacttcgccaggaccgtggcccgaagccctgtggcgccagctcggggtcccctttgctgctggcttggggcccctcgttccctgggcaagggtggc

SEQ ID NO: 6845 - DNA, 403 bp, Bos taurus
  Clone ID: 29-LIB34-071-Q1-E1-H1
acttctacctcctgtattttctactgtaataatgtaatttaaggccttccacaatgaacagttcactttattccctgggttttctatataaacagttttcaagatatgatttggttaaaaataatttgttataaaaattctgtttgcaaattaaactgtaaaagtatccaatgtctcagaaggcaatgatttgtgtgataatttgatatgcccaaagccctgctcatcaatgaaaactatcatatacagtaattgaattcattaacatgaatcttgagtatctggaccattgcttccatgttaacattttcttggcatttttagccccagatgtacttgagctcaattgtctgctctctgattttcattccctaaaatgaagccatggagaacaaacttgaaa

SEQ ID NO: 6846 - DNA, 383 bp, Bos taurus
  Clone ID: 29-LIB34-072-Q1-E1-H1
gcaacccaacatatggataagcgctgtagcccacatctagtcctgtctgcattgctttctgacaaccatagtgccacctacgctttcagtgagaaccactactggcgtctggacagcagccgggacgggtggcacagctggctcattgagcatctgtggccccaaggtccctcaacagtggatgctgcctttctctgggataaaacgctctacctcatccagggtacccaggtatatatcttcctgacaagggcaggctacactctcgtagaagattatccatagcagctggagaaggaatttgggagccctgatggggtctgccttcattctgtggatgcagcctttacctgtcctggatcttctcagctctacatcatggc

SEQ ID NO: 6847 - DNA, 389 bp, Bos taurus
  Clone ID: 29-LIB34-072-Q1-E1-H9
gggccgagccacgcgtccacttcacagcaggaagtgtgaccacgatcaatcatgacgacttacagcgacaaaggagagaagcctgaaagaggccgattcctccactttcactctgtgaccttctgggttggcaatgccaagcaggctgcgtcatattactgcagtaagctgggctttgagcccctagcctacaagggcctggagaccggttcccgggaagtggtgagccatgtggtcaagcaagggcagatcgtgttcgtcttctcctctgccctcaacccctggaacaaagagatgggcgatcacctggtgaaacacggcgatggagtgaaggacattgcgttcgaggtggaggactgtgactacattgtgcagaaagcccgggaacg

SEQ ID NO: 6848 - DNA, 411 bp, Bos taurus
  Clone ID: 29-LIB34-073-Q1-E1-H1
tgactattatcaaccagccataaagatattggtaccctttatctactagttggtgcttgggccggtatagtacgaacagctctaagccttctaattcacgctgaattaagccaacccggaactctgctcggagacgagcaaatctacaacgtagatgtaaccgcacacgcatttgtcataatcttcttcatagtaataccaatcataattggaggattcggtaactgacttgttcacctactaaatggtgctcacgatatagcaattccccgaataaataatataaacttctgactcctcgctcgctcattcctactagtcctcgcatcctctatagttgaagctggggcacgaacaggctgaaccgtgtacactcccttagcaggcaacctagcccatgcaggatcttca

SEQ ID NO: 6849 - DNA, 413 bp, Bos taurus
  Clone ID: 29-LIB34-074-Q1-E1-H1
gaacaacacagtgaatattactgagacagacagccatatacagtatttgccctgttttctctctctctctctatttttaaattttattttaaactgactcttaatgaaacttagagagtttcattacacttagttgggaaaaggaatttatatgcaaatatattttctatttccccacaataatgcaaattattttatgaagtaagtgcaattacattaaccttttaagatacccaggagtctgttgttctgtagctattatcatctgtaaatgtcttatttgtataaagtaatgtcttttaaaagtgaaaattataagctcatcttaaaatgtccaattatagttttgtaacctataaggccattgaaagtatttgtttaaagtggataaacttttagaattttgggaatgt

SEQ ID NO: 6850 - DNA, 398 bp, Bos taurus
  Clone ID: 29-LIB34-079-Q1-E1-H1
ggaacatcatggatttgagactcgcggggcgccgggcgctcgtcacgggggcgggcaaaggcatcggtcgcagtattgtcaaggcgctacacgcggctggcgcccgagtggtggccgtgagccggacccaggccgacctggacagcctggtccgcgagtgccccggggtagagaccgtgtgcgtggacctagctgactgggaggccacggagcaggcgctgggaggtgttggccctgtggacctgctggtgaacaatgcagctgtggcgtttctacagcccttcctggaggtcaccaaggaggcatatgacatgtctttcagtgtgaaccttcgggcggtcatccaggtgtcgcagattgtggcccgaggcctgataactcggggagccccaaggggc

SEQ ID NO: 6851 - DNA, 425 bp, Bos taurus
  Clone ID: 29-LIB34-080-Q1-E1-H1
atgagtttaaggcagatgaaaagaagttttggggaaaatacctatacgaaattgctagaagacatccctacttttatgcaccagaactcctttactatgctaataaatataatggagtttttcaagaatgctgccaagctgaagataaaggtgcctgcctgctaccaaagattgaaactatgagagaaaaagtactgacttcatctgccagacagagactcaggtgtgccagtattcaaaaatttggagaaagagctttaaaagcatggtcagtagctcgcctgagccagaaatttcccaaggctgagtttgtagaagttaccaagctagtgacagatctcacaaaagtccacaaggaatgctgccatggtgacctacttgaatgcgcagatgacagggcagatcttgccaagtacatatgtgat

SEQ ID NO: 6852 - DNA, 411 bp, Bos taurus
  Clone ID: 29-LIB34-080-Q1-E1-H9
ctgaccacgagccagtacctgatgcatgaggttgccaagcagctggacctgaacccaaaccgcttccctatctttgccgctctgttaggaaatcacattctacctgatgaagatctggcttcctttcattggagtttacttggtccagaacatccactagcttcacttaaggtccgggcccaccagctggtcttgccaccgtgcgatgtggtgatcaaggctgtggctgactatgtccgcaacatccaggatacctcggacttggatgccatagctaaagatgttttccagcattctcagtctagaacagatgacaaagttattcgatttaagagagcaattggatattactcagcaactagcaagcctatggcattttcaccagcacattacttagccaagacaaatcca

SEQ ID NO: 6853 - DNA, 424 bp, Bos taurus
  Clone ID: 29-LIB34-081-Q1-E1-H9
ttaacaaaatccaagactggcaacaaccaaaattattaaaccaaacaaccccttggaaaccaaaatgaacgaaaattaatttacccctttaattaccccggtaattttaggtctccctctcgtaacccttatcgtactattcccaagcctactattcccaacatcaaaccgactagtaagcaatcgctttgtaaccctccaacaatgaatacttcaacttgtatcaaaacaaataatgagtatccacaattctaaaggacaaacatgaacattaatattaatatctctgatcctatttattggatcaacaaacctactaggcctattaccccattcattcacaccaacaacacaactatcaataaacctaggcatagccatccccctgtgagcaagagccgtaattacaggattccgcaataaa

SEQ ID NO: 6854 - DNA, 419 bp, Bos taurus
  unsure (57),(155): unsure at all n locations; Clone ID: 29-LIB34-082-Q1-E1-H1
cccacgcgtccgatcctgaattgtatcctttataatacaccagccacaggcaaatanatacgttatcatatcaaaagatgataaaaaaattgctaaaatgcagtatggattcatgattaaggactcttgtcaaaccaggaatagaggaggactcnctcaacttggtaaagaaatctacaaaaagcctacagtcaacttcatacttctggaaaggattgtttgtttctgaaaggcccaacatactctacctagaaagaattcaagcaagccagtcctctgctgcaagaataacaggaaggcggaaatgctcaaaatgtcttccaatagttacgaagtttctatcccaatgtcaaaaaaactcaacggcattccagagacaacctctaaggacctgcagacattaactgaaggagctgtgt

SEQ ID NO: 6855 - DNA, 391 bp, Bos taurus
  Clone ID: 29-LIB34-083-Q1-E1-H1
attggaacccttcaacttccacgatgtgtttcagcccttctacgacatgatccaccaggcccagcaggccatggacgcccacctgcagaggactcgctaccacttccccacgatggaattcacagaaaacaacgaccgtactgtgtgtaaggagatccgccacaactccacgggatgcctgcggatgaaggaccagtgcgagaagtgccaggagatcctggaagtggactgttcggccagcaacccaactcagacgctgctgcgccagcagctgaacgcatccctgcagctggcggagaagttcagcaggctgtacgaccagctgctccagtcctaccagcagaagatgctcaacacgtcggccctgctcaagcagctgaacgagcagttc

SEQ ID NO: 6856 - DNA, 393 bp, Bos taurus
  unsure (324): unsure at all n locations; Clone ID: 29-LIB34-084-Q1-E1-H1
aaagcaatggggcagagagagcagagcccagaggagacagaggctgaagctagttaacatcagtgtcttggctcccaactggctcccaattcctggtgaaactcctaaagggagactgttaaatcatgaaattaatcaccatccttttcctttgttccaggctgctaccaagtttaacccaagagtcttctcaagaaatcgactgcaacaaccaggatgtatttaaagctgtggacgctgctctgacaaaatacaacagtgaaaacaagagtggcaaacagtttgtattgtaccgcataaccgaggttgccagaatggccacangagagtgcacagcgaacgtggccaagagagggaatatgaagttctccgtggctatccaaacctgcctga

SEQ ID NO: 6857 - DNA, 403 bp, Bos taurus
  unsure (279),(283): unsure at all n locations; Clone ID: 29-LIB34-084-Q1-E1-H9
agtgggagacagaatttcgtaagggctagagaaaccaagagactgccaccatggcagggaagcccactcttcactatttcaatggacgcggcagaatggagtgcattcggtggctcctagctgcagctggagtggagtttgaagagaaatttatagaaaaaccagaagacttggataagttaaaaaatgatgggagtttgatgttccagcaagtgccaatggttgaaattgatgggatgaagctggtgcagaccagagccattctcaactacattgccnacanatacaacctctacgggaaagacatgaaggaaagagccctgattgatatgtaatcaaaaggtgtggcaaattttggggaaatgattaagcaatttccactgtgcccaacctgctgaaaaag

SEQ ID NO: 6858 - DNA, 369 bp, Bos taurus
  Clone ID: 29-LIB34-085-Q1-E1-H1
atgccatccgaatgctatcaagctgctgatgtataacaccgaggatcctccagggtcagaagcacttcgcatccggaacgctttgtctgagaagctcatgataagcaccatgtatgccaacaatggctcggtgcttcagggcagctctgtggcttctgtgtatagggggaagcttctcataggcactgtatttcacaaagccctgtactgtgagctctagactccagatattcccaaaagtctacacatttggtaaaagtaaacccctaatcatataagtagaactctaagtaaatgacacacaccaataaaagtgtgtccagctttcctcatgcatagacatacagaatcagggacattacataatat

SEQ ID NO: 6859 - DNA, 441 bp, Bos taurus
  Clone ID: 29-LIB34-086-Q1-E1-H1
atggatcccaaaggacagagagtgaagcttaatgatggccacttcattcctgtcctgggatttggcactgctgaagctaaagaggttcctaagagtgaagctctggaagtcaccaaatttgctatagaggttgggttccgccatattgactgtgctcatgtgtaccaaaatgaagagcacgttggccaggccattcgaagcaagattgcagatggcactgtgaagagagaagacatattctacacttcaaagctttggtgcactttccttcgaccagagttggtcagaccagccttggaaaagtcactgaaaaatcttcacctggactatgttgatctctatattattcattttccactggctatgaagccaggggaggaattattgccaaaagatgaaaatggaaaactgataggtgattcggtggatctctgtcacacg

SEQ ID NO: 6860 - DNA, 402 bp, Bos taurus
  Clone ID: 29-LIB34-086-Q1-E1-H9
gggccgacgcacgcgtcaactcaaatagtcaaaaaatcgttaacctaagagataaagtggtccagcttgaagcaaactgtcaagagccttgtcaagatacagtgaaaatacatgatgtaactgggagagattgccaagatgttgccaataagggggccaaagagagtggactttactttatcagacccctgaaagctaagcagcagttcttagtctactgtgaaattgatgggtctggaaatggatggactgtgtttcagaagaggcttgatggcagtctggatttcaagaaaaactggattcaatataaagaagggtttggacatctgtctcctactggaaacacagaattttggctgggaaatgagaagattcatttgataagcacacagtctaccatcc

SEQ ID NO: 6861 - DNA, 366 bp, Bos taurus
  Clone ID: 29-LIB2809-026-Q1-E1-H1
atgatttttgaagacataaggtatcatctctgcccttaattacgatttttatgttcacatctaaattaatctgatacaagtaagaatagatcttttctattttttaaccaaattcttgggaatactcttcacctcacatatatgtagtaaatttaacatatattaagatgatggaccatacgtcaaaatttaactaaagtttttattttttcaattttttacgacaacgagattgacaaccaacatctcgggtgtcacgcttaggtcccttatgtcctaaaattttattaaaacttaatgaccgcggaatctatgatccaatcacgaacaatgtcctattcataaattatgtgtggttttgaatat

SEQ ID NO: 6862 - DNA, 411 bp, Bos taurus
  unsure (372): unsure at all n locations; Clone ID: 30-BOVMS1-001-Q1-E1-H5
tgacacccctagaatcagctgcatcaggtaacaatactcaggctttctggtgatgacatcaagatggtgttgctcagaagaaccaggattcctgtttgtagtttgtggatcatctcattaataatcctggagtttttagttcctttcctccatgtcggagttgacctgtgaaaatctcttcaatgcctcatgtaaaataatcaccctttttgaaattttttcctgtttattgcagcaacagactttgttgactttttggagaggggagtttgaaagttgtaagatgttatggaatgtcacccatgtcctgttggaaataactatttttggaaagtctcttttaaagctggatacaagttagctttgcggtangggagtgatcatttcctaatcaaaagtcataaagctact

SEQ ID NO: 6863 - DNA, 421 bp, Bos taurus
  unsure (378): unsure at all n locations; Clone ID: 30-BOVMS1-002-Q1-E1-H5
acgcaaagaccgggtgattctgaaaatggagtgcggagactcggaactggtggatggactcattttccagcatatcaccctcctcatgtgcttggcatacaggaaccagctgctcaacgtttttgtccgtccgtccttagtcgctatggcattgcagatgacacctgggttcaggaaagaggatgtctacagttgctttcgcttcctatgcagtgttttttcagatgagttcatctttcttccaggaaatgcactaaaggactttgaagaaggctgttacttgctttgtaaaagtgaggccatacaagtgatgacgagggacatcctagttacagaaaaaggaaattctgtgttagagtttttaataggactttttanaccttttgtggaatcttatcagataatttgcaaatacctcttg

SEQ ID NO: 6864 - DNA, 449 bp, Bos taurus
  unsure (326): unsure at all n locations; Clone ID: 30-BOVMS1-004-Q1-E1-H5
gagaagggggcgtcttcttctctgcagcctcaacaggttacaaacatgcaagaaccacagagctcccacagcaacgatcatcttcagttgctacccagcagacaacggtatcctccatcccatcccatccatccactgctggaaaaatcttccgtgccatgtatgactatatggctgctgatgcagatgaggtatccttcaaagatggagatgccattgtcaatgttcaagctattgatgaaggttggatgtacggcactgtgcagaggactggcaggactggcatgctcccagccaactacgttgaagctatttagacacttcanagcatcaatcctgtctacatgacctacaaatcttgttagtatttcagtttagactctccactattctccaagttctcaaactgcctaatagtttttgttatgatttacggtttgcacatccct

SEQ ID NO: 6865 - DNA, 276 bp, Bos taurus
  Clone ID: 30-BOVMS1-004-Q1-E1-H9
ccgaccacgcgtccgattagataggatagatcagcttccaacaattcctgaaacagtcccttaattggatgattacagcaacataaaatttctgaagcctttctccatattcatgatctgtggattcaaggggatataacggatttaagctgtgacgtctcagaagatcacaactagattactatcggtgttctcagatttgggaaaactgtctaattaccattacgctacactggaattactcaaatttggattcacctagtaaagatacaattc

SEQ ID NO: 6866 - DNA, 367 bp, Bos taurus
  Clone ID: 30-BOVMS1-005-Q1-E1-H5
atgcgacgtcatagctcttctatagtgtcacctaaattcaattcactggccgtcgttttacaacgtcgtgactgggaaaaccctggcgttacccaacttaatcgccttgcagcacatccccctttcgccagctggcgtaatagcgaagaggcccgcaccgatcgcccttcccaacagttgcgcagcctgaatggcgaatgggacgcgccctgtagcggcgcattaagcgcggcgggtgtggtggttacgcccagcgtgaccgctacacttgccagcgccctaagcgccgctcctttcgctttcttcccttcctttctcgccacgttccgcgggtttccccggtcaagctctaaatcggggagctccc

SEQ ID NO: 6867 - DNA, 261 bp, Bos taurus
  Clone ID: 30-BOVMS1-006-Q1-E1-H5
cgcgtccgccgacgcaagagttggagcggctgctccaactcagctgctcaccctgttctgtgagcagaaagaacttactgaaatgcatggtttaaataacttcctcatcaaaaccttccttctgttttgtgtgctttcaaataactaatccgaacttccacaaaattaacatttgaatttagctgtaattctcaactgacctttttccctgtactaacgtatggtttccctgtgtggcgtgtattccgaacgttcctactt

SEQ ID NO: 6868 - DNA, 399 bp, Bos taurus
  Clone ID: 30-BOVMS1-006-Q1-E1-H9
catgcatggagaatcccagggacgggggagcctggtgggcttccgtctatggggtcgcacagagtcggacacaactgaagcgatttagcagcagcaggccagtcctcaacatgtcacagcagtttccaatcttcatgaattatctgaagctctctgtgatattctctgatagtctagctgagactgacaagtttctttggtctgggtttctaagatcaaatttggattggaatgtttattcatgaaacaaaggagaaagtctaggagtttagttcatgctctcagttaatgagagcttgtcttcttgaggctttaaacataaaattaatttggaaaatattatagagatagttatccaatggcttgctaaacctaataccattatagccctcaatcctg

SEQ ID NO: 6869 - DNA, 415 bp, Bos taurus
  Clone ID: 30-BOVMS1-008-Q1-E1-H5
ttcaggatcgcgagcggccgcccttttttttttttttttttttttttttttttttttttttttttttttttttttttttttttttttttttttttttttttttttggtccaaatcgcgaacggccgccctttttttttttttttttttgaggggcaaagtgaaaaagtttatttatgacatgtcaaaattcagaagagaagacaaagaatgcacaaaagcatcacaaaatggttacataatataaaaacacaagaactgagctatttcaggaacaatagctcaagatcccatgtgtcccagggaaaacgctcagtgccaacgggtaatggaaaaacagttttttaataaagggaaaaccactcaacagggcataacaaataacaatttgggtcaaaattcctaaaaatcaaaagg

SEQ ID NO: 6870 - DNA, 349 bp, Bos taurus
  Clone ID: 30-BOVMS1-008-Q1-E1-H9
atgcgacgtcatagctcttctatagtgtcacctaaattcaattcactggccgtcgttttacaacgtcgtgactgggaaaaccctggcgttacccaacttaatcgccttgcagcacatccccctttcgccagctggcgtaataccgaagaggcccgcaccgatcgcccttcccaacagttgcgcagcctgaatggcgaatgggacgcgccctgtagcggcgcattaagcgcggcgggtgtggtggttacgcgcagcgtgaccgctacacttgccagcgccctagcgcccgctcctttcgctttcttcccttcctttctcgccacgttcgccggctttccccgtcaagctc

SEQ ID NO: 6871 - DNA, 235 bp, Bos taurus
  Clone ID: 30-BOVMS1-009-Q1-E1-H5
gtcagcagtcccttgggccagctccagctcctcgtccagagggtggggtactggagttagatctctaaccctctccttggaacccccatttcccatcatcctcaagctcccagtgttcagcgtgacgaaggacactgctcccacactgtcctcgggctccccaggccctcccgtctatggatttgaccaaccgcacccactccccaataaattgattctcctggggagcctcctt

SEQ ID NO: 6872 - DNA, 410 bp, Bos taurus
  unsure (370): unsure at all n locations; Clone ID: 30-BOVMS1-010-Q1-E1-H5
atgcgacgtcatagctcttctatagtgtcacctaaattcaattcactggccgtcgttttacaacgtcgtgactgggaaaaccctggcgttacccaacttaatcgccttgcagcacatccccctttcgccagctggcgtaatagcgaagaggcccgcaccgatcgcccttcccaacagttgcgcagcctgaatggcgaatgggacgcgccctgtagcggcgcattaagcgcggcgggtgtggtggttacgcgcagcgtgaccgctacacttgccagcgccctagcgcccgctcctttcgctttcttcccttcctttctcgccacgttcgccggctttccccgtcaagctctaaatcgggggctccctttanggttccgatttagtgctttacgggcactcgaccccaaaaa

SEQ ID NO: 6873 - DNA, 238 bp, Bos taurus
  Clone ID: 30-BOVMS1-010-Q1-E1-H9
ggtccggctcctcgggtcgacaacgcgtccgcccaagcgtccgcttgattttgtttgccatgtaacaaattactgcttaaaatgttggcattcatattaattacagatataattctgtgtatcttactgtgactccgaaaactatagtgttggtgtcatggaaatgtatgttatttccaaagtcatttcattaaagatgaaaactttaaaaaaaaaaaaaaaaaaaaaaagggaaaaa

SEQ ID NO: 6874 - DNA, 399 bp, Bos taurus
  Clone ID: 30-BOVMS1-012-Q1-E1-H5
ttatcttccacttgcaagcttatggaaatatcaaatgtcaaaataagtaaaaagtgggagaattatttactgttagaagaatgtttttattagtttggatgtcttcttttttaatggaatctaatcagtacttctgaactgcaggtatagtgctctaactaaaacataagctagtagtcccactgatcgataaactagacagtgtttatccctactttttgaatttagaatattgaggtattctctgtttaaacttgtctgggggtatttaagcttatacatatatgtgtacatatgttcatacacacagatctctgtttttggttttctcatttcaagttcttaagaagtattcatgtgctctttatttgtagaaatagctgctatacagtgaagaac

SEQ ID NO: 6875 - DNA, 451 bp, Bos taurus
  Clone ID: 30-BOVMS1-012-Q1-E1-H9
aaattgcatacctaatttgtgtttggagagttaaatgaactttaatcagggtaattgcacttttaaactttctagtagatttactgtaggtgtaatgccttaatcatttttttgaatgttttctcctcagagctgaaggttgctgggcacctaaatgatgtttcatagtagctttgggtgatcctactgctatttatgatttgctgtataaagttggcactacttaatttgcaagctgatttctcagtgtaaatttgttcattcctggtaatctattttctataaaaacgtatttttgcacaacatttttaacaatcggtgtaccttcatctaggatgtgttccattttggcaaacagctttccggcataaatccagagaagtgctttatatgaagtttattattttgagcagagtttgtgatttagtattttatgttgttggatttgaat

SEQ ID NO: 6876 - DNA, 301 bp, Bos taurus
  Clone ID: 30-BOVMS1-014-Q1-E1-H9
gaagaatctaggcatcggcaaggtctcccctttcgaagagaagatgattgctgaggccatccctgagctgaaagcctccatcaagaaaggagaggagtttgtcaagaacatgaaatgagaaggcgcttagcgagcagttggtctccttaacttattaaggcatcatgtcactgtaaagccgtttcagatacttttgtcgtttcaatttgcttcgttgaggaggattgtattaacgaaccacccctttgcaatctcggtcagtctgtcggtgcatcaataaaagcaggctttgattttcttt

SEQ ID NO: 6877 - DNA, 439 bp, Bos taurus
  unsure (406): unsure at all n locations; Clone ID: 30-BOVMS1-016-Q1-E1-H5
ggcgattccatattgaaaacacagatgacctgacgactctgatcatcatggacgtacggaaacaagatggtggactgtataccctgagtttagggaatgaatttggatctgactctgctactgtgaatataaatattcgatccatttaagagggcctgtgctctcacactcagactcattcttaacctttcccaaatgattcacatggactaatctttctatctttctgatctgtaaatacttaaaaaaaagagtagttttgtatcaacctaaatgagtcgaagttcaaaaataatacatttcagtcttttcataattgttgacctaagaagattacacattttctagtgacatgtacatactgtatatagccggattaacggttataaagttttggtacatttantttatgacattttacactgtaactattgaaact

SEQ ID NO: 6878 - DNA, 187 bp, Bos taurus
  Clone ID: 30-BOVMS1-017-Q1-E1-H5
ttaaaagctgaacgttaagtattccgatcctattggccgtaatatgccatacattcgtggaactacgcgttctacgctatatagaactccaagtaaggtccacatgtcgtacgtccagggggcccagttcaacccatcgatggtgcactcgcacttttcagtcatcacgaacaaagtatcgctagat

SEQ ID NO: 6879 - DNA, 447 bp, Bos taurus
  Clone ID: 30-BOVMS1-021-Q1-E1-H5
gtgaacaggcgccagaactgtcattgacaacggatatgacatttcccagcagtgacaagtggaatcccttgtaacatagtatttgtctgctctgtgtcggtgtgttaaccaggcctgccagttcccttctcttgtgattctgaggactgttcctccagagcttagctggctctaggggagcatggaggccactgtgcccacaggcagaaccagagttccacgcaatgctcacctgagtcacaggatcccctattactgtattctagctacaatgttatattacatagtataatgagacgatatcaagagtacacatgtaatgatgatgcatattaacattctcataggagtggttagagaagccgatgcctcatttctacattttgtcattagcagtgatcatctaacggttccgtgtatccttacagaaataaagcagcatataaa

SEQ ID NO: 6880 - DNA, 355 bp, Bos taurus
  Clone ID: 30-BOVMS1-022-Q1-E1-H9
atgcgacgtcatagctcttctatagtgtcacctaaattcaattcactggccgtcgttttacaacgtcgtgactgggaaaaccctggcgttacccaacttaatcgccttgcagcacatccccctttcgccagctggcgtaatagcgaagaggcccgcaccgatcgcccttcccaacagttgcgcagcctgaatggcgaatgggacgcgccctgtagcggcgcattaagcgcggcgggtgtggtggttacgcgcagcgtgaccgctacacttgccagcgcccttaacgccgctcctttcgctttcatcccttcctttctcgccacgttcgccggctttccccgtcaagctctaaatc

SEQ ID NO: 6881 - DNA, 404 bp, Bos taurus
  unsure (370): unsure at all n locations; Clone ID: 30-BOVMS1-023-Q1-E1-H5
atgcgacgtcatagctcttctatagtgtcacctaaattcaattcactggccgtcgttttacaacgtcgtgactgggaaaaccctggcgttacccaacttaatcgccttgcagcacatccccctttcgccagctggcgtaatagcgaagaggcccgcaccgatcgcccttcccaacagttgcgcagcctgaatggcgaatgggacgcgccctgtagcggcgcattaagcgcggcgggtgtggtggttacgcgcagcgtgaccgctacacttgccagcgccctagcgcccgctcctttcgctttcttcccttcctttctcgccacgttcgccggctttccccgtcaagctctaaatcgggggctccctttanggttccgatttagtgctttacggcacctcgaccc

SEQ ID NO: 6882 - DNA, 392 bp, Bos taurus
  Clone ID: 30-BOVMS1-023-Q1-E1-H9
tcctctcgatctttcttcctcattcgttcgatgcttttttttttccggcattgtatggaatatttcctgcatattgagtttcattgattgtggcttcatcttctctgtgggggtgctttaattctgtcgtaatcatacgttcatatttatgttttgccatcgcacagtaagattaactttacggctccttcgcaattctcgatacgagctctacagtcggatttgaacgaaatcttaactgtgtcttcttcaacattatatgataatagttatgttcttagtatcaaggaatcggaagtaaacatttatcaggttgaattagctattactcaaagttttaggatacagataatatcaccaagttatgctcctttgggatactctggaccatt

SEQ ID NO: 6883 - DNA, 424 bp, Bos taurus
  Clone ID: 30-LIB188-001-Q1-E1-H5
acattcaaggggggagccggctcccctgacgtgcaaatgatggggcccagggccctgccaagtcagcagcagtggggtatggggaagctgtgcctctccctggaagttgggacaagcacagttctggggagagaacatgttggggaagaggatggtcacgtgatcacaaaagcatcaggggtcagaggtcacgttcccagcaggctccagtgaatcaaaccagtaaaagcaaaagcccagggagggaagagaagggcggccggggagtctggctgtggggggtgagctggtccacagaggccagcccagcccagggccccgtcaccagttcatgatgcagttacggttcaaggtcatgaagtaaacttggctgctgcccccggagcggaccgaggcgaaaaataccttgtcgttccgctcacac

SEQ ID NO: 6884 - DNA, 428 bp, Bos taurus
  Clone ID: 30-LIB188-002-Q1-E1-H5
acttctccttagagttgggcacacacttgtccaggccctggtcatcgccagcacacaaggcacagagtctggatttcgggtcagccccaggggcacagctctgactaaagaattcatcaaatgcgcaggagcctgtctggttgacgatcaggcccatggggatgttccagcctgcagtcctgtccacggcggtgtggcacgacttcttgtctttcagagaattccatgtgagcccctcatttgctttcttgacaactgccacggcaaggtacactaactttgatgctgagcgggatgctctgaacattgaaacagccatcaagaccaaaggtgtggatgaggtcaccatcgtcaacatcctgaacaaccgcagcaatgaacagagacaggatattgccttcgcctaccagagaaggaccaagaatgaa

SEQ ID NO: 6885 - DNA, 417 bp, Bos taurus
  Clone ID: 30-LIB188-002-Q1-E1-H9
acttgtcctctgactcaggctgcccatttctctgccactccacggcgatgtagtctgggtagaagctggtgaccatgcaggtgaggctgaccgtgcttttgctgagctcttcctggggtggggccaggacatacacctgcggctcccgggccggccctttggtcctggagatggtcctcacgatgggggccgggaggccttcgttgtggaccttgcacttgaactcctttcctccagtccagtcctggtgctggatgcgcagggcgctgaccacgcggtaggtgctgttgaactgctcctctctcggcttcgtcgtggctgtgtttacctccacgtcgtccacgaaccaggagaacttcacctcggggtcatcgtggcccacgtccaccaccacacacgtgacctcgggcgttcccg

SEQ ID NO: 6886 - DNA, 389 bp, Bos taurus
  Clone ID: 30-LIB188-003-Q1-E1-H5
actctctcagcagcatggtgaccgtgcccgccagcagctcaggaacccagaccttcacctgcaacgtagcccacccggccagcagcaccaaggtggacaaggctgtcactgcaaggcgtccagtcccgacgacgccaaagacaaccatccctcctggaaaacccacaacccaggagtctgaagttgaaaagacaccctgccagtgttccaaatgcccagaacctctgggaggactgtctgtcttcatcttcccaccgaaacccaaggacaccctcacaatctcgggaacgcccgaggtcacgtgtgtggtggtggacgtgggccaggatgaccccgaggtgcagttctcctggttcgtggacgacgtggaggtgcacacggccaggacg

SEQ ID NO: 6887 - DNA, 285 bp, Bos taurus
  Clone ID: 30-LIB188-004-Q1-E1-H5
actcgtccaagaagaagatcttcatgggcctcatcccctacgaccagagcggcttcgtcaacgccatccggcaggtcatcaccacccggaaacaggcagtgggacctggtggcgtggcaggccccgtccagatcgtcaacaacaagttcctggcgtggagcggagtcatggagtggcaggagcccaggcctgagccccacagccggtctaagcggtggctgccctcgcacatctatgtgaaccaaggggagatcctgaggaccgagcagtggccgaggaagctgt

SEQ ID NO: 6888 - DNA, 423 bp, Bos taurus
  Clone ID: 30-LIB188-004-Q1-E1-H9
acgaggtcagacccttagggctctgcccagaaggggttgccatcctcggcctgcatgaagtagtaaacaaagagcaggaaggcagcaaagaccaggaacagcagcacctggccccagagtgggacctggcgatcctggcccaggccggcagccccaggggcctgcttttcaggccggatggctctgcgggtgagccacgaaggggccgaagatgaagatgaggacacactcgaggtggaggaggatgtgggataataggacaggcccagggagcttctggagatgttggaaatagggcggtagtgtgcgatgttctggtaggcactgtcctggccatacaggaggcgttcccgatccttgccttcctcttccaaagagaaaagattgtcatcacggaccctggcggtgaaaggggtcagcatc

SEQ ID NO: 6889 - DNA, 382 bp, Bos taurus
  Clone ID: 30-LIB188-005-Q1-E1-H5
acagcgccgaatctaccttcgaggggatcctcaaaaacccaagagcagagtctttgaacagcaggtccctctggccgggtggagagccaaagagctggaagctccgagacttgttttttccaaatttctcctgcgccttgctgagaagcttccagatcaagtcttccttgccatccacacttcgggccacgacagcatgagaagggacctgggccaggtggcactccttgaacgcatccactggcgcccgactgttgttcaggcagagaagctcatactggtccctgtcagccttctctggcaagttctcaaacactgtcgtctctttaacaaaagccacgtctccagccccgtcctgcagacacttgaaggcaccagaata

SEQ ID NO: 6890 - DNA, 361 bp, Bos taurus
  Clone ID: 30-LIB188-006-Q1-E1-H5
acttgagaaggacagagtcactcgagcccctccagggagctgtggctaaattcttctctgccagctgtgttccctgcattgatagacaagcataccccaacctgtgtcaactgtgcaagggggagggggagaaccagtgtgcctgctcctcccgggaaccatacttcggttattctggtgccttcaagtgtctgcaggacggggctggagacgtggcttttgttaaagagacgacagtgtttgagaacttgccagagaaggctgacagggaccagtatgagcttctctgcctgaacaacagtcgggcgccagtggatgcgttcaaggagtgccacctggcccaggtcccttcgcatgctgt

SEQ ID NO: 6891 - DNA, 211 bp, Bos taurus
  Clone ID: 30-LIB188-007-Q1-E1-H5
gccatgggcgcgggatactcctattacaacctggatgaaacttgtatccgcttctatcacccggataaagaggacggaatgctgagcaaactctgccacaaagatacctgccgctgtgcagaggagaactgcttcatgcaccacacggagaaggaggtcactctggaggaccggctggacaaggcttgcgagccgggcgtggactatgtgt

SEQ ID NO: 6892 - DNA, 432 bp, Bos taurus
  Clone ID: 30-LIB188-008-Q1-E1-H5
actgtggcacctgctgggcacatggcagcaccagtgccatggcggaccggatcaacatcaagaggaagggggcgtggccgtccacactgttgtcggtgcagcacgtgctcgactgtggcgacgcgggctcttgtgaggggggcaacgacctgccggtgtgggagtatgcccaccggcacggcatccccgacgagacctgcaacaactaccaggccaaggaccaagagtgtgacaagtttaaccagtgtgggacctgcactgaattcaaagagtgccatgtcatcaagaactacaccctctggaaggtcggtgactacggctccctttcggggagggagaagatgatggcagaaatctacaccaacggccccatcagctgtggcataatggcaaccgaaaagatgtctaactacactggtggcatctactccg

SEQ ID NO: 6893 - DNA, 404 bp, Bos taurus
  Clone ID: 30-LIB188-008-Q1-E1-H9
accagtaatagggagtgggatcaatcccttctcttttgtaacctgccaggatctcttcattatcccagatacgcatggagccacccacgatctcaccaacattgggcatcaacacgtcgacagattcggtgagccgggggtcctcgggacagcgctgcatgtagaaggacttgatctccacgggaaagcgacacagcaagatgggctcgttgatggtgtccgtcatcagtctctctggagcttccgggatgtcctctccaaattcatagaaagttccgtcttctttctttatattgtgttctttcagccacacaatcgcatctgaatagttcatccgtttgaaaggccgtttagggggcttaaaattcgggttgaggtcgcgcactatgtttcctgcgggtgat

SEQ ID NO: 6894 - DNA, 394 bp, Bos taurus
  Clone ID: 30-LIB188-009-Q1-E1-H5
gggcgcgggatacattgcctggaaaatcccatggatggaggagcctggtaggctgcagtccacagggtcacgaagagttggacacgactgagcgacttcactttcacttttcactttcatgcattggagaaggaaatggcaacccactccaatgttcttgcctggagaatcccagggacgggggagcctggtggctgccgtctgtgggatcacatagagtcggacatgactgaagtgacttagcagtagcatcagcagcagcagcagcagcagctcattcctattctgtatgtaggttccttttgatccttcacataatggaaaattggggctgattgcattttacatctctagaaagtgtatgtgtgtatgtgtgtgtgtgtgtgtgtgtgat

SEQ ID NO: 6895 - DNA, 333 bp, Bos taurus
  unsure (56): unsure at all n locations; Clone ID: 30-LIB188-010-Q1-E1-H5
actgattttaaaaactaataacttaaactgccacacacaaaacatatggtccacanaaacattctcctttccttctaaaggtttaacaagccatggtaaccataaacaatcctttaacaataaacctaaattggcaaattgaaacaacaattccgaaaacgttcctccaacaatgaataaaacaggggttgcaaggaattgggaaaaaaatccattatacctttcaaccttcctgggaaacattgggaaccttgcaatccagctgccttcttgtccaatgctttgatgacacccacagagacagtctgtctcacctgcgcggggcggcgctcc

SEQ ID NO: 6896 - DNA, 273 bp, Bos taurus
  Clone ID: 30-LIB188-010-Q1-E1-H9
acccttccgttggtcgcagcacacaatctatgctactgtgtttggaggatttccggttcgctgccatgacaggcaccaggccacacttgcccgcagtgtagatagatcctccatccaagttcagggcatctgcgtcccctttcagcaccaggacgatgcagtcgtcagtggtggacgccgtggcacatgtcacgttctggccgctctgcagggtccactgctggcacgtcttctgctcctcaagtcccactgcgcagtacacgaccctggtgt

SEQ ID NO: 6897 - DNA, 401 bp, Bos taurus
  Clone ID: 30-LIB188-011-Q1-E1-H5
acggaagttacttggtaaatccagaatcaggatacaatgtctctttgctatacgaccttgaaaatctgcctgcatccaaggattccatcgtgcatcaggctggcatgttgaaacgaaactgttttgcctctgtctttgagaaatacttccagttccaagaagagggcaaggaaggagagaacagggcagttatccattatagggatgatgagaccatgtatgttgagtcaaaaaaagacagagtcacagtagtcttcagcacagtgtttaaggatgacgacgatgtggtcattggaaaggtgttcatgcaggagttcaaagaaggacgcagagccagccacacagccccacaggtcctcttcagccacagggaacctcccttagagctgaaagataccgat

SEQ ID NO: 6898 - DNA, 425 bp, Bos taurus
  Clone ID: 30-LIB188-012-Q1-E1-H5
acacggtcactaccgacaaggtgccttgtcctttcccttcagcttttactgtgaaacgctcattttccttagtctcttctgagcgcaggaggctggcagattcccagaggatacgatgcctgaccgcagagttgcggctgggcagttggatggacacatccaggttcagctccttgtgatcaggaacatccttctggtattgggccaaggcttggaacaccatgaaagtggcctgcgtggagccataaccacctccatagtatctctgctcgttgagccagcgcacgacaggaggcgtagtgtcgtagtctttgcgtgccagcagagccaagagggcgtaggacgtggcctccacattgtagagcttctggttaggttcctcccagcggttcttttctttggctgtgttcagaaatttggtgagg

SEQ ID NO: 6899 - DNA, 445 bp, Bos taurus
  Clone ID: 30-LIB188-012-Q1-E1-H9
ctcccgtaggccatggcggcgggatacaacgtctacaagatccactggctcatggcagccctgactttcaccaagagcgtctctctcctcttccacagtatcaactactacttcatcaacagccagggccaccccatcgaaggcctcgctgtcatgcactacatcacgcatctgctgaaaggtgccctcctcttcatcaccattgccttgatcggctccggctgggccttcgtcaagtatgtgctgtcagacaaggagaagaagatctttgggatagtgatcccactgcaggtcctggccaacgtggcctacattgtcatggagtcccgcgaggagggtgccagcgactacggtatctggaaggagatcctcttcctggtggatctcatctgctgtggcaccatcctgttccccgtggtctggtccatccggcatctccaggacg

SEQ ID NO: 6900 - DNA, 411 bp, Bos taurus
  Clone ID: 30-LIB188-013-Q1-E1-H5
acaaagcggtcagcccacggaaccatatacaacagttgcacagagtcctagaaaaaacgcatctctctaaaggcaactcagaataggtaaggcaggtggcccccctccccccaccccacaacacatacagaacaaaacagagaaaggagaagccagtggccaggatgaccccagagctccggccctagggggtctcccaagccccggggcacaggtggatatggccttgaaaaggggagaggccctgccaggctgaggccaggtccccctctggctgtaggaatggggaaggggctccggctaagggggtatactcaggggaccactgagggactcagtgtcagctctgtgcccaagggggccagggaccctcggtggcctctcctgggactccacagaactatggggact

SEQ ID NO: 6901 - DNA, 377 bp, Bos taurus
  Clone ID: 30-LIB188-015-Q1-E1-H5
gccatggcggcgggatacatcttgcaggtggctcttcctccacatcacggctagggtctccaagatgatgcgagtgtgagccccaaggccgcggtctggaagcggaacttcacggattgttttaagaacatggcagacaagcccgacttgggggaaatcaacagcttcgataatgccatgctgaataagactgagacgcaggagaagaacacccccttgtcatcttgaacctcactcactacagatggcttagagccaacctcttctcgacccctatgcataacctcaccactcgacctgatcaatgttaactaaaatcacccctgatcctgggacagaacgaaagatgcccaatctccgttatgttgtgcatatct

SEQ ID NO: 6902 - DNA, 414 bp, Bos taurus
  Clone ID: 30-LIB188-016-Q1-E1-H5
ggcggccggatacaacgccgaatctaccttccaggggatcctcagaaacccaagagcagagtctttgaatagcaggtccctctggccgggtggaaagccaaaagggctggaagctccgagacttgttttttccaaatttctcctgcgccatgctgagaagcttccagatgaagtcttccttgccatccacacttcgggccacgacagcatgataagggacctgggccaagtggcactccttgaacgcatccactggtgctcgactgttgttcacgcagagaagctcatactggtccctgtcagccttctctggcaagttctcaaacactgtcgtctctttaacaaaagctacgtctccagccccgtcctgcagacacttgacggcaccataataaccgaagtatggttcccggg

SEQ ID NO: 6903 - DNA, 434 bp, Bos taurus
  unsure (356),(388): unsure at all n locations; Clone ID: 30-LIB188-017-Q1-E1-H5
ccatggcggcgggataccctcttcagtgtgacttaggtgggacattgtccaggcagaactgatgtctctgtttggatactgcacaagggggccctacgcacacccataaaggtagccatacccaggagggttgattggcaggctggaagaaaaattccatgacaaaggcacttttacctcaatagggagctgggagttgactgggagtgttataggggtggggaggaattatttcaatagaggtgttatttgcagactgctgagagaaatgaagagagttcacctacaccgggccatctgcaggatcagtaggggctgctgtatgtctctgctgccgcaaggggaacgtaatgtangcatcatagccatagatgcctgcatcgcatangcccatcgcccctgcagcgattttggaaccgtttcctctcgcaacg

SEQ ID NO: 6904 - DNA, 360 bp, Bos taurus
  Clone ID: 30-LIB188-018-Q1-E1-H5
acctggattatatacagtagaacctatcgcttcttctatgagttatgacataagatcctgcctaacctcagttattaggaatttgcttagtcctgctgccctataggtggagtcatgtcgattacctgaagcatagtgttaagggctgttactcccatccttgtgggttacaaccttttaggtcacataactccagctatgtcagcctctcacttaaaacgcctattcttgtgagggtctctagcataaaggccctgcctgcgatagggctgacctggctcttcacagccggcctgactcaagtgaggagtttccaggtggtcccgctgccgttcaaggtcagaccttgagtatgtttgt

SEQ ID NO: 6905 - DNA, 424 bp, Bos taurus
  unsure (385): unsure at all n locations; Clone ID: 30-LIB188-018-Q1-E1-H9
acctaagtcactgtccatccagttgagccaaaaaatgcccaggggtagggaaatataggggaggaaaatccagggaaggagacatggggaggaaggcagagccacagacagtgaaccactgaaggatggcgccatcctgtgacttcctgtctgtgaccacaaacggaggaggaaggagcaccccagataagtccctcacctcccagcatgccgatccctttctccatcaggcacatacattctttcctcctactctgattgctcagagatgggccccacctccccagccctctgcagggcttcctctgacctcttcccttccccagagcagggtctcagttgccaggcaatcaagccaaggtgggcttgcccttgcaggtcctcncgctggaaggacctggggaggagtaaaggggagcctggc

SEQ ID NO: 6906 - DNA, 405 bp, Bos taurus
  Clone ID: 30-LIB188-021-Q1-E1-H5
acatcttgcaggtggctcttcctccacatcacggctagggtctccaagatgatgcgagtgggagccccagggccgcggtctggaagcggaacttctcggattgttttaagaaaatggcagacaagcccgacttgggggaaatcaacagcttcgataaggccaagctgaagaagactgagacgcaggagaagaacacccccttgtaatcttgagcctcactcactacagatggcttagagccagcctcttctccacccctaggcacagcctcccctctctacctgatcaatgttaaatagaagcacccctgatcctgggacagaaggaaggatgcccagtctccgttttgtttttttttttttgtagcctgcaaagtggctcgttggtcattttcccacaaagaat

SEQ ID NO: 6907 - DNA, 422 bp, Bos taurus
  Clone ID: 30-LIB188-022-Q1-E1-H5
acaaggcaaaactgttcttttcagttgaaatgctttggcagcaaagtaaatctttgcattctttcttagtaaggaaagatgcaatgtgctttttgcttcatctcagaagagcaagattcttgtcttttatcctctccatctaacggtcagtaaatacacggtcattttaaatttcacatggaaaggattaatctgatgcacatggaatcccctgccctggcagctgtgtgtgtgtgtgtgtgtgtgtgtgtgtgtgtctatacatattattcgggtttgtcagcacaagacaaaatgccttaggacttttacttgtcgctcagaggtggagggacaagtaaaatgcgtgacaagtgaacaagaaaggcgtctgcacgagtaaacaggggctgtgtcactagtgcgccgcacagcagccagac

SEQ ID NO: 6908 - DNA, 385 bp, Bos taurus
  Clone ID: 30-LIB188-022-Q1-E1-H9
acagtaaactccctagtgcgctcagcccagcttggtggccagctctttggccttcgccttttccagcttggcgatgcgtgccaccgacttcggccccaggacgttgcctccccagtgacgacggatctcatcgtatctgtcgttgtaattggtcctgatggcttccaccagcttagccagggcactcttgtcctccgagttgacttgtgtgaaggctacggtggtgcacgtcttcctgtgcaccaggcgccccagccgggccttgcccttgatgatgcagtagggaacccccatcttgcggcacagggcaggcaggaagaccacgagctcaatgggattcacgtcgtgagcgatcaccacaagctgagccttcttgttccccacc

SEQ ID NO: 6909 - DNA, 451 bp, Bos taurus
  Clone ID: 30-LIB188-023-Q1-E1-H5
catggccgcccgataccaagtgataccaggatcggcccccagaaccctcatctatggtgacaccagtcgagcctcgggggtccccgaccgattctccggctccaggtccgggaacacagccaccctgaccatcagctcgctccaggctgaggacgaggcagattatttttgtgcatctgctgaggatagtagcagtaatgttgttttcggcagcgggaccacactgcccgtcctgggtcagcccaagtccccaccctcggtcaccctgttcccgccctccacggaggagctcaacggcaacaaggccaccctggtgtgtctcatcagcgacttctacccgggtagcgtgaccgtggtctggaaggcagacggcagcaccatcacccgcaacgtggagaccacccgggcctccaaacagagcaacagcaagttcatgtccttaataaggaaa

SEQ ID NO: 6910 - DNA, 436 bp, Bos taurus
  Clone ID: 30-LIB188-024-Q1-E1-H5
tcccgtgcgccatggcggccggataccattacaaatattaaaaaaaaaaaatttaacaagcaaggctagagtttgataaattccatcttgtgatccattcttgtgcattcttcacttcttgagtcactcccaaaatccatttgtattgtaactcctaaaggatgatttacaggtcagtatcaaaccaggccagctgattgctgtcgcccgggggcagcccatccatgaggtcctgggcatgccccagatctggcagcccgtcaactggatagtcagcaccagggtggtggccgcccatctcatgttccatcatggggtccatccccaaggcgtcctggccgtaccaaaagaccttcctcctgatactgcgctgctggacctgcaaaacaacaaaattactggaattaaagattgggaactttaaaaacttgaaaaa

SEQ ID NO: 6911 - DNA, 282 bp, Bos taurus
  Clone ID: 30-LIB188-026-Q1-E1-H5
cgccatggcgcgggatacaataaagtcctcggccacactgtagaactttgggaatgctcgatccaaccgactgctgtcaccttcaccgttccagtttttaaatcctgagtcaagcgccaaaaaaaaaaaatcaaaaaagacaaaaaaaaaaacaaataaagccatgccaatctcatctcgttttctgcgcaagttaggttttgtcaagaaaaagggtgtaacgcagctaacagtccgcctagaagcatttgcggtggacgatggaggggccggactcatcgt

SEQ ID NO: 6912 - DNA, 413 bp, Bos taurus
  Clone ID: 30-LIB188-026-Q1-E1-H9
gggatacattggacctccactgtttcgaatcccttggatcatggaggcatggttcccagcgtcagagtaaatctcacagcctggcatcatcttagccagagtgaagagggtcgagtcattggccacaaagcacgaggagaacaagagtgcagcatctattccatggaggtcagccagctcctgctccaggtccacgtggaatttactagttccagaaatatttctagtacttggccaagcgctcggatcggcaaggggcaccagtcttgatctgccccgtgcacagccccaccaccaggtcagcaatgaaggtgtcctcagtctccccggagcgatgagacaccatgacgccccacccgttggactgggccagcttgcacgcctgcaaggactcggtcacagagccaatctgg

SEQ ID NO: 6913 - DNA, 424 bp, Bos taurus
  unsure (352): unsure at all n locations; Clone ID: 30-LIB188-027-Q1-E1-H5
acttcgtcaaagaccagcaccgcgtcccgctcagcgtgcgcgtgccaccgcgctgcgtgggcatctttctggatattgaggctggaaagctgtccttcttcaacgtatccgacggctcccacattttcaccttcaccgacaccttcccggggatgctctgcgcgtatttcaggcctagagcccacgatggcagcgaacacccagatccgctcaccatctgcccattaccagttggtgagaaacacgtcctcgaagaggaggacagtgacgcctggttacaaccctatgagtcctcaaacactgacctgggcctgtagtgaagtgctttcgtggccactggactgggtcctgngcggcttcctgaatacccagctggcgctatgctctcctgcttcctgtaaagccaacagatacactaacccca

SEQ ID NO: 6914 - DNA, 407 bp, Bos taurus
  Clone ID: 30-LIB188-028-Q1-E1-H5
tgctccctagcgccatgggcccgggatacttgtatcctcggaagaaataggtctttccattgggcatccagaagagagcagcatcaatcctgtcagtaggcagtcctcggcccagctccttaatgtgcttggggtagccaggctccagggaagcttcgtcaaacacccagtgcttgtctcctttgaagaagacaaacttgccatccttcctctcataggcagtgttgatggatgcgggcaggccccgccataactggccgatgggcatggggtatccgtccatcacctggtttttccttacgcgccagaaccaacgctccttgaagacaaacatctcccctcgaagcatggccacggtgtcaaagttcccatcacagatgttgggcccgtaggtgggatttttgggc

SEQ ID NO: 6915 - DNA, 335 bp, Bos taurus
  Clone ID: 30-LIB2809-001-Q1-E1-H5
actgtcaggtagaacttgaagaagaagctgagggtgagggtgcgtcggaattcaatcatgcctccaggggcgtctggggataaggacagttcttccgccaggcctgcacacacgtcctgtagcagcttctcattccagaactttgacagctgcttctgcgtggtcttgagggctgagatggttctgtccgccattccgccatagcagaggactagctcctttacctgcatgcttcctggctggaacaggactctcatgccgcaggtcaccttggctatgtcatcttctctccgggttgcctgcctgaatgctgataaaaaccccatcccccctgc

SEQ ID NO: 6916 - DNA, 417 bp, Bos taurus
  unsure (354),(406): unsure at all n locations; Clone ID: 30-LIB2809-002-Q1-E1-H5
acagcagaaaggcctgaatgggcatatctctctggggatagggcactgctttctggggaacaggcaggactttggactgagaaagggacagcacggactgaggaggaaacatgacagttggaggaagaggctggtgaggctggtgcatccaagactggagcagaggcagaggaaggtgcagattttcaacatcagtgagagtcaggctctggctttcagtaaagggctcaactggatatttagggaagggcatttctttgtgcttaggagccatagcctccttcactttggagactcccattacttcaggctgaaggaaaggcggcaccaccacaggggtttgagtaagagganggatgttttgtgggaagctgttatggatgggcccaaggaagggatagactanagactgtgtct

SEQ ID NO: 6917 - DNA, 255 bp, Bos taurus
  Clone ID: 30-LIB2809-003-Q1-E1-H5
catacgaagattcaaaatctgtccgactggaagattcacgtcagaaacttcctgagaaaccagagagatttgactcctggccctgtgtgatgggtcgcgaggccttcacctcggggagacattactgagaggtggaggtgggagacaggacggactgggcaattggggtgtgtagggagaatgtgatgaagaaaggatttgaccccatggctcccgagaatgggttctgggctgtggagctctatggaaatgggt

SEQ ID NO: 6918 - DNA, 396 bp, Bos taurus
  Clone ID: 30-LIB2809-004-Q1-E1-H5
ccggacgccatgggcgccggataccttcaatttgagattgccctattctaaaacagcagttgaagcctttggatagaatggtttgacatgatagatgaagagacatgtagagcatggaattttcagaaccatcaaagaccataactgtggagtccctcagaattcacttgactcttcaccacagtggcatagtagtcttttcactgttctcagagccaatgggattagggatgtcagagaatgatggggcatcagtgtattgtgtgcctagtggaacgtaataccaggcaccagatggataggcatccagctggtagaattgtctgaaaagctcagggtagaagtaggccagttcctgattcactcctatcataggttctttctgttgggcatgga

SEQ ID NO: 6919 - DNA, 412 bp, Bos taurus
  unsure (366),(369): unsure at all n locations; Clone ID: 30-LIB2809-004-Q1-E1-H9
catggccgcgcgatacagcagaaaggactgaatgggcatatctctctggggatagggcactgctttctggggaacaggcaggactttggactgagaaagggacagcacggactgaggaggaaacatgacagttggaggaagaggctggtgaggctggtgcatccaagactggagcagaggcagaggaaggtgcagattttcaacatcagtgagagtcaggctctggctttcagtaaagggctcaactggatatttagggaagggcatttctttgtgcttaggagccatagcctccttcactttgggagactcccattacttcaggctgaaggaaaggcggcaccaccacaggggtttgagtaaganganggatgttttgtgggaggctgttagggatgggcccagggaaggg

SEQ ID NO: 6920 - DNA, 434 bp, Bos taurus
  Clone ID: 30-LIB2809-006-Q1-E1-H9
actgcagaaaagcctgaatgggcatatctctctggggatagggcactgctttctggggaacaggtaggactttggactgagaaagggacagcacggactgaggaggaaacatgacagttggaggaagaggctggtgaggctggtgcatccaagactggagcagaggcagaggaaggtgcagattttcaacatcagtgagagtcaggctctggctttcagtaaagggctcaactggatatttagggaagggcatttctttgtgcttaggagccatagcctccttcactttggagactcccattacttcaggctgaaggaaaggcggcaccaccacaggggtttgagtaagacgagggatgttttgtgggaggctgttatggatgggcccagggacaggatagactagagactgtatctgggcaaacgggtggatt

SEQ ID NO: 6921 - DNA, 413 bp, Bos taurus
  Clone ID: 30-LIB2809-007-Q1-E1-H5
actgacggaggcggccgtgggagaggagttgggcaccgtgttagtgctcgtctcgctgatatagatcttagagatggggatcttcagagctttgctggccacctgcaccatcttggtgtgaaggccttggcccatctctgtgcccccgtggctcaccagcacggagccatctgtgtatacgtggatcagggctcctgcctgatttagaaaaggaactgtgaagcttattccaaatttggtaggaattatgcacaatcctctctttttccaacaattctccttgttgaacttgtcgacctcactcttccgagcgtaatactgagagctcttcaggcactcatcccagcacctgggcacgctgaacccctcaagcctctggttgaagtgggtcaggtccccttctttgtatcact

SEQ ID NO: 6922 - DNA, 411 bp, Bos taurus
  Clone ID: 30-LIB2809-008-Q1-E1-H5
accccagcaggaaattgttcccaatagtgctgaggaacgacttcacagtatgaaagagggaatccatgcccaacagaaagaacctatgataggagtgaatcaggaactggcctacttctaccctgagcttttcagacaattctaccagctgggtgcctatccagcgtgggctggtagtacgttccactaggcagagaatacactgatgccggatgagggcgcgggagatcgctaatcccatggggggcggagagggggggggggactactatgcgggggtgggtgaagagtcaagtgaattctgagggactccacagttatggtctttgatggttctgaaaattccatgctctacatgttctttcatctatcatgttcaaacattctatccaaaggcttcaactgctgttt

SEQ ID NO: 6923 - DNA, 424 bp, Bos taurus
  Clone ID: 30-LIB2809-009-Q1-E1-H9
gggatacaaggtacgattgtggaaagcctttcaagcagtgaggaatctattacacgcatcaataagaaaattgagaagtttcagagtgaggaacagcagcaaacagaggatgaactccaggataaaatccacccctttgcccagacacagtctctagtctatcccttccctgggcccatccctaacagcctcccacaaaacatccctcctcttactcaaacccctgtggtggtgccgcctttccttcagcctgaagtaatgggagtctccaaagtgaaggaggctatggctcctaagcacaaagaaatgcccttccctaaatatccagttgagctctttactgaaagccagagcctgactctcactgatgttgaaaatctgcaccttcctctgcctctgctccagtcttggatgcaccaccctc

SEQ ID NO: 6924 - DNA, 119 bp, Bos taurus
  Clone ID: 30-LIB2809-011-Q1-E1-H5
gcgggatacagcagaaaggcctgaatgggcatatctctctggggatacggcactgctttctggggaacaggcaagactttggactgacactgggacttcacggactgaggaggactcat

SEQ ID NO: 6925 - DNA, 431 bp, Bos taurus
  Clone ID: 30-LIB2809-012-Q1-E1-H9
acagtattctttaaaattttctttttaaattgaaagccaacaactctgcctttatgatgctaagctcatgttcttatttcttctcctatcttctttctcttctgttcccattatccttccctttgttttgtccctgtcaccttcctttctccttctcctcattgccccccaggcaagcaggtggtcagtcattggtgggtttccagcttccaaagcctagacaaccctgctgtagtctcaaactagtggtctttgccccggctgaccctttccttgagctgtctgagctttaaggtggatggctcaagctagagatatgacagaatcttctgggaagggccttgatgatcttcagcccagactttttctaaatgaaatggaaaaataactttattttggcaccaaactgaaaaaacaggtcaattgtcagg

SEQ ID NO: 6926 - DNA, 145 bp, Bos taurus; identical to SEQ ID NO: 763
  Clone ID: 30-LIB2809-013-Q1-E1-H5

SEQ ID NO: 6927 - DNA, 411 bp, Bos taurus
  Clone ID: 30-LIB2809-014-Q1-E1-H9
acctggtgagattgtggaaagcctttcaagcagtgaggaatctattacacgcatcaataagaaaattgagaagtttcagagtgaggaacagcagcaaacagaggatgaactccaggataaaatccacccctttgcccagacacagtctctagtctatcccttccctgggcccatccataacagcctcccacaaaacatccctcctcttactcaaacccctgtggtggtgccgcctttccttcagcctgaagtaatgggagtctccaaagtgaaggaggctatggctcctaagcacaaagaaatgcccttccctaaatatccagttgagccctttactgaaagccagagcctgactctcactgatgttgaaaatctgcaccttcctctgcctctgctccagtcttggatgca

SEQ ID NO: 6928 - DNA, 436 bp, Bos taurus
  Clone ID: 30-LIB2809-015-Q1-E1-H5
gcatgatccttaccgccatgggggcgggatacctggtgagactgtggaaagcctttcatgcagtgcgaaaattgagaagtttcagagtgaggaacagcagcaagcataggatgaactccaggatacaatccagccctttgcccagacacagtctccagtctatcccttcactgggccgatccctaatagcctcccacaaaacatcccgcctcttactcaaacccctgtggtggtgccgcctttccttcaacctgaagtaatgggagtctccaaagtgaatgaggctatggctcctaatcacaccgaaatgcgcttcactaaatatccagttgagccctttactgaaagccagagcatgacgctcactgatgttgaaaatctgcactttcctctgcctctgctccagtcttggatgcacgagcctcaccagcctcgt

SEQ ID NO: 6929 - DNA, 397 bp, Bos taurus
  Clone ID: 30-LIB2809-015-Q1-E1-H9
gcccggaatacagcagaaaggcctgaatgggcatatctctctggggatagggcactgctttctggggaacaggcaggactttggactgagaaagggacagcacggactgaggaggaaacatgacagttggaggaagaggctggtgaggctggtgcatccaagactggagcagaggcagaggaaggtgcagattttcaacatcagtgagagtcaggctctggctttcagtaaagggctcaactggatatttagggaagggcatttctttgtgcttaggagccatagcctccttcactttggagactcccattacttcaggctgaaggaaaggcggcaccaccacaggggtttgagtaagaggagggatgttttgtgggaggctgttagggatgggccc

SEQ ID NO: 6930 - DNA, 268 bp, Bos taurus
  Clone ID: 30-LIB2809-016-Q1-E1-H5
acagcagaaaggcctgaatgggcatatctctctggggatagggcactgctttctggggaacaggcaggactttggactgagaaagggacagcacggactgaggaggaaacatgacagttggaggaagaggctggtgaggctggtgcatccaagactggagcagaggcagaggaaggtgcagattttcaacatcattgaaagtcaggctctggctttcattaaagggctcaactggatatttagggaagggcatttctttgtgcttagg

SEQ ID NO: 6931 - DNA, 422 bp, Bos taurus
  unsure (378): unsure at all n locations; Clone ID: 30-LIB2809-018-Q1-E1-H5
acagcagaaaggcctgaatgggcatatctctctggggatagggcactgctttctggggaacaggcaggactttggactgagaaagggacagcacggactgaggaggaaacatgacagttggaggaagaggctggtgaggctggtgcatccaagactggagcagaggcagaggaaggtgcagattttcaacatcagtgagagtcaggctctggctttcagtaaagggctcaactggatatttagggaagggcatttctttgtgcttaggagccatagcctccttcactttggagactcccattacttcaggctgaaggaaaggcggcaccaccacaggggtttgagtaagaggagggatgttttgtgggaggctgttanggatgggcccacggaagggatagactagagactgtgtctgggca

SEQ ID NO: 6932 - DNA, 380 bp, Bos taurus
  Clone ID: 30-LIB2809-018-Q1-E1-H9
accccagatggaaattgttcccaatagtgctgaggaacgacttcacagtatgaaagagggaatccatgcccaacagaaagaacctatgataggagtgaatcaggaactggcctacttctaccctgagcttttcagacaattctaccagttggatgcctatccatctggtgcctggtattacgttccactaggcacacaatacactgatgccccatcattctctgacatccctaatcccattggctctgagaacagtgaaaagactactatgccactgtggtgaagagtcaagtgaattctgagggactccacagttatggtctttgatggttctgaaaattccatgctctacatgtcttttcatctatcatgtcaaacca

SEQ ID NO: 6933 - DNA, 429 bp, Bos taurus
  Clone ID: 30-LIB2809-020-Q1-E1-H5
catggccccgggatacagcaaaaaggcctgaatgggcatatctctctggggatagggcactgctttctggggaacaggcaggactttggactgagaaagggacagcacggactgaggaggaaacatgacagttggaggaagaggctggtgaggctggtgcatccaagactggagcagaggcagaggaaggtgcagattttcaacatcagtgagagtcaggctctggctttcagtaaagggctcaactggatatttagggaagggcatttctttgtgcttaggagccatatgctccttcactttggagactcccattacttcaggctgaacgaaaggcggcaccaccacaggggtttgagtaagaggagggatgttttgtgggaggctgttagggatgggcgcagggaagggatagactagagactgtgt

SEQ ID NO: 6934 - DNA, 428 bp, Bos taurus
  Clone ID: 30-LIB2809-021-Q1-E1-H5
acctcttattacaagctctgcccctgctccttcccctcactgacatagcccctcttccctgaagctatgaacatgtgagatacttgtagacacgcaagcacctggcaagtttgctttcaagagcctgctaatgaatgaggaaagtcagtccaagccaggtgtcagagcccccaccatgagaaaaagaggaatacaaaggactgagagtattaaacaaggcaaagctcttctttttctccaaaactagtcaggcctggagactacgtgatttgtttgaagacagaaccagcagagctgcagggtgactggaagccatcgccagagggaagaacacaagcttcaaggccagatgcccagctgagctctcagaacagcccagccaggaggacaggcaggagaaccaggggccaggccaccaggaaccctgc

SEQ ID NO: 6935 - DNA, 387 bp, Bos taurus
  Clone ID: 30-LIB2809-021-Q1-E1-H9
catgggcgcgggaaacttggtgagattgtggaaagcctttcaagcagtgaggaatctattacacgcatcaataagaaaattgagaagtttcagagtgaggaacagcagcaaacagaggatgaactccaggataaaatccacccctttgcccagacacagtctctagtctatcccttccctgggcccatccctaacagcctcccacaaaacatccctcctcttactcaaacccctgtggtggtgccgcctttccttcagcctgaagtaatgggagtctccaaagtgaaggaggctatggctcctaagcacaaagaaatgcccttccctaaatatccagttgagccctttactgaaagccagagcctgactctcactgatgttgaaaat

SEQ ID NO: 6936 - DNA, 328 bp, Bos taurus
  unsure (7): unsure at all n locations; Clone ID: 30-LIB2809-026-Q1-E1-H9
gcatggncgcggatacatccttgagccatggcggccagcgacatctccctgctggacgcccaaagtgcccccctgagagtgtatgtggaggagctgaagcccacccctgagggcgacctggagatcctgctgcagaaatgggagaatgatgagtgtgctcacaagaagatcattgcataaagaaccaagatccctgcggtgttcaagatcgatgccttgaacgagaacaaagtccttgtgctggacaccgactacaaaaagtagcgttgtcgcggccgacgtcaagctttgttgtttttgctcttttttttctagtgccttaaaatgt

SEQ ID NO: 6937 - DNA, 210 bp, Bos taurus
  Clone ID: 30-LIB2809-027-Q1-E1-H5
ggtcgcggctaggccgtacgtcctcagcacctacctctaggctgtggatcttgtgagtgggctggaatagcttgttgcgcatctccctcgtcacgatcttatcctgattcatctgtttggacctcttggtcagcataccccgcaccagacggtctgttcgatcgtctttgactatccgccaggtgttcacgcatgagggtctgtacgggg

SEQ ID NO: 6938 - DNA, 439 bp, Bos taurus
  unsure (408): unsure at all n locations; Clone ID: 30-LIB2809-028-Q1-E1-H9
ccatgggcccgggatacagaagaattaacaaagcaaatgaaaagcaccaataattccatccccagaaacaatcacttttaatatattggcatacgttagtctatttcaacatttctgaaatcatccatggttatctaatttttctcatataacctgtaacgtatttctgtgttgctgcaatttcttaatagaagtaatttacactggctgtgtgaatgtataatagaagagtcctactgatgaacgtgctgaggcaaggaagaaatcagcggtcagttatctgaggctatatcacctgtgaatgtcagaacagagagcttcaggattcagaggaccgaactctgaaaaagtcattctccttctttagaactgcagtatcctcttctacccaagaggagttcaggccanaagacaccagatcctggcctctccgattcac

SEQ ID NO: 6939 - DNA, 409 bp, Bos taurus
  Clone ID: 30-LIB2809-031-Q1-E1-H5
cgccatgggcccgggatacaggctaaagacccatcctccagggcttccggacctttgccaagaatggtggatgctgtggaggaaatgggaacaacccaaactgctgcatgaaccagaataaagaccacaccgttactctctcaccatctttattcaacccagaggagttcatgcccctggatcctacccaggaacccatcttccctccagagttgctgaggctgaaagacgttccaccgaagcagctgcgttttgaaggggagcgtgtgacctggatccaagcctccaccttgaaggagttgctggacctcaaagctcagcatcacgaggccaagctggtggtggggaacacagagatcggcattgagatgaagtttaagaatcagctatttcctatgatcatctgccc

SEQ ID NO: 6940 - DNA, 405 bp, Bos taurus
  Clone ID: 30-LIB2809-031-Q1-E1-H9
actgttagaaacgctgatggaccttgtgggaccccagagattctccagtgctgtgggattggtgaccattgtggagtgctgtcctgtcctcctgggaccaccagttttaggtcgtctcaatgacatatatggagactacaaatacacatactgggcatgtggcataatccttattgtcgcaggcatctatcttttcattggcatgggcatcaattaccgacttcttgaaaaagaacagaaagctgagaagcagcagaaaaaggaaagtaaagatgaggagaccaatgtagatgttgctgagaagccaaaagaagtcatcgatgcagcagaatctccagaacataaagccacagaagaagaccccaaagaggcggagagtccagtttgaacctgtgggactgaagg

SEQ ID NO: 6941 - DNA, 305 bp, Bos taurus
  Clone ID: 30-LIB3057-001-Q1-K1-H5
ggtttcgctggatagtaggtagggacagtgggaatctcgttcatccattcatgcgcgtcactaattagatgacgaggcatttggctaccttaagagagtcatagttactcccgccgtttacccgcgcttcattgaatttcttcactttgacattcagagcactgggcagaaatcacatcgcgtcaacacccgccgcgggccttcgcgatgctttgttttaattaaacagtcggattcccctggtccgcaccagttctaagtcggctgctaggcgccggccgaggcgaggcgccgtgcggaaccgc

SEQ ID NO: 6942 - DNA, 404 bp, Bos taurus
  Clone ID: 30-LIB3057-001-Q1-K1-H9
cacaaataaaacattaactttcctagaactcactaatgcagagtagctagacccagcagtttggattcatacagatcagaagctctgtgtcacttcactgccttttctgtcatcctccccttgagtaaatacgtgaccaacctgtgcagtgtgacagtctcatttgcaggaaaaactaataacatggatcataatcatccagattctctcacttggtaccagcacttatgtaggtatcaagagaagaggtctaagatttataaactttaactttccataaggattttagacagtattttaatagaacatgactaatgaaagtgacaaatttttaagtttctcaaaaagtccccattgtaaaccttttaagggaagagaaatgaactaaaaagaacattgatgtg

SEQ ID NO: 6943 - DNA, 234 bp, Bos taurus
  Clone ID: 30-LIB3057-003-Q1-K1-H5
gcccaacagacccaccatgaagtccttatgagcttgattcttgggttgctgcgctcctggaatgaccctctctatcacctagtcaccgaagtgcggggtatgaaaggagccccagatgctatcctatcgagggccctatagaatgaaggagaaaaccaaccacttctggaagggattggaatgatatttggccaggttatttctggaacccaagagacttaaccctaccctggg

SEQ ID NO: 6944 - DNA, 429 bp, Bos taurus
  Clone ID: 30-LIB3057-004-Q1-K1-H5
gtactcacgatccatcacccttcctttcttcttttatttatgtcatcatcataatcttttaatagtatgcataataaactgtatacacatcttatataacttttatctaaacatcataatctcaccactgtcatttttcattttatttaaaaaataaataaaacaatacaatttattataaataccaccttatatttaattatattatataatatacacaattattaaatttattctctatacacatatacacaaaaaatttcacacaactttataaacttcctttatataataaaaataaaaactaacaaaatgttttataaattccctaatacatattactaccctttattaaaattattctcattccttcacaaaatataatcactaaattaaaatattttacactttttttaatataaaaaatat

SEQ ID NO: 6945 - DNA, 176 bp, Bos taurus
  Clone ID: 30-LIB3057-005-Q1-K1-H9
ctacgaatggtttagcaccaggcgccccacgaacgtgcggtgcgtgacggtcgagggggcgtgtcgtctttccgggcgcgcccctgtgtaccgggactaagggctctactcaccgtacccctggtccgacgcgcggcgggggcgcgccgtgccagtgccccttatacctgtgcgac

SEQ ID NO: 6946 - DNA, 419 bp, Bos taurus
  Clone ID: 30-LIB3057-007-Q1-K1-H5
tctagatcgcgagcggccgcccttttttttttttttttcatctacacagcgttgttgatttttattcaactatacgcaaacagcaaaattaacacaatattcaccaactccagaacagttttcttttttaaaccaaagtgtgattaatttaacaagcacagactttcagattctgataacctcttacccaacccagccctgctgctcatctagatggccaggctttaacagcaaagcaatttcttctatggagctttttccagtattgctctttaaaggagccacagtgggacactgacacgcagtaaccagcctgagacgttgggggtcccctggttgacttggtgagacagagccgtgaaaacacatgccagtaggtacccttacacacaattctgtgctcagggtcacaaaggcgg

SEQ ID NO: 6947 - DNA, 402 bp, Bos taurus
  unsure (344),(382): unsure at all n locations; Clone ID: 30-LIB3057-007-Q1-K1-H9
cccacgcgtccggttttgttagttcacacactaagttctgaaaaatgagttccaaagtttgtcttattctacttatgttcatggccactatacttttgatctcctctgaggttgcacccgatgatgcataccagaattttgacaaaacagatgggaagcgtagtgcaaatggggtagatgaaagcaaatattggcgtggtggctatggcgactatggtggttggcgtggtggtggttggcgtggtggctatggaggctggcgtggtggctatggtggtgggcgtggtggctatggtggctggcgtggtggctatggtggtgggcgtggtggctacggaggttgnggtggtggctttggccctaacgaacataatgaggctgngattgatgctagccctcaca

SEQ ID NO: 6948 - DNA, 441 bp, Bos taurus
  Clone ID: 30-LIB3057-009-Q1-K1-H5
tcctggtgaagtgtgtttcttgaaatcatcaccaccatggacagcaaaggttcgtcgcagaaagggtcccgcctgctcctgctgctggtggtgtcaaatctactcttgtgccagggtgtggtctccacccccgtctgtcccaatgggcctggcaactgccaggtatcccttcgagacctgtttgaccgggcagtcatggtgtcccactacatccatgacctctcctcggaaatgttcaacgaatttgataaacggtatgcccagggcaaagggttcattaccatggccctcaacagctgccatacctcctcccttcctacccctgaagataaagaacaagcccaacagacccaccatgaagtccttatgagcttgattcttgggttgctgcgctcctggaatgaccctctctatcacctagtcaccgaggtgcggggtatg

SEQ ID NO: 6949 - DNA, 335 bp, Bos taurus
  Clone ID: 30-LIB3057-009-Q1-K1-H9
ggcgcgtgcctgccaggtgggctcaactgccatattgcgctgcttgggtgcaacttggtttgccacgtaacagtgctcttgatgcattttctaacaggagggtgtaacgggattggcgcgtgggtcttcaatttcgtgctcaacggtgctattttgttgctgcttcttaatttctacgtgaggatgtatttagcaaggaagaggaagcgtaagggtgtcgtcattgatcatcgttgtgagaatgataataacattgctcgctcctctgtcttgggcgctggaaaagaaccacatactaataaagtgaagtccaatttaagcacagatatatattt

SEQ ID NO: 6950 - DNA, 404 bp, Bos taurus
  Clone ID: 30-LIB3057-011-Q1-K1-H9
gtttgccgccgggacacaggtgtcgtgaaaaccaccgttaaacctaagccaaaatgggaaaggagaagacccacatcaacatcgttgtcattgggcacgtagattcagggaagtctaccacgactggccatctgatctataaatgtggcgggatcgacaagagaacaattgaaaagttcgagaaggaggctgccgagatgggaaagggctccttcaaatatgcctgggtcttggacaaacttaaagctgaacgtgagcgtggtatcaccattgatatctccctgtggaaatttgagaccagcaagtactatgttaccatcattgatgccccaggacacagagacttcatcaaaaacatgattacaggcacatcccaggctgactgtgctgtcctgatcgttgct

SEQ ID NO: 6951 - DNA, 431 bp, Bos taurus
  Clone ID: 30-LIB3057-012-Q1-K1-H5
gcttcacaatgataggaagagccgacatcgaaggatcaaaaagcgacgtcgctatgagggcttgtccgccacaagccagttatccctgtggtaacttttctgacacctcctgcttaaaaccccaaaggtcagaaggatcgtgaggccccgctttcacggtctgtattcgtactgaaaatcaagatcaagcgagcttttgcccttctgctccacgggaggtttctgtcctccctgagctcgccttaggacacctgcgttaccgtttgacaggtgtaccgtcccagtcaaactccccacctggcactgtccccggagcgtgtcgcgcccggccgtctctcggtcgggcgcttggcgccagaagcgagagcccctcggggctcgcccccccgcctcaccgggtcagtgaaaaaacgatcagagtagtggtattt

SEQ ID NO: 6952 - DNA, 381 bp, Bos taurus
  Clone ID: 30-LIB3057-012-Q1-K1-H9
ccgagagctgctgtcatggcggccactctatgggccttcttttccgtcctcctgctggtgctatcaagggatgcccagagctcggaggtgtctgggtctacctccgacgggtcaggagggagtggggtcggcactggagatcgcttcaagattgaggggcgtgcggttgttcctggagtgaaaccccaggactggatctcggcggcccgagtgctggtagacggagaagagcatgtcggctttctgaagacggatgggagttttgtggttcatgatataccttctggatcttatgtagtggaagttatttctccagcttacaggtttgatcctgtccgagtggatatcacttctaaaggcaaattgagagctagatacgtg

SEQ ID NO: 6953 - DNA, 400 bp, Bos taurus
  Clone ID: 30-LIB3057-013-Q1-K1-H5
cggacgcgtgggatcgcgagcggccgcccttttttttttttttttttagattttggcagcgctacagagtctgttgttatttaagatgaaacccattagagccaagcatgcattacaaagctataaagctcagagaagtttgccagggaatggatcattaagaaccatctcagaaatggataggatgaatgtgggcttagcagttgttgttgtagatgattctgcaattcaggagcttaaggtaagtgtcaatcttgcttgaatccctgcgcaggcagtggagcaggttataaaaagcggaataacgtgcatcttcatccttagtttgcagggacgggagttctgaccaacacagggtagggctcagtctctttggctccaggaataacctggccaaata

SEQ ID NO: 6954 - DNA, 377 bp, Bos taurus
  Clone ID: 30-LIB3057-013-Q1-K1-H9
taaggaggaggcgccatcatgggagttgacatccgccacaacaaggaccgaaaggttggacgcaaggagcccaagagccaggacatttacctgaggctgttggtcaagctgtataggttcctggccagacgaaccaactccaccttcaatcaggttgtcctcaagagattgttcatgagccgcaccaacaggccaccgctctctctttcccggatgatccggaagatgaagcttcctggccgggagggcaaaacagctgtggtcgtggggactataaccgatgatgttcgtgtccaggaggtgcccaaactgaaggtgtgtgctttgcgagtgagcagccgcgcccggagtcgcatcctcaaggccgggggcaagat

SEQ ID NO: 6955 - DNA, 407 bp, Bos taurus
  Clone ID: 30-LIB3057-015-Q1-K1-H5
tcttgaaatcatcaccaccatggacagcaaaggttcgtcgcagaaagggtcccgccttctcctgctgctggtggtgtcaaatctactcttgtgccagggtgtggtctccacccccgtctgtcccaatgggcctggcaactgccaggtatcccttcgagacctgtttgaccgggcagtcatggtgtcccactacatccatgacctctcctcggaaatgttcaacgaatttgataaacggtatgcccagggcaaagggttcattaccatggccctcaacagctgccattaccttctccttcctacccctgaagattaagaacaagcccaacagacccaccatgaagtccttatgagcttgattcttgggttgcttcgctcctggaatgaccctttctatcacctagtca

SEQ ID NO: 6956 - DNA, 284 bp, Bos taurus
  Clone ID: 30-LIB3057-017-Q1-K1-H5
ttctcgaatcctcgactcctcgactcctactcagcttcggcctcctcgcctcctcttcaggctccaccatgtccaggggggtgacccagaagtcctacaaggtgtctacctctgcccccaggtccttcagcagccgctcctacaccagtgggcccggctcccgcatcagctcctctgccttttcccgagtgggcagcagcagcagctttcgcggcggcctgggcaccggcatgagcatggctggaagctacggtggggccctaggtttggttggcattcacagc

SEQ ID NO: 6957 - DNA, 387 bp, Bos taurus
  Clone ID: 30-LIB3057-018-Q1-K1-H5
ggcacatcccaggctgactgtgctgtcctgatcgttgctgctggtgttggtgaatgtgaagccggtatctccgagaacgggcagacccgtgagcatgcccttttggcttacaccctgggtgtgaaacaactaattgttggcgttaacaaaatggattccactgagccaccctatagccagaagagatacgaagaaattgttaaggaagtcagcacctatattaagaaaattggctacaaccccgacacagtagcatttgtgccaatttctggctggaatggtgacaacatgctagaaccaagtgctaatatgccatggttcaagggatggaaagtcacccgtaaggactgcaatgccagtggaaccaccctgcttgaaactctggat

SEQ ID NO: 6958 - DNA, 360 bp, Bos taurus
  Clone ID: 30-LIB3057-020-Q1-K1-H5
atcaccctgcccacttcaacctttctgtccataaacctcacaacgcgccatcgtgattatttccagtacctgccaccccagtcttaatcactgttcgaagaacagtctcagaactgtttgtctcaattggccatttaagtttaatagtaaaagactggttaatgataacaatgcatcgtaaaaccttcataaggaaaggagaatgtttttgtggaccatatgttttgtgtgttgcaatttaaattattagtttttaaaatcagtactttttaatgaaaacaacttttccaaaaatctgtcacaaaattttatacccatttaaaaaagtttaatgagaataaaattttttttatcattctt

SEQ ID NO: 6959 - DNA, 423 bp, Bos taurus
  unsure (418): unsure at all n locations; Clone ID: 30-LIB3057-020-Q1-K1-H9
cttgaaatcatcaccaccatggacagcaaaggttcgtcgcagaaagggtcccgcctgctcctgctgctggtggtgtcaaatctactcttgtgccagggtgtggtctccacccccgtctttcccaatgggcctggcaactgccaggtatcccttcgagacctgtttgaccgggcagtcatggtgtcccactacatccatgacctctcctcggaaatgttcaacgaatttgataaacggtatgcccagggcaaagggttcattaccatggccctcaacagctgccatacctcctcccttcctacccctgaagataaagaacaagcccaacagacccaccatgaagtccttatgagcttgattcttgggttgctgcgctcctggaatgaccctctctatcacctagtcaccgaggtgcggngtatg

SEQ ID NO: 6960 - DNA, 269 bp, Bos taurus
  Clone ID: 30-LIB3057-021-Q1-K1-H5
cggacgcgtgggccgtgccccgtgtccatgtacgtaaggctctccgtaccggaccccggggtcgactctcgtatggggcgcggcgggccatgctccggaagactccctctactgaccttctgctgtgacgaaccaacaccatgctattccattccaaccgacgctctcttagcactgcagtatctttctttctgggctagaatatgacttaaaggcgactagtcataatactactgatggtaacttgatcccattggctactaaaccaa

SEQ ID NO: 6961 - DNA, 434 bp, Bos taurus
  unsure (308): unsure at all n locations; Clone ID: 30-LIB3057-022-Q1-K1-H5
tcctggtgaagtgtgtttcttgaaatcatcaccaccatggacagcaaaggtgcgtcgcagaaagggtcccgcctgctcctgctgctggtggtgtcaaatctactcttgtgccagggtgtggtctccacccccgtctgtcccaatgggcctggcaactgccaggtatcccttcgagacctgtttgaccgggcagtcatggtgtcccactacatccatgacctctcctcggaaatgttcaacgaatttgataaacggtatgcccagggcaaagggttcattaccatggccctcaacagctgccatacctnctcccttcctacccctgaagataaagaacaagcccaacagacccaccatgaagtccttatgagcttgattcttggttgctgcgctcctggaatgaccctttctatcacctagtcaccgaggtgcgg

SEQ ID NO: 6962 - DNA, 204 bp, Bos taurus
  Clone ID: 30-LIB3057-023-Q1-K1-H5
aaaaaaaaaaaaacataaacccaaaaataaaaaaaaacaaaaaaaataaaaaaaaaaaaaaaataaaaaaaaaataaaaataaaaataaaaataaaaaacaattaaaaaaaaaaaacaaaaaaaaaataaaaaaaaaaaaaaattcaaaaaaaaaaaaaaaaaatacataaaaaaaaaaaaataaaaaaaaaaaaacaaaaaaa

SEQ ID NO: 6963 - DNA, 428 bp, Bos taurus
  Clone ID: 30-LIB3057-025-Q1-K1-H5
cccagggcaaagggttcattaccatggccctcaacagctgccatacctcctccgtgccgacccctgaagataaagaacaagcccaacagacccaccatgaagtccttatgagcttgattcttgggttgctgcgctcctggaatgaccctctctatcacctagtcaccgaggtgcggggtatgaaaggagccccagatgctatcctatcgagggccatagagattgaggaagaaaacaaacgacttctggaaggcatggagatgatatttggccaggttattcctggagccaaagagactgagccctaccctgtgtggtcaggactcccgtccctgcaaactaaggatgaagatgcacgttattccgctttttataacctgctccactgcctgcgcagggattcaagcaagattgacacttaccttaag

SEQ ID NO: 6964 - DNA, 413 bp, Bos taurus
  Clone ID: 30-LIB3057-025-Q1-K1-H9
ctttgatgtaaagaaaatgttaaggagacatcaagtcagcgtgactctggatccagaaacagctcattatgaactaattctgtctgaggatcggagacaagtgattcgtggatgccctcaggaaaaccttgataattcttctaggagatttagtgccttgccctgtatcctgggctatgaaggcttcacttcagggaaacattactttgaagtagatgtgggagaaggaactgggtgggatttaggagtctgtatggaaaatgttcagagggacactgtcatgccgcagacacctcagtctggattctgggccatcagacggtgcaaagaaggctatgtagcacttacctctcccctaacttccattcatctgacagagaagcccctggttgtagggatttttctggactttg

SEQ ID NO: 6965 - DNA, 401 bp, Bos taurus
  Clone ID: 30-LIB3058-003-Q1-K1-H5
attattattatcttttttaacttactgtgtttgaggtctcgttttcccagatgtcaaggttgaatactctcttcctacaggtgtctgccctcctcctaatgtaggtccagtgatatgtgtaagggatgcattgggtgagtttatgaccgactttatccctctgatggccatggctgactgaagtgggaattatagctgctgaacatcctgtgatgatcaaccgattgttagctgcttagactatgaagtgctgcataccgatgctacatggacaatgacctattccagaagcttgctacctgactgtgcactacttcggtactccgtagggttcgacatatggaagtcacctttgagatcaatgtgagaggcattctacgagtgacacctgaagacaaaag

SEQ ID NO: 6966 - DNA, 420 bp, Bos taurus
  Clone ID: 30-LIB3058-003-Q1-K1-H9
cagagacagggtgccatcgtggctgtaactggagacggtgtcaatgactccccggctttgaagaaggcagacattggggttgccatggggattgcaggctcagacgtgtctaagcaagctgctgacatgattctcctagatgacaactttgcctcaattgtgactggagtagaggaaggtcgtctgatctttgataacttgaagaaatccattgcttataccctcaccagtaacattcctgagattacccccttcctgatatttattattgcaaacattccactccctctggggaccgtcaccatcctctgcatcgacttgggaacggacatggtccctgctatctccttggcttatgagcaggctgagagcgacatcatgaagaggcagcccagaaacccccagacggacaaactcgtg

SEQ ID NO: 6967 - DNA, 431 bp, Bos taurus
  Clone ID: 30-LIB3058-005-Q1-K1-H9
ctcagatgaagttcagatcgggcctgagacggtcatgaccacgctgtatactgccaagaagtacgcagtgcctgctcttgaggcccactgtgtggagttcctgaaaaagaacctgcgggctgacaacgcgttcatgctgctgacgcaggcaagactttttgatgaaccacagcttgccagcctatgtctggagaacattgacaagaacacggctgatgccatcacagctgagggcttcacggacatcgacctagacacactggtggcggtgctggagcgggacacgctgggcattcgagaggtgcgcctgttcacagccgttgtccgatggtccgaggctgaatgtcagcggcagcagctgcaggtgacacccgagaacaaacggaaggttctgagcaaggcgctggacctcatacgctttccactgatga

SEQ ID NO: 6968 - DNA, 256 bp, Bos taurus
  Clone ID: 30-LIB3058-006-Q1-K1-H5
cggacgcgtgggttcatcggcaacagcacggccatccaggagctgttcaagcgcatctcggagcagttcacggccatgttccggcgcaaggccttcctgcactggtacacgggcgagggcatggacgagatggagttcaccgaggccgagagctgcatgaacgacctggggtcctagtaccagcagtaccaggacgcctcggccgacgtgcagggcttgttcaagtaggacgaggtcgaggacaaagcctgaggac

SEQ ID NO: 6969 - DNA, 381 bp, Bos taurus
  Clone ID: 30-LIB3058-008-Q1-K1-H5
ccacaacacgctgaagctgcgcttcccggccgaagatgagttccccgacctcagcggccacaacaaccacatggccaaggtgctgacccccgagctgtacgccgagctgcgcgctaagagcactccgagcggcttcacggtggacgacgtcatccagaccggcgtggacaacccaggccacccctatatcatgaccgtgggctgtgtggccggcgatgaggagtcgtacgacgtgttcaaagagctctttgaccccatcatcgaggaccggcacggaggctataagcccaccgacgagcacaagaccgacctcaaccccgacaacctgcagggcggcgacgacctggatcccaactacgtgctgagctcgcgggtgcgcac

SEQ ID NO: 6970 - DNA, 257 bp, Bos taurus
  Clone ID: 30-LIB3058-008-Q1-K1-H9
cggacgcgtgggtgaattttgagactgcaaagtctcgagtgactcagagcaactttgcagttggctacaagaccgatgagttccagcttcacactaatgtaaatgatggaacagagtttggtggctccatttatcagaaggtgaacaagaaagttggagaccgctgttaatctggcctggaccgcaggaaacagcaacactcgcttcggattagcagccaagtaccagatggaccttgatgcctgtttttcggttaa

SEQ ID NO: 6971 - DNA, 434 bp, Bos taurus
  Clone ID: 30-LIB3058-011-Q1-K1-H5
cgtcccctgtcagccagcatgtacaacgccatcaagttccttaacaaggagatcacgggtgtgagcggctctaagcgggaagaggaggtgatgagtatgaggcatgagcaaggcatgcatgggaggatggagctagaaacatatttgggactcccaggaagggcagctatctggtctgcctgggcaggggttaaggaggtggttggactgtctaacctgggccccctttagtctcattgttatacacatgttcaagtatctggcatgataatcaaaggaaaaaaatgtccatttcttggtccttaagtgtcttactccattaagccaagtcagaactacgagcagctattgaccgatatataaaagagaagattgtgcttgcagctcaggcaatctcacgctttgcttataagaagatcagtaatggagatgtg

SEQ ID NO: 6972 - DNA, 401 bp, Bos taurus
  Clone ID: 30-LIB3058-012-Q1-K1-H9
tagatcgcgagcggtcgccctttttttttttttttttttttaaaaaccttattttctggttaattcgttttgccaaacaaacacagtgaaaactttagtctgactaattgtacagaaaatagaatttgtaaccagtagcaaacataacaggatagacctaagtccctggcaggctggatttccatcaacaggtcacctagatccccttgtagatggcctcctgggagggaagtcctaggaagctgaggcacagatctgccagtccccatcagaatcacaggctgcacctgggaaggaaaagcacataaaagtagaactgatgttacttggatctcttatcactacacacacaacaattgtctctgattgccagccaaactcaaggtgttgtcttcccaaag

SEQ ID NO: 6973 - DNA, 433 bp, Bos taurus
  Clone ID: 30-LIB3058-013-Q1-K1-H5
agcgtcctcaatattaggagccatcaacttcattacagcaattatcaacatagagcccggcgcattgacacaatatcaaaccgctctgtttacatgatccgtaataattaccggcggactactactactctcgctccctggattaacagccggcatcacaatgctattaacagaccggaacctaaatacaaccttcttggacccggcatgatgaggagaccctattgtatatcaacacttattctgattctttggacaccccgaagtctatattataatcttacctgggttcggaataatctctcatatcgcgacctactactcatgaaataaagaaccattcggatatatgggaatagtttgagctataatgtcaatcggatgtctaggttctatcggatgagcccaccatatattcactggcggaatagac

SEQ ID NO: 6974 - DNA, 300 bp, Bos taurus
  Clone ID: 30-LIB3058-014-Q1-K1-H9
caattatcaacataaagccccccgcaatgtcacaataccaaacccctctgttcgtatgatccggaataattaccggcgtactactactactctcgctccctgtattagcagccggcatcacaatgctattaacagaccgggacctaaatacaaccttcttcgacccggcatgaagaggagaccctattctatatcaacacttattctgaatctttggacaccccggagtctatattttaatcctacctggggttggaataatctctcatattgtgacctaatactcaagaaaaaaagaac

SEQ ID NO: 6975 - DNA, 450 bp, Bos taurus
  Clone ID: 30-LIB3058-015-Q1-K1-H5
cttacaccatccacctcatcaaggaccgccactttttccttcaagtgctcatccagctgtaccaccgtatccctcacaagctacacatcacaccactctgggactgggaccccaacaccagccttctggaacagggccacattgtccattaccagttgcaggtcctcatctccagccccaaggaccaaacagtattccaacacctaccgcttcagggttctgtcctcaccctggctctgtggccctgccacatggggtccaaggacctcagcaggcatctccagtgcctggacagattccaattcacagagcacaggtgccaccgacatttcagaacaattaccatggttcggggtggcattaaaacggacttcaaaaacattttttaaaatgttctgtaagataaactgtatatttcatatgtacctgttatggtactttttaaagctt

SEQ ID NO: 6976 - DNA, 337 bp, Bos taurus
  Clone ID: 30-LIB3058-018-Q1-K1-H5
atcgcgagcggccgcccttttttttttttttttttttttttttttttttttttttttttttttttttttttttttttttttttttttttttttttttttttttttttttttttttttttttttttatttttttttataattaaaaattttttttttaaaataagaagttatttcttatttttttttaataaattatattttgaaaaaataaaaaatattaatgaaaaatgttattttttataaatttttaaaaaaaatgctttgtttataattttttcaattataaaattttttaaatttaaaaaatttataaatttatattttttttatttattaa

SEQ ID NO: 6977 - DNA, 310 bp, Bos taurus
  Clone ID: 30-LIB3058-020-Q1-K1-H5
acgccccccagcaccccatcgccctacggactcagctatcccccgggctactccctggcatcaggccagctctcccccgcagccccggcacccccactggctttttgtttgatctttgccttttgactttgtgcctattttgatccactttcggcctccacgccaggcgaccgccctccccacccgagggcttgtgtcagaaacatcctctgcagggtgggtgtgcgccgcttggtggtggtcagcctggggctgcctgtcacccgtgctgacggctgccgtgagtcctgcgaggtccgcctgatggtgc

SEQ ID NO: 6978 - DNA, 418 bp, Bos taurus
  Clone ID: 30-LIB3058-020-Q1-K1-H9
ggtgccgggaacaactgggccaagggccactacacagagggcgccgagctggtggactcggtcctggacgtggtcaggaaggagtccgagagctgtgactgtctgcagggcttccagctgacccactcgctggggggcggcacggggtctgggatggggacccttctcattagtaagatccgcgaggagtaccccgaccgcatcatgaacaccttcagcgtcatgccctcgcccaaggtgtccgacacggtggtggagccctacaacgccaccctgtccgtgcaccagctggtggagaacacggatgagacctactcgattgacaacgaggcgctgtatgacatctgcttccgcaccctgaaactgaccacccccacctacggtgacctcaaccacctggtgtcggccaccatgagcg

SEQ ID NO: 6979 - DNA, 470 bp, Bos taurus
  Clone ID: 30-LIB3058-021-Q1-K1-H5
ctcaaaaggaaatattgtgcatggtctgtcagtcttggaaatctgtcttatcatagcaatgaaacatttaaatgatatctatgaagaggagccctttaattttcaaatggtttataatgaattccagaagtttgttcaaagaaaggcccattctgtttataattttgagaaacctgttgtcatgaaggcgtttgaacacttacaacaattagaattaataaggcccatggaaagaacatcagtaaatgcacagagggagtatcagctgatgaaactacttttggataatacacaaattatgaatgctttgcagaaataccccaactgtcctacagatgttaggcagtgggcgacatcctccctaagctggttatgagtataaccatggtttcagttatggagtttcaggcagacttctctaaagaactaaaagctgttgtcctttaacaagatatgttatggcattttct

SEQ ID NO: 6980 - DNA, 473 bp, Bos taurus
  unsure (404): unsure at all n locations; Clone ID: 30-LIB3058-022-Q1-K1-H5
aaatttttcagtaattttgaacaacagtgtcgaaagttgaatggtcttttcagcatgaaactggtgtgtttcttcaaggcagcctgcaaagccatagagcaagctaaggctcaggacatcactaagctggttctctacacagacagcatgtttaccatcaatggcatcaccacctgggtgaagggctggaagcagaatggctggaggaccagcaccgggaaggaggtgaccaacaaggaggacttcgcggagctggagcggctggcgcggggcatggacattcagtggatgcacgttcctggccattcggggtttaaaggcaatgaaaaggcggacagactatcgagagaaggctcgaaacactccgcagactgagcagtcagcaagatggaattaggactcangtggaccggtgccttcgcggggttggaagaaagtgttcccccccggcccccaggaaccattcccaagtt

SEQ ID NO: 6981 - DNA, 356 bp, Bos taurus
  Clone ID: 30-LIB3058-022-Q1-K1-H9
aaataaaagaaaaacagacaaaactaacaaaattttattaaaaaaaaaataaaaaaaagtcaaaaaggtaataaaaataaagagttacagagaaaaacttgaatctaaaaaaacacataaataaaaataccagggaattaaaaacataaaaaaataaaaaaaagggaggccgatttagtggaccaaagtttaagttcacttaattgcgattgaatatttctaatattgtgccacatattttaatttaaaagccttggattttacaacgagctttctggaaaaaccgtgcagttaccgacattattgaccttgcatgaaatgcccttttaataatgggctgttttatggataggccc

SEQ ID NO: 6982 - DNA, 366 bp, Bos taurus
  Clone ID: 30-LIB3058-023-Q1-K1-H5
gggaaattactccgtgttgtgcagtggggcgctgggtgctggggtcgacaagatcacgctcattggtgagtcccaccttttcccagaatctctcttctccgaaacccaggagactgggattccagccagttcctccctcagacctagggctccagacccccagcccctcatccttcagacacagaaatctttgtcctgggcctcctccaaccccagaccctaggactcccacccccagatccctgatccctcagggaatcctggacctcagtcactttttccagggaaccctcagacccttgctcactcagacccaagagtccaggcccccattctcttcctgtcttagatccaagagttgggggt

SEQ ID NO: 6983 - DNA, 437 bp, Bos taurus
  Clone ID: 30-LIB3058-024-Q1-K1-H5
ctagatcgcgagcggccgccctttttttttttttttctttcttaaaatctttacttttgagacaggacataagtgttacagacacacatggaaaagcaatacatgatcatagttgaaagcgaagacaatctagtcaaagtttttacgcctgtcagctaatgctgaagttgagtatgacatgctgcaaggctgaaaggaatggtaattaatattcctctccttcttcctctccctctccttccacagaatccacaccaacctcctcataatccttctcaagggcagccatgtcctcattaccaccttgaccttccctccatgtcctgccctgtctcctttcctcctcctgggttcatgttgtaataaaagatgattgttggtgtgtaattaatttgttcaaaaggaaaaaaaggcaaaacatgaaacttggttccaac

SEQ ID NO: 6984 - DNA, 409 bp, Bos taurus
  Clone ID: 30-LIB3058-024-Q1-K1-H9
cggtaccctgttccgagggactatggctctcatcaagaaccactcggagggcggcggagtgatcgtcaacaacaccgagagcatcctgatgtcctatgaccatgtagagcttacgttcagtgacatgaggaatgtgccagaggccttcaaggggaccaagaaaggcaccgtctaccttaccccgtaccgggtcatctttctgtccaaggcgagggatgccatgcagtccttcatgatgcccttctatctgatgaaggactgtgagatcaagcagcctgtgtttggggcaaactacatcaaagggacagtgaaggccgaagcaggaggtggctgggaaggctctgcatactacaagttgacctttatgttcgggggcgccatcgaatatggacagcggatgttacaggtg

SEQ ID NO: 6985 - DNA, 428 bp, Bos taurus
  unsure (380): unsure at all n locations; Clone ID: 30-LIB3058-025-Q1-K1-H5
gataaagtaccatgtagaagtaaaagcatgatttctgaaggacagaatgtattatatcatccccttccctctttttttggctgtgccacaaggcatgtgggattttagttccccacccagggatcgaacgtgtgacccctgcaatggaagcacagtcttaaccaccggaccaccagggaagcctcatgtcgttcccttactccaaaaaaatattccttcattcattacttaaagaatcaatttaaagtttcctatgtttcaaggactccaatgtcctgccttaacatagtcctcacttacctttctgatcctgtttcccctctcgctttctcatgctctcttgattccagtgacatttcccaaattctaaggtttatggnggtccttccccagatattcaaatgaactgtttcatttatgaggtcttt

SEQ ID NO: 6986 - DNA, 272 bp, Bos taurus
  Clone ID: 30-LIB3058-026-Q1-K1-H9
cggactcgtgggctcgagcggtcgccctttttttttttttttttttttttttttttttgttttttttttttttttttttttttttttttttttttttttttttttttttttttttttttttttttttttttttttttttattttttttttataaatttttttaataaaagatttttttaatgtatttataattaatggtttttaatagatttaatatatttttatttttttgagtttataattaattattaaattttttaataattatatta

SEQ ID NO: 6987 - DNA, 419 bp, Bos taurus
  Clone ID: 30-LIB3058-027-Q1-K1-H5
cggacgcgtgggctggctcggtccgcagctgggcggggaggcggaggatggaattgggcttatcgaccataaccgtgtatctcgccagcgccagcagtcctgtggcggcgacaacgatggagggggagccagcgagccgtgaggagggagaagccgtgaatgcctccggagctgcggccgcctcggcgttcagggaatcggcacagcagatgagtaatgaaagaggctttgaaaatgtagaactgggagtcataggaaaaaagaagaaagtcccaaggagagtcatccactttgttagcggtgaaacaatggaagagtacagcacagacgaagatgaagtggacagcctggagaagaaagacgttctgcctcctgttgatccgacaaaacttacctggggcccctacttatggtttcac

SEQ ID NO: 6988 - DNA, 236 bp, Bos taurus
  Clone ID: 30-LIB3058-028-Q1-K1-H5
ccgagatcaagatccagctggaagcatctgaacagcacacgccccagctgggctgttagccacgctgtcactctgaaggtgaccccgagcaggtcagtcccagcccttagctcctgtttggtcgggaggagggaaagggcatgggaaggcagggctggaccggcttctctacttcttcgtcacctttgcggggtgagagttacgtgtctaggtttgaatctctgtgtcactcattt

SEQ ID NO: 6989 - DNA, 424 bp, Bos taurus
  Clone ID: 30-LIB3058-029-Q1-K1-H5
attatacaaatgaacttctttacaaaatagaaacagactcacagagaacaaagttatagttgccaggaaggaagggtgaggggaagggatagttggggagtttgggatcgacatatacatgcagctatacttaaaattgggcttccttggcggtccagtggctaagaatccacctgccaatgcaggggacataggctcaatccctggtcagggagctaagattcccacatgctgcagggcaactgagcccattcatcacaactactgagccagcactctagacctctgagccgccactactgaagccctcatgcctagagcccgtgctgcacaacgaagactagtccccgctccctgcaactagaaaaagcctgtgctcacagcagcaaagaccccatgcagccaaatattaataaaattaaat

SEQ ID NO: 6990 - DNA, 275 bp, Bos taurus
  Clone ID: 30-LIB3058-030-Q1-K1-H9
tatcaaagaccagtcctaatgactaacagtcctgatcgtgtgagatatgaaataactcgttagcatatactatagactattaaccagcatcttacgagctacacatgcttacatacatcattcttgacacctctagcatggtcatctcgacgaataatagccgtacagaataacctagtatatacactcctatggaccagtaatatctattatagaagtataataactccagaatctatataacgggacgccactagctgattaatactaggaca

SEQ ID NO: 6991 - DNA, 277 bp, Bos taurus
  Clone ID: 30-LIB3058-032-Q1-K1-H5
aactcttttatgcactgcggcactaccagtgaccagtttcttagagataactggaatggttagccagagccactaattgggcaaaatttacagctacagccagttgggtgtgattcataagggtcatgagaggagcattacagttaatggcaacataccttcaaggacacctctccagggtcagcctatcaggaaggtggaggtcttatgcataggtctattcatgccaatcatggtggtgatataatagactatctgcttaaccagcttaagaatg

SEQ ID NO: 6992 - DNA, 423 bp, Bos taurus
  Clone ID: 30-LIB3058-034-Q1-K1-H5
caagagccccctctgatgcagcttctgatttgcccccgaccctgtctgcactgtgcggtacattcctgccacaaccgagcacaccgtgcagtgggccaagggtgaatttgacgaccttttctgtgagtctgccaagaccatcaacagccacccacaggcactctcgtctccagaagacttggttaagtcacagaagcagcccctgctgcagacaatgcggggtgtcctgacagagcgtccgcagacctggcaagactgcgtgctgtgggcctttggccactggcagctccgcttccattatggcatcacacagctgctgaggacctacccacctgacaaagtgcaggaggatggaactccattctggtcgggtcccaaacagtgtccccagcccttgaagtttgatgccagccaagatatgca

SEQ ID NO: 6993 - DNA, 416 bp, Bos taurus
  Clone ID: 30-LIB3058-038-Q1-K1-H5
tccagatcaagaagttcaccttcggcttgtactgggtgcccaagaaactggatgtgtccggtgagatgcccgaggagctagacatctcccagctgaggggcacagggctgcagcctggagaggaggagctgcccgacattgccccacccctggtcactccggatgagcccaaaggtagccttggtttctatggcaacgaagacgaagactccttctgctcccctcacttctcctctccgacatcgcccatgttggatgagtccgtcatcatccagctagtggagatgggcttccccatggacgcctgccgcaaagccgtctactacactggcaacagcggggccgaggccgccatgaactgggtcatgtcacacatggacgacccggattttgcaaaccccctcatcctgcctggc

SEQ ID NO: 6994 - DNA, 428 bp, Bos taurus
  Clone ID: 30-LIB3058-038-Q1-K1-H9
ggaagttcctgaacttcctttggtgttggttgataaagttgaaggctacaagaagaccaaggaggctgtgttgcttctgaagaaacttaaggcctggaatgatatcaaaaaggtctatgcctctcagcgaatgagagctggcaaaggcaagatgagaaaccgtcgccgtatccagcgcaggggaccctgcatcatctataatgaggacaatggtatcatcaaggccttcagaaacatccctggaattactctgcttaatgtaagcaagctgaacattttgaaacttgctcctggtggtcacgtgggacgtttctgcatttggactgaaagtgctttccgaaagttagatgagctatatggcacttggcgtaaagcagcctccctcaagagtaactacaacctccctatgcacaagatgctcaatacag

SEQ ID NO: 6995 - DNA, 152 bp, Bos taurus
  Clone ID: 30-LIB3058-039-Q1-K1-H5
gttctagatcgcgagcggccgccctttttttttttttttttttttttttttttttttttttttttttttttttttttttttttttttttttttttttttttttttttttttttttttttttttttttttttttttttttttttttttttttt

SEQ ID NO: 6996 - DNA, 422 bp, Bos taurus
  Clone ID: 30-LIB3058-041-Q1-K1-H9
gttgtagtatactgggtttgacatttcttccacgctcgcagggccgacttccggtcaagtggatggctcccgaagcccttttcgacagagtgtacacccatcagagcgatgtctggtccttcggggtgttaatgtggagatcttcacgttagggggttcgccctacccagggattcccgtggaggaactttttaagctgcttaaggaaggacataggatggacaagccagcaaactgcaccaacgaactgtatatgatgatgagagactgctggcatgcggtaccctcacagagacccaccttcaagcagttggtagaagacttggatcgaattctcacactcacaaccaatgaggaatacttggacctcagtcagcttcttgaacaatattcacctagttaccctgacacaaggagttctt

SEQ ID NO: 6997 - DNA, 311 bp, Bos taurus
  Clone ID: 30-LIB3058-042-Q1-K1-H9
gcgagcggtcgccctttaccagttttgtgccctctaccaggactttgtcagggactagggtgtggtctccattgaggacccctttgaccaggacgattgggcggcctggtccaagttcacagccaatgtgaggatccagattgtggatgatgacctgacagtgaccaaccccaagcgaattgagcggacggtggaagataaggcctgcaactgtctgctgctgaaggtcaaccagatcggttcagtcaccgaaaccatccaagcgtgcaagctggcccaggagaacggctgggggatcaatggtgagtcac

SEQ ID NO: 6998 - DNA, 451 bp, Bos taurus
  Clone ID: 30-LIB3058-043-Q1-K1-H5
cggacgcgtgggctatgcagagccttattcttcccattttgttaggatcagctaggccagtaggaatggaccaggaccttgtctcacactgatgatacctcagatgttggctggctatgtgaactgcctatttcctgtgccgagctgtttttgatttttaaataaatgaaaatctgtagattctctcctcccctgtcccaaaaaacaaagcaaaataatgctttttgaaattgtctctaggattttaaagtgaaaaaatgatggtactatccaaagttctttatttcagaatctgacagtggattcctttaacataggctcaagatcaaaacagcataccctctaagctcagacagactgttgactccaagggttttgatcaataccataacaaacctttttcctttgacatactctgggttttggtgtttggagggagagaagaagggag

SEQ ID NO: 6999 - DNA, 435 bp, Bos taurus
  Clone ID: 30-LIB3058-045-Q1-K1-H5
ggcgccgggacacaggtgtcgtgaaactaccgttaaacctaagccaaaatgggaaaggagaagacccacatcaacatcgttgtcattgggcacgtagattcagggaagtctaccacgactggccatctgatctataaatgtggcgggatcgacaagagaacaattgaaaagttcgagaaggaggctgccgagatgggaaagggctccttcaaatatgcctgggtcttggacaaacttaaagctgaacgtgagcgtggtatcaccattgatatctccctgtggaaatttgagaccagcaagtactatgttaccatcattgatgccccaggacacagagacttcatcaaaaacatgattacaggcacatcccaggctgactgtgctgtcctgatcgttgctgctggtgttggtgaatttgaagccggtatctccaag

SEQ ID NO: 7000 - DNA, 440 bp, Bos taurus
  Clone ID: 30-LIB3058-046-Q1-K1-H9
tatgcacccaacccttttactggggagttcccccccacttagcccgtggatgctggaggtgagagcgagtggtttaagtgcctgatttccaccgcccgaccccctcccctgtgaccagctgggacgagagtggccgagggcctaccctcttcctactcttccgcaacctggccccttccaatcgctgacccctcattgctatgcccccatcacagctagagagatggaaccccgacctcagcaggcccatggggcagagctgggccttcttccagtgtcctgccccgctggggtatggggcctggggtctcgagaagctggagtgccctctctgccctcacgcgttctctgccagagccttacatcctggagcgacagcccctacctggtgccttccggcccaaagggggaccacggtttgcacttttatcccccacccc

SEQ ID NO: 7001 - DNA, 434 bp, Bos taurus
  unsure (421): unsure at all n locations; Clone ID: 30-LIB3058-047-Q1-K1-H5
gcgctgacattcaccttctgtgggtttatgttattttattgatgatgtcagctctctggatcagacagaggttggtagaagacagcatacttttggttgagaccataaaggtcttcatagaattgggattccacttgtgcaaattgtgcctggagatttttgagaactttgaccctctgcttaaccgctagaggccagcactgagtgtggcctgcctttagccggatgccccaaaaggggccacaagggcctcaggaatcggctgcctcctgcgggtttcagtctcctcggttgcataggcccctccagtgcacagaatacatctgcatcagtcagggaattgccctcctcgaccatgagcttctcgggttcctctaccttctagcatgctgtcccatcggcaagttccccgggcatttanggggcggttccct

SEQ ID NO: 7002 - DNA, 414 bp, Bos taurus
  Clone ID: 30-LIB3058-048-Q1-K1-H9
ggcccgtgtggaagagttcaagctgaatatgatgtggaagagccccaatggaaccatccggaacatcctcgggggaacggtcttccgggagcccatcatctgtaagaacatcccgcgtctcgtccctggctggaccaagcccatcaccattggcaggcatgcccacggcgaccagtacaaagccacagactttgtggttgaccgggctggcacattcaaggtggtcttcaccccgaaggatggcagcggccctaaggaatgggaggtgtacaactttcctgctggtggcgtgggcatgggcatgtataacacggatgagtccatctcaggttttgcacacagctgcttgcagtatgccatccagaagaagtggccactctacatgagcaccaagaacaccattctgaaagctta

SEQ ID NO: 7003 - DNA, 281 bp, Bos taurus
  Clone ID: 30-LIB3058-049-Q1-K1-H5
ctcaccccaaagggtggcctggaggggtatggtcagcagcttgggctagaattgggagggaggagagaaagcagggagggcagagagacctcataaatcaccctgccctccatatcccgaacctctgttgtcatggcaactgttgccagagctggaggtgtctggggcctccagaatggggccttcgagtttccttgagctgctagaggaaaactgagagtctgagacaagcagaggaagtccccaaggcaaggtggccttggccagaggcttattcttct

SEQ ID NO: 7004 - DNA, 429 bp, Bos taurus
  Clone ID: 30-LIB3058-049-Q1-K1-H9
gcacagggcactgcacctgatgcccgcctgcatcatccagaccgctccatgaatgagctttgcctacaacatcccttgcctgctgccatcagaagagggggcccctctgcatctgagcccccccatcctctcgtcacctgggcccatggaacactctgatccgcctcattttgaaaccaaaaaaactgctccttcactctcaccctgaggccccagaaaagaggccctatggttggtgccccagagttaatcaccaccccaggggttgcctctggatgtcagatctcccctggggggtggggggcttggctgctgctgctgctgctctgtatttgcctcttgtgatcctgtcctttacccattccactccacccaggagaggccttggtacgccctctgctctggagtgtccctctgcctagcatccca

SEQ ID NO: 7005 - DNA, 444 bp, Bos taurus
  Clone ID: 30-LIB3058-054-Q1-K1-H5
caggaagatggcgacccgcgcggcccttgtgtggtccggctggtggctgctgctgctgcctttgcttggcctggccggcgccagcggtccccgcaccttggtactgctggacaacctcaacctccgggagacgcattcgcttttcttccggagcctgaaggatcgcggctttgtactcacattcaagaccgcagatgaccccagcctgtccctcattaagtacggggagtttctttatgacaatctcatcattttctccccttcggtagaagattttggaggaaatatcaacgtggagaccatcagtgcctttatcgacggtggaggcagtgtcctggtggctgccagctcagacatcggcgaccctctccgagagctgggcagtgagtgtgggattgagttcgacgaggagaaaacagctgtcatcgaccatcacaactatga

SEQ ID NO: 7006 - DNA, 283 bp, Bos taurus
  Clone ID: 30-LIB3058-056-Q1-K1-H5
cggacgcgtgggctgaaggtgccggccatcaatgtcaatgactctgtcaccaagagcaagttagacaacctctatggctgccgggagtccctcatagatggcatcaagcgggccacagatgtcatgattgcgggcaaggtggcggtggttgcaggctatggcgacgtgggcaagggctgtgcccaggccctgaggggatttggggcccgcgtcatcatcacggagattgaccccatcaacgcacttcaagctgccatggagggctacgaagtgaccgccatgg

SEQ ID NO: 7007 - DNA, 401 bp, Bos taurus
  Clone ID: 30-LIB3058-056-Q1-K1-H9
tgggggagctgggaggccttcccgagcccccgcccccctggaatggcagggtgcgtaactggaatctcctgtcccctcctgatcctcccccacacccccaggagccatgctcttgccccaggcctgtcggtggcctccccttgcaaccggacaggtcagggccggctcctgcccctgcacaccctgctgtgatcccgggtccctgcccctgtctctctttgctttccctctggcctgactggaagcagaaaatgaccaaatcactattttttccctaatgaaatgtcattgctggaagagccccatgcaagcctggttgtagccatgagtgggcttgacggggtcttgagacagaagactcttctggcctatgggccctgtgattccactagtggtggggc

SEQ ID NO: 7008 - DNA, 421 bp, Bos taurus
  Clone ID: 30-LIB3058-057-Q1-K1-H5
caggaagatggcgacccgcgcggcccgtgtgtggtccggctggtggctgctgctgctgcctttgcttggcctggccggcgccagcggtccccgcaccttggtactgctggacaacctcaacctccgggagacgcattcgcttttcttccggagcctgaaggatcgcggctttgtactcacattcaagaccgcagatgaccccagcctgtccctcattaagtacggggagtttctttatgacaatctcatcattttctccccttcggtagaagattttggaggaaatatcaacgtggagaccatcagtgcctttatcgacggtggaagcagtgtcctggtggctgccagctcagacatcggcgaccctctccgagagcttggcagtgaatgtgggattgagttcgacgaggagaaaacagct

SEQ ID NO: 7009 - DNA, 442 bp, Bos taurus
  Clone ID: 30-LIB3058-058-Q1-K1-H5
gagaatgtgaaacacaaaaccaaggagtacattaagaagtacatgcagaagtttggggctgtttacaaacccaaagaggacactgagttagagtgacctacggggccagggtgggaggcccggcaagctggtaggagagactgtggggagaagacatcctgtgggccctctccccaccccaccgtcagggctgtgtgctgctggtgacgcaacaccctggggacttcaaacctgcggattaaactgaaagccacaatactgagctccatctacaacacgtggtccctggttgtgagctgttggtagaggccatcagaggccaggggttaggcccttgagaccttccttctgagacctgctcagcctgaccccactccaacctgggtctcctccttggcggtgctgtcagcgcacaggcttatgcgcattcccacccacattc

SEQ ID NO: 7010 - DNA, 144 bp, Bos taurus
  Clone ID: 30-LIB3058-058-Q1-K1-H9
tgaaaacaccaaatggcggatgacgccggtgctgcgggagggcccggaggccccgggggccccggaatggaaggccgcggtggcttccgcggaggcttcggtagtggcgtccggggccggggtcgcggccggggtcggggccgg

SEQ ID NO: 7011 - DNA, 444 bp, Bos taurus
  Clone ID: 30-LIB34-001-Q1-E1-H5
cggacgcgtgggcggggttgcaaagagtcagacacagtgaagcaacttaacagcatgcatgcaaggtcattcgacatttacctctttgaagaaccggcaaacctatttccagagcaactgcaccatttgacttcttcatcagcaatgtacaaggggcccaatttctccatattcttgaaacatgtgctgttgattttctattattattattattaatacagccttcttgatttgagttaatgtcttgctgcggctttgatttccctgagatggtgagcatgtgcttagtgcttagcagtcccttgtgtatgttttctgaaaaaatgtctattaaagtcctttttccactttttcactggattttttgtcttttattattgagctgtaaatattccttaaatattctagatacaatttcctcatcagatgtatgatttgcaaata

SEQ ID NO: 7012 - DNA, 371 bp, Bos taurus
  Clone ID: 30-LIB34-002-Q1-E1-H5
gagaaaaaccttttagctgtagctggaaaggttgtgaaaggaggtttgcccgttcagatgaactgtccagacaccgacgaacccacacaggtgagaagaagttcgcctgtcccatgtgtgaccggcggttcatgaggagcgaccatttgaccaaacacgcccgtcgccacctgtcagccaagaagctaccgaactggcagatggaagtgagcaagttaaatgacatttccctacctccaaccccggctcccacgcagtaatagacggatggtgaagaatcagactaactttaactttggtcacagccagaagccagtggtgatagaaaaacgcttccgctgcaggtctgttgctctccagtgtgggctgca

SEQ ID NO: 7013 - DNA, 398 bp, Bos taurus
  unsure (365): unsure at all n locations; Clone ID: 30-LIB34-003-Q1-E1-H5
accaaccataaagatattggtaccctttatctactatttggtgcttgggccggtatagtaggaacagctctaagccttctaattcgcgctgaattaggccaacccggaactctgctcggagacgaccaaatctacaacgtagttgtaaccgcacacgcatttgtaataatcttcttcatagtaataccaatcataattggaggattcggtaactgacttgttcccctaataattggtgctcccgatatagcatttccccgaataaataatataagcttctgactcctccctccctcattcctactactcctcgcatcctctatagttgaagctggggcaggaacaggctgaaccgtgtaccctcncttagcaggcaacctagcccatgcaggagcttc

SEQ ID NO: 7014 - DNA, 417 bp, Bos taurus
  Clone ID: 30-LIB34-004-Q1-E1-H5
cactaataaaaattgtaaacaatgcattcatcgaccttccagccccatcaaacatttcatcatgatgaaatttcggttccctcctgggaatctgcctaatcctacaaatcctcacaggcctattcctagcaatacactacacatccgacacaacaacagcattctcctctgttacccatatctgccgagacgtgaactacggctgaatcatccgatacatacacgcaaacggagcttcaatgttttttatctgcttatatatgcacgtaggacgaggcttatattacgggtcttacacttttctagaaacatgaaatattggagtaatccttctgctcacagtaatagccacagcatttataggatacgtcctaccatgaggacaaatatcattctgaggagcaacagtcatcacca

SEQ ID NO: 7015 - DNA, 310 bp, Bos taurus
  Clone ID: 30-LIB34-005-Q1-E1-H5
aaaaactcgagcataaccaggtacttgctgtggccgcttgcaaacatccacgacgccccagctgatcacgccaacttgaatgaagcgactcctcttgtgaataatcagggggccaccagaatcacctttgcaagtgttggggtcagcgtagggatccacacctccagtgcagaggaacctgggggtgactacctcagagacgtccttgactttttcataacctggggcgcgtagagcatctctctcacagctggctttcttgtccccattcttgatgtagactgccttccaaggtcagccatatgccagc

SEQ ID NO: 7016 - DNA, 414 bp, Bos taurus
  Clone ID: 30-LIB34-005-Q1-E1-H9
tatacttatacccctaacctggttatcaaaaaataatataatttgggttaactccacagcacacagccttctaattagctttacaagcctcctcctcataaaccagtttggcgacaacagccttaatttttcactactatttttctccgactccctatccactccactactaattttaaccatatggctcctccctctaatactaatagctagccaacatcatctatcaaaagaaaacctaacccgaaaaagactatttattactatgctgatctcactacaactattcctaattataacctttaccgccatggaactaatcttattttatattctatttgaagcaacactagtcccaacactcattattattacccgatgatgaaaccatacagaacgcctaaacgccggact

SEQ ID NO: 7017 - DNA, 385 bp, Bos taurus
  Clone ID: 30-LIB34-006-Q1-E1-H5
ctgcccacaccccgctctcgcaggcagacatgaggacagagagaatgtcccccctcctggctctggggatcctggtggctgggctctgctccagggtccactgcctcccagagaatgtgaccccagaagaacagcacaaagtgacatctgtggatggccactcattaacctccaacaacactgacttcgccttcagcctctacaagcagttggctttgaaggaccccaataagaacgtcatcttctcccctctgagcatctccatagccttgggcttcttgtccctgggggctcatggccccactgtgacagagatcctggaaggtctcaagttcaacctcacagagacccccgagacagaaatccaccaggggttccagcacct

SEQ ID NO: 7018 - DNA, 310 bp, Bos taurus
  Clone ID: 30-LIB34-007-Q1-E1-H5
tgccttttctcagtatctccagcagtgtccatttgatgagcatgtaaaattagggaacgaactaactgagtttgcaaaaacatgtgttgctgatgagtcacatgccggctgtgaaaagtcacttcacactctctttggagatgaattgtgtaaagttgcatcccttcgtgaaacctagggtgacatggctgactgctgtgagaaacaagaccctgaaagaaatgaatgcttcctgagccagacttatgatagcccagacctccctaaattgacaccagaacccaatactttgtgtgatgagtttaaggca

SEQ ID NO: 7019 - DNA, 368 bp, Bos taurus
  Clone ID: 30-LIB34-007-Q1-E1-H9
caaggtttgaaactggaactactctgagatacacctgtcgtcctggctacaggataagttcaagaaagaactttcttatctgtgatggaacagacaattggaaatacaaagagttttgtgtcaaaaaacgatgtgaaaacccaggagaattacttaatgggcaagtgatagttaagacagattactcttttggatcagaaatagaattcagctgttcagaagggtatgtcttaattggctcagccaacagttattgtcagctacaagataaaggagttgtctggagtgatcctctcccacaatgtataattgccaagtgtgaacctcctccaaccattagtaatgggagacacaatggtggcgatgaa

SEQ ID NO: 7020 - DNA, 420 bp, Bos taurus
  Clone ID: 30-LIB34-008-Q1-E1-H5
tgctttctaaggcccacttgacttcacattccaggatgtctggctcactctaggtgagtgatcacaccatcgtgattatctggatcatgaagatcttttttgtgcagttcgtctgtgtattcttgccacctcttcttaatatcttctgcttctgttaggtctagccattaggtctccctaacttaagcatttagtgggctgtagctggcccttggataacttgacctgaaatgagcagagctagtgtgtggaccaaagtgtagccactctgtgcagtcatgagggagaatgccatttgaggtaaagtgtaggcctcatcagataacaatatgattggcagatccttcaaagagtggctggatggtgaacttgggcttgttatagcacagcctcaagtcttgacttggcctcaagtcatag

SEQ ID NO: 7021 - DNA, 404 bp, Bos taurus
  Clone ID: 30-LIB34-009-Q1-E1-H5
gtttcccggacctcttcttccacctttcaatatataactctgctaaaaaacatgtggaaaggaaggcagaatcaagtacaagataatgaaaatgtagtaaacgagtactcctcacatctggaaaagcaccagttatatatagatgagactgtgaagaataatatcccaactaagcttcgtgtgctccgttcaattctggagaatttgagaagcaaaatacaaaaattagaatcggatgtctcaactcagatggaatactgccgcaccccgtgtactgttacttgcaatattcctgtggtgtctggcaaagaatgtgaggaaatcatcaggaatggaggtgaaacatctgaaatgtacctcattcagcctgaggattctagcagaccatatagagtatactgtga

SEQ ID NO: 7022 - DNA, 309 bp, Bos taurus
  Clone ID: 30-LIB34-010-Q1-E2-H5
gaaatccaccagggcttccagcacctcctgcagacgttcaatcagcccagcaaccagctgcagctgagcgtgggcaacgccatatttgtgccagaggagctgaagctgctggacaaattcaggaaagatgccgaggctttttacgcctctgaggttttatccatcaacttcaaggattctgaagctgccgtaaagcttatcaatgaatatgtgaagaatactacgcatggaaaaattgagaagctcttaaatgatcttgacgtgctcacaaatttaatcatgttgaattacatcttctttaaagcccag

SEQ ID NO: 7023 - DNA, 437 bp, Bos taurus
  Clone ID: 30-LIB34-011-Q1-E1-H5
acgatctgtaagccacatagcactcgttatcgtagccatccttatccagacaccttgaagctacataggagcaaccgcccttatgattgcccacggcctcacatcctccatacttttctgtctagcaaactcaaactacgaacgaatccacagccgaaccataattctagctcgaggcctacaaacgctccttccactaatagccacctgatgactactagcaagtctaaccaacttagctctacccccaacaatcaacttaattggagaactatttgtagtaatgtcaaccttttcatgatctaacattacaattattctaataggagtaaatatagtaatcaccgccctatattctctatacatgctaatttatacccaaacgaggaaatataccttacacattaataatatctcgccttcctttacacgggaaa

SEQ ID NO: 7024 - DNA, 292 bp, Bos taurus
  Clone ID: 30-LIB34-012-Q1-E1-H5
gtacggacataattcggcggtcacccacgcgtacgaggagacccacagctcaggccagtgcgtgaggagtaccgtcctgctcggtctagtcagatcagcatagtcaacgggtgtgtttcgtccagatacatacatggcgtgagattgctcattggtttagagatttgggataagaggattttaaaggcctggtactgactgccttttctcagtatctccagcactgtcgatttaatgatcatgtgaaattagtgaacgaagctagactgagtttgcaaaagcatgtgttgct

SEQ ID NO: 7025 - DNA, 408 bp, Bos taurus
  unsure (283): unsure at all n locations; Clone ID: 30-LIB34-012-Q1-E1-H9
agctcgggcattgagagtgccagttgcactgtggctgttgggcttgtgctggtctttggctaaagcccaccctctggctagagctcctgagcttgggcacggagttgaaggtgggaatgtggccaagccggatccagaagtgacggaacgctgctcggatggctggggctttgatgctaccaccctggatgagcatgggaacatgctgtttttaaaaggggagtttgtgtggaagggtcatgcctgggcccggcagttgatctcagagaggtggaaggatgcncccagtcccgtggatgctgcattccgctatgatcgtaacagtgtccttctgatcaagggggacaaattctgggtatatcctcctgagaagggggaggaatatccaaagttgctccaagagaagtt

SEQ ID NO: 7026 - DNA, 392 bp, Bos taurus
  Clone ID: 30-LIB34-013-Q1-E1-H5
ttcgccggtcgacccacgcgaccgagctgcctcgagcagggagctggtggctcttccatccccagaccagccaagcctgtgagtgacaccccagacagaggaaccagagccatgcggagtctcagcggactgctgttgttactgactgcctgcctggcagtaaacgccagctccgtgcccacattgcccgatgacattcaagtgcaggagaacttcgacctgtctacgatctatgggaagtggttcaatgtggccgtgggctccacctgcccatggctgaagaggttcacggagaagatgacgatgagcacagtggtgttgaaagcggggccgacgagcaaggagatcagcgtcaccaacactcacaggcggaaaggtgtctgtgaatcgat

SEQ ID NO: 7027 - DNA, 421 bp, Bos taurus
  Clone ID: 30-LIB34-014-Q1-E1-H5
aggaccctgcgctcggcctttgagtacggcggccagaagtgctcagcgtgctcccgcctctacgcgccccgctcgctgtggccgcagatcaaagggcggctgctggaggagctcggtgggatcaaagtgggcaatcctgcagaggattttgggaccttcttctctgccgtgattgatgccaagtccttcggtcgcatccggaagtggctggagcacgcccgctcctcacccagcctcaccatcctggccgggggccactgtgacgactctgtgggctactttgtggagccgtgcatcgtcgagaccaatgacccccaggaccccatcatgaaggacgagatcttcggtcccgtgctggccgtgtacgtctacccggacgaagaatacaacgagacgctgcggctggtcgacagcaccacca

SEQ ID NO: 7028 - DNA, 414 bp, Bos taurus
  Clone ID: 30-LIB34-014-Q1-E1-H9
cccgggtcgactcacgacgtccgaagcccggttcccgggaggatgaagttcgtgtataaagaggagcatccgttcgagaagcgtcgctctgagggcgaaaagatccgaaagaaatacccggactgggtcccggtaatagtagaaaacgctcctaaagcacggatatgagacctggataaaacgaaatacctggagctttctgatcttacaattggtcagttctacttcttaatccggaagcgaattcatctccgagcagaggatgccatgtttatctacggcaataacgtcataccgccgagcattgccacgatggatcagcagtacaaagaacaccatgaacaagacttctttctatacattgactacactgattaaagtgtctacggtctgtgaagctgctgcccctaaagt

SEQ ID NO: 7029 - DNA, 368 bp, Bos taurus
  Clone ID: 30-LIB34-015-Q1-E1-H5
gtactattctttaccggatttttctgagctttctaccactcaagcctcgcccccacccctgaactaggcggctgctgacccccaacaggcattcacccactaaaccccctagaagtcccactgctcaacacctctgtcctattggcttccggagtttccaataactgaacccaacaaaatttaataaaaagggaaccaaagccttttattcaagccccaattaacaacaacaaaattaggattcaacttaaaataataaaagcctcaaaatactatgaagcaacttttactaaccccgaccggatttaccggtcaactttttttgttaccacaaggtttcaacggcttcaacttaacaattggttcaa

SEQ ID NO: 7030 - DNA, 410 bp, Bos taurus
  Clone ID: 30-LIB34-017-Q1-E1-H5
caaaactttggcacaatgaagtgggtgacttttatttctcttctccttctcttcagctctgcttattccaggggtgtgtttcgtcgagatacacacaagagtgagattgctcatcggtttaaagatttgggagaagaacattttaaaggcctggtactgattgccttttctcagtatctccagcagtgtccatttgatgagcatgtaaaattagtgaacgaactaactgagtttgcaaaaacatgtgttgctgatgagtcccatgccggctgtgaaaagtcacttcacactctctttggagatgaattgtgtaaagttgcatcccttcgtgaaacctatggtgacatggctgactgctgtgagaaacaagagcctgaaagaaatgaatgcttcctgagccacaaagatga

SEQ ID NO: 7031 - DNA, 397 bp, Bos taurus
  Clone ID: 30-LIB34-017-Q1-E1-H9
ctccaggaaccaaggcgccatgcagccccggctgctccttcttgctgccttcctggcgctcctggtcttgcctgaagctaccaaggccgaggagggatcccttctggacaagatgcagggctatgtgaaggaggccaccaagaccgccaaggatgccctgagcagcgttcaggagtcccaggtggcccagcaggccagagactggatgactgagagcttcagctccctgaaagactactggagctcgttcaagggcaagttcactgacttctgggaatctgccaccagtcccacacagtctccaccctgaggccatctgagatctcagtaccccaagtccacctgcctatccatcctactagctccttgggtccagcagcctcccagggctgccccc

SEQ ID NO: 7032 - DNA, 407 bp, Bos taurus
  Clone ID: 30-LIB34-019-Q1-E1-H5
cttgcatacagcttggcatccttcagaaaatattataccagtggcggctacaaataacctatatatattccacgacaaggttaactacgatgacaagttattacctaataatctcacatactgaatactagtcaaacacgtttttaaatgtttctttgggtgttcatttgatgcctcgactttattttccctctgcaggataaaatttggaataaaatccaatggagtctaaccttcccacatccccactttcaagaaacctttgtcaaacccaataagttctgggaccactctgtttaaaatccacagctgccagctaacagtaaatcctccataattgaatttaatttccgaagcctttaatgcccccttttctcaggtgggtccaaatgttttgtttccaggtg

SEQ ID NO: 7033 - DNA, 336 bp, Bos taurus
  Clone ID: 30-LIB34-019-Q1-E1-H9
ggaaggcactgctggaaatgcagcagacgaaaatggtgttggaaactttcggtggcgatggacatgccagaggagactctgtatctcaaggaacaggattagcaccaggaagtcccagaaagcctggaaccagtagtattggaaatgtgaaccctgggagctatggacctggaagtagtggcacttggaaccccggccgccctgagcccggaagtgctggcacctggaaccccggccgccccgagcccggaagtgctggcacctggaaccccggccgccccgagcccggaagtgctggcacctggaaccccggccgccccgagcccggaagtgctg

SEQ ID NO: 7034 - DNA, 422 bp, Bos taurus
  unsure (413): unsure at all n locations; Clone ID: 30-LIB34-020-Q1-E2-H5
gagaaaaagtactgacttcatctgccagacagagactcaggtgtgccagtattcaaaaatttggagaaagagctttaaaagcatggtcagtagctcgcctgagccagaaatttcccaaggctgagtttgtagaagttaccaagctagtgacagatctcacaaaagtccacaaggaatgctgccatggggacctgggtgaatgcgcagatgacagggcagatcttgccaagtgagatgtgtgataatcaagggggggagctccagtaaactgaaggaatgctgtgataagcctttgttggaaaaatcccactgcattgctgaggtagaaaaagatgccatacctgaaaacctgcccccattaactgctgactttgctgaagataaggatgtttgcaaaaactatcaggaagcanaagatgcct

SEQ ID NO: 7035 - DNA, 365 bp, Bos taurus
  unsure (339): unsure at all n locations; Clone ID: 30-LIB34-021-Q1-E1-H5
ggcagcctcggggcagctgtctggggacacgctggggcccctggccgtggccctgctcatcttcttgctcttgctggacctgatgcaccggcgctcacgttgggccccacgatacccaccaggccccatgccgctgccggtgctgggcaatctgctgcaggtggacttcgaggacgcacgtcccagctttaaccagttgcggcgccgtttcgggaacgtgttcagcctgcagcaggtctggacaccggtagtcgtgctcaacgggctggcggctgtgcgcgatgcgctggtgtaccgcagtcaggacactgccgaccgtccacctcaggcactctacangcacttgggtttcgggccgcgcgccg

SEQ ID NO: 7036 - DNA, 438 bp, Bos taurus
  unsure (367): unsure at all n locations; Clone ID: 30-LIB34-022-Q1-E1-H9
gatagccgtaacttctgtgctgtgccagccgcatccctgagacaagatggtgaaggtcggagtgaacggattcggccgcatcgggcgcctggtcaccagggctgcttttaattctggcaaagtggacatcgtcgccatcaatgaccccttcattgaccttcactacatggtctacatgttccagtatgattccacccacggcaagttcaacggcacagtcaaggcagagaacgggaagctcgtcatcaatggaaaggccatcaccatcttccaggagcgagatcctgccaacatcaagtggggtgatgctggtgctgagtatgtggtggagtccactggggtcttcactaccatggagaaggctggngctcacttgaagggtggcgccaagagggtcatcatctctgcaccttctgccgatgcccccatgtttgtgat

SEQ ID NO: 7037 - DNA, 409 bp, Bos taurus
  Clone ID: 30-LIB34-023-Q1-E1-H5
acaggtcagagactcgcgggtcgacgcaagcctctacacagatgctgcatagatggctcgcttcgtggccttggtccttctcgggctgctgtcgctgtctggactggacgccatccagcgtcctccaaagattcaagtgtactcaagacacccaccagaagatggaaagccaaattacctgaactgctatgtgtatgggttccatccaccccagattgaaatcgatttgctgaagaatggggagaagattaaatcggagcagtcagacctgtctttcagcaaggactggtctttctacctgctgtcccacgctgagttcactcccaacagcaaggatcagtacagctgccgagtgaaacacgttactttggaacaaccccggatagttaagtgggatcgagacctgtaa

SEQ ID NO: 7038 - DNA, 369 bp, Bos taurus
  Clone ID: 30-LIB34-024-Q1-E1-H5
tcgcgggtcgacacaagcctctagacgtagtctcatcattcagctgttccagccctcaggttctggggcctgcgaggtgcgcgggcgtggacccgctggcctcgtattccaggtggaggatggtccatatcttgttttgctggtgcctcaagtgacactggagggggagaccacagtcagaagaagtttctcctgcaggacatcgctgagctgattaagaccagagcctgccagaaggtggtggtcatggtgggggccggcatcagcacagccagcggcatgccagacttcacgtctccgggggttggctactacatcatcctccagcagtacaagctcccctagcctgaggccatttttgagctctcc

SEQ ID NO: 7039 - DNA, 417 bp, Bos taurus
  Clone ID: 30-LIB34-025-Q1-E1-H5
gctgctgctgtgtaacgtccagccccgccgcaacctgccggtggtctttgagcacgactcctggttcatcatcttcatggctgccttcgccttctccaatggctaccttgccagtctctgcatgtgctttgggcccaagaaagtgaagccggctgaggcagagacagctggagccatcatggccttctttctgtctctgggcctggcgctgggggccgtcttctccttcctgttccgggcaatcgtgtgaccgcggatggacggcaggatggcaccggctgcctgttcctgccttcccctttaggggtgggcaagggtcctctggaggttttcttgtctagccatcttctgcttgctcatggcctgtgctgggcccggcatccatgccccgaggagagagcctctgtggatggacat

SEQ ID NO: 7040 - DNA, 408 bp, Bos taurus
  Clone ID: 30-LIB34-026-Q1-E1-H5
gggtacccaggtatatatcttcctgacaagggcaggctacactctcgtaaaagattatccaaagcagctggagaaggaatttgggagccctgatggggtctgccttcattctgtggatgcagcctttacctgtcctggatcttctcagctctacatcatggcaggccagaagctgtggaggctggacctgaacttaggagctcaagccacgtggacagagcttccttggctccatacgaaagtcgatggggccctgtgtacagagaagtctctgggcccccactcgtgttctgccaatggtctgggcttgtacctcgtccaaggccccaatctgtactgctacaaagatgtggaggaattgagcaagaccaaggaccttccccaggcccagaggatgaacagcctcct

SEQ ID NO: 7041 - DNA, 403 bp, Bos taurus
  Clone ID: 30-LIB34-028-Q1-E1-H9
ggagcctggaaggcagagcaactggacctcgcctaagctgtgtctctgactcatttctgactttaggcaagttcttccaatgggaaaaatggcgaagatgtttagtttcatccttgtcaccactgctctggtaatgggcaggggaagctcggctctggagaactgcctccaggagcaggcgcggctcagagcccaagtgtacctgctggagacccgggtcaagcagcaacaagtcaagatctcgcagcttttgcatgagaaacaagtccagctccttgataaaggagaggagaatagtgtcattgaccttggaggaaagaggcaatacgcagattgttcagagattttcaatgacgggtacaagcagagtggattttataaaatcaaacctctccagagccca

SEQ ID NO: 7042 - DNA, 309 bp, Bos taurus
  Clone ID: 30-LIB34-030-Q1-E1-H5
cggacgcgtggggaactttatctgaaaagaaaaagataatatttttcctatgggacaatggacttgcaaagcctcacttcactttaaaagtaaaaagaacccatgttgagaactccactaacagttttatgccggtgataatttatctacataccatttcaataaatattttgtttcctaagactaaaagaaaaagaaaaaaaaaaaggaaaaaaaaaaaagaaaaaaaagaaggaatacaagaggatagaaaaaagaaaaaggcaaaaaatggagagcgaagggggagaaaaaaaagggggggccgcc

SEQ ID NO: 7043 - DNA, 419 bp, Bos taurus
  Clone ID: 30-LIB34-030-Q1-E1-H9
gggaagacaaagaccaccttctacagtaatggactcaagttaaaatattactacatgccctttgggtcaggagtcactatatgtcctggaagattattcgctgtccaggaaatcaagcagtttttgatcctgatgctttcctatttcgaactggagcttgtggagagctgtgtcaaatgtccacctttggaccaatcccgggcaggcttgggcattttaccaccattatatgatactgagtttagatataaattcaagcattcgtgaacatatgcttggaggccccctggtgctgttacaaggctgcgggcaccatcactcaccggtgccctgtgggcagacgtgtttagtggcagtacgacggtgcagcaggttcccttctgcccagcagtgcttgcttgtgaatcttaacgttttgg

SEQ ID NO: 7044 - DNA, 361 bp, Bos taurus
  Clone ID: 30-LIB34-031-Q1-E1-H5
gatacgaggcgaggcggtgctgaagacccagggcccccagcccagggaccttgctaggatggggccagcatggctgtggctgctgggagctgggatcctggcctctgtccactgtcagccccttcctgcccatggagataagagcctgagggtgcctgaagccccgcgtggtcagctctcagagtccctccccgcctaccagaaaatcacacgcacccttaccagcttcgctttgcgtctgtacaagcagctggcagcagaaaccccaggaaacatcttcttctcgccagtgagcctctccagcaccctggccctgctctctctgggggtgcaagctaatacccgcactcagatcctggag

SEQ ID NO: 7045 - DNA, 194 bp, Bos taurus
  Clone ID: 30-LIB34-032-Q1-E1-H5
gtactaccgagtgaaccttcgcacacggcgggtggacgctgtgatccctccctacccacgctccatcgcccagtactggctgggctgtccagtccctggccaagcgtagcagcctgagtccaaacagctggtcactgctgctccctgctccagcatcctccttccagctcaataaagatcccttgaccctgaac

SEQ ID NO: 7046 - DNA, 420 bp, Bos taurus
  Clone ID: 30-LIB34-032-Q1-E1-H9
gatcaaagcagtcttcctccctaagaaactacccaaggaacaatgatagagtcttcttcctcggctgtctgcagcagaaaagtgtcaatgaagcatcagcgagttccagttatgatccttcatagcaaggggacaatggcatcctggcccttctctaggctgtggagtatctctgatccaattctgttccaagtgaccttggttgctactctgttggccactgttcttggcagttgtggtattccaccctatttagactttgcttttccaataaatgagttgaatgagacaaggtttgaaactggaactactctgagatacacctgtcgtcctggctacaggataagttcaagaaagaactttcttatctgtgatggaacagacaattgggaatacaaagagttttgtgtcaaaaaacga

SEQ ID NO: 7047 - DNA, 307 bp, Bos taurus
  Clone ID: 30-LIB34-034-Q1-E1-H5
cggagccacagggacggccaagcccaggagccagggaaccgacgaccgagtcatgtggctggaaatactccttgcctcagtgctgggctttgtcatctactggttcgtctccaaggacaaggaggagactttgccccttgaagatggatggtgggggcctggggtgaggcccacagctggggaggataagagcatccgcccattcaaggtggaaacatcagatgaggagatcaatgacttacatcagaggattgacagggtccgtttaactccacctttggatgacagtcgtttccactaaggtttc

SEQ ID NO: 7048 - DNA, 436 bp, Bos taurus
  Clone ID: 30-LIB34-034-Q1-E1-H9
tactgattgccttttctcagtatctccagcagtgtccatttgatgagcatgtaaaattagtgaacgaactaactgagtttgcaaaaacatgtgttgctgatgagtcccatgccggctgtgaaaagtcacttcacactctctttggagatgaattgtgtaaagttgcatcccttcgtgaaacctatggtgacatggctgactgctgtgagaaacaagagcctgaaagaaatgaatgcttcctgagccacaaagatgatagcccagacctccctaaattgaaaccagaccccaatactttgtgtgatgagtttaaggcagatgaaaagaagttttggggaaaatacctatacgaaattgctagaagacatccctacttttatgcaccagaactcctttactatgctaataaatataatggagtttttcaagaatgctg

SEQ ID NO: 7049 - DNA, 379 bp, Bos taurus
  Clone ID: 30-LIB34-035-Q1-E1-H5
cagacgcgtgggccgcgcccggacgggagcgcggagctcgggggcgcaggacccacaggccggggccggggccggggccggggacgtggcagccgcctcgcccgccagaaaagtttcccaggagttggctgcgcgcgggccggaccatgaacgtgtttcggatcctcggcgacctgagccatctcctggccatgatcctgcttctggggaagatttggaggtccaagtgctgcgcgggcatctctgggaagagccagatccttttcgctctcgtctttaccaccaggtacctggacctgttcaccaacttcatctccatctacaacacagtaatgaagatggtttttctcctctgtgcctaggtcacagtgtacatgat

SEQ ID NO: 7050 - DNA, 355 bp, Bos taurus
  Clone ID: 30-LIB34-036-Q1-E1-H5
agtcactctcctgctctgcgggcagcttctcgcggtggaaaccggcagtgaggccacaggcgacagctgcccaaaggcccccgagattgctaatagccatgtggagtactcggttcgctatcagtgtgacaaatattacaaactgcatgctggaaatggggtgtatacttttaacaataagcaatggataaacaaggacattggacagcaacttcctgaatgtgaacaagatgacagctgcccagagccccccaagattgaaaatgggtacgtggagtacttgggtcgctaacagtgcaaagcctattacacactgcgcacctgtggagatggagtgtacacctttaacagtaag

SEQ ID NO: 7051 - DNA, 360 bp, Bos taurus
  Clone ID: 30-LIB34-036-Q1-E1-H9
aatttggtaagatatttaaaaataacacatgctaactgcataagctaattgacgatgggagattgacgttccagcaagtgccaatggttgaaattgatgggatgaagctggtgcagaccagacccattctcaactacattgccaccaaatacaacctctacgggaaagacatgaaggagagagccctgattgatatgtactcagagggcgtggaagacttgggggaaatgatcatgcatttaccactgtgcccacctgatcaaaaagatgctaagatagctcagatcaaagagagaacaacagaccgttatttccctgcatttgaaaaagtgctgaagaatcaccgacaagattatcctg

SEQ ID NO: 7052 - DNA, 420 bp, Bos taurus
  Clone ID: 30-LIB34-037-Q1-E1-H4
cgaggccggggacgaacgcatgctggcagactcccctccgcaggaccattcctgctgttcaggcgccctgtatcacggcagcaaagtgagcccaaattcagtcccatcttgggtcaacccttcaccagcgccagtgctcccaatgcctgctgtcggcgctcaggtgcttgagtcaacccctcctccacatgtgatgagagttgaaaatgacccacacttcatcatctacctgccaaaaagccaaaagaatatttgtttcaatattgactcagaacctggaaaaatcctcaaccttgtttctgatccagaattagggattttggtcaacggacagctcgtcggtgccaagaagcccaagaataaaaaactcagcacctattttgggaaactgggattttatttccaacgtgaagatgtgaa

SEQ ID NO: 7053 - DNA, 407 bp, Bos taurus
  unsure (333): unsure at all n locations; Clone ID: 30-LIB34-037-Q1-E1-H9
acctgacctatgacagtgaatcgataatggcactctccatcacgcggggccttctgctgctggcagccctgtgctgcctggcccccatctccctggctggagttctccaaggacacgctgtccaagagacagatgatacatcccaccaggaagcagcgtgccacaagattgcccccaacctggccaactttgccttcagcatataccaccatttggctcatcagtccaacaccagcaacatcttcttctcccccgtgagcattgcttcagcctttgctatgctctccctgggagccaagggcaacactcacactgagatcctgaagggcctgngtttcaacctcactgagctcgcagaggctgagatccacaaaggctttcagcatcttctccacaccctgaaccag

SEQ ID NO: 7054 - DNA, 387 bp, Bos taurus
  Clone ID: 30-LIB34-038-Q1-E1-H5
agcacgcaaagactacgacactacgcctcctgtcgtgcgctggctcaacgagcagagatactatggaggtggttatggctccacgcaggccactttcatggtgttccaagccttggcccaataccagaaggatgttcctgatcacaaggagctgaacctggatgtgtccatccaactgcccagccgcaactctgcggtcaggcatcgtatcctctgggaatctgccagcctcctgcgctcagaagagactaaggaaaatgagcgtttcacagtaaaagctcaagggaaaggtcaaggcaccttgtccgtagtgaccgtgtaacatgccaagctcacaaggcaaagtctcccggcaggcagttcgaccccccggggtttcaatacggc

SEQ ID NO: 7055 - DNA, 315 bp, Bos taurus
  Clone ID: 30-LIB34-038-Q1-E1-H9
atcaacggtattcgacaacctgcctaacccagaagacaggaaaaactatgagctgctctgcggggacaacacccggaagtctgtagatgattaccaagaatgctacttggcaatggttccttcccatgcggttgtggctcgaactgtgggcggcaaggaggatgtgatctgggaacttctcaatcacgcccaggaacattttggcaaagataaaccagacaatttccagcttttccaatcccctcatgggaaggacctgctgtttaaggactctgctgatgggtttttaaagattccttctaagatggattttga

SEQ ID NO: 7056 - DNA, 422 bp, Bos taurus
  Clone ID: 30-LIB34-040-Q1-E1-H5
caccagctcaccatggctcgggcattgagagtgccagttgcactgtggctgttgggcttgtgctggtctttggctaaagcccaccctctggctagagctcctgagcttgggcacggagttgaaggtgggaatgtggccaagccggatccagaagtgacggaacgctgctcggatggctggggctttgatgctaccaccctggatgagcatgggaacatgctgtttttaaaaggggagtttgtgtggaagggtcatgcctgggcccggcagttgatctcagagaggtggaaggatgcccccagtcccgtggatgctgcattccgctatgatcgtaacagtgtccttctgatcaagggggacaaattctgggtatatcctcctgagaagggggaggaatatccaaagttgctccaagagaagtt

SEQ ID NO: 7057 - DNA, 361 bp, Bos taurus
  Clone ID: 30-LIB34-041-Q1-E1-H5
atccagggtccactgcctcccagagaatgtgaccccagaagaacagcacaaagggacgtctgtggatggccactcattagcctccagcaacactgacttcgccttcagcctctacaagcagttggctttgaaggaccccaataagaatgtcatcttctcccctctgagcatctccatagccttggccttcctgtccctgggggctcatgaccacactgtgacagagatcctggaaggtctcaagttcaacctcacagagacccccgagacagaaatccaccagggcttccagcacctcctgcagacgttcaatcagcccagcaaccagctgcaactgagcgtgggcaacgccatgtatgtg

SEQ ID NO: 7058 - DNA, 352 bp, Bos taurus
  Clone ID: 30-LIB34-042-Q1-E1-H5
atgaaagttgaactagctagattgagttaccagagagcagcttgggaagttgattctggtcgccgaaatacctattatgcctctattgcaaaggcatatgctggagatatcgcaaatcagttagcttctgatgctgttcagatttttggaggcaatggatttaatactgaatatcctgtagaaaaattaatgagagatgccaagatctatcagatttatgaatgtacagcacatattcaaaggcttattatagcccgtgaacacattggcaggtataagaagtaaccagatcaccgtgttaataatcgttgagtaattagagtatgatcgactatttaaactccaggaaaga

SEQ ID NO: 7059 - DNA, 419 bp, Bos taurus
  Clone ID: 30-LIB34-043-Q1-E1-H5
aaggacgcgtgggggcagatcttgccaagtacatatgtgataatcaagatacaatctccagtaaactgaaggaatgctgtgataagcctttgttggaaaaatcccactgcattgctgaggtagaaaaagatgccatacctgaaaacctgcccccattaactgctgactttgctgaagataaggatgtttgcaaaaactatcaggaagcaaaagatgccttcctgggctcgtttttgtatgaatattcaagaaggcatcctgaatatgctgtctcagtgctattgagacttgccaaggaatatgaagccacactggaggaatgctgtgccaaagatgatccacatgcatgctattccacagtgtttgacaaacttaagcatcttgtggatgagcctcagaatttaatcaaacataactgt

SEQ ID NO: 7060 - DNA, 418 bp, Bos taurus
  Clone ID: 30-LIB34-044-Q1-E1-H5
attccaggctcggagccccgggcccgccgacaccatgagttggtcctcgcaccctccgagtgtaatcttctacattctttcattgctttcttcagcatgcctggcatatgttgctacccgagacaactgctgcatcttagatgaaagatttggtagttattgcccaactacctgtggaattgcagatttcctgaataattaccaaaccagtgtagacaaagatctacgaactttggaaggcatcttatatcacgttgagaacataacatcagaagccagagagctggtcaaagcaatccagatcagctataaccctgatcaaccatcaaagccagatcacatagagagtgctaccaagaattccaagagtatgatggaagaaattatgaaatatgaaacactgataacaacacatgaa

SEQ ID NO: 7061 - DNA, 372 bp, Bos taurus
  Clone ID: 30-LIB34-045-Q1-E1-H5
tatgagagaaaaagtactgacttcatctgccagacagagactcaggtgtgccagtattcagaaatttggagaaagagctttaaaagcatggtcagtagctcgcctgagccagaaatttcccaaggctgagtttgtagaagttaccaagctagtgacagatctcacaagagtccacaaggaatgctgccatggtgacctacttgaatgcgcagatgacagggcagatcttgccaagtacatatgtgataatcaagatacaatctccagtaaactgaaggaatgctgtgataagcctttgttgggaaaatcccactgcattgctgaggtagaaaaagatgccatacctgaaaacctggccccattaactgctga

SEQ ID NO: 7062 - DNA, 427 bp, Bos taurus
  Clone ID: 30-LIB34-046-Q1-E1-H9
catgtatcaaaacaaataatgagtatccacaattctaaaggacaaacatgaacattaatattaatatctctgatcctatttattggatcaacaaacctactaggcctattaccccattcattcacaccaacaacacaactatcaataaacctaggcatatccatccccctgtgagcaggagccgtaattacaggattccgcaataaaactaaagcatcacttgcccatttcttaccacaaggaacacccactccactaatcccaatactagtaattattgaaactatcagcctttttattcaacctatagccctcgccgtgcggttaacagctaacatcactgcaggacacctattaattcacctaatcggaggagctacacttgcactaataagcattagcactacaacaaccctaattacattca

SEQ ID NO: 7063 - DNA, 443 bp, Bos taurus
  Clone ID: 30-LIB34-047-Q1-E1-H5
agcagtttgtgtctgacctacgaagcctgagctgtcagatggctgtcctccagggcaatggctctgaaaaagcctgctgcccagtgaactggatcgattatgaaggcagctgttactggttctctcgctccgggaagccctggccagaggctgagaagtactgccagttggagaatgcccacctggtggtggtgggctcctgggaggagcagaaatttatccagcaccacatgggccctgtaaatacctggataggcctcatggatcaaaatgggccctggaaatgggtggacgggacggactacgagacgggcttcaagaactgggcaccagagcagccagatgactggtatgggcacgggctcggagggggtgaagactggtgccacatcacggtggacggccgctggaatgatgacgtctgcctgagggccctacgctgg

SEQ ID NO: 7064 - DNA, 431 bp, Bos taurus
  unsure (365): unsure at all n locations; Clone ID: 30-LIB34-048-Q1-E1-H5
atggattccaaaatgcgctcatagttcgttacaccaggaaagtaccccaagtgtcaactccaactctcgtggaggtttcaagaagcctaggaaaagtgggtactaggtgttgtacaaagccggaatcagaaagaatgccctgtactgaagactatctgagcttgatcctgaaccggttgtgcgtgctgcatgagaagacaccagtgagtgaaaaagtcaccaagtgctgcacagagtcattggtgaacagacggccatgtttctctgctctgacacctgatgaaacatatgtacccaaagcctttgatgagaaattgttcaccttccatgcagatatatgcacacttcccgatactgagaaacanatcaagaaacaaactgcacttgttgagctgttgaaacacaagcccaaagcaacagaggaacaactg

SEQ ID NO: 7065 - DNA, 426 bp, Bos taurus
  Clone ID: 30-LIB34-048-Q1-E1-H9
ggtttaaagatttgggagaagaacattttaaaggcctggtactgattgccttttctcagtatctccagcagtgtccatttgatgagcatgtaaaattagtgaacgaactaactgagtttgcaaaaacatgtgttgctgatgagtcccatgccggctgtgaaaagtcacttcacactctctttggagatgaattgtgtaaagttgcatcccttcgtgaaacctatggtgacatggctgactgctgtgagaaacaagagcctgaaagaaatgaatgcttcctgagccacaaagatgatagcccagacctctctaaattgaaaccagaccccaatactttgtgtgatgagtttaaggcagatgaaaagaagttttggggaaaatacctatacgaaattgctagaagacatccctacttttatggcacag

SEQ ID NO: 7066 - DNA, 418 bp, Bos taurus
  Clone ID: 30-LIB34-049-Q1-E1-H9
aagcagcgtgccacaagattgcccccaacctggccaactttgccttcagcatataccaccatttggctcatcagtccaacaccagcaacatcttcttctcccccgtgagcattgcttcagcctttgctatgctctccctgggagccaagggcaacactcacactgagatcctgaagggcctgggtttcaacctcactgagctcgcagaggctgagatccacaaaggctttcagcatcttctccacaccctgaaccagccaaaccaccagctgcaactgaccactggcaatggtctgttcatcaatgagagtgcaaagctagtggatacgtttttggaggatgtcaagaacctgtatcactccgaagccttctccatcaacttcagggatgctgaggaggccaagaagaagatcaacga

SEQ ID NO: 7067 - DNA, 415 bp, Bos taurus
  unsure (313): unsure at all n locations; Clone ID: 30-LIB34-050-Q1-E1-H5
cattgctgtcaaggagaagtatgccaagtacctaccccacagcgcgggccgctatgcggccaagcgcttccgcaaggcacagtgccccatcgtggagcgcctcaccaactccatgatgatgcatggccgcaacaatggcaagaagctcatgaccgtgcgcatcgtcaagcacgcctttgagatcatccatctgctcactggcgagaaccccctgcaggtcctggtgaacgccatcatcaacagcggcccccgggaggactccacccgcattgggcgagctggaacagtgaggcggcaggccgtggacgtgtcnccactgcgccgtgtgaatcaggccatctggctgctgtgcaccggcgcccgggaggccgccttccggaacatcaagaccattgccgagtgcctggcggatgaa

SEQ ID NO: 7068 - DNA, 235 bp, Bos taurus
  Clone ID: 30-LIB34-052-Q1-E1-H5
aggtagagcccctttcattatgaagcatgcagtgttatcggagagcaaggacggcctgagtgtatatgaagggagacgtgtgttgcaggtattcggtacgtgtatcacctcagatggcaaaccggattgtggattctgcaaggagcatcctcaacaagtttatacctgatatctatatttacacagaccacatgaaaggcatcaactctgggaagtctccgggctttgggctgtc

SEQ ID NO: 7069 - DNA, 244 bp, Bos taurus
  Clone ID: 30-LIB34-052-Q1-E1-H9
gcgagcggacgcccttttttttttttttttagagtcttttcattttttatataattgtaacacaagataagaaacgctcaccgattgtaaaaaaggattagattctcttctccctattctgcttattggcctctggggctgtgtgacctgtcatcggacccctgtggaacacgtctgcacagccaaacctcgggacattcctgtgaatcccatgtgtatttaccgttcctcagagaagaaggca

SEQ ID NO: 7070 - DNA, 239 bp, Bos taurus
  Clone ID: 30-LIB34-054-Q1-E1-H5
ggtgaaacatctgaaatgtacctcattcagcctgaggattctagcaaaccatatagagtatactgtgatatgaaaacggaaaaaggaggatggacagtaattcagaaccgtcaagatggtagtgttgactttggcaggaaatgggatccatataaacaaggatttggaaatattgcaaccaatgcagaagggaagaaatactgtggtgtaccaggtgagtattggctcggaaatgacat

SEQ ID NO: 7071 - DNA, 350 bp, Bos taurus
  Clone ID: 30-LIB34-055-Q1-E1-H5
cccacctgcaaagttctgcatcgccactcagacatcatggcggacaaccgggatccagccagcgaccagatgaaacactggaaggagcagagggccgcgcagaaacctgatgtcctgaccactggaggtggtaatccagtaggagacaaactcaatagtctgacggtagggccccgagggccccttctcgtccaggatgtggttttcactgatgaaatggctcactttgaccgggagagaattcctgagagagtcgtgcatgccaaaggagcaggggcttttggctactttgaggtcacacatgacattaccagatactccaaggcgaaggtgtttgagcatattggaaa

SEQ ID NO: 7072 - DNA, 367 bp, Bos taurus
  Clone ID: 30-LIB34-056-Q1-E1-H5
ggaacatcatggatttgagactcgcggggcgccgggcgctcgtcacgggggcgggcaaaggcatcggtcgcagtattgtcaaggcgctacacgcggctggcgcccgagtggtggccgtgagccggacccaggccgacctggacagcctggtccgcgagtgccccggggtagagaccgtgtgcgtggacctagctgactgggaggccacggagcaggcgctgggaggtgttggccctgtggacctgctggtgaacaatgcagctgtggcgtttctacagcccttcctggaggtcaccaaggaggcatatgacatgtctttcagtgtgaaccttcgggcggtcatccaggtgtcgcagattgtggcccg

SEQ ID NO: 7073 - DNA, 220 bp, Bos taurus
  Clone ID: 30-LIB34-057-Q1-E1-H5
ctaggttctagaatctcgagcggccgcccttttttttttttttttacattgtaaggctgtacagattttattattgagtaaaagcagtatcaccttcccatttatttgctgctatagtccttcagtgatgtgagcagttatacgcatgggataaaacactacagggcccttgtcaatggatgtgaagttaccatttcatctcttctccatggtctagaca

SEQ ID NO: 7074 - DNA, 223 bp, Bos taurus
  Clone ID: 30-LIB34-058-Q1-E1-H5
ctcctggaagtgtacaacatgatgagcagggaagtaaaccagttcagagagacctggaaccgcacgcgccacgtcatcatcatcatgactgacggtttgcacaacatgggtggggatccagtcactgtcattcacgatattcggtacttgctagacattggtagaaatcgcaaaaaccccagggaggattatctggatatctatgtgttcggggttggacctc

SEQ ID NO: 7075 - DNA, 219 bp, Bos taurus
  unsure (96): unsure at all n locations; Clone ID: 30-LIB34-058-Q1-E1-H9
aggtgccataacaaagtaccaccgatcgcatggcttaaacagaaatttactttcttttctaaagttctggagattggaagtgtgaggtcaaggtanggttgatttcttctgagttccctctcttgcctgaatgatggtcatttccctgtgtcttcacgtggacttctctctgtacttgtctatattcaaatttcctcttataaggataccagtcatatt

SEQ ID NO: 7076 - DNA, 208 bp, Bos taurus
  Clone ID: 30-LIB34-059-Q1-E1-H9
gtggggtgctgtcatatggcctgggccaggagaagcccaagcacagcaaggacatcgcccgcatcaccttcgacgtatacaagcagagccctcgagatctcttcggcagcctgaatatcaaagccacgttctacgggctctactccttgagctgtgacattcaaggactcggcccaaagaaaatactcagggagctcctccgatgggc

SEQ ID NO: 7077 - DNA, 368 bp, Bos taurus
  Clone ID: 30-LIB34-061-Q1-E1-H5
agtggaaaggaaggcagaatcaagtacaagataatgaaaatgtagtaaacgagtactcctcacatctggaaaagcaccagttatatatagatgagactgtgaagaataatatcccaactaagcttcgtgtgctccgttcaattctggagaatttgagaagcaaaatacaaaaattagaatcggatgtctcaactcagatggaatactgccgcaccccgtgtactgttacttgcaatattcctgtggtgtctggcaaagaatgtgaggaaatcatcaggaatggaggtgaaacatctgaaatgtacctcattcagcctgaggattctagcaaaccatatagagtatactgtgatatgaaaaccggaaaa

SEQ ID NO: 7078 - DNA, 163 bp, Bos taurus
  Clone ID: 30-LIB34-062-Q1-E1-H5
gtccgcagacatcccaaaagaaaccaggatactgccatcatggcggggaaacccacgttacactacttcaatggacgtggcagaatggaatgcattcggtggctcctggctgcaaccggagtggagttctgaagacaaatttacatcacaaccagatcacctg

SEQ ID NO: 7079 - DNA, 442 bp, Bos taurus
  unsure (271),(325): unsure at all n locations; Clone ID: 30-LIB34-063-Q1-E1-H5
ggggccacccacgcgtcaggagtgctcctcttgagtcagccctatccacggcagagatgttttccgtgagggacctctgcctggtcctgagtttggtgggtgcaattaagacagaacatggtagtgatcctcccagtggtgactttttaactgatagacgaggggtgcgtggcccaagacttgtggaaagacagcaatctgcctgcaaagagacaggctgggccttctgctctgatgaagactgggatacaaaatgcccttctggctgcangatgaaacggttgattgatgaagtcgatcaagattttacaagcagaataaatanactaagagattcactatttaattatcagaagaacagtaaggactctaatacattgaccaagaacatagtggaactaatgagaagggattttgccaaagctaacaacaatgataatac

SEQ ID NO: 7080 - DNA, 213 bp, Bos taurus
  Clone ID: 30-LIB34-065-Q1-E1-H5
cgccttcagcctctacaagcatttggctttgacgaaccccaatacgaatgtcatgttctccccgctgagtgtctccatggccttggccttcctgtcactgggggcccgtgaccccagcctgacagacatcctgcaaggcctcaccgttcaccctcacaggaatccacaagacacagatccaccagagcttccagcatctcctgcaggcgctca

SEQ ID NO: 7081 - DNA, 255 bp, Bos taurus
  Clone ID: 30-LIB34-066-Q1-E1-H5
cctcgagcagggagctggtggctcttccatccccagaccagccaagcctgtgagtgacaccccagacagaggaaccagagccatgcggagtctcagcggactgctgttgttactgactgcctgcctggcggtaaacgccagctccgtgcccacattgcccgatgacattcaagtgcaggagaacttcgacctgtctaggatctatgggaagtggttcaatgtggccgtgggctccacctgcccatggctgaagag

SEQ ID NO: 7082 - DNA, 162 bp, Bos taurus
  Clone ID: 30-LIB34-068-Q1-E1-H5
gacaacattttagcgctgtcattctacaaggtcatcctgggtgcacacaacgagaaagtcgggaacagatgcagaatacatgcagctgcggagctccagcgatgctaccactacaactgcacacacaagagatccacttgtctgcaccccgaactacatggt

SEQ ID NO: 7083 - DNA, 212 bp, Bos taurus
  Clone ID: 30-LIB34-069-Q1-E1-H5
tgcagaacccacaccagaacaagaggaaaaagcactcttgtcatcacctgaaggagaggaaaaagcaacatcagacgctgacctgaaagaacatatggttggaatcatcttcagcaggagtaaactgactaacctacagaaacaggtgtgtgctcacatcgtccaggccattcgcatgggaagccaccaagagtccgccgagggaatgggga

SEQ ID NO: 7084 - DNA, 225 bp, Bos taurus
  unsure (216): unsure at all n locations; Clone ID: 30-LIB34-069-Q1-E1-H9
cgatggcacctgcgctgacagctactctttcgtgtttgcccgagaccccagcggcttttccccggaagtgcagaaaatcgtgcggcagaggcaggaggagctgtgcctggccaggcagtaccggctgatccctcacaacggttattgtgatggcaagtcagaaagaaacattttgtagcaacatggaagggtgtcctttcattaggaaacttcccnattaaccct

SEQ ID NO: 7085 - DNA, 190 bp, Bos taurus
  Clone ID: 30-LIB34-070-Q1-E1-H5
ctgggaaaaagctggaagatggccctaaattcttgaaatctggtgacgctgccatcgttgatatggttcctggcaagcccatgtgtgtcgagagcttctctgattatcctcccctgggccgttttgctgtgcgtgacatgagacagacagtcgctgtgggtgtcatcaaagcagtggacaagaaggcagc

SEQ ID NO: 7086 - DNA, 397 bp, Bos taurus
  unsure (239): unsure at all n locations; Clone ID: 30-LIB34-071-Q1-E1-H9
aactgccagcctcctgcgctcagaagagactaaggaaaatgagcgtttcacagtaaaagctgaagggaaaggacaaggcaccttgtcggtagtgaccgtgtaccatgccaagctcaaaggcaaagtctcctgcaaaaagttcgacctccgggtttccatacgcccagcccccgaaacagtcaagaagcctcaggacgccaaaggttccatgatccttgacatctgtaccaagtacctgngagaccaggatgccactatgtccatcctggatatatccatgatgacaggcttctcacctgatgttgaagacctcaaaacgctgagcactggtgtcgacagatacatctctaagtatgagatgaacagagactccaacaagaacacactcatcatctac

SEQ ID NO: 7087 - DNA, 410 bp, Bos taurus
  unsure (379): unsure at all n locations; Clone ID: 30-LIB34-072-Q1-E1-H5
acacagagatcccagggggttactacggggggaggggctgctaattcagctcattgtcatcaatgacttcctatattagggaaaacatacatacaggtgcacaagagctgggctgtaggccgtagatggtagaaaagtggtcagtcttcttgggcctggaagtcaacagccaactcaaagtgactgagggtggttgattagctttcttgctctgcttccactgctctttctcctgcaatgactgatgatcccttggtggacagagacacattatcagaaatgaaggagcctgggaatagttgcaaagaatattgagacctaagagaggtattagcctccattccagccagagcggccccaacactggatggttctgtanggagcctggtcatcaacttgcaataccctca

SEQ ID NO: 7088 - DNA, 355 bp, Bos taurus
  Clone ID: 30-LIB34-076-Q1-E1-H5
ctcatgtcggactactaatataccgatcccacctaatatcctcccttctatgcttagaaggaataatgctatccctattcgttatagcagccctaacaatcctcaactcacattttacattagctagcataatacctattatcctactagtcttcgcagcctgtgaagcagccctaggtctatctctactagtaatagtatcaaatacatatggtactgattatgtacaaaacctcaacttactccaatgctaaaatacattattccaacaattatacttatacccctaacctggttatcaagaaattatataaattgggttaactccacagcacaaagccttccaattaacttt

SEQ ID NO: 7089 - DNA, 322 bp, Bos taurus
  Clone ID: 30-LIB34-077-Q1-E1-H5
accctatagaaagtcgtattacgctgccgctcgcctgcccgccgccatggccctgctccgaggtgtgttcatcgtcgctgctatgcggtccccctttggtgctcatggaggtccttctgaaagacttcacacctactgacatggctgagtttgctgccagggctgccttgtctgctggcagagtctcaccggtaactgtcgacagtgtccgtcgtaggcaatgtcatgcagagttcttcagatgctaattacttggcaagacatgttgggttgcgtgtgggaatcccaaaagagaccccagctatcactattaacaggctct

SEQ ID NO: 7090 - DNA, 407 bp, Bos taurus
  Clone ID: 30-LIB34-078-Q1-E1-H5
gtcttagtacacgcgatacgccaagggcaacgcacagagtttccgagtgggcctgaacaccctgcgcggctactacaaccagagcgaggccgggtctcacaccctccagtggatgtctggctgctacgtggggccggacgggcgtctcctccgcgggttcatgcagtacggctacgacggcagagattacctcgccctgaacgaggacctgcgctcctggaccgcggcggacacggaggctcagatcaccaagcgcaagtgggaggcggaaggttatgctgaggtacagaggaactacctggagggcgaatgcgtggagtggctccgcagacacctggagaatgggaaggacacgctgctgcgcgcagaccctccaaaggcacatgtgacccatcaccccatctctg

SEQ ID NO: 7091 - DNA, 403 bp, Bos taurus
  Clone ID: 30-LIB34-079-Q1-E1-H9
gacagggcagatcttgccaagtacatatgtgataatcaagatacaatctccagtaaactgaaggaatgctgtgataagcctttgttggaaaaatcccactgcattgctgaggtagaaaaagatgccatacctgaaaacctgcccccattaactgctgactttgctgaagataaggatgtttgcaaaaactatcaggaagcaaaagatgccttcctgggctcgtttttgtatgaatattcaagaaggcatcctgaatatgctgtctcagtgctattgagacttgccaaggaatatgaagccacactggaggaatgctgtgccaaagatgatccacatgcatgctattccacagtgtttgacaaacttaagcatcttgtggatgagcctcagaatttaatcaaac

SEQ ID NO: 7092 - DNA, 405 bp, Bos taurus
  Clone ID: 30-LIB34-080-Q1-E1-H5
ctagacatggacgtgaatatcgctcctctccgcgcctgggacgatttcttcccaggctctgaccgctttgcccggccggacttcagggacatttccaaatggaacaaccgtgtggtgagcaacctgctctattaccagaccaactacctagtggtggctgccatgatgatttccgttgtggggttcctgagccccttcaacatgatccttggaggcattgtggtggtgctggtgttcacaggcttcgtgtgggcagcccacaataaagacatcctccgtcggatgaagaagcagtaccccacagcgtttgtcatggtggtcatgctagccagctacttcctcatctccctcttcgggggagtcatggtctttgtgtttggtatcacatttcctttgctgttgatg

SEQ ID NO: 7093 - DNA, 419 bp, Bos taurus
  Clone ID: 30-LIB34-082-Q1-E1-H5
accccagcccagcgtcctctcccaggcacctctcctgcgatgggtcctcacactcagctttctggtggccacggtcgctgtggggctttacgccatgtgaattcaagtgtgctggctcctgggggccatgaaaactgttcgtggagaggggcagcctcttggctggcttccttcccttgagcttggggcagggggcagctgtcagggctcctgctgtctccctgtatccctctcttctggataaaaggagcctgagacatctccaccaacccaaagtacatccagtcagtgacctgaacttcaaagtgggacaaggggtcttccctggcccctcagcactcaccccttcctgttcctgcagcagagcccagaagatgtagccagagcaacagctgttgaaaacctccaaaagccttggg

SEQ ID NO: 7094 - DNA, 342 bp, Bos taurus
  Clone ID: 30-LIB34-083-Q1-E1-H9
cgcgtcagcaaccttctcttccacataagaagctctgacgaaagagatgcataaatcagttactctgacagtttcccaaagattcagaatctgctttgagtagctgctgttgccactgtcgacatctggtatttgaaaaaacagggtctgcaatcacctgacagtgtacagaaaagctcccctctttgtgtagctgacagggccttttggcggaggagaatgtcattgaatcttgacagtgacgtttgcctccagctgcctgacaggcagcaagtcagcagctcaaccccacagaaaccagcaccaagtgaagctgaaaaaataagggcaaaatgtgaaaat

SEQ ID NO: 7095 - DNA, 368 bp, Bos taurus
  unsure (278): unsure at all n locations; Clone ID: 30-LIB34-084-Q1-E1-H5
aaagcgccatggccgccttacgtgccctgctgccccgcgtccgcgccccgctgcggccctggctcttctgcccggtgcagcgctccttcgcctcgagcgcagcctttgagtacatcatcacagcaaagaagggaaggaacagcaacgtggggttgatccagctgaaccgccccaaggccctcaatgcgctctgcaacggcctgatcgtggagctcaaccaggcactgcaggccttcgaggaagacccagccgtgggggccattgtcctcacaggcggngagaaggtatttgcagctggagccgacatcaaagaaatgcagagcctcacgttccagaactggtactctggcgggttttgagccactggg

SEQ ID NO: 7096 - DNA, 392 bp, Bos taurus
  Clone ID: 30-LIB34-085-Q1-E1-H5
aggcgagagcatccggggacgccgggcgggaggtggaccgggaagacctaacctaggttctgtggatttgaacctccgcatttctaacccaagatctcgaaatgcatcgtgattcctgtccattggactgtaaagtttatgtaggtaatcttggaaacaatggtaacaagactgaattggaacgagcttttggctattatggaccactccgaagtgtgtgggttgctagaaaccctcccggctttgcttttgttgaatttgaagatccccgagacgcagctgatgctgtccgagagctagatgggagaacactctgtggctgccgagtaagagtggaactatcgaatggtgaaaagagaagtcgtaatcgtggcccacctccttcttggggt

SEQ ID NO: 7097 - DNA, 399 bp, Bos taurus
  Clone ID: 30-LIB34-085-Q1-E1-H9
agtatgaatcaagccatggtgcctgtggatggtcataaggaagagccccaaatatgcgttattgagctgggtggcaccattggagacattgaaggaatgccgtttgtggaagcgttcagacaattccagtttaaagcaaaaagagagaatttctgtaatattcatgttagccttgtcccacagcccagtgctaccggagaacaaaaaaccaaacccacacaaaacagtgtccgtgcgctgaggggattaggcctgtctcccgatctgattgtctgccggagttcaacgcccatcgaaatggctgtgaaggaaaagatttctatgttttgtcatgtgaaccctgaacaggtcatatgtatccatgatgtttcttccacctaccgagtgcctgtgcttttg

SEQ ID NO: 7098 - DNA, 407 bp, Bos taurus
  Clone ID: 30-LIB34-086-Q1-E1-H5
ttcaaatctcctagacgacccaactgtgagtgtctctgtcgtagcctctcagcttgctttcctgtgtcctgtgagtatcttcctgcctgaatgggcgctttatcctactggtgctgaggaaagcagggtctgtacaactgttccagtccaggaggcccctctttgtaatcccctgcctatgacatgcatcccctctctctctccacattgctcctgcgcacacattcccatagtttcctgagcgatcaaatggacgtcgattctgagaataccctcaccgatgcctgcaacctggatgtgtgtgctccaccattacatagccttcgtggtcatgatggacgagatgggaaagaacgaccccatggagagataggtgatccagggtctccagttatgcctggaccagc

SEQ ID NO: 7099 - DNA, 352 bp, Bos taurus
  unsure (275): unsure at all n locations; Clone ID: 31-BOVMS1-001-Q1-E1-H3
aaaggatcatatcgtggagctgatgtccaccctgtctcactgtgctacgatcacgcagatcgtatcgtacgagctcctgaatgccattgagcgcatcaaactcctgctgaccaacaacatcagcatgctcaataccacactgaacctcgaggcagacatcatacaaatccagtgtacacattgtggacattcgccataaagctcgcaacgcagaacagaaagccaagaaggccatcactgatgcagccatgatggctgacgagctgaagaaggancaggacaccagcggctacctgctgcggttgacgtacaacatggatcatacggtgacggacctgcagaatcgtctgga

SEQ ID NO: 7100 - DNA, 416 bp, Bos taurus
  Clone ID: 31-BOVMS1-002-Q1-E1-H3
acgcgtccgacaactctcacatccatacatgactactggaaaaaatgtagctctgactagttggacttttgttcgcaaagtaatgtctctgctttttaatatgctgtctaggttggtcatagcttttcttccaaggaacaagcgtcttttaatttcatggctgcagtcaccatgtgcagtgattttggaaccccccaaaataaagtctgtcactgtttccatatctatttgccatgaagctaacctaaaaatccttaagaatgacacttcctagtaataagagaaaatagccataatctttctaaggtgaaaagaatgggtgggtatttatccagcatactcagatatacttggtggcaaactctctattaaaatggacaagtgaacaattttacatcctactgtaagaactgtct

SEQ ID NO: 7101 - DNA, 409 bp, Bos taurus
  Clone ID: 31-BOVMS1-003-Q1-E1-H11
gtcggaatcagggtcgacgacgcgtccgcactaagtaatattacccgatgaggaaaccacacagaacgcctaaacgccggacacgatttcctattctatacactatctggctctctacccctagtagtcgcactaaattatatccaaaacacagtaggatccctaaatttcctaatattacagtactgagtacaacctgttcataactcttgatctaatgtcttcatatgactagcatgtataatagctttcatagtaaaagtaccactatatggcctccacctttgactacctaaagctcacgtagaagcccccatcgcatgctccatagtccttgcagcagttctactaaaactaagggggtactgtatgctacgaatcacactaattctaaaacctatgaccgact

SEQ ID NO: 7102 - DNA, 421 bp, Bos taurus
  unsure (115): unsure at all n locations; Clone ID: 31-BOVMS1-003-Q1-E1-H3
atggaagatagtttactggatgttttaacaaaaaggaggcattccagaaccctgcaggagtcagagacgtcatctcctgaagatgaaggccagactaggatacttgacacagcanaagaaatggaggttacagaagttgaactaacaggatgtttggactccaataatcaagacaagcttacagcactgaaagcagtaacaaacttcggagctccggttgaagtttttgactctgaagaagctgaagtgttccagaggaaacttgatgagaccaccaaactgctcagagagctccaggaagcccagaatgagcgtctgagcaccagaccccctctcaacatgatctgtctcttgggtccgtcatacagagaaatgcatcttgctgaacaagtgaccaataaccttaaggaacttgcacagc

SEQ ID NO: 7103 - DNA, 246 bp, Bos taurus
  Clone ID: 31-BOVMS1-005-Q1-E1-H11
gtcggccacgcgtccggtttgatccacctggggctctatccatccttctagttccagttccaaccacagttccaaccaatgggctccagactctgggttctggccaatgaaaaacctcccttacagtctcctcttctttttccgcaagctccgcccaacatcaggagctctggctaatggaactcacctgaagctgttgctttttctctactcaaagcaacaaatattagcaatggtggccttaac

SEQ ID NO: 7104 - DNA, 359 bp, Bos taurus; identical to SEQ ID NO: 3767
  Clone ID: 31-BOVMS1-007-Q1-E1-H3

SEQ ID NO: 7105 - DNA, 405 bp, Bos taurus
  Clone ID: 31-BOVMS1-009-Q1-E1-H11
atgcgacgtcatagctcttctatagtgtcacctaaattcaattcactggccgtcgttttacaacgtcgtgactgggaaaaccctggcgttacccaacttaatcgccttgcagcacatccccctttcgccagctggcgtaatagcgaagaggcccgcaccgatcgcccttcccaacagttgcgcagcctgaatggcgaatgggacgcgccctgtagcggcgcattaagcgcggcgggtgtggtggttacgcgcagcgtgaccgctacacttgccagcgccctagcgcccgctcctttcgctttcttcccttcctttctcgccacgttcgccggctttccccgtcaagctctaaatcgggggctccctttagggttccgatttagtgctttacggcacctcgacccc

SEQ ID NO: 7106 - DNA, 385 bp, Bos taurus
  unsure (242),(335): unsure at all n locations; Clone ID: 31-BOVMS1-009-Q1-E1-H3
gaataatatatcgcaacatcccatcaatataaaaatcacaacccacgagctacagaagcatcaactaaataattttttgactcaatcaacagcctcaatactactaataatagccgtcatcattaacctaatattctcaggccaatgaaccgtaataaaactatttaacccaatagcctcaatacttataacgatagccctagctataaaactaggaatagccccatttcacttctgagtcncagaagtaacacagggcatccccctatcctcaggccttatcctactgacatgacaaaaactagcacctatatctgtactttaccaaatcttcncatcaattaacctaaacttaattctaaccctatcagttttatcaatccta

SEQ ID NO: 7107 - DNA, 223 bp, Bos taurus
  Clone ID: 31-BOVMS1-010-Q1-E1-H3
ccatgaatgcaacgtcaaagcccttcaaaagtgtcacctaaattcaattcacgggccgtcgtttaaaaaagtcctgactggaaaaaccctggggttacccaacttaaccgccttgcagaaaatccccctttcgcaagctggcgtaataccaaaaaggcccgcaccgatcgcccttccaaaaaattgcccaccctgaatggcaaatgggaccccccctgtaacg

SEQ ID NO: 7108 - DNA, 396 bp, Bos taurus
  Clone ID: 31-BOVMS1-011-Q1-E1-H11
gttctagatcgcgagcggccgccctttttttttttttttttgcttgagaaaaataaaattttatttccctaatttgacgatcattgtttatttcattcataaaggagaaaaattaagttctgtgtgctgttttaaatatactttaaggcaaaaaattaacacataatattatattacattaatatatgtcaggaaggtaacttgaacatagttaaaaaacaaacttgaaaatatttgctttgctgtgcaggcttttcaacagttatttttaaagactgaggaattaaacacctgtcacttttgccagctggtgtggatgttaaaagtcactgtcactctcttgcctgctactctattttgcacctgctacaaattgagacatgggcatctcacaca

SEQ ID NO: 7109 - DNA, 289 bp, Bos taurus
  Clone ID: 31-BOVMS1-012-Q1-E1-H3
aaaaaaaccaaatgaaaaacttaaagaaataacaaaatgtcaaaataagtaaaaagtgggaagaattatttactgttataaagaatgtttttattagtttggatgtcttcttttttagtggaatctaatcagtacttctgaactgcaggtatagtgctctaactaaaacataagctagtagtcccactgatcgataaactagacagtgtttatccctactttttccggggaaaaccttggcgttacccaagttaaaccccttgcagtaaatccccctttcgcaacctgg

SEQ ID NO: 7110 - DNA, 374 bp, Bos taurus
  Clone ID: 31-BOVMS1-013-Q1-E1-H11
agcagctggaagatgagctggtgtcgctgcaaaagaaactcaaggccaccgaagatgaactggacaaatactccgaggctctcaaagatgcccaggagaagctggagctggcggagaaaaaggccaccgacgctgaagccgacgtagcttctctgaacagacgcatccagctggttgaggaagagttggatcgtgcccaggagcgtctggcaacagctctgcagaagctggaggaggccgagaaggcagcagatgagagtgagagaggcatgaaagtcattgagagccgagcccaaaaggatgaggagaagatggagattcaggagaatcagctgaaagaggccaaacacatcgctgaggatgccgaccgcaag

SEQ ID NO: 7111 - DNA, 341 bp, Bos taurus
  Clone ID: 31-BOVMS1-013-Q1-E1-H3
gtcgacgcacgactcgtccgtgaagatggtgcccagctcaaatcaaccaccggcccgccatctccatgaacctaatcaccatgcctgcaactaatttgcacagctcggatcgagacatattcgaaggcgatgttgatattgccactcagtctgtgatcatcatcactacgttggaagatttgtgaatggttgatctgtgagatgatgatccagtctccttgccccatgttaatgcagcagtattgacagaagtcattcagtggtgcactcagcacatggatgatctgcctcatcctgacgatgatgagaccacagtaacagatcatatgatatacctgttt

SEQ ID NO: 7112 - DNA, 411 bp, Bos taurus
  Clone ID: 31-BOVMS1-014-Q1-E1-H3
aacaaaggtatcacctgcgaggtcctgacggactgtttccgcatcttcggcaagagcaccgccagctacatggactccgacgatctggcggggattttccgagccaccagtgagcacgtaagatacaacgagctcgaatccctgaggaatgacggtgacaatgtcaactaaaggggaattgatctcaacaagttcgtgaagatgatggaacggcatccagtagtaagtccagacttgttaccatctgcaacgcacggacctctgacgtgagcagatctgcccgccgagcagcgttcgttcgcccgcgtcgggcaggaggctcagacccttctggggaagtgtctggaaggaataataggaaatattgtcgaaaaatgtccagatttgctgcgaaaagattttgaatcaatg

SEQ ID NO: 7113 - DNA, 254 bp, Bos taurus
  Clone ID: 31-BOVMS1-016-Q1-E1-H11
aaaattcctggaggagctgctgaccactcagtgtgaccgcttctcccaggaagagatcaagaacatgtgggctgccttcccccccgacgtgggcggcaacgtagactacaagaacatctgctacgtcatcacgcatggtgacgccaaggaccaggagtagagcgggcccttttcggtctctgctaatcaacaccttcctgccagtccgacctccccacccagactcctaataaattgaaagggtctcatttctt

SEQ ID NO: 7114 - DNA, 396 bp, Bos taurus
  unsure (28): unsure at all n locations; Clone ID: 31-BOVMS1-018-Q1-E1-H3
gttattttgcagcgtgagtaggaccgtntacttgtaatcaaaatccctactttcctgggaatactcccctctttgcatttggatgtagtccaaagagtgaaccaggaactagtgacttggagatagaaatgaagaatagagttgataaagcactgaacctttaaaccccctctacggttggttgcatcataactaagttacaaattaaaggagatatataaagttgagatcaattaaatcttaataaacttaacagtttatggtttagtatttccccttccttttcctgctttgtttcaagattatattttaatagtttttccctagataggcttttcaactgagcctgttatcatcagctgatacagaattttaactacagaggaaaaaaaatga

SEQ ID NO: 7115 - DNA, 268 bp, Bos taurus
  Clone ID: 31-BOVMS1-019-Q1-E1-H11
atgcgacgtcatagctcttctatagtgtcacctaaattcaattcactggccgtcgttttacaacgtcgtgactgggaaaaccctggcgttacccaacttaatcgccttgcagcacatccccctttcgccagctggcgtaatagcgaagaggcccgcaccgatcgcccttcccaacagttgcgcaccctgaatggcaaatgggacccgccctgtaccggcgcattaaccccggcggttgtggtggttacccccaccttgaccgctaaac

SEQ ID NO: 7116 - DNA, 429 bp, Bos taurus
  Clone ID: 31-BOVMS1-020-Q1-E1-H3
ctttattattattctactaaccattatactaggaactattattgtcataatcagttctcactgactacttgtctgaatcgggtttgaaataaatatactcgccatcatccccatcataataaaaaatcacaacccacgagctacagaagcatcaactaaatattttttgactcaatcaacagcctcaatactactaataatagccgtcatcattaacctaatattctcaggccaatgaaccgtaataaaactatttaacccaatagcctcaatacttataacgatagccctagctataaaactaggaatagccccatttcacttctgagtcccagaagtaacacagggcatccccctatcctcaggccttatcctactgacatgacaaaaactagcacctatatctgtactttaccaaatcttcccatc

SEQ ID NO: 7117 - DNA, 439 bp, Bos taurus
  Clone ID: 31-LIB188-001-Q1-E1-H3
accaaaagaccttcctcctgatactgcgctgctggacctgcaaaacaacaaaataactgagatcaaagatggagactttaagaacctgaagaaccttcatacactgattctcatcaacaacaaaattagcaaaatcagccctggggcatttgctcctttggtgaaattggaacgactttatctttccaagaatcaactgaaggaattgccagagaaaatgcccaaaactcttcaggagctgcgtgtccatgagaacgagatcaccaaagtgcgaaagtctgtgttcaatggattgaaccagatgatcgtcgtagaacttggcaccaacccgctgaagagctcaggcattgaaaatggagcctttcagggaatgaagaagctctcctacatccgcattgctgacacaaatataactaccatccctcaaggtcttcctcct

SEQ ID NO: 7118 - DNA, 445 bp, Bos taurus
  Clone ID: 31-LIB188-002-Q1-E1-H3
gccatgggcccgggatacttcatattgggatcatgccggacacccatgaagttgtagttccacgaggactgggcaggcaccataaagaagccaaggaagcgatccgacagtagcatctggaccctctcgtactgcgagggtaagtagcctttggggttgttgcccttgtctgtgttctggcggccccattcatagccactgggggtcagcttgtacgctgtcagggtgcaagagcctggtgtgaagctgcaccctttatctactatttggtgcttgagccggtatagtaggaacagctctaagccttctaattcgcgctgaattaggccaacccggaactctgctcggagacgaccaaatctacaacgtacttgtaaccgcacacgcatttgtaataatcctcttcatactaatagcaatcataattggaggattcggtaactga

SEQ ID NO: 7119 - DNA, 335 bp, Bos taurus
  Clone ID: 31-LIB188-003-Q1-E1-H11
cctggtcagccataccggttggaacgagagcttaaacagctttacttagaacgagtattgaaaggtgatgtgggaaaactttctaaattcaggattcgcattgaagaacccgcccgcaaggaagcacatggtttttcctgggaagtgcatttctagcggacatcaatgaagacaaagacaacttctggatgacccgacaggaataccaagaaaagggtgttcgtgtgctggagaaactcggggtgacggttcgataaactgtgaagctggttcccatcacgccctaacgtgctttctttttttccattactgccagtctttgaactcattcaact

SEQ ID NO: 7120 - DNA, 434 bp, Bos taurus
  unsure (109): unsure at all n locations; Clone ID: 31-LIB188-003-Q1-E1-H3
tggccgccggatactcagaggagtgatgctcgccaggccccagccctggtgctgggaggggcggagctgcctcgcaatccgcttctttgctttggcccccgtggcctgngtgaaccacctggctgacttcaggaccatccgcttgtgtccccctcgctggcctgcttttcctgtggggcctgggagatgctcacaatgggtcaacccttttaggctgaatgattccttgggtctcgaaaattcagtccaacagcccttggcttctttcgatcggctctgacactggtctacatgactggtctttctaaagtcagtgagtttggttatgcaactctcaacttgaccagttttactaaggggctgacaaatcaaaaacacacttgtcagttcggtgaaaataatgtggtcaaacaacgaagtccattgcattgatt

SEQ ID NO: 7121 - DNA, 220 bp, Bos taurus
  Clone ID: 31-LIB188-004-Q1-E1-H3
aaaacaaagataagaatggcaagaaaagcagcaagaacaagaaaagttttaaagaaagatgttgcttactgtgaaggcccaagtgctggaccaagtgggtcgccactgaggaccgagggcgggttccttgagacaagacttccgttgacctctcagcctgttcctgtgctccccaacctccttcacacacacttctgtaaatggggaaaaatatctgtga

SEQ ID NO: 7122 - DNA, 397 bp, Bos taurus
  Clone ID: 31-LIB188-005-Q1-E1-H11
acaagtaaagggttaactttagactaggaattggtgttggggtggggggtgcaagaatctttattttattttatttttttggataaaagttttatctattatatattaaacgttcttgctgctgtgctgcaaagtcatagcagatttgaggcgcttttgagggccgaattattctccaagttgagagatgtcctcgggttgaattgaaagccctacccaaaactgcagtgggaagggggagagcctttgcctccactgccccaccctcaccctcctcgtagaccctctgccttttgaaagcagatcattttcactgagatgttggacattgcagatgtctgttccccaagccagcaaggacctctgaaaccttcatgggctggcctttttttttttc

SEQ ID NO: 7123 - DNA, 420 bp, Bos taurus
  unsure (80): unsure at all n locations; Clone ID: 31-LIB188-005-Q1-E1-H3
tggcggcgggatacagcgccgaatctaccttcgaggggatcctcaaaaacccaagagcagagtctttgaacagcaggtcnctctggccgggtggagagccaaagagctggaagctccgagacttgttttttccaaatttctcctgcgccttgctgagaagcttccagatcaagtcttccttgccatccacacttcgggccacgacagcatgagaagggacctgggccaggtggcactccttgaacgcatccactggcgcccgactgttgttcaggcagagaagctcatactggtccctgtcagccttctctggcaagttctcaaacactgtcgtctctttaacaaaagccacgtctccagccccgtcctgcagacacttgaaggcaccagaataaccgaagtatggttcccgggaggagc

SEQ ID NO: 7124 - DNA, 391 bp, Bos taurus
  Clone ID: 31-LIB188-006-Q1-E1-H3
tgggcgcgggataccccagcaggaaattgttcccaatagtgctgaggaacgacttcacagtatgaaagagggaatccatgcccaacagaaagaacctatgataggagtgaatcaggaactggcctacttctaccctgagcttttcagacaattctaccagctggatgcctatccatctggtgcctggtattacgttccactaggcacacaatacactgatgccccatcattctctgacatccctaatcccattggctctgagaacagtgaaaagactactatgccactgtggtgaagagtcaagtgaattctgagggactccacagttatggtctttgatggttctgaaaattccatgctctacatgtcttttcatctatcatgtcaaacc

SEQ ID NO: 7125 - DNA, 367 bp, Bos taurus
  unsure (89),(361): unsure at all n locations; Clone ID: 31-LIB188-007-Q1-E1-H3
acaacttgactaagctggacaggaggaattcggggtatgtcctgaggctgtgagctttgggtcccatgcagctgggggagtccatacanacctggaagtaaaccgtgtctggtttgtaaccttcgcttccgtgaatagagagggtggattaaatggttcccaagaaagcctctgcgattgttgctcagtcactcagttgcatcaagctctttgcggctccatggactgcagcacaacaggtttcctggtccttcaccgtctcctggagctggctcaaactcaggtccattgagttggtgatgccatccagtcatctagtcctctgtcatccccttctgccttcaatctttcccagcattanggtctt

SEQ ID NO: 7126 - DNA, 408 bp, Bos taurus
  Clone ID: 31-LIB188-008-Q1-E1-H3
gccatggcggcgggatacaaaatatagtttttctcatacaaaaagatatacaattaaaaaacaaaaaatgaaaccacctgcagcccacatactttttcagaaaagggtagagcgagctcagagctctgacacaggacagtgaacaaagtgctaaggcggagagtgactgaccaagtgctagaggctgcagtgagacaggagctgtcaacaaccctgtctcctaacactgggcaagagtgagcccttggggcttctgtgaagatctgccttctggtttctcatggcaacatctggatgctctcatcacagtgttggggcattttatctaaggttcctccttgggtttggagaagtcacagtgggcaaagctgatagcagcaacccttacgtaatcagtgtcagaactgc

SEQ ID NO: 7127 - DNA, 288 bp, Bos taurus
  Clone ID: 31-LIB188-009-Q1-E1-H11
actagcacaatatcgtgcaccattgtcatcaacctagtcatgctcaatgatcctggtatgtacgtctgccaagctggggaagacgtgatctccgcttgcattagtattaatgtctacgtgctcgtcactcagcctgagctggtttaaggctatgtgatgaactcggtgacctttaactgttccctgagcatcgaagtgatacatgtgacctaaatttctgtgctatcacaagattgggggagcttacgttgtggacatcaggacattcgggaagaatgctcaggactt

SEQ ID NO: 7128 - DNA, 249 bp, Bos taurus
  Clone ID: 31-LIB188-009-Q1-E1-H3
acacaggggtgtggagcaaacctactgcctctatctatacagcaggtcctgttcttccaacaggaagggagcaaatctctcccttgggaataaccaatgccatacgtggtaaccttgtctaatacagacagctggtgtcctgttgacacctggggccacatacaaagagagcagcctggctgatgctgctaagagaaactgctcaagatcggctggacacatcccagcggggggtgcccttcacgtgga

SEQ ID NO: 7129 - DNA, 385 bp, Bos taurus
  unsure (373): unsure at all n locations; Clone ID: 31-LIB188-011-Q1-E1-H3
ccgaccgcatggccgcgggacactggagtggggtgacattgccttctcccatatctattcacaagcctgcctaaatcattgacttctagccacctttgggatgccaatgcccacccacccttaccaggccgcagaggagagaaaacacttaccacaggaggtccgggtaaggaacaaggaactaacaagctcccaccaaccaggattctgcagaggtcaacaagaggtcagcaagagatgggagactgcagtccagaggtcctagcaacttccagcgagcagcaaagacccagcatagtcaaaacgaattcaatgttaccaaaaccaaataaataaacggacagaagttcttggaacacatgactgaggttangggtgaggcagt

SEQ ID NO: 7130 - DNA, 419 bp, Bos taurus
  Clone ID: 31-LIB188-013-Q1-E1-H11
ccatggcgcgcgataccaaaagaccatcctcctgatactgcgctgctggacctgcaaaacagcaaaataagtgagatcaaagatggagactttaagaacctgaagaagcttcagacactgattctcatgaacaacagaattagcagaatcagccctgaggcatttgctcctttggtgaaattggtacgactttagcgttccaagaatcaactgaaggaattgccagagaaaatgcccaaaactcttcaagagctgcgtgtccatgataacgagatcaccaaagtgcgaaagtctgtgttcaatggattgaaccagatgatcgtcgtagaacttgggaccaacccgctgaagagctcaggcattgaaaatggagcctttcagggaatgaagagggtctcctacatgggcattggtgacag

SEQ ID NO: 7131 - DNA, 395 bp, Bos taurus
  Clone ID: 31-LIB188-013-Q1-E1-H3
acctggctgattctgtgcacgaggctgcaggcacatttgtagtgtgtgcaatcgcagccctgccaggcctggggctccatcctggagcccgagggtgagtgtccatgtggtccaagcatgactgactgcaaaggtcccatccacacggcatgtgtgcatgtgtgacccctctgagtgtgtctgtgctaacggtcagaagctgtatacgtcggggtcagcatgggtgaatctgccagtgggaggctggtttcagaacatcaagtcaacccgggggacagcataccacctaccagtcaaaacacacccaaacggctggtttggggcctccctgtgacctccttgtcccagctccaagccaggtctctgaggatgggtgggggaaggaagatcgtgct

SEQ ID NO: 7132 - DNA, 347 bp, Bos taurus
  Clone ID: 31-LIB188-014-Q1-E1-H3
actcctcctgggtgtcgctcccccgccatatcacaacggccctccacatccacccccaacgagataccttgagattctcaatgcagccatgccttggggctgccttggtgctgccacacttcaggctctcgtccttccacaactttctgtggctttacagcaccttgggagccaccagagacgacgtcgagagggcaccggtggaccgacagcctgtcctggcatggggcactgggagtggggcaccgtcatgtgaccaccccagacatttggccttctccctgctggctgccttacaactatccctacattagcagtttgcgttgtatgcactttggtcatttcct

SEQ ID NO: 7133 - DNA, 464 bp, Bos taurus
  Clone ID: 31-LIB188-015-Q1-E1-H11
atgctccggacgccatggaggccggatacctctgctatggggcgcgagggacagccgattatgactatcactttggcccaagcaccaagctgacggttgtagatgatctgagccaggtcaacccgcccaaggtggctgtgttcgaaccctcggaagcagagatctcccggacccagaaggccacgctcgtgtgcctggccacgggcttctaccccgaccacgtggagctgacctggtgggtgaacaggaagcaggtcacgactggggtcagcacggaccctgaaccctataaggaggaccctgcacgggatgactccagatactgtctgagcagccggctgagggtgactgcggccttctggcacaacccccgcaaccacttccgatgccaagtccagttccacgggctcacggaccaggaccagtgggaggagcaggacagggccaagcccgtcacccagaac

SEQ ID NO: 7134 - DNA, 323 bp, Bos taurus
  Clone ID: 31-LIB188-016-Q1-E1-H3
ccatagccgccggatacacacttttatcagttcagttcagtcacttagttgtgtccaactcctttgcaaaccccaaggaacggcaattatgccaaggcctcccctggccaacaacaaatcctgggggctaatcaaactcaattcaaagagtaggtgatgctatccaaccatcttatcctctgtcgtccccttctcctcctgccttcaatctttcccagcatcagggtcttttcagatcagtcagtttttcccatcaggtgaccaaagtgttggagtttcagcttcagcatcattccttccaatgaacacccaaggctgatctc

SEQ ID NO: 7135 - DNA, 403 bp, Bos taurus
  Clone ID: 31-LIB188-018-Q1-E1-H3
cggatccgtgcctagtttaggaaatcccctggtcctcaaaagccaaccaatgggtgcccctgggggcaaaagggaactgccgggccacggaaccgttggttgttggccccttgaaggaatcccaaatcccaaaaaaggcaaggatcccttcccccttggtgaactggcctggaattcctggccctgaaatgggggctcccacatctgtcttggaagaggccagagtgtagctcctcccaaaagtggggatacccatcaccagcttattggctggagcccccagcctcagcatgtagctcacagcgtagtcagcgttactgaatctgtcagaacttgcatcttcctggcctcgaaacaaggggctgtggtgtccgactgtctggcgccaggctccgtgaaagtc

SEQ ID NO: 7136 - DNA, 381 bp, Bos taurus
  Clone ID: 31-LIB188-019-Q1-E1-H3
cgggatacaagcttatttttatttttttttttttttttttctttttttttttttttttttttttttttttttttttttttttttttttttttttttttttttttttttttttttttttttttcaaagtgacctaaaggctttatttacaagaggaaaccggcctggccccacctggggccttgcggggctatataaaggttcccagaaaagggaggtgggcacacggccatttaatttacaataaaatgggggaggggttttgccccaaggttaaggctgtgggtcatccactgggggcctctgcaaaaaccgggcttaggcatggcccccccaaaaaaagcccggttcaattcctcttcaaggaccccttgttcttcccc

SEQ ID NO: 7137 - DNA, 298 bp, Bos taurus
  Clone ID: 31-LIB188-020-Q1-E1-H3
tggggcgggctactcgagaagcaaagtgtttcacatcatagattccacttccaaatccttggaatgttcatttctttggctataaagagggactagccgggaaagccaggtaatgcgtaggaaactaaactaacaaaagagcgggtggggcgggcagcgctaatgtcatcctcccggggacgggcacagggggctgttagccgcgggctgactgcggagaactgttagctggagcacggagcagccgtcctcgatgcttgggctgtcgcggggcttcagtcatccccaccacacaggt

SEQ ID NO: 7138 - DNA, 298 bp, Bos taurus
  Clone ID: 31-LIB188-021-Q1-E1-H11
tggccgcgggatactctgagctgggcagtgtcaggatgctgctgaggctgtaggtgcttttcttgctgtcctggtctgtgaaactgttttggaagttgctgctgctctgagtaaccccatccactttccacttgacattgatatctttggggtagaaatcattcaccaagcacacgacagagacagttccggtcttcagctgctcatcagatggtttgaagaggaagacggatggctcagcatcagaccttttgatctccacctcggttccttggccgaaagtgggaggagtatgtgt

SEQ ID NO: 7139 - DNA, 399 bp, Bos taurus
  unsure (330): unsure at all n locations; Clone ID: 31-LIB188-021-Q1-E1-H3
ccatggcggcgggatacagcgccgaatctaccttcgagggggattctcaaaaaaccaagaagcaaaatccttggacaacaaggccctccgggcgggtggaaaaccaaagaactggaaaccccgaaacttgttttttccaaaattcccctgcgccttgctgagaaacttccagattaagtcttccttgccatccacacttcgggccacgacagcatgagaagggacctggggcaagttggaactccttgaacgcatccactggcgcccgactgttgttcaagcagagaagctcatactggtccctgtcagccttctctgggaagttctcanacactgtcgtccctttaacaaaagccacgtctccagccccgttctgcagacacttgaagggcacagaat

SEQ ID NO: 7140 - DNA, 370 bp, Bos taurus
  Clone ID: 31-LIB188-022-Q1-E1-H3
acctggtccctggtcatacccttaaacagagggtctgtgattccctgaatagtctctctggcgttacttatcactttagcagcccaagcgccccccggtcccctttgggcagcgtcatagtttccgcgggcatggaagtatttgtctgcacccttgtagttggcttctttcatgtcttggtaagctctccacatgtctttagccccttgaccagcttccttgaggaatgtcccccatccctggctgctgatgcccaggatcaggaagcagaaaatgatgcccgtggaaaggttcatcctgtggccgtgccctcctgctgaagctcctggtgaagctgagctgccacctgcccgggcggccgctcgaacag

SEQ ID NO: 7141 - DNA, 359 bp, Bos taurus
  Clone ID: 31-LIB188-023-Q1-E1-H3
catggtagcgcgatacgtccccttaaagttgggaacacacttgtccaggccctggtcatcgccagcacacaaggcacagagtctggatttcgggtcagccccaagggcacagctctgactaaagaattcatcaaatgggcaggagcctgtctggttgacgatcaggcccatggggatgttccagcctgcagtcctgtccacggcggtgtggcacgacttcttgtctttcagagaattccatgtgagcccctcatttgctttcttgacaactgccacggcaaggttcgagcggccgcccgggcaggtttttttttctttgtttaatcttatttttgttacgcaaaaacggttcatttttt

SEQ ID NO: 7142 - DNA, 426 bp, Bos taurus
  unsure (386),(408): unsure at all n locations; Clone ID: 31-LIB188-024-Q1-E1-H11
ccatagccgccggatacttccctgaaacatggatctgggacttggtggttgtaagctcttcaggtgtgcatgaagtagaagtaacagtccctgataccatcactgaatggaaggcaggggccctctgcctgtccagagacactggacttggtctctctccgaccgcctctctccgagtcttccagcccttctttgtggagcttacaatgccctactctgtgatccgtggagaggccttcacactcaagaccacagtgttaaactaccttcccaaatgcatccgggtcagtgtgcaactagaagcctctcctgcattcctagctgttccagaaaaggaacaagagacttattgcatctgtgggaatggccggcagactgtgtcctgngcggtaactccaaagtccttanggaatgtgaatttcacag

SEQ ID NO: 7143 - DNA, 435 bp, Bos taurus
  unsure (316),(420): unsure at all n locations; Clone ID: 31-LIB188-025-Q1-E1-H11
cgccatgggcccgggatacagagaacctccctgggaggtggcggtggcggcaaggtccgcatcaacgttgaggagtctgtggacgggaaggtggtttcttccagaaagagagaaatctaacagcccagtgcaggggagatgcccctgccacccctgccctccccaggctgagcagaaagctggccagagggaccggaaaagcaaattccaggctctgctttcagagggtctggtccaaggggtccttcgtttcttagttgggtgcttcccgtgctctcccctgctccctccagctttcctgcctctgatagagcanggaggtgcaagaaacagctgtattgtgttacaagttcatggtctgtacttgttggcactgctcagctcagcacttctagattcaggccagagaggaaaaggcanaaaatacaaatctca

SEQ ID NO: 7144 - DNA, 420 bp, Bos taurus
  Clone ID: 31-LIB188-025-Q1-E1-H3
gcaatgggcgcgggacactgtcaggctgcacggggccagtgcacatctcaggcgaatgcagaactgcgtctgggtttagaaaggcagcaatcgttacattttggcttttattctagatgcttaacttagttaaggcgacagttcaagcgtattaagtgaaggtagataaaatgtaatgacaatcgataagtctcttgcagctacacacactgtctaataatgcttacatggaatgaaaccagtgttacttagctggtgttacacacacatagaactgaagaaaagtaattctaaatgcactatggtgacagtaaaaatgcaaatacagcacagaactaagcactgcttgatatcaaggtgatggttctaacagagctgagcctggagcagtcattctactcacaaggctgtgaaagcatc

SEQ ID NO: 7145 - DNA, 333 bp, Bos taurus
  Clone ID: 31-LIB188-026-Q1-E1-H3
atggccgcggcgatacattacataaactagatcatgtacgatttacgatgcaacgcgagagttatgtaaattccaacttgtgatccaatcgtgtgcattcgtcaattcttgagtcaatcacaaaatccatttgtactgtgacgcctaaaagattatttacaggtcactagcacaccaagccatctgactgctgtagcccgggggcaaccaatctatgaggtcctgtgcaagccccacatctggcaccccgtcaacggcatagtcaacatcatgggtagtgactgcccatctcaagttccatcatcaggtcaagctctaaatgctcatgaccgt

SEQ ID NO: 7146 - DNA, 413 bp, Bos taurus
  Clone ID: 31-LIB188-027-Q1-E1-H3
gatcaccagtctcacgattaacttgaattcaagagaagctcgatatgacccctcactgctggatatccgcctctccccgaattatgtggtctgccgggactgtgaggtcgccaatgacgggcataccattcaggttatcctgaagtcgaaatcagttccatcaggaggtccattgcctcaaggacatgaatttgagctgtatgaagttagatttcactggggaagagaaaaccagcgtggttctgagcacacagttaatttcaaagcttttcccatggagctccgcctgatccactggaactccaccttgtttggcagtatcgatgaggctgtggggaaccccatggaatcgctatcatcgctttgtttgtccagatctgaaaagagcacgtggcctgaaagctgtgactgaa

SEQ ID NO: 7147 - DNA, 415 bp, Bos taurus
  Clone ID: 31-LIB188-028-Q1-E1-H11
ccgccataggcccgggatacttctcattagagttgggcacacacttgtccaggccctggtcatcgccagcacacaaggcacagagtctggatttcgggtcagccccaggggcacagctctgactaaagaattcatcaaatgcgcaggagcctgtctggttgacgatcaggcccatggggatgttccagcctgcagtcctgtccacggcggtgtggcacgacttcttgtctttcagagaattccatgtgagcccctcatttgctttcttgacaactgccacggcaaggtacactgtaaaataaagtgtttaactcttctgtcagtcactctgtctcagaaagtggatcacaccggactacaggtgtcactacgttgctttgtaaacatgataatgtacaaagacaccacaaatcca

SEQ ID NO: 7148 - DNA, 377 bp, Bos taurus
  Clone ID: 31-LIB188-028-Q1-E1-H3
catgcgccaagccgccatgagcccgggaaccctcttacgtgtgacataagtcggacattgtcaaggcacaactgatatctccgtctggatactgcataatggggccctaggcacacccatatacgtaaccatatccaaaatggttaattggcaggctgaaaaaaaaattccatgaccaacgcacttttacctcaacagggatctgggagttgactggtattgttataagggtgctgaagaattatttcaatataggtgttatttgcagactgctaacatacatgaaaagagttcacctacaccggtgccatctgcacgatcagtacgggctgctgtatgtctctgctgcctcaaggggaatgtaatgtacgcatcat

SEQ ID NO: 7149 - DNA, 191 bp, Bos taurus
  Clone ID: 31-LIB2809-001-Q1-E1-H3
gcgggatactatgctctataaacctctttttcttgattgcatcatctttctttttatacaacagccttattcagaagagtgggacataaacgttcagccataaaataatgatattatcaaatgagctgtccatattaatctaataaatttcttcaatttctgagttatgttgacaaataagaatttttttt

SEQ ID NO: 7150 - DNA, 424 bp, Bos taurus
  unsure (406): unsure at all n locations; Clone ID: 31-LIB2809-002-Q1-E1-H3
acagcagaaaggcctgaatgggcatatctctctggggatagggcactgctttctggggaacaggcaggactttggactgagaaagggacagcacggactgaggaggaaacatgacagttggaggaagaggctggtgaggctggtgcatccaagactggagcagaggcagaggaaggtgcagattttcaacatcagtgagagtcaggctctggctttcagtaaagggctcaactggatatttagggaagggcatttctttgtgcttaggagccatagcctccttcactttggagactcccattacttcaggctgaaggaaaggcggcaccaccacaggggtttgagtaagaggagggatgttttgtgggaagctgttatggatgggcccaaaggaaggatagactanagactgtgtctgggcaaa

SEQ ID NO: 7151 - DNA, 316 bp, Bos taurus
  unsure (196): unsure at all n locations; Clone ID: 31-LIB2809-004-Q1-E1-H3
ccatgaccgccggatagaccagaaaagcctgaatggacatatctctctggcgatagggcactgctttctggggaacacgcaggactttggactgagaacgggacagcagcgactgaggatgaaacatgacagttggaggaagaagctgggtgggctggtgcatccaagactggaggagaggcacaggaaggtgcanattttcaacatcagtgagagtcaggctctggctttcactaaagggctcaactggatatttagggaagggcatttctttgtgcttaggagccataggctccttcactttggagactcccat

SEQ ID NO: 7152 - DNA, 430 bp, Bos taurus
  Clone ID: 31-LIB2809-005-Q1-E1-H11
tgctcgccgtcgccatggccaccggatacagtattctttaaaattttctttttaaattgaaagccaacaactctgcctttatgatgctaagctcatgttcttatttcttctcctatcttctttctcttctgttcccattatccttccctttgttttgtccctgtcaccttcctttctccttctcctcattgccccccaggcaagcaggtggtcagtcattggtgggtttccagcttccaaagcctagacaaccctgctgtagtctcaaactagtggtctttgccccggctgaccctttccttgagctgtctgagctttaaggtggatggctcaagctagagatatgacagaatcttctgggaagggccttgatgatcttcagcccagacttttgctaaatgaaatggaaaaataactttattttggcacc

SEQ ID NO: 7153 - DNA, 272 bp, Bos taurus
  Clone ID: 31-LIB2809-006-Q1-E1-H3
gctcggcaccgccatgggtacgggatacgccctgaccatggcggacagcgacatctccctgctggacgcccagagtgcccccctgagagtgtatgtggaggagctgaagcccacccctgagggcgacctggagatcctgctgcagaaatgggagaacggtgagtgtgctcagaagaagatcattgcagaaaaaaccaagatccctgcggtgttcaagatcgatgccttgaacgagaacaaagtccttgtgctggacaccgactacaaaaagt

SEQ ID NO: 7154 - DNA, 359 bp, Bos taurus
  Clone ID: 31-LIB2809-007-Q1-E1-H11
tgggcgcgggatacccaggcatcccatggtctcggcaacgctgtaagttgatagcagccaggtcaaagccgtggatcttgtgagtgggctggaaaagcttgttgcgcagctcactcgtcaccattttatcctgattcatcagtttggacttcttggccagcagaccccgcaccagagggtcaattccaccgtctttgattatcctccaggtgttgaagaagagggtgtgtagggggagctctgcttccggaccccatggctggtaattctcatccaggcgggacacagtggagggaacctccatgtggccaaagcggaaggcaaaggtgaagacattggaaattcggggatccacagag

SEQ ID NO: 7155 - DNA, 413 bp, Bos taurus
  Clone ID: 31-LIB2809-010-Q1-E1-H3
cagtattatttaaaattttctttttaaattgaaagccaacaactctgcctttatgatgctaagctcatgttcttatttcttctcctatcttctttctcttctgttcccattatccttccctttgttttgtccctgtcaccttcctttctccttcccctcattgccccccaggcaagcaggtggtcagtcattggtgggtttccagcttccaaagcctagacaaccctgctgtagtctcaaactagtggtctttgccccggctgaccctttccttgagctgtctgagctttaaggtggatggctcaagctagagatatgacagaatcttctgggaagggccttgatgatcttcagcccagacttttgctaaatgaaatggaaaaataactttattttggcaccaaactgaaaaa

SEQ ID NO: 7156 - DNA, 226 bp, Bos taurus
  Clone ID: 31-LIB2809-011-Q1-E1-H3
caccacaagggtatgagtaagaggagggatgttttgtgggacgctgttacggatgggcccagggaagggatagactagggactgtgtctgggcaaaggggtggattttatcctggagttcatcctctgtttgctgctgttcctcactctgaaacttctcaattttcttattgatgcgtgtaatagattcctcactgcttgaaaggctttccacaatctcaccaggt

SEQ ID NO: 7157 - DNA, 439 bp, Bos taurus
  unsure (341): unsure at all n locations; Clone ID: 31-LIB2809-013-Q1-E1-H11
cgccaaggccgcgggatacggctctgagcccaatctggccagccgtctccggaacctcagcagcccgctgggcctcatggctgtcaaccaagaagcctgggaccacgggctggcctacctgccctttaacaacaagaagccgagcccctgtgagttcatcaacaccaccgcccgcgtgccctgtttcctggcgggagattttcgagcctcagagcagattctgctggccactgcccacaccctccttctccgggagcacaaccggctggccagagaactaaagaaactcaaccctcactggaatggagagaagctctaccaggaagcccggaaaatcctgngagccttcatacagatcatcacctttagggactacctacccattgtgctaggtagtgagatgcagaagtggatcccgccctaccaaggctataataac

SEQ ID NO: 7158 - DNA, 436 bp, Bos taurus
  Clone ID: 31-LIB2809-013-Q1-E1-H3
cctcccgtacgccaaggcggcgggatacatcatgaaaaaccctgggctggaggaagtaaaagctggaatcaagattgccaggagaaatatcaataaggcttgatatgcagatgacaccacccttatggcagaaagtgaagaagaactaaagagcctcttgatgaaagtgtaagaggagagtgaaaaagttggcttaaagctcaacatttagaaaactaagatcatggcatctggtcccatcacttcatgggaaatagatggggaaacagtggaaacagtgtcagactttattttggggggctccaaaatcactgcagatggtgattgcagccatgaaattaaaagacgcttactccttggaaggaaagttatgaccaacctagatagcatattgaaaagcagagacattactttgccaacaaaggtccatctagtc

SEQ ID NO: 7159 - DNA, 314 bp, Bos taurus
  Clone ID: 31-LIB2809-016-Q1-E1-H11
catgcgccgtaccgccatggagcccgggatacctggtaagattgtggaaagcctttcaagcagtgaggaatctattacacgcatcaataagaaaattgagaagtttcagagtgaggaacagcagcaaacagaggatgaactccaggataaaatccacccctttgcccagacacagtctctagtctatcccttccctgggcccatccataaaagcctcccacaaaacatccctcctcttactcaaacccctgtggtggtgccgcctttccttcagcctgaagtaatgggagtctccaaagtgaaggaggctatgg

SEQ ID NO: 7160 - DNA, 379 bp, Bos taurus
  Clone ID: 31-LIB2809-016-Q1-E1-H3
gcccgggctactgcttatgagagtgctaagcgcactctctcttccagcacccaggccagtattgagattgattccctctatgaaggaatcgacttctatacctctattacccgtgcccgatttgaagaattgaatgctgacttgttccgtggcaccctggaccctgtggagaaagcccttagggatgccaaactggacaagtctcagattcatgatattgtcttggttggtggctcaacccgtatccccaagattcagaaacttctccaggacttcttcaacgggaaagaactgaataagagcatcaaccctgatgaggctgttgcatatggtgcagctgtccaggcagccattttgtctggagacaaatctgaaaatg

SEQ ID NO: 7161 - DNA, 378 bp, Bos taurus
  Clone ID: 31-LIB2809-020-Q1-E1-H3
gggacacaactaaggtgacaaatcactgcacagaaagcaaatctgttttcaattttcttagcaattctgatataatattcactgtaatcaaaactgcctcagttcagttcagttcagtcactcagtcatgtccaactctttgtgaccccctggaccgcaacacaccatgactccctgtccatgaccaacacccgaagcttgctcaagctcatgtccattcagtgatgccatccaaccatctcatcctctgtcctcttctcctctcctgccttcaatctttcccacaatcagatcttttccaatgcatcagttcttcaaatcaggtggccaaagtattggagtttcagcaaaagtctttccagtgaagattcacgactg

SEQ ID NO: 7162 - DNA, 446 bp, Bos taurus
  unsure (352): unsure at all n locations; Clone ID: 31-LIB2809-021-Q1-E1-H3
gccatggacccgggatagaccagaaaggcctgaatgggcatatctctctggggatagggcactgctttctggggaacaggcaggactttggactgagaaagggacagcgcggactgaggaggaaacatgacagttggaggaagaggctggtgaggctggtgcatccaagactggagcagaggcagaggaaggtgcagattttcaacatcagtgagagtcaggctctggctttcagtaaagggctcaactggatatttagggaagggcatttctttgtgcttaggagccatagcctccttcactttggagacttccattacttcaggctgaaggaaaggcggcaccaccacangggtttgagtaagacgagggatgttttgtgggacgctgttacggatgggcccagggaagggatagactagagactgtgtctgggcaaaggggtg

SEQ ID NO: 7163 - DNA, 359 bp, Bos taurus
  Clone ID: 31-LIB2809-023-Q1-E1-H3
tacatcttactgattcttttggctctgaccttgttgttctcgtagcccatgttgtttgcaacggttctttctgcagctcatgcagaaacctttctcaaaggcttctttggtattgcaccggtaggccttacttggattttcttcattcaacagagagtcaatgaagagatgaacggaacgttcgtgggagcacttcaccagctgatccacatctccaaggcctctctctgcaatcacacggagagcttccccaatgttacatcctggttggaaagtgcctccgttagggtaaatgtccacatgccctactggtttctggattccgatacttcgacctggtgaccccctggtgaatgtgt

SEQ ID NO: 7164 - DNA, 411 bp, Bos taurus
  Clone ID: 31-LIB2809-024-Q1-E1-H11
gataccagccaaatcacacacctccccccgggaaccccggcaaaaaactccaagcctaacaaggaattcccaaaaggccaatttcctgggaatggctcggggaaactttccccttggcaacattatgtcccggagttgagggaagcataatagatggtgcagagctggaagccaggggccgtgggctggctgtggcgcagaggggagcagacccagcggatggaagacaggtcccctcgggtgaggacatttatgaaggcatgctctgtctgctcctcgggcttgtcttgttccagtgggaagtggcggaacgctccccaggctccatcacggtagacattcatcaccaggtcactctggagcaccttctgcagctccaaaggactcgggtcggtctaaggaatgggggac

SEQ ID NO: 7165 - DNA, 411 bp, Bos taurus
  unsure (80): unsure at all n locations; Clone ID: 31-LIB2809-024-Q1-E1-H3
catgctccaacagccatgggcccctcagttaatgcacacaattatttgatatgatggcacttacaggagaagtgattcanagggcttttaaacattttccatacagaaatttaatgaagactttaattccctttgactcagtggcctttataccagcatgatactactggaatttaggtaacaagctgttaggacaatttcacttaaggatgttacactatctaaaatacagtagagaactcaagaagaaagagtgccttcaatttgagattgccctattctaaaacagcagttgaagcctttggatagaatggtttgacatgatagatgaaaagacatgtagagcatggaattttcagaaccatcaaagaccataactgtggagtccctcagaattcacttgactcttca

SEQ ID NO: 7166 - DNA, 375 bp, Bos taurus
  Clone ID: 31-LIB2809-025-Q1-E1-H11
ccaagggcccgggacacacctaacaccgaagcattatagagaacggtacctaccctagaagatcccccagaagttatggaaagcccacctgggatcaacacagtccaggttacttcaactgcagtctaaaaactctaaggggacatcaaggaagacaacgcaggtctagctgaaaccaaatgactacttcaaactttcctttggccagttgtctgccttcggtgaacagagaatatgattttcacagatctggctccttcctcgtctcctcttacattttacttttatgccagatttaattttttgattcctgcataataaagccaatcaaatgcagttgaaaggcgccaaaatgccggacataacgaatgggga

SEQ ID NO: 7167 - DNA, 422 bp, Bos taurus
  unsure (369)...(370): unsure at all n locations; Clone ID: 31-LIB2809-025-Q1-E1-H3
gatacaccgagacctggagatggcagccttttccctcccatcctgccatccctgagtggtctgttgttctgggatggaccctcacaggaaatgcaggagacagagtccccaaagcctctgcccagaggggcccaggaaaaggaggagtccccccacccacagacaggcctgggaacatctctgggatcgagtccctggctcccatggccctgggcactcagaaagcccagcagcacacagcacacaccccaagggacaagctaggcctctttcttcttagcagacttccatgtactaaaataagcaaatgaaataccttttccagtttcgaattttcaaattaggaatgtctcttccgaacactctttnnttttttcattttagggatgggagggggaaaaattgagaggattaatgttaag

SEQ ID NO: 7168 - DNA, 396 bp, Bos taurus
  Clone ID: 31-LIB2809-027-Q1-E1-H11
atgggcatatctctctggggataaggcactgctttctggggaacaagcaagactttggactgagaaagggacagcaccgactgaagaagaaacatgacaattggaggaaaaagctggtgaagccggtgcatccaagactggagcaaaagccagggaaagtgcagatttttcaacatccgtgagagtcaggctctggccttcagtaaaaggctcaactggatatttacggaagggcatttctttgtgcctacgagccatagcctccttcactttggagactcccattacttcaggctgaaggaaaggcggcaccaccacacgggtttgagtaagacgagggatgttttgtgggaggctgttatggatgggcccacggaaaggatagactagagactg

SEQ ID NO: 7169 - DNA, 324 bp, Bos taurus
  Clone ID: 31-LIB2809-027-Q1-E1-H3
ctgggcatttctctctggggacaaggcaccgccttctggggaacacgcaagactttggcctgctatctgcacatcaccgactgccgacgaaacatgacggttggacgaacatgctggtcagcgctggcgcatccaacactggtgcacacgcacacgaaggtgcagattttcaacatcagtcacagtcaggctccggctttcactacatggctcacctggacatttagggaacggcatctccttgtgcttatgcgccacagcctccttcacgttggcgactcccattacttcaagctgaacgaactgtccaccaccaccggggtt

SEQ ID NO: 7170 - DNA, 349 bp, Bos taurus
  Clone ID: 31-LIB2809-028-Q1-E1-H3
actgggcatatctctctggggatacggcactgctttctggggaacacggaggactttggactgagaaagggacagcacggactgaggaggaaacatgacacttggaggaagacgctggtgaggctggtgcatccaagactggagcagaggcagactaagtgcagattttcaacatcagtgagagtcaggctctggctttcagtaaagggctcaactggatatttagggaagggcatttctttgtgcttaggagccataacccccttcactttggagactcccattacttcaggctgaaggaaaggcggcaccaccacaggggtttgagtaagacgagggatgttttgtg

SEQ ID NO: 7171 - DNA, 405 bp, Bos taurus
  unsure (269): unsure at all n locations; Clone ID: 31-LIB2809-029-Q1-E1-H3
tacagcagaaaagcctgaatgggcatatctctctggggatagggcactgctttctggggaacaggcacgactttggactgagaaagggacagcacggactgaggaggaaacatgacagttggaggaagaggctggtgaggctggtgcatccaagactggagcagaggcagaggaaggtgcagattttcaacatcagtgagagtcaggctctggctttcagtaaagggctcaactggatatgttagggaagggcatttctttgtgcttangagccatagcctccttcactttggagactcgcattacttcaggctgaaggaaaggcggcaccaccacaggggtttgagtaagacggaggatgttttgtgggaagctgttacggatgggcccagggaagggatagac

SEQ ID NO: 7172 - DNA, 286 bp, Bos taurus
  Clone ID: 31-LIB2809-030-Q1-E1-H11
gccgggctcgcaggcctccagccgcctaggccgcgggacactccttagccatgagcggccagcgacatctccctgctggacgcccagagtgcccccctgagagtgtatgtggaggagctgaagcccacccctgagggcgacctggagatcctgctgcagaaatgggagaacggtgagtgtgctcagaagaagatcattgcagaaaaaaccaagatccctgcggtgttcaagatcgatgccttgaacgagaacaaagtccttgtgctggacaccgactacaaaaagt

SEQ ID NO: 7173 - DNA, 380 bp, Bos taurus
  unsure (367),(370): unsure at all n locations; Clone ID: 31-LIB2809-030-Q1-E1-H3
gccaagggcccgggatacagcagaaaggcctgaatgggcatatctctctggggatagggcactgctttctggggaacaggcaggactttggactgagaaagggacagcacggactgaggaggaaacatgacagttggaggaagaggctggtgaggctggtgcatccaagactggagcagaggcagaggaaggtgcagattttcaacatcagtgagagtcaggctctggctttcagtaaagggctcaactggatatttagggaagggcatttctttgtgcttaggagccatagcctccttcactttggagactcccattacttcaggctgaaggaaaggcggcaccaccacaggggtttgagtaaganganggatgttttg

SEQ ID NO: 7174 - DNA, 385 bp, Bos taurus
  Clone ID: 31-LIB2809-032-Q1-E1-H11
actgtcccagtgggtcgtgtggagactggtgttctcaaacctggcatggtggtcacctttgctccagtcaatgtaacaactgaagtgaagtctgtagaaatgcaccatgaagcattgagtgaagcccttcctggggacaatgtgggctttaatgtcaaaaacgtgtctgtcaaagatgtccgtcgtggcaatgtggctggtgacagcaaaaatgatccacccatggaagctgctggcttcacagctcaggtgattattttgaaccatccaggccaaatcagtgctggatatgcacctgtgctggattgtcacacagctcacattgcttgcaagtttgctgagctgaaggagaagattgatcgtcgttctgggaaaaagctggaag

SEQ ID NO: 7175 - DNA, 284 bp, Bos taurus
  Clone ID: 31-LIB3057-001-Q1-K1-H3
gggggatatgctgccaaactccaccgttcggcccatcaccattgctggcgtgccggagtctgtcaccgagtgtgtcaagcagatctgtctgatcatgctggagacgctgttccagtctgcagaagggagagtcatgaccatttcgtaccagcccatgccggccagctctacagacatctgcgcgggcggccaagatcggagcatcgacacttagggctacccacacgccatccatgacctgtagggaccacctctagatgcctactcgattcaaggacagcaca

SEQ ID NO: 7176 - DNA, 151 bp, Bos taurus
  Clone ID: 31-LIB3057-003-Q1-K1-H3
ttactcatcaaaagatttgtcccaagctgcattatcgctctttctcttcctcccgagtctcggtgcaggtcttccgacatctcttctttcggccctaccgccttccattcacaccttccaaggcctgattcattcatatgacgagcccccc

SEQ ID NO: 7177 - DNA, 375 bp, Bos taurus
  Clone ID: 31-LIB3057-006-Q1-K1-H11
cgtcgcagaaagggtccggcctgctcctgctgctggtggtgtcaaatctactcttgtgccagggtgtggtctccacccccgtctgtcccaatgggcctggcaactgccaggtatcccttcgagacctgtttgaccgggcagtcatggtgtcccactacatccatgacctctcctcggaaatgttcaacgaatttgataaacggtatgcccagggcaaagggttcattaccatggccctcaacagctgccatacctcctcccttcctacccctgaagataaagaacaagcccaacagacccaccatgaagtccttatgagcttgattcttgggttgctgcgctcctggaatgaccctctgtatcacctagtcaccg

SEQ ID NO: 7178 - DNA, 389 bp, Bos taurus
  Clone ID: 31-LIB3057-006-Q1-K1-H3
ctagatcgcgagcggccgcccttttttttttttttttggtttttcaagcgagtccagccgcgaagctgccgtcggcggtggtggccctggagcccccgtcgcctccccctgcggcgctcgctacattcaacctgcccaggccatcggggctggcctcgtcctcctcctcgtcctcgtccttaaagtgcttctcctggccattgcgccgcgcggcggtggcggtgtcatcttcgggcgagcccggcggggcgggggcgccaggtggtggggggcgcggggccctcgcggctggagcggtgtcgggccccccgagcgctccgccccgcactcggggcttgcgggcacggcgcgagggcacgccattgcaaccgttcttcttgaggtgtctg

SEQ ID NO: 7179 - DNA, 278 bp, Bos taurus
  Clone ID: 31-LIB3057-007-Q1-K1-H3
agcggagtgcccgtaaggagtcgcgcggcgcccacaccagggaggactacaaggagagggttgacgattacgatgactccaagcccattacatgttcagcaaaagaagccctttgagcagcacttgacgaagcacacctctctactaccatgacatcaatactagaaatgtcacaccggactacatacctgtaatctacagtaacatgaaactagactgactgtgccactgaatctgcatccatgcattcctactgaagagacttaatctacattgct

SEQ ID NO: 7180 - DNA, 416 bp, Bos taurus
  Clone ID: 31-LIB3057-009-Q1-K1-H3
gtagaaatgcaccatgaagcattgagtgaagcccttcctggggacaatgtgggctttaatgtcaaaaacgtgtctgtcaaagatgtccgtcgtggcaatgtggctggtgacagcaaaaatgatccacccatggaagctgctggcttcacagctcaggtgattattttgaaccatccaggccaaatcagtgctggatatgcacctgtgctggattgtcacacagctcacattgcttgcaagtttgctgagctgaaggagaagattgatcgtcgttctgggaaaaagctggaagatggccctaaattcttgaaatctggtgacgctgccatcgttgatatggttcctggcaagcccatgtgtgtcgagagcttctctgattatcctcccctgggcccgtttgctgtgcgtgacatgag

SEQ ID NO: 7181 - DNA, 371 bp, Bos taurus
  Clone ID: 31-LIB3057-011-Q1-K1-H3
gctgctgtcgctgtctggactggacgccatccagcgttcttcaaagattcaagtgtactcaagacacccaccagaagatggaaagccaaattacctgaactgctatgtgtatgggttccatccaccccagattgaaatcgacttgctgaagaatggggagaagattaaatcggagcagtcagacctgtctttcagcatggactggactttctacctgctgtcccacgctgagttcactcccaacagcacggatcagtacagctgccgagtgaaacacgttactttggaacaaccccggatagttaagtgggatcgagacctgttagcagcaccatcgaggtttgaagatgcctcatttgggttggactaat

SEQ ID NO: 7182 - DNA, 371 bp, Bos taurus
  unsure (35)...(42): unsure at all n locations; Clone ID: 31-LIB3057-013-Q1-K1-H3
gttctagatcgcgagcggccgcccttttttttttnnnnnnnntttttttttgatgtaagaagggttttatttgtcaaaatgtacagctggtgggacctgttcatgcatcttcaccagcagctggggcatctccacccttggtgtttctggtgtaaatcacttgagctctgtgctttgaaaccaatttaataagtcctttactaaggagttcctgaagggctgctctggccagggaaccacgaatcttcagtctctcaaagacgacagctggagttataagcttatagttgggaacttctttacaggagttgtcatatgttgctttgtcaaacaagactaggttattgagtttgtcccgaactttgcctttg

SEQ ID NO: 7183 - DNA, 421 bp, Bos taurus
  Clone ID: 31-LIB3057-014-Q1-K1-H11
gtcggcccaagccgtccggttgcggcccgaccactggttccggcgcaggcacactcatatacggttgcgcacgcgtgcacgcgcttggggcggtggtgggagtctaccggtgcaccggagctggcggactggcgggcgtggcgatgggtgaggcggacgcgggaacgccttccttcgagatgacttggaacagcacgacaagcagtggctactgcagccaggaggactcggactcagagctcgagcagtacttcactgcgcgtacctcgctggcgcgcaggccgcgtcgggaccaggacgagcccgtggagtgggagacacctgacctttctcaagctgagatcgagcagaagatcaaggagtacaatggccagatcaacagcaacttgttcatgagcctggacaaggatggctcctacac

SEQ ID NO: 7184 - DNA, 279 bp, Bos taurus
  Clone ID: 31-LIB3057-014-Q1-K1-H3
gttctagatcgcgagcggccgccttttttttttttttttctctttctgggactttgaagtctttaaaataattcataccaatggttaccggtcacaaacatgattttaaccaaaatattgctagcctaccacatcagcaggacggaaccgtggcccgggcgctgaacccgtggctgaatggaggccgcgcgctcccacccagttgcctaatgatgccgttttcgttggaaacaaggggatcatgccaaagttaggaaaaacagccttggttctggtttt

SEQ ID NO: 7185 - DNA, 400 bp, Bos taurus
  Clone ID: 31-LIB3057-015-Q1-K1-H11
gaagtgtgtttcttgaaatcatcaccaccatggacagcaaaggttcgtcgcagaaaggggcccggctgctcctgctgctggtggtgtcaaatctactcttgtgccagggtgtggtctccacccccgtctgtcccaatgggcctggcaactgccaggtatcccttcgagacctgtttgaccgggcagtcatggtgtcccactacatccatgacctctcctcggaaatgttcaacgaatttgataaacggtatgcccagtgcaaagggttcattaccatggccctcaacagctgccataccttcttcctttctacccctgaagattaagaaccagcccatcagacccaccatgaagtccttatgatcttgattcttgggttgctgcgcttctggaatgaccc

SEQ ID NO: 7186 - DNA, 463 bp, Bos taurus
  Clone ID: 31-LIB3057-015-Q1-K1-H3
ctttgaaggccgaagtggagaagggttttatgttaacagcagttgaacatgggtcagtgggtggtttagatatgtgcgtgcgccgttcctaatggtctgtcgatggccttcgttgccctcatccgttcgaatgggtgtctgtttcatatcctttttactctgagtttctgttattttgttctatttttcttttttttctttttcttttcctattttatttttttttttctgttttttttttttttgttcttttgttcttttgttttttttttttttttttttttttttttttttttttttttttttttttagtggttttatttttttttttttttttttttttatttttttttttttttttttttcttttattcttttcttttttttttttattttttttttctcttttttttttttttttttttctttttttttgtttttttttattgttttctattttttt

SEQ ID NO: 7187 - DNA, 398 bp, Bos taurus
  Clone ID: 31-LIB3057-016-Q1-K1-H3
gaggagagacagggcagttatccattatagggatgatgagaccatgtatgttgagtgaaaagaagacagagtcacagtagtcttcagcacagtgtttaaggatgacgacgatgtggtcattggaaaggtgttcatgcaggagttcaaagaaggacgcagagccagccacacagccccacaggtcctcttcagccacagggaacctcccttagagctgaaagataccgatgccgccgtgggtgacaacattggctacattaccttcgtgctgttccctcgccacaccaacgccagtgctcgagacaacaccatcaacctgatccacacgttccgggactacctgcactaccacatcaagtgctcgaaggcctatattcacacacgtatgcgggcaaaaa

SEQ ID NO: 7188 - DNA, 178 bp, Bos taurus
  Clone ID: 31-LIB3057-017-Q1-K1-H11
gtcggggacagtaaccgggacccgtgtctactcctgttgcctgcgcctgctgacccgtagggagcattcgtgagtgcatctgcatccacgttggccaggctggtgtccagatcggcaatgcctgctgggagctctactgcctggaacactgcattcagcccgatggccagatgccaag

SEQ ID NO: 7189 - DNA, 397 bp, Bos taurus
  Clone ID: 31-LIB3057-018-Q1-K1-H3
tagcattcacagtatctcttgtaggactactaatataccgatcccacctaatatcctcccgtctatgcttagaaggaagaatgctatccctattcgttatagcagccctaacaatcctcaactcacattttacattagctagcataatacctattatcctactagtcttcgcagcctgtgaagcagccctaggtctatctctactagtaatagtatcaaatacatatggtactgattatgtacaaaacctcaacttactccaatgctaaaatacattattccaacaattatacttatacccctaacctggttatcaaaaaataatataatttgggttaacttcacagcacacagccttctaattaactttaccagccttcttcttataaaccaattt

SEQ ID NO: 7190 - DNA, 375 bp, Bos taurus
  Clone ID: 31-LIB3057-019-Q1-K1-H3
agaacttcaaactccagccaaacgttccttgttgccactctgggtatttctgagacttggtcttagagcctgttgcatgcccttagctttacagcttctgcctttcttttgtatttattctcagccatttggggcacatgcatctctataatcagactggatatgggacttcttgtcattttaagagtagaaaatagggtaatttaacttaccagctgccgtctaccctccccgcccccagtaactgcagtctacagagtcaatatattttttcagagaaggttattcactcaattttttctgaaccataattaaactttatgataaaaaaaataaaaaagggccggcccgctctaagaaggatctcaaggcttt

SEQ ID NO: 7191 - DNA, 341 bp, Bos taurus
  Clone ID: 31-LIB3057-020-Q1-K1-H3
ggcagctggagctggcaaggtcaccaagtctgcccagaaagctcagaaggcgaaatgagtattatccccaatacctgccaccccagtcttaatcagtggtggaagaacggtctcagaactgtttgtctcaattggccatttaagtttaatagtaaaagactggttaatgataacaatgcatcgtaaaaccttcagaaggaaaggagaatgtttttgtggaccatatgttttgtgtgtggcagtttaagttattagtttttaaaatcagtactttttaatgaaaacaacttgaccaaaaatctgtcacagaatttgagacccattaaaaaaagtttaatgag

SEQ ID NO: 7192 - DNA, 415 bp, Bos taurus
  unsure (194),(322): unsure at all n locations; Clone ID: 31-LIB3057-021-Q1-K1-H11
ggtgtggtctccacccccgtctgtcccaatgggcctggcaactgccaggtatcccttcgagacctgtttgaccgggcagtcatggtgtcccactacatccatgacctctcctcggaaatgttcaacgaatttgataaacggtatgcccagggcaaagggttcattaccatggccctcaacagctgccatacctnctcccttcctacccctgaagataaagaacaagcccaacagacccaccatgaagtccttatgagcttgattcttgggttgctgcgctcctggaatgaccctctgtatcacctagtcaccgaggtacggngtatgaaaggagccccagatgctatcctatcgagggccatagagattgaggaagaaaacatacgacttctggaaggcatggagatgatatttg

SEQ ID NO: 7193 - DNA, 125 bp, Bos taurus
  Clone ID: 31-LIB3057-022-Q1-K1-H3
ctacgaatggtttagcaccaggcgccctacgaacgtgcggtgcgtgacgttcgaaggagcgaccggtctttacttccgcgccccgtttcccgggacgaagggctctccacaccggaccccggtcc

SEQ ID NO: 7194 - DNA, 276 bp, Bos taurus
  Clone ID: 31-LIB3057-024-Q1-K1-H11
ttcccgttcgacccacgcgtacgcaccgataaacctataccaaaatgggaattgagaatacccacatcaacattgttgatatggagcgcgtaaattcatggatgactagcaccactttacctctgaaccatataccacatgagatcaaagcgagagcccataaattgtttacttatcattgtttttactaatgataaaggcttttacctgcttaaatgacttaccttaaattcatcctggatatttaggaaacattactcagaactatttattcat

SEQ ID NO: 7195 - DNA, 351 bp, Bos taurus
  unsure (1),(10),(287),(296),(299),(314),(338): unsure at all n locations; Clone ID: 31-LIB3058-002-Q1-K1-H11
nccacgcgtncggtcaccactcccaagccagtaccgagtcctacgagcagtcgcacgcaagtgtcaagagacgaaacggtcgacatggctcgcacgcaatctgccgtagcggtcgccgtggtggccgcggtgctgctgctggcagcggcggcgacgacctcggaggccgccatcacctgcgggcaggtgagctccgccatcgcgccctgcctctcctacgcccgcggcacggggtccggcccctccgcgtcctgctgtagcggcgtcaggaacctcaagagcgccgncagcaccgncgncgacaggcgcgccgnctgcaactgcctcaagaacgccgncaggggcgtcagc

SEQ ID NO: 7196 - DNA, 223 bp, Bos taurus
  Clone ID: 31-LIB3058-003-Q1-K1-H3
agaagatcactcgtatgaaacacgtcgggccaaacttcttagaatcaagtctgctctgcatgcaagtgacatgactaggctagaccagtatgtccaaagaatgatggagaatcagcacacactctactgaatggctggggccatcaggaaagaggccgaatctctctcttttgctgaacgacttctgaaaaaggtctatgaagtgcttgatctcacagcacat

SEQ ID NO: 7197 - DNA, 419 bp, Bos taurus
  Clone ID: 31-LIB3058-006-Q1-K1-H3
cgcgcgtgaggcatgtggtgtgatagtagaattaatcaaaagcaagaaaatggctggaagagctgtcctgttggcaggaccttctggaactggcaagacggctctagctctggctattgctcaggagctggggagtaaggtccccttcgtgcccgatggtggcgagtgaagtatactccacggagatcaagaagacggaagtgctgatggagaacttccgcagggccattgggcttctgataaaggagaccagagaggtgtacgaaggagaggtcacggagctcaccccatgttgagacggagaatcccatggggggctacggcaagaccatcagccacgtgatcattgtgctcaagacggccaaaggcaccaagcaactgaagctggaccccaccatttttgaaagtttgcaaaaaga

SEQ ID NO: 7198 - DNA, 448 bp, Bos taurus
  Clone ID: 31-LIB3058-007-Q1-K1-H11
catatattttacctgtatgttgagcctaggttattaaatcaatccatcattaatagcatgactaggtatgaatttgcaagaagtttttaaaacatgagtaagatttaatgaaagttaagttggcattgtaaatgtctttttatattttttaattatattttttttttttttctgtatttttatgtattattatattatatattttatttatattttttttttatttgtttttttatatttattttttttattatgttttgtttttctttttttttttttatatatttattttcttattattatttatttttttattatttttgttttgtgtattatttatttttatattattagtttttttatatattttttttatatttatattttttgatttttttttatatattttctattatactattttatttataatattatttattttttt

SEQ ID NO: 7199 - DNA, 389 bp, Bos taurus
  Clone ID: 31-LIB3058-009-Q1-K1-H11
cggtcttcctcttcttcatcgccgtgcgtggccgcacccccgaggccgcgcagatcggctcgggcaggaacgccgcgcgcctctgctgcgttaccagccgggacgcggggcgcagctggggcggcgcgcgggacctcacggcggaggcggtgggcagcgctgagcaggactgggccacgtttgccgtggggcctggccacggagtgcagttgcgctctggccgcctgctggtgccggcctacacctaccacgtggtccggcgggagtgcttcggccggatctgcaggacccgcccccagtcctttcgcgttctacagtgatgaccacggccgcacctggaagcgcgggggccttgtgcccagcctgcgctcgggcgagtgccagctggc

SEQ ID NO: 7200 - DNA, 360 bp, Bos taurus
  Clone ID: 31-LIB3058-010-Q1-K1-H3
tgcaaagtagactttgttacatgaagttcgctgggaaatagatgttctgtctctatgagaatatattttaactgactttgtagatgccttaatatttgcatgataagctagttttattggtttagtatcttgttgtttacgcatggaatcactattcctggttatctcaccaacgaaggctaggaggcggcatcagaagtgctgggcgtgacagagccatgagccagccattttataagcactctgatttctaaaagttaaaagaaatgtatatgaaatctctgtagcctttagttatcagtacagatttattaaattttggcccttaacccagccttttccagtgtgtaacccagtttg

SEQ ID NO: 7201 - DNA, 335 bp, Bos taurus
  unsure (177): unsure at all n locations; Clone ID: 31-LIB3058-012-Q1-K1-H3
cactgagtggttcttcggatcatgtctggtggctccgcggattataacagagaacatggcggcccagagggaatggaccccgatggtgtcatcgagagcaactggaatgagattgttgataactttgatgatatgaacttaaaggagtctcttcttcggggcatctatgcttatggntttgagaagccatcagctattcagcagagagctattattccatgtattaaagggtatgatgtgattgctcaagctcagtcaggtactggcaagacagccacatttgctatttccatcctgcaacagttggagattgagttcaaggagacccaagcact

SEQ ID NO: 7202 - DNA, 395 bp, Bos taurus
  Clone ID: 31-LIB3058-014-Q1-K1-H3
ctgactctggggggcagccccagctgactcagccaggcaagctgaccgaggccttcaagtacttcctgcagggcatgggctatatggcttcatcctgcatgactcgcctgtcccgatctcgcacggcctccctgaccagcgcagcatccattgatggcaaccggtcccgctctcgcaccctgtcccagagcagcgagtctgggactctctcttcagggcccccagggcacaccatggaggtctcctgttgaatgatccttgttgtcctggtgtgggacccagccctcaccttccccagtactaacctgggaggtgcccagggcactgggcccaagtgagcacaggaagctgggcagatcatgttgtgagatgaccttgatctttgatgctaccct

SEQ ID NO: 7203 - DNA, 381 bp, Bos taurus
  Clone ID: 31-LIB3058-015-Q1-K1-H11
agaactttgaggtgaaggcggatgacctggagcccatcgtggagctgggccggcgggcgtacggggtggtggagaagatgcggcacgtgcccagcgagcagatcatggcggtgaagcggatccgggccacggtaaacagccaagagcagaagcggctcctgatggatctggatatctccatgaggaccgtggactgtcccttcacggtcaccttttacggcgcactcttccgtgaaggggatgtctggatctgcatggagctcatggacacgtccctagataaattctacaaacaagtgatcgataaaggccatacatttcagaggacatcttagggaaaatagcaagttctattggaaaaagccttagagctttgcacag

SEQ ID NO: 7204 - DNA, 347 bp, Bos taurus
  Clone ID: 31-LIB3058-016-Q1-K1-H3
gttttattgtttaaattgcgtgcatgcttaagtcacttcagtcatgtctgactctttgcgactctatggactgtagcccgccgggctcctctgtctgtgggattctccgggtaagaatgctggagtgggttgccagcccctccaccaggggaatcttgcagattcaaggattgagcccacgtctcttatatgtcctgcgttggcaagtgccatttactgttaggatcacgagggaaaccctagtgtaaactatgtaatagtaaattagatactaagattaaccatgcattttacctcctggatggcctagaatcggtagagctgagtgactcccttccccagaatat

SEQ ID NO: 7205 - DNA, 434 bp, Bos taurus
  Clone ID: 31-LIB3058-017-Q1-K1-H3
caggggcagggtgggagaggctccgggagccccgaggcagtacctgatgtggcgctggcggatgagcacacgggcgtggtggatggacttggccaggcccagcttgaagacctgggtctgcaggcgtctctccaagaaatcctcaatcttcaggcccaggatgtaatccagcttcatcttgccctcatccagcaccccgatacggacgagccgccagaacagggcattacctggtgagggggcacagaagcctgtctcagccttccagttcaaatccggcaccttcacaccacggcggtgagacccagcatgaaggaagaactagttctgatacaggactcaacgccctactgcatgagccaccgtgactgccagaatcctcactaccctgaggcagatgacgacccacaacctgtctgaacaagggagcgccc

SEQ ID NO: 7206 - DNA, 433 bp, Bos taurus
  Clone ID: 31-LIB3058-018-Q1-K1-H11
tagatcgcgagcggccgcccttttttttttttttttttttttttttccctgttataaagtgattttattaaattgatttggacatactgtaggtcaaaaaatattttccaaagataacaattatggactttaaagctcgacataaaattagtagcttcaaaagtgttagtcatattccccagcaacagcatgataaaataattcaactatgtagaaatatagaactctaggactagctggaaacttggaaatcatttagcctaatggcctcattttgtacgtgagaaaactagactcaaagattaagcgattttgcccaagctcacatacctaatagtaataaagctagaaatcaaaccaatttttcctaaaactaaaattctattaatgatatttcaactggcttgctatcaactaaaagtctaagcttttc

SEQ ID NO: 7207 - DNA, 457 bp, Bos taurus
  Clone ID: 31-LIB3058-019-Q1-K1-H3
ctgacgcgagggttttattttcactgacaagaacttttatttctccttaatgacattaaacacggctgctacaggggaaaaacatgatccacaggaggcaccaaacttaagtttcataattgatcctgacaacagccgaagtaaactggggtcgaattagatgcaaaactacaggttatttcaggctcttttagttacaagtgaactatgtaaacagcacaagtctactctgcactgttaagacccctgtggtgagaatgtcatcacagatgaagaaagcttggtaggcagttcaatgcacagagcccttactcaaataaaacaatatggcaagaattctacacagaaattagatttaagaggccaacaccaaatatgagatacgtagcgtttaaaaacaaattcaaacgccagattctaagcactaccatctataaagcgaacatgcctgataatg

SEQ ID NO: 7208 - DNA, 322 bp, Bos taurus
  Clone ID: 31-LIB3058-020-Q1-K1-H3
cggacgcgtgggctagatcgcgagcggccgcccttttttttttttttttttttttcatctacacagtgtttttatttttattcaactataagcaaacagcaaaattaacacaatattcaccaactccagaacagttttcttttttaaaccaaagtgtgattaatttaacaagcacagactttcagattctgataaccttttacccaacccagccctgctgctcatctagatggccaggctttaacagcaaagcaatttcttctatggagctttttccagtattgctctttaaaggagccacagtgggacactgacacgcagt

SEQ ID NO: 7209 - DNA, 456 bp, Bos taurus
  Clone ID: 31-LIB3058-021-Q1-K1-H11
ctgtggtgttggagaagactcttgagagtcccttggatagtaaggagatccaaccagtccatcctaaaagaaatcaatcctgaatattcactggaaggactgatgctgaagctgaaactccagtactttggccacctgatgcgaagaactgactcctttgaaaagaccctgatgctggggaagattgaaggcaggaggagaaggggacaacaaaggatgagatggttggatggcatcaccgattcaatggacatgagtttgggtaaactctgggagctggagatggacagggaggcctggcgtgctacagtccatggagtcgcagggccggacatgactgagagactgaactgaattatggtcccagttacttaaaaaaaagaaaactatatgttttgtcaaatgtagtcaagggggtgatggagtctcatctgtggtgccagcagcacacctgta

SEQ ID NO: 7210 - DNA, 315 bp, Bos taurus
  Clone ID: 31-LIB3058-021-Q1-K1-H3
gactattatctacaaatatttattgtaacacttgaatagaactacaggaagcccttggcactgatagaaaatattgattcactgttaggttacaaaaatttatacatagcaaaatttaatgctctttacataaaaaatattagactacttaaacaaaactttcaaaaattcctggtaagagctaccagaattagaaaagtaaaattaagctttagacactgcctcttctaaaacactggactcaaacagcaccttcactgctggaaaaaatatttaagtctgtcatgccacaagaaaaaaaaaaaaggccggccg

SEQ ID NO: 7211 - DNA, 327 bp, Bos taurus
  Clone ID: 31-LIB3058-022-Q1-K1-H3
taaagtgtaacattgtgtagcctttatcagattactattagagtggaaatggtccaattagtttgctttttaatatgcttaaaataagcaggtggatctatttcacgtttttgatcaaaaactttatttgggatatgtatgggtaggtaagtcagtaagaggtgttatttggaaccttgttttggacagtttaccagttgccttttatcccaaagttgttgtaacctgctgcgatacaatgcttcaagagaaaatgcggttataaaaatggttcagaattaaacttttaattcagaacatttccagccactgtcaacagaaaaaggt

SEQ ID NO: 7212 - DNA, 424 bp, Bos taurus
  Clone ID: 31-LIB3058-024-Q1-K1-H3
cggactcgtgggctccaacagaaccagcaacctcagtacctccaccgtcagcccccctgccagagccaatggcacctcaacagagaagaagctgacagagcccgaaagcaagggtgtggtcatcgtggctgtgaccgtgtgcgtcctggtcttggccttgctgggtgctgtcctctatttcttctacaagaagggcaagctgccttgtggacggtcaggcaaacaagagatcacgctgcccccgtctcgtaagagcgaatttgtagttgaagttaagtcagataagctcccagaagagatgggcctccttcagggcagcagcggtgacaagagggctccaggagaccagggagagaaatacatcgatctgaggcactagccgctgaatcacacggcgctccctcccctgcctggaaccttcccc

SEQ ID NO: 7213 - DNA, 283 bp, Bos taurus
  Clone ID: 31-LIB3058-028-Q1-K1-H3
gtgctttacaaatacgcactaattaagcctcacaaacagccagagccttggaatggagggctttggccagtctgtcgggattcttggacgccctgccacagcttatggattccgccctgatgaaccttacttctatggctgtggatctcgataaagtcatccctctccttgtgtgctctcagttaagaaggcgtctgtgtgggttgggttaactttgaatctcggcctaataatgcatgttgatactgtttgcaggtctgtgtctctctttaattttccctgt

SEQ ID NO: 7214 - DNA, 439 bp, Bos taurus
  Clone ID: 31-LIB3058-029-Q1-K1-H3
gagcggagccggcgcgcagggagagcgcggtgctgcctgaggtctccaagcggctcgccatgggtggcccacagcagcagccaccttacctgcacctggccgagctgaccgcgacccagttcctggagatctggaagcacttcgatgcagacggaaatgggtatattgaaggtaaagagttagaaaactttttccaagaattggagaaagcaagaaaaggctctggcatggtatcaaagagtgacaacttaggggagaagatgaaggaattcatgcagaagtatgacaagaactcagatgggaaaattgagatggcggagctggcacagatcctgccgaccgaggagaactttcttctgtgcttcaggcagcacgtgggctccagcaccgagtttatgggagcttggcggaagtatgactcagacagaagcgggttcat

SEQ ID NO: 7215 - DNA, 377 bp, Bos taurus
  Clone ID: 31-LIB3058-032-Q1-K1-H3
cgacccacgcgtccggaaaggacccgtgagggcaatgacttatactatgaaatgattgagtctggtgttatcagcttaaaagatgctacctctgaggtagcgctggtgtacggtcaaatgaatgaaccacctggtgctcgggcccgggttgctctgactgggctgactgtagctgagtacttcatagaccaataaggtcatgatgtgtttttgttttttatcttttattttgtttcatttaattttttttttttttttcatattattcattttaattatttttttttttatctttattttttatttctttttttttttttatttgtttttttagatctttattttatttttttttttattatttttatttttttttt

SEQ ID NO: 7216 - DNA, 392 bp, Bos taurus
  Clone ID: 31-LIB3058-033-Q1-K1-H11
aagaggtgagaagtgttctgactgtggctttcagtcctgaaaaactgagtgagatgactcctttaatcagccgggcctgcgatgtgcttctggctcacctagagcgtgacgcacagtctggtgaggctcttgacatccacaggacctactgttgctacaccacagatgtggtggccagagttgcctctggcaccgaagagaactcccactaggctcctgagcaccccttcgtggagcactgcaagcgcttctttgcatcctccatatccaaacatcttctggggttactctcatcatttccatccataatggtgccactggcgcggatattgtccactatgaatcgcgatgaactgaatggctcttttaacaaaatcatttatgaatgtgat

SEQ ID NO: 7217 - DNA, 431 bp, Bos taurus
  Clone ID: 31-LIB3058-034-Q1-K1-H11
cggacgcgtgggccggaccccttgtctggttccgtgtccccggggtggagagggggggcgcggggacaggcctcggccccgctggccagtgaccagtcgcctgactgggctcctcccccggcccggcccatccctgaagactttatcttgtgaccgagactgctggctctcccttccttgagcttggagcctcagcagcgatgcgtttcttgactgtcgcgttcctgttcctggcactcagtgcctccgccctggccgagccggtgaaattcaaggactgcggttcttgggtcggagttataaaggaagtgaatgtgagcccatgtcccacccagccttgcaaactgcacagaggacagtcttacagtgttaatgtcacgttcaccagtaatactcagtctcaaagtagcaaggctgtggtacatggcatt

SEQ ID NO: 7218 - DNA, 418 bp, Bos taurus
  Clone ID: 31-LIB3058-034-Q1-K1-H3
cagacctgttccaccatagcaagctggatcccttcatggccttctgtgccaacatccggcagcaggatgtgttcatgttcctgaccaaccggcactcctttggccacctgctctccctggacagctaccagaccacccacctccacaacgacctctgggaggtgttcagcaaccccgaggactggaaggagaaatacatccatgagaactacaccaaggccttggcggggaagatggtggagatgccttgcccggacgtctactggttccccatcttcacggagactgcctgtgatgagctggtggaagagatggagcactacggccagtggtccctgggagataacaaggacaaccgcatccagggtggctacgaaaacgtgccaaccatcgacatccacttgaaccagatcaactt

SEQ ID NO: 7219 - DNA, 441 bp, Bos taurus
  Clone ID: 31-LIB3058-035-Q1-K1-H3
cggacgcgtgggaaaatattttcagaatttagtttgttccttaacttctgtttttttgtgtgtgtgttttaacctgtgtttttttgagacagacaagctgtaacccttcatgtgccttacctccgctcagtgtgggcagcacttcgccccgaggggtggaggaccctgactctatcttccagaagctgatgcgagagtctgcaggtggccagtttgagtctctgatgggcttcagcagctctgctcccgtggaggacagtgttgtcatcccatgtgaattctgtggggtccagctggaagaggaggtgctgttccatcaccaggtgagagtccccgaggacccgggcacttctcttgtccccttgatcctctgggagtgaacctgaggctttcagagcggagaatgcctctctggccttgagttgcatgcatacctgatct

SEQ ID NO: 7220 - DNA, 441 bp, Bos taurus
  Clone ID: 31-LIB3058-036-Q1-K1-H11
cgacccacgcgtccggttgtagatcgcgagcggccgcccttattctttttttattattttttttttttttttagttattggattattttcaaaataccatgaaaaaacaattactaaattttataaaaattaaaaaaaaataaaaaacaattaatttctaacaaaaaaaaaacaactgaatagcccataacaacaaatcaaaaagctaaattcctaatctcaaacacattacacataaaaccaacacacatcaaagcataaggttttaaaacacccacatattgaacacaaaaacattaggcagccaaaaaattacacataccaaaaaaaaaaacataagcaaatacgacaagaaaaaaggattaacaccacgcagacctctccaaaaaactcagacaaaaccacaagacgaaacagacaacaccccctaaccaagaacaa

SEQ ID NO: 7221 - DNA, 425 bp, Bos taurus
  unsure (311): unsure at all n locations; Clone ID: 31-LIB3058-036-Q1-K1-H3
ctggtatcaagatttacttcattaaatttaaatttcatagaattggagaaggaaatggcgatctactccggtatttactgcttggaaaattccatggacagaggagcttggtgggctgcagtccatggggttgcaaagagttggacaggactgagcaactgaccatacacaaacatgccatagaacagctattaaatggtttatttaaccattccttattgatatggttattacaaggagccctgctatgaacatttcctgactcgacatttgtctcagagtttctctaggaaagtggttttcaaactttntaatgtcaggactctctacacttctaagagaacttgtatatgagggttaatatctatcactattcaatgtattagaaattacatagtgataatcttaaaatagtcattaaaaat

SEQ ID NO: 7222 - DNA, 410 bp, Bos taurus
  unsure (382): unsure at all n locations; Clone ID: 31-LIB3058-037-Q1-K1-H3
gtggcgctgtaagaagtaacaacctcttctcttcgccatctgctcggcagccgcgaagcagcaactatgcgtgagtgcatctccatccacgttggccaggctggtgtccagatcggcaatgcctgctgggagctctactgcctggaacacggcattcagcccgatggccagatgccaagtgacaagactattgggggaggagacgactccttcaacaccttcttcagtgagacaggggctggcaagcatgtgcccagggcagtgtttgtagacctggaacccacagtcattgatgaggttcgcactggcacctaccgccagctcttccaccctgagcagctcatcacaggcaaagaagatgctgccaataactatgcccggngtcactacaccattggcaaggagatcat

SEQ ID NO: 7223 - DNA, 433 bp, Bos taurus
  Clone ID: 31-LIB3058-038-Q1-K1-H3
tcggtgcagttaggttttctctcccagaaattttgtctcttcagttaccctgattagatttggtttgcacatattctgttgtgtcatgagtacccattgaatctcagtggtgatttgatgataattttttcataggccttctagccaaaatttttattatttaagaaaaaatttttttttttgccaagtgacatgagggatcttagttccctgaccagggatcaaactgcatcccttgcagtagaagggtggaaccttaaccactggaccaccaggaagaccctagccaaaatttttaaataaaataatcacctcataactatatgtagttattcttatttaaaatatataaattatagctttgatttgattacaaaagtgccaattttgttaaaatgttttattgtgatgaaagttcaaaagtaattaatgc

SEQ ID NO: 7224 - DNA, 426 bp, Bos taurus
  Clone ID: 31-LIB3058-039-Q1-K1-H3
ggcgggctgcgctgcacccgggctggtctcggatgggggaggggatgtcggtcagtgcgagatccgctgctgctgaagagaggagcgtcaacagcagcaccatggtagctcaacagaagaaccttgaaggctatgtgggatttgcaaatctcccaaatcaagtatacagaaaatcagtgaagagaggttttgaattcacacttatggttgtcggtgaatctggactgggaaagtcaacattaatcaactcattattcctcacagatttatattctccagagtatccaggtccttcccatagaataaaaaagactgtacaggtggaacaatccaaagttttaatcaaagaaagtggtgttcagttgctgctcacaatagtcgataccccaggattcggagatgcagtggataatagtaattgctggc

SEQ ID NO: 7225 - DNA, 313 bp, Bos taurus
  unsure (39): unsure at all n locations; Clone ID: 31-LIB3058-040-Q1-K1-H11
ccattcgttcggtagaatgatagactgtaactactatcnatgatgtacagattgcaatttagatgtttcgttggcagtctgaagaggtgtggattgcctcttatatagcgaacttcgtgaaaaacccatgaagcacaacacacctcactaaagagattacaagaatttggcacagttagtcactttgagcaatctgcaaatttctagctgctgacaatcttgaagtcactccctgttcactgaaatcctttgattgaactggctgaatactttgaaaaatgccgagttctagctaatgcatttcccagtaagg

SEQ ID NO: 7226 - DNA, 216 bp, Bos taurus
  unsure (44): unsure at all n locations; Clone ID: 31-LIB3058-040-Q1-K1-H3
gagctagatcgcgagcgggcggcctgatgcttttgcgagcttgngtgcaacaatacaggtggattgtgctttcacctctgcagtcatctgtgagtaaatggagtgtgaacaatggaatggaacgaaattacaggaatgcgtaagtaaagggctgtagaacaccttaacagttatgacatggcagttataaaccaaccatgggcaacttagtgatat

SEQ ID NO: 7227 - DNA, 376 bp, Bos taurus
  Clone ID: 31-LIB3058-041-Q1-K1-H3
ccgggccgacccactcgtccgcgagcacgcggccactcggctgcgctattccaagtgcttcagcttcggcagcgccgaggccgaggcctcgtacctcacccagcgggcccgcttcttcagcgccaacgagggcctggacgactacctggaggcccgcgagggcatgcacctgaaggacgtggacttccgagagtccctcatggtgttcgccgacccgcgcagcccgccctggtacgcgcgcgcctgggtcttctggctggtgtcggcggccacgctgtcctggccgctgcgcgtggtggcggcctatggcacggcccacgtccactaccaggtggagaagctctttggcgccagctcgtccccgtccggcgccgtg

SEQ ID NO: 7228 - DNA, 202 bp, Bos taurus
  Clone ID: 31-LIB3058-043-Q1-K1-H11
ccctcttccgtttgattcttagtatcttttaatagatctgacaaggcccacaaaagaagactttccatgggttttctttatctcaaccagttatctttacattctttattcacattcactctcatataatattaccatcacttcacatcattcctcaactactattcatattcctttaaatatttctataaacattttaaag

SEQ ID NO: 7229 - DNA, 435 bp, Bos taurus
  Clone ID: 31-LIB3058-045-Q1-K1-H11
cccaaatatccttaaaatgtttgacagttattctttgaaatattatcccatatatctgtatatgctcatgtatttagaaaattgtcttaatatttttccaggaggaaagagcaaattgaagaagaccatgagcagtatcatttttggagtgtgtactcttataagaaatatcggtattagcagagagggcagtttttgctttttattttatgcccttgtttactgttcgatattttgaagttacatatattatttaaaataaataaacaaatacttaaaattcaatatttaatataaataagttcaacatttaaaatatttgatatttaagataaatagatttagactaaaatgctctttccttcagttaaactaatgagaatctaaaatctaagtcagtcacatttgtttcttcttgggtacattctgctctat

SEQ ID NO: 7230 - DNA, 435 bp, Bos taurus
  Clone ID: 31-LIB3058-045-Q1-K1-H3
gcgagcggccgccctttttttttttcgttgagagaggtcggagatcatgcctgtgttagcggcccttctgcggcgcggccccctgcttcagaggcgggtgcaggaaataaggtatgcggagcgaagttatgtatcaaaacccactttgaatgaagtggtcatagtaagtgctataagaacacccattggatcctttctaggcagtctttcctctctgccagccactaaacttggttccattgcaattcagggagccattgaaaaggcagggattccaaaagaagaagtgaaagaagcatacatgggcaatgttctacaaggaggtgaaggacaggcccctacaaggcaagcagtactgggagcaggcttacctatttctactccatgtaccactataaacaaagtttgtgcctcaggaatgaaagccatcatgat

SEQ ID NO: 7231 - DNA, 440 bp, Bos taurus
  Clone ID: 31-LIB3058-046-Q1-K1-H3
gtataataaaatcagtacagtactttttagttgaatgatttgtcagatcagattttaagttatttataaaaatattttaagaagatggtacacccatatgtacaaatgtttgtgataatttgttatgtaaggggttttatgctaatgagacctttttggttgatctgtttttctcagataagtaactaataacattttacatcaagtgtatataaagtttgaattttttctccatgaatgcaactaatttttctaagtaaatactgggttttatgagcttccccagtggctcagtggtaaagaatccacctgcaatgcaagagatatggagaccagtgtttgatccctgggtcgggaagatcccctgtaatgggaaatggcaacccactccagtaatcttgcctggaaaattccatggacagaggagcctggtgggctgt

SEQ ID NO: 7232 - DNA, 373 bp, Bos taurus
  Clone ID: 31-LIB3058-047-Q1-K1-H3
gtgatcctggaggccaccgaggaggtgctggctaccaccatggccaggattgcaggccggttgtttaaggcctaagcaaccaagcccaaaggcctaaaggaggagaccttttcccccgtcagccagaaaacccccctgggcctggaggcctcggagcctaccctggctgcggtagaggcggccccgggtctgagggacacggcccttcccttcacagagccttcggcaggggacctgccagcgccaaagacctacgtgagctgcctgagcagccctctgtccagccccaccaaggacaggaagccaaagaactctgcacaccacatctccctggccccctgccctctgccggctgccccccttcgcgagttgc

SEQ ID NO: 7233 - DNA, 259 bp, Bos taurus
  Clone ID: 31-LIB3058-051-Q1-K1-H11
atcgcgagcggccgtcctttttttttttttttttttttttttttttttttttttttttgttttttttttttttttttttttttttttttttttttttttttttttttttttttttttttttttttttttttttttttttttattttttttgtttttttttttttttttattattttttttttttttatatttttattttttattatgtgtgttttttttttatttagtttattttatttttttttaaaatatttatttt

SEQ ID NO: 7234 - DNA, 379 bp, Bos taurus
  Clone ID: 31-LIB3058-051-Q1-K1-H3
ccggaaagaaagtccagcccctgggagatcctggactgccttttaaatctctgcttgtcacctcgcgggcggggtctctaacctcttgatgtctggggaaccctgacctgctacggggactcggggcagcctgtggactggttcgtcgattacaagctgccggcccacacagggtcgggagatgcgacgcagaacggtctgcggtacaagtactttgacgaacactcataagactggagcgacggcgtgggggtcatcaatagcaccaccggtgccgtgggccgcagactgctgccgctgtaccgagacaacatcaggcaggtgatgacgccttcggtcgaacctggggtgggactctaaggtgggcctgacctgaggg

SEQ ID NO: 7235 - DNA, 413 bp, Bos taurus
  Clone ID: 31-LIB3058-052-Q1-K1-H3
tatatctaaccattcccaaaataatttcaaccaaagcttagaggacctaaaggctaaaaagttctaaggaactgacataagagtaatagtatggagactgcattaatgacatggtacttagtacattgtgggcttaccaggtgacacagtgataaagaatccattacaggagatgcaggttcgatcccagggctgagaagatccccaggagtatggaaatggcaacctgctccagtactcttgcctagacaattctttggacagaggagccaggtaggctatagttcatggggtctcaaagagttagacgggactgagcacacacccaaacacttagtaagtcaagatacatttgcaaattattttcctcctgcttcatttcaaaataaacttgggataatcatgttagcttt

SEQ ID NO: 7236 - DNA, 351 bp, Bos taurus
  Clone ID: 31-LIB3058-053-Q1-K1-H11
attatgggaggccactccatccgcatcctaggctggggagtggagaacggcaccccctactggctggtcggcaactcctggaacactgattggggtgacaatggcttcttcaaaatcctcagaggacaggaccactgtggaatcgagtcggaaatcgtggctggaatgccgtgcactcatcagtactagaagatctgatctgcttgggggcctgtctgctggcccagggccagttttcccctaaatacagccacttggactggggatgaggtggggggactggggggagttggatgtcttttaatttttgaatcatgataagatttaaggggttttagaccggggcttaag

SEQ ID NO: 7237 - DNA, 345 bp, Bos taurus
  Clone ID: 31-LIB3058-053-Q1-K1-H3
agcgtccggcaaagggcaaatagaaaccccggtttttagctgccctaccacctcttgagacttctggtttaactatcagactgaaatttattgacttaagtgaccagccacttgtcccatgtctgttgctcactggaaacatcctaccatgtgcactgcactaataccccaattaagtcctgttgcaaccaaaaggtctttcaagcagggctccaggcttacttccctatgaacctttcacaatggtggccgagaagatgctcaaagaagaagccataacagaggtgcaagcatacttagataccaaggtaactcctcatggcatactacgataatcctaatatt

SEQ ID NO: 7238 - DNA, 396 bp, Bos taurus
  unsure (342): unsure at all n locations; Clone ID: 31-LIB3058-056-Q1-K1-H3
cggacgcgtgggatttttgaaagaaaaatataaagtataaaattactaatcctagctatggcaaactacgttcacttcttaaacaaataggaaaattcctcccttaagtgatataaagggggatgagtcatcatgatccctgaaacaagcactcaaacaggagatcttacacatgttcatcaacactttcagtgtaaaatacaaacccctttcagaaaaggcatatagtaagctttaacacacctcacttaggaacatagcttacaacttaatatttaagggtggccagtttatggttacattttatgcctcaatttattagtcaataaaaatttttaaatntcagaatagtcttcttaacacaatatgatttgaaatagggaaaaaaattgacta

SEQ ID NO: 7239 - DNA, 416 bp, Bos taurus
  Clone ID: 31-LIB3058-058-Q1-K1-H3
tcgggaacacagacattttcggagctggagccgtcactgccgccgccattttgtgtctgtggagaaagaagattctgtggcggctggaagtggacggagatcacccgtgagacggcggcgtttcatacccgaggttccccctgtgtcgtcccccaacccccctccgcggtcagcatgtggtgaagccggagccgcgagagacccggggagaggaagagaggagtcggaagggaggcggggtatccagagcggcttcagcttcagctgcggcggacctcggaggggggccgtggcgcaatgtcagagcagacgccggccgaggccggtactgcgggggcccgggaggacgcctgtcgggattattagtcatcactcggagaccttacctttaattgcaaaccggacatcaatatgct

SEQ ID NO: 7240 - DNA, 403 bp, Bos taurus
  Clone ID: 31-LIB34-001-Q1-E1-H11
cttgcaacttcgaaaaatttaaaaccatgaaacatctattactgctacttttctgtgcttttatagttcaggcccaatttcctactgactatgacgagggacaagatgacagacctaaggtaggtttgggtgcccgcggtcatcggccctatgacaagaagaaggaagaggcccccagcctgagacctgtgccccctcccatcagcggaggtggctatcgggctcgtcccgccacagcaactgtgggccagaagaaagtggagagaaagccccctgacgctgatggctgcctgcacgcggacccggatctgggtgtgttgtgtcctacaggatgtaagttgcaagatactttggtaagacaggagagaccaatccgaaagagtatagaagatttacgtaatac

SEQ ID NO: 7241 - DNA, 426 bp, Bos taurus
  Clone ID: 31-LIB34-001-Q1-E1-H3
ctaatgcatcatccagccagagaggtcgaagtggttctggaaactttggtggcggtcgtggaggtggttttggtgggaatgacaactttggtcgtggaggaaacttcagtggtcgaggtggctttggtggcagccgtggtggtggcggatatggtggcagtggggatggatataatggatttggtaatgacggaagcaattttggaggtggcggaagctacaatgattttggcaattacaacaatcaatcttcaaattttggacccatgaaaggaggaaactttggaggcagaagttctggcccctatggtggtggaggccaatactttgccaaaccacgaaaccaaggtggctatggtggctccagcagcagcagtaactatggcagtggcaaaaggttttaattactgccaggaaacaaaagct

SEQ ID NO: 7242 - DNA, 362 bp, Bos taurus
  Clone ID: 31-LIB34-002-Q1-E1-H11
cgcgtcaacggaagcgtgggcgaggccgtgacacagatggtcagagcccaggaaaagaatgcttacctgagcatgaatgacatctccacggaggggaggttcacttaccccactggggaaatactggtctattccaactgggccgatggggagcccaacaacagtgatgagggacaaccagagaactgtgtggaaatctttcctgatggcaagtggaatgacgtaccctgcagtaagcaactccttgtgatctgcgagttttgagctctcccacccaccccatggaacgggcactgcccagagctgtgagctgccaacatcccaataaaaatgtgaccctctgctgctcatggcttccccac

SEQ ID NO: 7243 - DNA, 247 bp, Bos taurus
  Clone ID: 31-LIB34-002-Q1-E1-H3
tccgggccgccccacgcgtccagcactgtatggctgccctgaagcaccagccacaagaatttccaacttacgtagagccaacagatgacgagatctgtgaggcattcaggaaagatcccaaggactttgctgatcgatttatgtatgaatagtccattaattatggacaagctcctctgacacttttagtccgttacaccaagagttatctctctatggtacggtcctgctgtacctcaccaaaccc

SEQ ID NO: 7244 - DNA, 405 bp, Bos taurus
  Clone ID: 31-LIB34-003-Q1-E1-H11
aaagtaaaatacaacaaaatgtttaatgagcaaattcgtcttagcaaatatgaaactgccacagagaggaggggagggacaggggccacggggtggggggcaagtccgggagactagagagaatcgtctacgtaagaaccaggacaccagggtgaggaccagaggccaggaggacgggagctgtggtcctgagagggaggggagggtaccgggccggacaacaggattcaaaagagtttggccataaaatataaacacgctatgtttctacggtggggaagggttagagaaaaggggtatccgggaaaagactgcttcagggaagggctgtgggggtccgaccccgcccctgctgtcaccccctcgccgcccttccctctgtgtctgttggtgcgtgtgtccggt

SEQ ID NO: 7245 - DNA, 418 bp, Bos taurus
  unsure (304): unsure at all n locations; Clone ID: 31-LIB34-004-Q1-E1-H3
ggcggctctggatccactgcccacaccccgctctcgcaggcagacatgaggacagagagaatgtcccccctcctggctctggggatcctggtggctgggctctgctccagggtccactgcctcccagagaatgtgaccccagaagaacagcacaaagtgacatctgtggatggccactcattagcctccagcaacactgacttcgccttcagcctctacaagcagttggctttgaaggaccccaataagaacgtcatcttctcccctctgagcatctccatagccttggccttcttgtccctgngggctcatggccccactgtgacagagatcctggaaggtctcaagttcaacctcacagagacccccgagacagaaatccaccagggcttccagcacctcctgcagacgttcaatc

SEQ ID NO: 7246 - DNA, 405 bp, Bos taurus
  unsure (381): unsure at all n locations; Clone ID: 31-LIB34-005-Q1-E1-H3
ccgctgactattctcaaccaaccataaagatattggtaccctttatctactatttggtgcttgggccggtatagtaggaacagctctaagccttctaattcgcgctgaattaggccaacccggaactctgctcggagacgaccaaatctacaacgtagttgtaaccgcacacgcatttgtaataatcttcttcatagtaataccaatcataattggaggattcggtaactgacttgttcccctaataattggtgctcccgatatagcatttccccgaataaataatataagcttctgactcctccctccctcattcctactactcctcgcatcctctatagttgaagctggggcaggaacaggctgaaccgtgtaccctcncttagcaggcaacctagcccatgc

SEQ ID NO: 7247 - DNA, 380 bp, Bos taurus
  Clone ID: 31-LIB34-008-Q1-E1-H11
cggctgaatcatccgatacatacacgcaaacggagcttcaatgttttttatctgcttatatatgcacgtaggacgaggcttatattacgggtcttacacttttctagaaacatgaaatattggagtaatccttctgctcacagtaatagccacagcatttataggatacgtcctaccatgaggacaaatatcattctgaggagcaacagtcatcaccaacctcttatcagcaatcccatacatcggcacaaatttagtcgaatgaatctgaggcggattctcagtagacaaagcaacccttacccgattcttcgctttccattttatccttccatttatcatcatagcaattgccatagtccagctactattcctccacg

SEQ ID NO: 7248 - DNA, 389 bp, Bos taurus
  Clone ID: 31-LIB34-009-Q1-E1-H11
tagggcctgcccttagctgcggaaacacagtggttgtcaaaccagcagagcaaacccctctgactgctcttcacatgggatctttaataaaagaggcagggtttcctcctggagtagtgaatattgtccctggttatgggcctactgcaggggcagccatttcttctcacatggatgtagacaaagtggccttcacaggatcgacagaggttggcaaactgatcaaagaagctgctgggaaaagcaatctgaaaagggtgtccctggaactcgggggaaagagtccttgcattgtgtttgctgatgccgacttggacaatgctgttgaatttgcacaccaaggagtattctatcaccagggccagtgttgtatagctgcatcccgtctc

SEQ ID NO: 7249 - DNA, 420 bp, Bos taurus
  Clone ID: 31-LIB34-010-Q1-E2-H11
gtgtaaagttgcatcccttcgtgaaacctatggtgacatggctgactgctgtgagaaacaagagcctgaaagaaatgaatgcttcctgagccacaaagatgatagcccagacctccctaaattgaaaccagaccccaatactttgtgtgatgagtttaaggcagatgaaaagaagttttggggaaaatacctatacgaaattgctagaagacatccctacttttatgcaccagaactcctttactatgctaataaatataatggagtttttcaagaatgctgccaagctgaagataaaggtgcctgcctgctaccaaagattgaaactatgagagaaaaagtactgacttcatctgccagacagagactcaggtgtgccagtattcaaaagattggagaaagagctttaaaaacatgggc

SEQ ID NO: 7250 - DNA, 208 bp, Bos taurus
  Clone ID: 31-LIB34-010-Q1-E2-H3
actccgctcagacctgtggaagattagcgaccatgatttccaatgggataggaaccgtcaccgctggaaaaaggagtatatgtcttctccctttgctgcttattggcctctggggctgtgtgacctgtcatcggagccctgtggaagacgtctgcacagccaaacctcgggacattcctgtgaatcccatgtgtatttaccgttcctc

SEQ ID NO: 7251 - DNA, 410 bp, Bos taurus
  Clone ID: 31-LIB34-011-Q1-E1-H11
actgcgccagctaggaagccccaagttcagtgaaccatcttatatagacatactgggctggccaaaagttttgttcattttctccataagatggcgctagtagagcttagttgtctagcttcatttgaaacaattttattagattaaaatattgtgactgctgtcatatcagcatgcatttaaaaaaacatcaaaattaatgaatttttgtattgctattttgatattgaagaagaaaagcaacattcttggcataatatgctgtattatttcaagaaaggtaaaaaccacaactgaaatgcagaaaaagatgtgtgcagtgtctggggaaggtgctgtgactgatggaatgtgtgaaaagcagtttgcaaagtttcgtgctggagacttctcactggacaatatgccac

SEQ ID NO: 7252 - DNA, 366 bp, Bos taurus
  Clone ID: 31-LIB34-011-Q1-E1-H3
aaggaagttctgtacaaccatcagggccacttcgaccccgccactggtgtgttcaactgcagcgtccctggtgtgtaccactttggctttgacattgagttgtttcagagtgctgtcaaggtgggtctaatgcggaatggcatccagatccgggacaagcgagcagaagctggggatagccacgagcaggcttctggaagttccgtcttggagctggagaaaggggacagggtctggctggagtctaagctggacagagaagaatctgaaaaaggaactactcacgctgtgttttatgggtttttgctcaatggaaattaagacagctaggggtaactgcatgattctctccctcaagttactctg

SEQ ID NO: 7253 - DNA, 389 bp, Bos taurus
  Clone ID: 31-LIB34-012-Q1-E1-H3
accccacaaaactttggcacaatgaagtgggtgacttttatttctcttctccttctcttcagctctgcttattccaggggtgtgtttcgtcgagatacacacaagagtgagattgctcatcggtttaaagatttgggagaagaacattttaaaggcctggtactgattgccttttctcagtatctccagcagtgtccatttgatgagcatgtaaaattagtgaacgaactaactgagtttgcaaaaacatgtgttgctgatgagtcccatgccggctgtgaaaagtcacttcacactctctttggagatgaattgtgtaaagttgcatcccttcgtgaaacctatggtgacatggctgactgctgtgagaaacaagagcctgaaagaaa

SEQ ID NO: 7254 - DNA, 435 bp, Bos taurus
  unsure (377),(399): unsure at all n locations; Clone ID: 31-LIB34-013-Q1-E1-H11
ctttggcacaatgaagtgggtgacttttatttctcttctccttctcttcagctctgcttattccaggggtgtgtttcgtcgagatacacacaagagtgagattgctcatcggtttaaagatttgggagaagaacattttaaaggcctggtactgattgccttttctcagtatctccagcagtgtccatttgatgagcatgtaaaattagtgaacgaactaactgagtttgcaaaaacatgtgttgctgatgagtcccatgccggctgtgaaaagtcacttcacactctctttggagatgaattgtgtaaagttgcatcccttcgtgaaacctatggtgacatggctgactgctgtgagaaacaagagcctgaaaganatgaatgcttcctgagccacanagatgatagcccagacctccctaaatttgaaacaga

SEQ ID NO: 7255 - DNA, 362 bp, Bos taurus
  Clone ID: 31-LIB34-013-Q1-E1-H3
aacatcctttcccagctgggtatcaagaaaatcttcaccagcgatgcggacttctcaggaatcacagatgaccacaagctggcagtttcccacgtgatccacaaggctgtgctcgacgtgggcgatgagggcacggaaggagctgctgtcacggctgtcgtaatggctacctcatcactcttgcacacgctaactgtcagtttcaacaggccctttctgctttccatattctgcaaagagactcagagcatcatctttttgggcaaagtcaccaaccccaaggaagcctagagctcccctcctccctaaggagctgggtgcccaggtccctggaagcagcctggacccctctgctcatccct

SEQ ID NO: 7256 - DNA, 439 bp, Bos taurus
  Clone ID: 31-LIB34-014-Q1-E1-H3
ggtccacgcacgcgtccgagcaaaaactatcaggaagcaaaagatgccttcctgggctcgtttttgtatgaatattcaagaaggcatcctgaatatgctgtctcagtgctattgagacttgccaaggaatatgaagccacactggaggaatgctgtgccaaagatgatccacatgcatgctattccacagtgtttgacaaacttaagcatcttgtggatgagcctcagaatttaatcaaacaaaactgtgaccaattcgaaaaacttggagagtatggattccaaaatgcgctcatagttcgttacaccaggaaagtaccccaagtgtcaactccaactctcgtggaggtttcaagaagcctatgaaaagtgggtactaggtgttgtacaaagccggaatcagaaagaatgccctgtactgaagactatctgagcttga

SEQ ID NO: 7257 - DNA, 376 bp, Bos taurus
  Clone ID: 31-LIB34-015-Q1-E1-H11
gcccgagagcagggttcggtgccttttcctctgtccccaaccggtgcccggagcccccctccccttcctccccaccccctcccctccccggccctgccctcgcccttgtcccgggatcgctccgtcggacccagcatgatggaagacgactggcagccccggactcgatacataggtaacctctccagagatgtgacacaagttcttagtcgtcaattagtcagtccgattggaccctgtaaaagctgtaaactgattacgaggcaatcctagagcacgagggtcaactcgtcggttgggttttcggttttgcagcatacaagcaatgagccagatggcgttgtggaactgtataaccacagagatgcaactggag

SEQ ID NO: 7258 - DNA, 390 bp, Bos taurus
  Clone ID: 31-LIB34-015-Q1-E1-H3
accagatccacccgttggcctcaactggactctactgaacatcagtttgacagagattcatgccgacatcctagtgaaatgggaaccaccacccaatacagatgttaagatgggatggataatcctggagtatgaactgcactataaagaactaaatgagacccagtggaaaatgatggaccctttaatggtaacatcagttccgatgtactcgttgagactggataaagagtatgaagtgcgtgtgagaaccagacaacgaaacactgaaaaatatggcaagttcagtgaggtgctcctgataacatttcctcagatgaacccatctgcatgtgaagaagatttccagtttccatggttcttaattattatctttggaatacttgggct

SEQ ID NO: 7259 - DNA, 385 bp, Bos taurus
  Clone ID: 31-LIB34-017-Q1-E1-H3
cgcgtccgccccgctagcacaggcctctcgccttcgccgctccgccttcgccgccggtcgacaccgcaaccagttcgccatggatgatgatattgctgcgctcgtggtcgacaacggctccggcatgtgcaaggccggcttcgcgggcgacgatgctccccgggccgtcttcccgtccatcgtggggcgcccccggcaccatggcgtactggtgggcatgggccagaaagactcgtacgtgggggatgaggctcagagcaagagatgcatcctgaccctcaagtacgccattgagcaccggatcgtcaccaactgggacgacatggagaagatctggcaccacacctttctacaacgagctccgtgtggcccctgaggagcaccc

SEQ ID NO: 7260 - DNA, 398 bp, Bos taurus
  Clone ID: 31-LIB34-018-Q1-E1-H11
gaagcaagcaggacgcgatggacggccgagtgcagctgatcaaggccctcctggccctgcccattcggccccagacgcgtcggtggaggaacccgatccccttccccgagacgtttgacggcgacaccgaccggctcccggagtttatcgtgcagacgggcgcctacatgctagtggacgagaacctgttcaccaacgatgccctgaaggtgacgttcctcatcacccgcatgaccgggccagccctgcagtgggtgatcccctacatcaggaagcagagccccctcctcaacgattaccggggcttcctggccgagatgaagcgggtgtttggatgggtggaagacgaggacttctaggccgggaacgcctcgggtctgggggcgggttctcggggg

SEQ ID NO: 7261 - DNA, 428 bp, Bos taurus
  Clone ID: 31-LIB34-018-Q1-E1-H3
ttccaggccgacccacgcgtccggtgagagtgccctgctggcctggtcctgggtgccggcgtggtgaggaacccagcgctcgaagaggcagccatggggctgctgtctggggacacgctggggcccctggccgtggccctgctcatcttcttgctcttgctggacctgatgcaccggcgctcacgttgggccccacgatacccaccaggccccatgccgctgccggtgctgggcaatctgctgcaggtggacttcgaggacccacgtcccagctttaaccagttgcggcgccgtttcgggaacgtgttcagcctgcagcaggtctggacaccggtagtcgtgctcaacgggctggcggctgtgcgcgaggcgctggtgtaccgcagtcaggacactgccgaccgtccacctcaggcactctacaagca

SEQ ID NO: 7262 - DNA, 96 bp, Bos taurus
  Clone ID: 31-LIB34-019-Q1-E1-H4
caaagacacccagagcatcatctttttggggaaagtcaccaaccccagtgaagcctagagctccgctctgagctgtgggtcacctctctaaagagc

SEQ ID NO: 7263 - DNA, 427 bp, Bos taurus
  Clone ID: 31-LIB34-020-Q1-E2-H3
taggattccatgatgcaacatcaccaatcatagaagaactacttcactttcatgaccacacgctaataattgtcttcgtaattagctcattagtactttacattatttcactaatactaacgacaaagctgacccatacaagcacgatagatgcacaagaagtacagacaatctgaaccattctgcccgccatcatcttaattctaagtgctcttccttctttacgaattctatacataatagatgagatcaataacccatctcttacagtaaagatcataggacatcagtgatactgaagctatgagtatacagattatgaggacttaagcttcgactcctacataattccaacatcagaattaaagccaggggagctacgactattagaagtcgataatcgagttgtactaccaatagaagtaac

SEQ ID NO: 7264 - DNA, 365 bp, Bos taurus
  Clone ID: 31-LIB34-021-Q1-E1-H3
cataagttgaacaaaggtgcattgtatcatgaatgtttgctatttcctggagcctgctatttccctcccgaacctctttagtgactaccttcagtcggctatacggccttaccttgggcaggattacccccaagttgtggcaaaaaggaaaggtgccttcctaataataagtggggttaaattaattttaaataccaagggtccctaactttacataatttcaacattttcccctaacacattcttgggaaaaaaaatcacacaataaacttttatagaaaagagaatagaacctctcaaaaaaaaaagattatataacccaaagaaaagaagaccataacaccccgagggtgtcaccaaacccc

SEQ ID NO: 7265 - DNA, 358 bp, Bos taurus
  Clone ID: 31-LIB34-022-Q1-E1-H3
ggaacatccagcacggacttgcataagaaggcctttgtgtttcccaaagagacggagaattcctacgtatccctgaaaacacagttaaggacaccactcaaagccttcaccgtgtgtctctatttctacacagagctggcccgaacccacagctacagtattttctcttatgccaccaagcagcaacctaacgagatcctcatattttggtctaagggtaaaggctatatttttggagtgcatgggaagcaggtgttattccagagtcccgaaaacactcaagctccaacgcacatctgtgccagctgggagtccacctccggaattgcagagctctgggtgaatgggaaaccccgga

SEQ ID NO: 7266 - DNA, 437 bp, Bos taurus
  Clone ID: 31-LIB34-023-Q1-E1-H3
gggtcgacgcacgcctctgggatcaatcgtacaaatcccgctctcgcaggcagacatgagggcagagagaacttccttcctcctggccctggggctcctggtggctgggatccgcagtgtccactgcctcgcagagaatgtggtggtgaaggaccagcacagaagggtggatggccacacgttagcctccagcaacaccgacttcgccttcagcctctacaagcagttggctttgaagaaccccaataagaatgtcatcttatccccgctgagtgtctccatagccttggccttcctgtctctgggggcccgtggctccaccctgacagagatcctggaaggtctcaagttcaacctcacagagatccaggagaaagaaatacaccatagctttcagcacctcctgcaggcgctcaatcaacccagcaaccagctgc

SEQ ID NO: 7267 - DNA, 427 bp, Bos taurus
  Clone ID: 31-LIB34-024-Q1-E1-H3
gagcaagacctgaaactgcaatccctgtttgatgcaccagactttagcaagatcacaggcaaacctatcaaacttactcaagtggaacatcgcgtcggatttgagtggaatgaggatggggcgggtactaactccagcccaggggtccagcctgcccgcctcaccttccctctggactatcaccttaaccaacctttcatctttgtactgagggacacagacacaggggcccttctcttcataggcaaaattctggaccccaggggcacttagtactccaactaaatgttcaaataccccagaagaaaaaaacactagagggatggcagattatatattatacgaaggctgcccctacatttcaatgtatactttgcaataaaagtgccttatccttaaaaaaaaagaaaaaaaaagggcggccgct

SEQ ID NO: 7268 - DNA, 405 bp, Bos taurus
  unsure (319): unsure at all n locations; Clone ID: 31-LIB34-025-Q1-E1-H11
ccaagaaataatttaacagtcatgtgagtagcttgtctgaaggtatgatggaagggaccactgattttcttaggaaagtatgatttcagagttgtcagtatgattattagtgatttatcagtataaggtgtggtctcacggcctttattatgatggtttaactcaatgttttcccttcagagtggtttcctgtctgcccttcctttcattattgcctgggtcatttgcctcctgggaagttacctggcagatttccttctgaccaagaattttaggcttgttacagtgaggaaaattgccacagttctaggaaatctcncctcctcaacattccttttggttctgccatacgttgcctccaactatatcatagcagtgagccttctgacgctgtcctgtggacta

SEQ ID NO: 7269 - DNA, 418 bp, Bos taurus
  Clone ID: 31-LIB34-025-Q1-E1-H3
ccgaacgctgccgctcgcctgcccgccgccatggccctgctccgagagttcttcagatgctatatacttggcaagacatgttggtttgcgtgtgggaatcccaaaagagaccccagctatcactattaacaggctctgtggctccggtttccagtccattgtgagtggatgtcaggaaatttgttctagagactctgaagttgtcctgtgtggaggaactgaaagcatgagccatgctccctactgtgtcagaaatattcgttttggaactaagcttggatcagagctcaagctggaagacactctgtggacaggattaacagatacgcatgtccaaatgccgatggcaattactgcagagaatcttgctgtaaaacatcaaataagcagagaagattgtgacagatacgccctgcaa

SEQ ID NO: 7270 - DNA, 398 bp, Bos taurus
  Clone ID: 31-LIB34-026-Q1-E1-H3
atacgaaattgctagaagacatccctacttttatgcaccagaactcctttactatgctaataaatataatggagtttttcaagaatgctgccaagctgaagataaaggtgcctgcctgctaccaaagattgaaactatgagagaaaaagtactgacttcatctgccagacagagactcaggtgtgccagtattcaaaaatttggagaaagagctttaaaagcatggtcagtagctcgcctgagccagaaatttcccaaggctgagtttgtagaagttaccaagctagtgacagatctcacaaaagtccacaaggaatgctgccatggtgacctacttgaatgcgcagatgacagggcagatcttgccaagtacatatgtgataatcaagatacaatct

SEQ ID NO: 7271 - DNA, 369 bp, Bos taurus
  unsure (162),(169),(197),(250): unsure at all n locations; Clone ID: 31-LIB34-027-Q1-E1-H3
cctgaaggcaggagcctttaacttctatctgaaaggtttattccagaaatgagtgtacatttatataaatagatgctgtgtatatgatatacacatacatatatatataaatatctatatgggagaaggcaagccggtacaactgaggctcgggaccctganggtgcangggcagggggcggggccccttagcctgnggaggcccaagggactgctgttgagacaaacgcagaaaccacggggtaaggangggtttttctgtccttggccccgaatatttgtaaagttatttatcgacccccagagccatgtcctgtcgctccccaaggccctagtgtttggccagccgcatggcagaagtttaactta

SEQ ID NO: 7272 - DNA, 384 bp, Bos taurus
  Clone ID: 31-LIB34-029-Q1-E1-H11
gcaggaagtattggcttaacagctttgtctgctgtggcagtgagcagaactcctgctctcatgaacttcatgatgagaggctcttggataaccattggtgcaacctttgcagccatgattggagctggaatgctggtacagtcaatatcatacgagcagagtccaggcccaaagcaccttgcttggttactacattctggtgtaatgggtgctgtggtggctcctctgacgatcctaggggggcctcttctcctcagagctgcgtggtacacggctggcatcgtgggaggtctctccaccgtggccatgtgtgcgcccagtgagaagtttctgaacatgggggcccccctgagtgtgggcctcggtgtcgtctttgtgtcctca

SEQ ID NO: 7273 - DNA, 367 bp, Bos taurus
  Clone ID: 31-LIB34-029-Q1-E1-H3
cactgagcatactccggtctcgcacgtagtcatgcgggcagtgagaatgtcacgactcttgactctggagatgctcgtggatgggctctgctccagggtctactgccgcacagatcatgtgaagtcagtagaagagcacaatgtgacatctgtggatgggtactcattagcctcgagcaacatatgacatcgccttcatcctcgacaagcaattggctttgaaagaacccaataggatcgtcaacttctaccctctgaacatctccataaccttggtcatcgtgttcctgggggcacatgaccacaatgtgatacatatcctgagacgtttcaacttcaaggtcactcagatccccgagagtgaagt

SEQ ID NO: 7274 - DNA, 391 bp, Bos taurus
  Clone ID: 31-LIB34-031-Q1-E1-H11
ataaagatattggtaccctttaactactatttggtgcttgggccggtataatatgaacagctcgaagccttctaattcgcgctgaattaggccaacccggaactctgctcggggacgatcaaatctacagcgtaattgtaaccgcacacgcatttgtaataatcttcttcatagtaataccaatcataattggaggattcggtaactgacttgttcccctaataattggtgctcccgatatatcatttcaccgaatacataacataagcttctgacgcctccctccctcattcgtagtactcctcgcatcctctaaagttgaagctggggcaggaatatgctgtaccgtgtaaccacccctaccatgtcaactatcccatgcaagagcttc

SEQ ID NO: 7275 - DNA, 408 bp, Bos taurus
  Clone ID: 31-LIB34-032-Q1-E1-H3
ctgcactccaaactaattgtgtctcagagccccagagagggttgggagaacctaaaggagatgatgaaacatgccagtgacaaccacacctgtgtgaagacaaaacacaatgagatgatggccattttctttaccagtggaacaagtggatatcctaaaatgactggacacacccacagcagttttggtttgggattatctataaatggaaggttctggctggatttgacccctttggatgtcatgtggaatacctctgacacaggctgggcaaaatctgcatggagttaggttttttctccgtggatccagggagcatgtttatttgcacattatttgccgcgggttgagccaacttccatcttggcaacacgttccaagtttcccatcacagtcgtctgttcagca

SEQ ID NO: 7276 - DNA, 455 bp, Bos taurus
  Clone ID: 31-LIB34-035-Q1-E1-H3
ctcgcgggacgacgcaagcgtctagagaaactcatacatactgggcctgggtttcctgaaatcatcacacctgcagcagaaggaaaatgactgagttgaagtacatttctggattcgggaatgagtgtgcctcagaggaccctcgttgcccaggtgccctgccagaaggacagaataatcctcaagtttgcccctacaatctgtatgctgagcagctctcaggatcagctttcacttgtccacggagcaccaataaaagaagctggctgtataggattctaccttcagtttctcacaagccttttgagttcattgaccaaggccacatcactcacaactgggatgaagttgatcctgatcctaaccagctgcgatggaaaccatttgagattccaaaagcttctcagaagaaagtggacttcgtgaatggcctgcacaacttgtgtggaactgga

SEQ ID NO: 7277 - DNA, 417 bp, Bos taurus
  Clone ID: 31-LIB34-036-Q1-E1-H3
aaagtggtccagcttgaagcaaactgtcaagagccttgtcaagatacagtgaaaatacatgatgtaactgggagagattgccaagatgttgccaataagggggccaaagagagtggactttactttatcagacctctgaaagctaagcagcagttcttagtctactgtgaaattgatgggtctggaaatggatggactgtgtttcagaagaggcttgatggcagtctggatttcaagaaaaactggattcaatataaagaagggtttggacatctgtctcctactggaaacacagaattttggctgggaaatgagaagattcatttgataagcacacagtctaccatcccttatgtattaagaatacagttggaggactggaatggcagaaccagcactgcagattatgcttcattc

SEQ ID NO: 7278 - DNA, 428 bp, Bos taurus
  Clone ID: 31-LIB34-037-Q1-E1-H3
gatcactctaattactgtaatatttggtagcaaacaatctaggtacccttgctaaggttccagttaatagtttactccatcttcagtttgaatgtttgtgttaagtgaaggcggtactagaggggaaacttaaccaaaatcaggtagggaaataagagcaaaactgggggtggggagtttctttcctggattatggtgtttgtaaaaatttagggaagtagttttgtgagaataccagtgactatcctgtccattttcccattgaatttcgttttgagaattttaaaccctcaatacttacgacacggaatttttctgggttctctcttgaatgtttacaagtatgttgatccgatcttaacctgtaacttgggcatgtgatacagttactgtcatgaatttagagtattagtcatgcgtctgtgggg

SEQ ID NO: 7279 - DNA, 411 bp, Bos taurus
  Clone ID: 31-LIB34-038-Q1-E1-H3
cacctccagctgcctgcctgctgacacaccggggcctctctgaagccaccatgaaatccttcgttctgctcttttgcctggctcagctctggggctgccactcgatcccgcttgacccggttgcaggttataaggaaccggcctgtgatgacccacacacatagcaagcagccttggctgccgtggactacatcaacaagcaccttcctcggggctacaagcacaccttgaaccagattgacagtgtgaaggtgtggccgaggcggcccacgggagaggtgtatgacattgaaatagataccctggaaaccacctgccacgtactggaccccacgcccctggcgaactgcagcgtgaggcagcagacgcagcacgcggtggaaggagactgcgatatccacgtgctgaaac

SEQ ID NO: 7280 - DNA, 402 bp, Bos taurus
  Clone ID: 31-LIB34-039-Q1-E1-H11
agcgcactcctcgtccatcctcatccgtgttaggtgcagtccgggacaccaggaagatggcaccggctgggggcaaaaatgtcaagaagggcatcctagaacggctaaactctggagaggtcatcatcggagacggagggtttgtctttgcgctggagaagaggggctacgtgaaggcagggccctggaccccagaagctgctgtggaacacccagaagcagttcgccaacttcatcgagagttcctcagagctggctcgaatgtcatgcagaccttcaccttctatgccagtgaagacaagctggagaacagggggaactatgttgcagagaaaatatccgggcagaaagtcaatgaaaccgcttgtgacattgcccggcaagtggctgatgaaggagatg

SEQ ID NO: 7281 - DNA, 432 bp, Bos taurus
  Clone ID: 31-LIB34-039-Q1-E1-H3
cccactaataaaaattgtaaacaatgcattcatcgaccttccagccccatcaaacatttcatcatgatgaaatttcggttccctcctgggaatctgcctaatcctacaaatcctcacaggcctattcctagcaatacactacacatccgacacaacaacagcattctcctctgttacccatatctgccgagacgtgaactacggctgaatcatccgatacatacacgcaaacggagcttcaatgttttttatctgcttatatatgcacgtaggacgaggcttatattacgggtcttacacttttctagaaacatgaaatattggagtaatccttctgctcacagttatagccacagcatttataagatacgtcctaccatgaggacaaatatcattctgaggagcaacagttcatcacaaactcttatcagc

SEQ ID NO: 7282 - DNA, 417 bp, Bos taurus
  Clone ID: 31-LIB34-040-Q1-E1-H11
gccgccgggttgagaggagcgtggccttctcctctccccgccatggcgtgtgctcgtccactgatatcagtgtactccgaaaagggggagtcctctggcaaaaatgtcactttgcctgctgtgttcaaggctcccattctacccgatattgttaactttgttcacaccaacttgcgcaaaaacaacagacagccctatgctgtcagtgaattagcaagtcatcaaaccagtgctgagtcttggggtaccggcagagctgtggctcgaattcccagggttcgacgtggcgggactcaccgttccggtcagggcgcttttgggaacatgtgtcgtgggggccgcatgtttgcgccaactaagacctggcgacgttggcaccgcagagtgaatacgacgcagaagccatacgccatctgc

SEQ ID NO: 7283 - DNA, 429 bp, Bos taurus
  Clone ID: 31-LIB34-040-Q1-E1-H3
cgattagtgcgtattttgagttggaagctcagcctgatcagagaatggagtaacgctagcaattatcctgttatcagtactcctaataagtgggtcctttaccctctccacattaattactacacaagaacaaatatggttaatcctcccagcatggcctctagcaataatatgatttatcttaacactagcagaaacaaaccgagctccatttgatttaactgaaggagaatcagagctagtctcgggcttcaacgtagaatatgcagcaggaccatttgccctcttcttcatagcagagtacgcaaatattatcataataaatatctttacagcaattttattcctaggaacatcccacaatccacacataccagaactctacacaatcaattttaccattaaatccctactgctcacaatatcctt

SEQ ID NO: 7284 - DNA, 253 bp, Bos taurus
  Clone ID: 31-LIB34-041-Q1-E1-H11
acggacatgaatgtcgatgactctgtcaccaagagcaggtttgaaagcctcaatggctgccgcgagtccctcatacatggcatccgccgggccacaggtgtcatgagtgccggcactgtggcggtggctgcaagctatgagcacgtgggcatcggctgtgcccatgccctgcagggatctgaggcccatgtcatcatcacggacattgaccccatcaacgcacttcaagctgccatggccggctatgaggtga

SEQ ID NO: 7285 - DNA, 409 bp, Bos taurus
  Clone ID: 31-LIB34-041-Q1-E1-H3
cccacgcgtccgtactgattgccttttctcagtatctccagcagtgtccatttgatgagcatgtaaaattagtgaacgaactaactgagtttgcaaaaacatgtgttgctgatgagtcccatgccggctgtgaaaagtcacttcacactctctttggagatgaattgtgtaaagttgcatcccttcgtgaaacctatggtgacatggctgactgctgtgagaaacaagagcctgaaagaaatgaatgcttcctgagccacaaagatgatagcccagacctccctaaattgaaaccagaccccagtactttgtgtgatgagtttaaggcagatgaaaagaagttttggggaaaatacctatacgaaattgctagaagacatccctacttttatgcaccagaactccttta

SEQ ID NO: 7286 - DNA, 349 bp, Bos taurus
  Clone ID: 31-LIB34-043-Q1-E1-H11
agccccatgtgcatgatggacaatcagggtggggctccaaattactaccccaatagctttagtgctcccgagcatcagccttctgccctggaacacaggacccacttctctggggatgtacagcgcttcaacagtgccaacgatgacaatgtcactcaggtgcgggctttctatttgaaagtgctgaatgaagagcagaggaaacgcctgtgtgagaacattgcgggccatctgaaagacgcacagctttttatccacaataaagcggttaagaacttcagcgatgtccatcctgaatatggctcccgcatccaggctcttttggacaaatacaatgaggagaaaccta

SEQ ID NO: 7287 - DNA, 399 bp, Bos taurus
  Clone ID: 31-LIB34-045-Q1-E1-H3
gattcctcaattttaggagccatcaacttcattacaacaattatcaacataaagccccccgcaatgtcacaataccaaacccctctgttcgtatgatccgtaataattaccgccgtactactactactctcgctccctgtattagcagccggcatcacaatgctattaacagaccggaacctaaatacaaccttcttcgacccggcaggaggaggagaccctattctatatcaacacttattctgattctttggacaccccgaagtctatattttaatcttacctgagtttggaataatctctcatatcgtgacctactactcaggaaataaagaaccattcggatatatgggaatactttgggctataatgtcaatccgggtttctaggtttcatcgt

SEQ ID NO: 7288 - DNA, 413 bp, Bos taurus
  Clone ID: 31-LIB34-046-Q1-E1-H3
gaaggaagtggtccagcaagatttcggagagaaacgttcggggggaaggaacagcgagacacttgcagaattacagacgggaatcagagcccaaattgacgccaattgatctatctcccctctttaattactcctggggcagctctccgtgggtcagctccatccgacccgggggcccttccgacctccgcgcccagctcgtgggcctccatcttgtctcttccccgagtcccccagctgtcttcagcgggaccccctctccggtctctgagtcagcacgcgaggatccccacgcgcagtacaccaggtcatcgtggtcaccgtcaaccgcggatccggcgtcaacctggcctccgccatttatcgccctgtttttaattttttttttagctgtccctgtcgcttgggttgag

SEQ ID NO: 7289 - DNA, 423 bp, Bos taurus
  unsure (292): unsure at all n locations; Clone ID: 31-LIB34-047-Q1-E1-H11
cagcagtgtccatttgatgagcatgtaaaattagtgaacgaactaactgagtttgcaaaaacatgtgttgctgatgagtcccatgccggctgtgaaaagtcacttcacactctctttggagatgaattgtgtaaagttgcatcccttcgtgaaacctatggtgacatggctgactgctgtgagaaacaagagcctgaaagaaatgaatgcttcctgagccacaaagatgatagcccagacctccctaaattgaaaccagaccccaatactttgtgtgatgagtttaaggcanatgaaaagaagttttggggaaaatacctatacgaaattgctagaagacatccctacttttatgcaccagaactcctttactatgctaataaatataatggagtttttcaagaatgctgccaagctgaagat

SEQ ID NO: 7290 - DNA, 348 bp, Bos taurus
  Clone ID: 31-LIB34-047-Q1-E1-H3
catagagaatctcagcatgagtaccaccgggaaagttatcaggtgcaaagcagccatactctggaagcctgatggatcattttccattgatgaagtcgacatggctccaccaaaggcagacgacattcgcataaagatggtggccacggcgctctgtgggactgagatggacatgttgaaggataaatcatcttcatcaccaacactaccctatcattatgggccatgaacgacctggaatagcccagagtgtgggataacgagtcagcacagtgaaagcacgagagaaacttatcgcactctttctaccacagtgtggtgaatgcacctcatgccttaaatctgcac

SEQ ID NO: 7291 - DNA, 382 bp, Bos taurus
  unsure (329),(370): unsure at all n locations; Clone ID: 31-LIB34-048-Q1-E1-H3
gagagaaaaagtactgacttcatctgccagacagagactcaggtgtgccagtattcaaaaatttggagaaagagctttaaaagcatggtcagtagctcgcctgagccagaaatttcccaaggctgagtttgtagaagttaccaagctagtgacagatctcacaaaagtccacaaggaatgctgccatggtgacctacttgaatgcgcagatgacagggcagatcttgccaagtacatatgtgataatcaagatacaatctccagtaaactgaaggaatgctgtgataagcctttgttggaaaaatcccactgcattgctgaggtagaanaagatggcatacctgaaaacctgcccccattaactgctgancttgctgaagat

SEQ ID NO: 7292 - DNA, 424 bp, Bos taurus
  unsure (402): unsure at all n locations; Clone ID: 31-LIB34-049-Q1-E1-H3
gccggtgctacgcgggtctccccgctgttaccgaggagcgacggccgagcagactatctcggcctgaggcggcggggagaagcagacgggcagtttgctgcgacaccatggagggcggcgggggtagtggcaacaaaaccactggggggttggccggctttttcggagccggcggagcaggctactcgcacgcggatttggctggagtcccgctaactggtatgaaccctctgtctccttatttaaatgtggatccacggtatctcgtacaggatacagatgagtttattttaccaactggagctaataaaacccggggcagatttgaactggccttctttaccattggaggatgttgtatgacaggggctgcatttggggcaatgaatggtctacggctangattgaaggaaacccagaacat

SEQ ID NO: 7293 - DNA, 413 bp, Bos taurus
  Clone ID: 31-LIB34-050-Q1-E1-H11
cgcctgccttgtacggtcccgagattcccggtatccacccacgcccccggaagagcgcaaattactgctcagctccctagaggaagccaagaagaagaaagaggacgccctgaatgacaccagggattctgaaaacaagctgaaggcgtcccagggggtgtgctatgagaccatgacagccctttgggaggaatgtaagccctgcctcaagcagacctgcatgaagttctacgcgcgggtgtacagaagcggatcgggactggttggccaccagcttgaggagttcctaaaccagagctcccccttctacttctggatcaacggtgaccgcatcgattccctgatggagaatgaccgggaacagaaccacgtgatggacgtcatggacgacagcttcacccgggcgtccagca

SEQ ID NO: 7294 - DNA, 232 bp, Bos taurus
  Clone ID: 31-LIB34-051-Q1-E1-H3
atggacatggacatgagccccttgaggccccagaactatcttttcggttgtgaactaaaggctgacagagattatcacttcaaggtggataatgatgaaaatgagcaccagttatctttaagaacggtcagtttaggggctggagcaaaggatgagttacatgttgttgaagcagaggcgatgaattatgaaggcagtccaattaaagtaacactggcaactttgaaaatgt

SEQ ID NO: 7295 - DNA, 346 bp, Bos taurus
  Clone ID: 31-LIB34-055-Q1-E1-H11
atcagctcgacatctcgagcgaccgccctttattctcttattcacacctaagacactttagttacacgttgcaatggatgttgacgcggtgcggggtacatccgactacgtggactacactgccttgcctttgtaccacagcatcgtgcttgtcctctggagtcctcagttgcctggaccttggggtgacctgtgtcctggaccccaacttctctgcctcaggcttctgggatggctgtcagcagcacggtatgactgtgatccagtccttgggccacatcctgcggtacctgtgcaacacacgacatcggccacaggaccggacacataaagtccgcctggcgat

SEQ ID NO: 7296 - DNA, 111 bp, Bos taurus
  Clone ID: 31-LIB34-055-Q1-E1-H3
agctagttctagatcgcgagcggccgccctttttttttttttttttttttttttttttttttttttttttttttttttttttttttttttttttttttttgtgtatttttt

SEQ ID NO: 7297 - DNA, 378 bp, Bos taurus
  Clone ID: 31-LIB34-056-Q1-E1-H3
agcgatgagactgtggcgctcaccgccttcgtggtcatcgcccttcaccacgggctggcggtcctcccagacaagaattctgagcagttgaggagagtggaaaattccatctcaagagcaaacaccttcttgggggcgaaagcaacctctgggctcctgggctcccacgcctccgccatcacggcctacgccctgtcgctgaccgaggcccccgaggacctgcggagagttgcccacaacaacctcatggccatggccaaggacatcggtgataagctgtactggggctcagtcaccacttctccaagcaacgtcctgtcacccactccggctccacgtagcccagcagaccccattccccaggctccagccatgtcg

SEQ ID NO: 7298 - DNA, 226 bp, Bos taurus
  Clone ID: 31-LIB34-057-Q1-E1-H11
aacaattatcaacataaagccccccgcaatgtcacaataccaaacccctctgttcgtatgatccgtaataattaccgccgtactactactactctcgctccctgtattagcagccggcatcacaatgctattaacagaccggaacctaaatacaaccttcttcgacccggcaggaggaggagaccctattctatatcaacacttattctgattctttggacacccc

SEQ ID NO: 7299 - DNA, 223 bp, Bos taurus
  Clone ID: 31-LIB34-057-Q1-E1-H3
aatttggtaaaatttccagtgtccctaaataactatcaataggaaaatgacaaccttaccgagctatcgtctatatctgtacccacaccattttcaaagctacattagccatgagcaccggttccattcatcacaaccaaaacgaagatttggatatacgggaaatttgcggactatctacagctatgccattcacctgaatagccctcattgtcggcagtct

SEQ ID NO: 7300 - DNA, 317 bp, Bos taurus
  Clone ID: 31-LIB34-060-Q1-E1-H11
ctttaggcaagttcttccaatgggaaaaatggcgaagatgtttagtttcatccttgtcaccactgctctggtaatgggcaggggaagctcggctctggagaactgcctccaggagcaggcgcggctcagagcccaagtgtacctgctggagacccgggtcaagcagcaacaagtcaagatctcgcagcttttgcatgagaaacaagtccagctccttgataaaggagaggagaatagtgtcattgaccttggaggaaagaggcaatacgcagattgttcagagattttcaatgacgggtacaagcagagtggatttt

SEQ ID NO: 7301 - DNA, 238 bp, Bos taurus
  Clone ID: 31-LIB34-060-Q1-E1-H3
gtcggttacaccaagagttatctctctatggtagggtcctgctgtacttcaccaaacccaacagtatgctttttgaaagagagacttcagcttaaacatttttcacttctcaccattatgacaaacagaatctgctcacaatacgctgcttatgggaaggagaagtcaaggctcagccatctcatcaaatttgcccaggatgtgcctactgcacatctggaagatgttctgccacttg

SEQ ID NO: 7302 - DNA, 398 bp, Bos taurus
  Clone ID: 31-LIB34-061-Q1-E1-H11
ctgagaaggcagagcaactggacctcgcctaagctgtgtctctgactcatttctgactttaggcaagttcttccaatgggaaaaatggcgaagatgtttagtttcatccttgtcaccactgctctggtaatgggcacgggaagctcggctctggagaactgcctccagaagcaggcgcggctcatagcccaagtgtacctgctggagacccgggtcaagcagcaacaagtcaagatctcgcaacttttgcatgagaaacaagtccagctccttgataaaggagaggagaatagtgtcattgaccttggaggaaagaggcaatacgcagattgttcagagattttcaatgacgggtacaatcacagtggattttataaaatcaaacctctccagagccc

SEQ ID NO: 7303 - DNA, 350 bp, Bos taurus
  Clone ID: 31-LIB34-061-Q1-E1-H3
agttagctgtgctacagacgtatggggacactacacacatcctggtggacaagatgaactatactggccggttcctgcctggattcgaggcaccaccattcatggagccccaactttcgaagctgcccagctgcagtctcgagataatcgatcacattgtgggaaaccagcctgatcaagagatggtgtctgcctctgaatggtacctgaagaacttgcagttccaccgtttctggtccgtggatgacacgcaggtgcacacggagtacagctctctgcggtcagtcgtggaggccaattatgaggaatccatcatgatgcccattactgagccaacatcgggcaagaag

SEQ ID NO: 7304 - DNA, 210 bp, Bos taurus
  Clone ID: 31-LIB34-062-Q1-E1-H11
attgctgactgtttgcccaaaaggagtgaaaacccatgttcacaaaaaaacctgtacacaaatgcttatagcatctctattcgtaatggccaaaatctagaagcaactcagatgtctttcatcaagagaatggataaacgggtcatctacccaatgaaattctacccagcataaaaaggaataaccactaatacacacagaaacttgggt

SEQ ID NO: 7305 - DNA, 195 bp, Bos taurus
  Clone ID: 31-LIB34-064-Q1-E1-H11
tcttattaaagatgaaaatgtcttacggcggactttccccaaatcaggaacgaactggttgattgaaactgtctgcctgatttaccccaagggggatcccaagtgggtccaatctgagcccatttgggaccgctccccctgggtagagactaagcatgggtatgaattactaacagggaaggaaggcccacgtct

SEQ ID NO: 7306 - DNA, 218 bp, Bos taurus
  Clone ID: 31-LIB34-065-Q1-E1-H3
ctcaaggaggcagagacccgtgctgagtttgctgagagatcggtagccaagctggaaaagacaattgatgatttggaagataaactgaaatgcaccaaagaggagcacctctgtacacaaaggatgctggaccagactctgcttgacctgaatgagatgtagagcaccccagccccgccctgccgctgctcctccctctcaccccgactccgctgggg

SEQ ID NO: 7307 - DNA, 202 bp, Bos taurus
  Clone ID: 31-LIB34-066-Q1-E1-H11
cctgagcaccctggccggccagccgctgctggagcgtgccgaggcctggcgccagaagctgcacgggcgcctggaggaggtgggcgtccgggcccaggaccgcctggataagatacgccagcagctagaggaggtgcacgccaaggtcgaggagcagggcaaccagatgcgcctgcaggccgaggcattccaggcccgcctc

SEQ ID NO: 7308 - DNA, 185 bp, Bos taurus
  Clone ID: 31-LIB34-068-Q1-E1-H11
gccagttacgattgccgcctgtcgcacagagactaccaacgaagtggcacaggctgaagatcgctctgactgcagttgactggacgtcgagttacaccatacttttcgttctaaggctagcctaaaccatttcattcatctagacaaagatcatttcttcacccagttgttcacactagctttga

SEQ ID NO: 7309 - DNA, 217 bp, Bos taurus
  Clone ID: 31-LIB34-069-Q1-E1-H3
tgcaaaactaattgaaaaactggacatcaagttggacagtgaagataaggacaaggagggcaaaccgcttctgaaggctgtgatgcgccgctggctgcctgctggggatgccctgctgcagatgatcaccatccacctgccttcccctgtgacggcccagaagtaccgctgtgagctcctgtacgaggggcccccagacgatgaggcagccatgggc

SEQ ID NO: 7310 - DNA, 234 bp, Bos taurus
  Clone ID: 31-LIB34-070-Q1-E1-H11
agaggaaatcatcatgaatggacgtgacacatctgaactgtacctcactcagcctgaggattctagcaacccatatagaatatactgtgatatgaaaacgggaaaaggaggatggacagtacttcataaccgtcaagatggtagtgttgactttggcacgaaatgggatccatagacacaacgatttggtaatattgcataccaatgcagaagggaagaaatactgtgtgtgta

SEQ ID NO: 7311 - DNA, 409 bp, Bos taurus
  Clone ID: 31-LIB34-071-Q1-E1-H3
ctttctttcagctgggtgctcctcttgagtcagccctatccacggcagagatgttttccgtgagggacctctgcctggtcctgagtttggtgggtgcaattaagacagaagatggtagtgatcctcccagtggtgactttttaactgaaggaggaggggtgcgtggcccaagacttgtggaaagacagcaatctgcctgcaaagagacaggctggcccttctgctctgatgaagactggaatacaaaatgcccttctggctgcaggatgaaagggttgattgatgaagtcgatcaagattttacaagcagaataaataaactaagagattcactatttaattatcagaagaacagtaaggactctaatacattgaccaagaacatagtggaactaatgagaggggattt

SEQ ID NO: 7312 - DNA, 403 bp, Bos taurus
  Clone ID: 31-LIB34-072-Q1-E1-H11
acttccagcacctcctgcagacgttcaatcagcccagcaaccagctgcagctgagcgtgggcaacgccatgtttgtgtcagaggagctgaagctgctggacaaattcaggaaagatgccgaggctttttacgcctctgaggttttatccactaacttcaaggattctgaagctgccgtaaagcttatcaatgaatatgtgaagaataaaactcatggaaaaattgagaagctcttcaatgatcttgacgtgctcacaaatttaatcttgttgaattatatcttctttaaagcccagtggaagacgccatttaatcctaaccatacttacgaatcagagttccacgtgagccagaacgagagggtgattgtacccatgatgaccctttacctggaaacccctta

SEQ ID NO: 7313 - DNA, 400 bp, Bos taurus
  Clone ID: 31-LIB34-075-Q1-E1-H11
agagagtcgtattatcgcctgagccagaaatttcccaaggctgattttgtagaagttaccaagctagtgacagatctcacaaaagtccacaaggaatgctgccatggtgacctacttgaatgcgcagatgacagggcagatcttgccaagtacatatgtgataatcaagatacaatctccagtaaactgaacgaatgctgtgataagcctttgttggaaaaatcccactgcattgctgaggtagaaaaagatgccatacctgaaaacctgcccccattaactgctgactttgctgaagataaggatgtttgcaaaaactatcaggaagcaaaagatgccttcctgggctcgtttttgtatgaatattcaagaaggcatcctgaatatgctgtctcagtgc

SEQ ID NO: 7314 - DNA, 401 bp, Bos taurus
  Clone ID: 31-LIB34-075-Q1-E1-H3
gggtgacttttatttctcttctccttctcttcagctctgcttattccaggggtgtgtttcgtcgagatacacacaagagtgagattgcgcatcggtttaaagatttgggagaagaacattttaaaggcctggtactgattgccttttctcactatctccagcagtgtccatttgatgagcatgtaaaattagtgaacgaactaactgagtttgcaaaaacatgtgttgctgatgagtcccatgccggctgtgaaaagtcacttcacactctccttggagatgaattgtgtaaagttgcatcccttcgtgaaacctatggtgacatgggctgactgctgtgagaaacaagagcctgaaagaaatgaatgcttcttgagccacaaagatgataacccagacct

SEQ ID NO: 7315 - DNA, 382 bp, Bos taurus
  Clone ID: 31-LIB34-079-Q1-E1-H3
gccaagatgcacgccaccggctacatccatgccaccttctacacccccgaggggctgcgccacgggacccgcctgcacacccacctcatcggcaacatgcacacccaccttgtgcattaccgcgtcgacctggatgtggcaggcaccaagaatagcttccagaccctgcagatgaagctggaaaacatcaccaacccctggagcccaggacaccgcctagtccatccagctctccagcagatgcggtattctcgggagcgccaggcagccttccgcttcggacagactctgcccaaatacctgctttttactagccctgaacagaacccctggggccaccagcgcagctaccgagtgcagatccactccatggctgaccaag

SEQ ID NO: 7316 - DNA, 424 bp, Bos taurus
  unsure (413): unsure at all n locations; Clone ID: 31-LIB34-080-Q1-E1-H11
aggcttcaggaagtggatcctgcagactcgagcttcaggatggttcatgcaaagagctggaccctgaagaaacattttgtaggttaccctactaacagtgactttgaactgaagacagttgaacttccacccttaaaagatggagaggtcctgctggaagctttgtacttgactgtggatccttacatgagaattatggcaaaaagcttgaaggagggtgacatgatgatgggagagcaagtggccagagttgtggaaagtaaaaattcagccttcccaacaggaactattgtgctggctccttctggctggacaacgcattccatttctaatggggaaaaactggaaaaggtgcttgcagagtggccagacacgttaccactgtctctggctctgggaacggttggcatgcncggcctaacac

SEQ ID NO: 7317 - DNA, 426 bp, Bos taurus
  unsure (408): unsure at all n locations; Clone ID: 31-LIB34-080-Q1-E1-H3
ggccaatggagctgggcacacagtgcctcagacagccccactgttcttctgaacactttctggtccaggaaaccaggctgtgtgtgtctgtcccataaaaggccatgtggctgtacctggtggtcctcgtgggcctgtactacctcctacgctggtaccgggagaggcaggtggtgagccacctccgggacaagttcgtcttcatcacaggctgtgactcgggcttcgggaacctgctggccaggcagctggacctgaaaggcttgagggtcctggctgcatgtctgacagagatgggggctgagcaactgaggaaccagacatcagacatgctgcagacggtgatcctggatgtcaccaagacagacagcgttgctgcggccaccgagtgggtgaaagagcgtgtgngggacatagggctctggg

SEQ ID NO: 7318 - DNA, 342 bp, Bos taurus
  unsure (169),(183): unsure at all n locations; Clone ID: 31-LIB34-081-Q1-E1-H11
tcccccttcggccttgggaacaaggccaaatacggcggccccccaatcctggtgctgaaagggtctgcggaccccaattgcaagaacaacggggtctggagtgggacggaggccatctgccgccagccctactcctacgactttcctgaagatgtggcccccgccctgngcacctccttctcncacttacttgcaaccaccaatcccatccagcagaagaagaaacaaaacttgggccgcaaaatacaaatccagcgttccggtcacctgaacctctacctgctcctggacgcctctcagagtgtgtccaaagatgattttgaaatcttcaaggacagcgcc

SEQ ID NO: 7319 - DNA, 312 bp, Bos taurus
  Clone ID: 31-LIB34-084-Q1-E1-H3
acatgaacctgtgggagtgtgtgggcagatcatcccatggaacttcccgctcctgatgcaagcctggaaactgggcccagccttggcgacgggaaacgtggttgtgatgaaggtggctgagcagactccactcactgccctctatgtggccaacctgattaaggaggctggctttcctccgggtgtggtcaatgttattcctggatttggccccacggcgggagctgccatcgcctcccatgaggacgtggacaaagtggctttcaccggctccactgaggttggccacctaaatccagtttgcctgcgggg

SEQ ID NO: 7320 - DNA, 431 bp, Bos taurus
  unsure (291): unsure at all n locations; Clone ID: 31-LIB34-085-Q1-E1-H3
attccaaggccgacccaggcgtcaaggcctctcaagctcaccatggctcgggcattgagagtgccagttgcactgtggctgttgggcttgtgctggtctttggctaaagcccaccctctggctagagctcctgagcttgggcacggagttgaaggtgggaatgtggccaagccggatccagaagtgacggaacgctgctcggatggctggggctttgatgctaccaccctggatgagcatgggaacatgctgtttttaaaaggggagtttgtgtggaagggtcatgcctgngcccggcagttgatctcagagaggtggaaggatgcccccagtcccgtggatgctgcattccgctatgatcgtaacagtgtccttctgatcaagggggacaaattctgggtatatcctcctgagaagggggaggaatatcc

SEQ ID NO: 7321 - DNA, 434 bp, Bos taurus
  Clone ID: 31-LIB34-086-Q1-E1-H3
gctcagttcaattcaggagaatttgagaagcaaaatacaaaaattagaatcggatgtctcaactcagatggaatactgccgcaccccgtgtactgttacttgcaatattcctgtggtgtctggcaaagaatgtgaggaaatcatcaggaatggaggtgaaacatctgaaatgtacctcattcagcctgaggattctagcaaaccatatagagtatactgtgatatgaaaacggaaaaaggaggatggacagtaattcagaaccgtcaagatggtagtgttgactttggcaggaaatgggatccatataaacaaggatttggaaatattgcaaccaatgcagaagggaagaaatactgtggtgtaccaagtgagtattggctcggaaatgacagaattagccagcttaccaatatgggacccacaaagcttttga

SEQ ID NO: 7322 - DNA, 396 bp, Bos taurus
  Clone ID: 32-BOVMS1-002-Q1-E1-H7
acgaacaattcgcatcaacgacagtcgcgaagcgcacaatcgttcaaaggacgcagctcacatgattgtgtctgaaggtccacactctactataatcaacgccatgcatgcaaacgatacagcatgcaccaagactattaagatgcatgaggagagaaacaccaaacagaagaatgatgaatccaactccacaaggagcactacctgcatatctactggaccgtgagggacagtctcgagctaaagtactttccaatatgattaaacagaaacgaaaagagaaagcgggaaaatgggaggtccctctgcctaaagttcgtgcccagggagaaacagcagtattaaaagttattcgaacatgaaagacaaagaagaaagcctgaaagaggatggtta

SEQ ID NO: 7323 - DNA, 448 bp, Bos taurus
  unsure (387): unsure at all n locations; Clone ID: 32-BOVMS1-004-Q1-E1-H7
gattattttgcatgatgagagaattgtgtgtaaccagtgatatgatagttcctgaatgtataaacagaattctgaacactttttaatttaaaagcttaaaatagttcctgctttaaggaaatatgataatgtatactatgacaaatgttctttattcttctaacacaataagatttggactttttccccctaaaatgaagtgcagttcctgtgtatcttagattacatttctagtcaattatttgtattttaattttttgttagtacctaaagaatccattatatgagcagattttttaagtaatttctgtatattgtatatttgaattggcttttattgagcagcttatcttccacttgcaagcttatggaaatatcaaatgtcanaataagtaaaaagtgggagaattatttactgttagaagaatgtttttattagtttggatgt

SEQ ID NO: 7324 - DNA, 340 bp, Bos taurus
  Clone ID: 32-BOVMS1-005-Q1-E1-H7
atgcgacgtcatagctcttctatagtgtcacctaaattcaattcactggccgtcgttttacaacgtcgtgactgggaaaaccctggcgttacccaacttaatcgccttgcagcacatccccctttcgccagctggcgtaatagcgaagaggcccgcaccgatcgcccttcccaacagttgcgcagcctgaatggcgaatgggacgcgccctgtaacggcgcattaagcgcggcgggtgtggtggttacgcgcagcgtgaccgctacacttgccagcgccctagcgcccgctcctttcgcgttcttcccttcgtttctcgccacgttcgccggatttcccc

SEQ ID NO: 7325 - DNA, 450 bp, Bos taurus
  Clone ID: 32-BOVMS1-006-Q1-E1-H11
cttggacagttcaaccttctgcagctggatcctgactgtagagggtgctgtcaggaagaagcacaatttgaaactaaaaagctgtatgcaggagctattcttgaagtctgtggatgaaaattggggaggttccctcaagtccaagctttcgtcaggagtgataaacccaagctattcaaaggactacaaatcaagtatgttcgcggttcagaccctgtgctaaagcttttggacgacagtgggaacattgctgaagaactaagcatcctcaaatggaacacagacagtgtagaagaattcctgagtgaaaagttggaacgcatataaatcttaaattttgtcctatctttctgttaccttggtcaatgaaacactatagcacctagaaaataatttagttttgctttcctccattgatcagtcctttactgtgaggcattaaacatccaa

SEQ ID NO: 7326 - DNA, 400 bp, Bos taurus
  unsure (348),(371),(377): unsure at all n locations; Clone ID: 32-BOVMS1-008-Q1-E1-H11
cggagtacgacttgactactcgcatcgcgcactttttagatcggcatttagtctttccgttgcttgagtttctctccgtaaaagagatatataatgaaaaggagttgttacaagggaaattggatcttcttagtgataccaacatggtagactttgctatggatgtgtacaaaaacctttattctgatgatattcctcatgctttgagagaaaaaagaacaactgttgttgcacagctgaaacagcttcaagcagaaactgaaccaattgtgaagatgtttgaagatccagaaactacaaggcaaatgcagtcaaccagggatggtcggatgctgtttgactacctgncagacaagcatggtttcaggcangaatanttagatacactgtacaagtatgc

SEQ ID NO: 7327 - DNA, 410 bp, Bos taurus
  unsure (305): unsure at all n locations; Clone ID: 32-BOVMS1-008-Q1-E1-H7
gtgagttagaggttttgctgactgcccccgctacctcagctctgaaggatggattcaactgccaccatgtcgagcaaaagagcaaagaccaagaccaccaagaagcgcccccagcgcgcgacctccaacgtgttcgccatgtttgaccagtcccagattcaggagttcaaggaggccttcaacatgatcgaccagaacagggatgggttcattgacaaggaagacttgcatgacatgcttgcttccctgggaaaaaatccaactgatgagtatctggatgccatgatgaacgaggctccaggtcncataaattttaccatgtttctcacaatgtttggtgaaaagttaaatggcacagattcagaagatgtcatcagaaatgcttttgcttgctttgatgaagaagcaac

SEQ ID NO: 7328 - DNA, 132 bp, Bos taurus
  Clone ID: 32-BOVMS1-009-Q1-E1-H7
aaccaaccaaggccctaggctcatcttggccctcctcagctccctgcctgtttcccgtaaggctgtacatagtccttttacttccttgtggcctgtgacactagtttataataaactctttaagagaatatt

SEQ ID NO: 7329 - DNA, 237 bp, Bos taurus
  Clone ID: 32-BOVMS1-010-Q1-E1-H11
cgggtcgacttagcgtccggggcagcgtgctgtcacacttgatcgtgcgtctggacgtgactggctgcgatatcagcaaccacatgatgaatatcctcacctctctttgccacaccgtcattacgacagccctgcgggggatcgtgcgcgacatcaagtataagctgtgcgtcgtcgccactggactttgagatctcattggccaccaccgcttcctcctcctctctggttagcagc

SEQ ID NO: 7330 - DNA, 449 bp, Bos taurus
  Clone ID: 32-BOVMS1-010-Q1-E1-H7
ggtgatggcaccatcacaaccaaggaacttggaaccgtcatgaggtcgttgggccagaacccaacagaagccgaattgcaggacatgatcaacgaggtggacgctgatggtaatggcaccattgacttcccagaatttttgactatgatggctagaaaaatgaaagacaccgacagtgaagaggaaatccgcgaggcgttccgagtcttcgataaggatggcaacgggtacatcagcgccgcagagctgcgccacgtcatgacgaacctgggggagaagctgacggatgaggaggtggacgagatgatcagagaggcggacatcgacggggacgggcaggtcaactacgaagaattcgtacagatgatgactgcaaaatgaagacctactttcaactcctttttcccccctctagaacaatcaaattgaatcttttacttacctcttgc

SEQ ID NO: 7331 - DNA, 86 bp, Bos taurus
  Clone ID: 32-BOVMS1-012-Q1-E1-H11
acaaaacaagtctcgtgtttattattccttaagaactctgtgttatattaccatggaacgcctaataaagcaaaatgtggttgttt

SEQ ID NO: 7332 - DNA, 459 bp, Bos taurus
  Clone ID: 32-BOVMS1-013-Q1-E1-H7
gtttgacgacgttgccctgctcacttcagcctccggcccgccatctccttgagccctaccaccatgccttcaattaagttgcagagctctgatggagagatattcgaagttgatgttgaaattgcaaaacaatctgtgaccatcaagactatgttggaagatttgggaatggatgatgaaggagatgatgatccagtccccttgccaaatgttaatgcagcaatattgaaaaaggtcattcagtggtgcactcaccacaaggatgatcctcctcctcctgaggatgatgagaacaaagaaaaacgaacagatgatatacctgtttgggatcaagaattcctgaaagttgaacaacggacactctttgaacttatattgggagcaaactatttagacatcataggtttgcttgatgttacctgcaagactgttgctaatatgatcaaggcaaaactcctg

SEQ ID NO: 7333 - DNA, 420 bp, Bos taurus
  Clone ID: 32-BOVMS1-014-Q1-E1-H7
gccaagggcaagaccgaggaggagctggctgagtgtttccgcatcttcgacaggaacgcggacggctacatcgacgccgaggagctggcggagattttccgagcctccggggagcacgtgacagacgaggagctcgaatccctgatgaaggacggggacaagaacaacgacggccgcattgacttcgacgagttcctgaagatgatggagggcgtgcagtaagaagtcggcccttgcagccatcgacaccgcgcggccctcgggcgtgggcggcgccgccccccgagccgctttcgttcccccgccccgggcgggaggcgcggccccttctggggatgtgtctggaaggaataaaaggaaacattgcaaaaaaaaatacaacatttaagttcaaattttcaaaaaaaaaagggcggccgc

SEQ ID NO: 7334 - DNA, 214 bp, Bos taurus
  Clone ID: 32-BOVMS1-016-Q1-E1-H7
ccctactacacacctccaaacaacgaagcataatattccgaccactcagccaatgcctattctgagccctagtagcagacctactgacactcacatgaattggaggacaaccagtcgaacacccatatatcaccataggacagatgcgatgtgtcatattgttccagggctgtggccgactgtgtgacttcgtatccttggtatagcctgtagg

SEQ ID NO: 7335 - DNA, 379 bp, Bos taurus
  Clone ID: 32-BOVMS1-018-Q1-E1-H11
cccacccactaataaaaattgtaaacaatgcattcatcgaccttccagccccatcaaacatttcatcatgatgaaatttcggttccctcctgggaatctgcctaatcctacaaatcctcacaggcctattcctagcaatacactacacatccgacacaacaacagcattctcctctgttacccatatctgccgagacgtgaactacggctgaatcatccgatacatacacgcaaacggagcttcaatgttttttatctgcttatatatgcacgtaggacgaggcttatattacgggtcttacacttttctagaaacatgaaatattggagtaatccttctgctcacagtaatagccacagcatttataggatacgtcct

SEQ ID NO: 7336 - DNA, 298 bp, Bos taurus
  Clone ID: 32-BOVMS1-018-Q1-E1-H7
atgcgacgtcatagctcttctatagtgtcacctaaattcaattcactggccgtcgttttacaacgtcgtgactgggaaaaccctggcgttacccaacttaatcgccttgcagcacatccccctttcgccagctggcgtaatagcgaagaggcccgcaccgatcgcccttcccaacagttgcgcagcctgaatggcgaatgggacgcgccctgtagcggcgcattaagcgcggcgggtgtggtggttacgcgcagcgtgaccgctacacttgccagcgccctagcgcccgctcctttcg

SEQ ID NO: 7337 - DNA, 135 bp, Bos taurus
  Clone ID: 32-BOVMS1-019-Q1-E1-H7
gatgcgacgtcctaactctcctatagtgtcacctcaactcaattcactggccgtcgtgttacaccgtctcgactggcacaaacctggcgttaggcaagttaatggccttgcagcacaccaccctttcaccagctg

SEQ ID NO: 7338 - DNA, 390 bp, Bos taurus
  Clone ID: 32-BOVMS1-020-Q1-E1-H11
ataaacttgatgggatgaatcaccttggagggagccttggaaccaagtttgccaagactactttcccaccctgagggagtcaatgccattcagaagccgtttatttgaagatggaggaagtatttatatgaaaagggcaattcaacagtccatagaactaaaacagcttcttctaagagacctattacaagttgaatcaatttggaaatcatgtttttatgtttcaatggaaacgttttagttacttaaattgttcataatttcttactttagcctgtcagtgtgtattgtacctgcaatcatgtttccttccttcacatgggtaaaaataagcagcatccgtaagattatgattttttaatttgtggccagtgaagatttcactccatc

SEQ ID NO: 7339 - DNA, 443 bp, Bos taurus
  Clone ID: 32-BOVMS1-021-Q1-E1-H7
attttatattctatttgaagcaacactagtcccaacactcattattattacccgatgaggaaaccaaacagaacgcctaaacgccggactctatttcctattctatacactagctggctccctacccctattagtcgcactaatttatatccaaaacacagtaggatccctaaatttcctaatattacagtactgagtacaacctgttcataactcttgatctaatgtcttcatatgactagcatgtataatagctttcatagtaaaaataccactatatggcctccacctttgactacctaaagctcacgtagaagcccccatcgcaggctccatagtccttgcagcagttctactaaaactaggggggtacggtatgctacgaatcacactaattctaaaccctatgaccgacttttatagcataccattcattatactct

SEQ ID NO: 7340 - DNA, 257 bp, Bos taurus
  Clone ID: 32-BOVMS1-022-Q1-E1-H11
ctggcaacttggactataagaacctggtgcacatcatcacccacggagaagagaaggactaagggagtggcttgcctttgggtgggcagatgggggcatccatgccctcttctcatttttcccagcagtgcaccacccccaaccctggccagttggtcttgtggctgcctcatttatccacctccatcttctttgcagccttggtgccctagagctaccacgtgaccacacagctggcagatggaaattcacccaga

SEQ ID NO: 7341 - DNA, 345 bp, Bos taurus
  Clone ID: 32-LIB188-001-Q1-E1-H11
actgggggtctcccttgaggtcgtaagtggccccatccagacccatgatcagatattctttcccaggttccaactgaaggcggcaagaggctcggaccaggaagtttctggtctgatcagcggtggccctggcatccttggtgaaatgcaggacttgggtgatacgggtctcaaagaggcggaaagcagccctgctgtcttctcggagaaccttaacctggaagccgtagtccactcggggagagtaccaggcgaatttcatccggtaaccctccaagtcctgctgcccacgctccagggcccggcgctgtcgaaggcacttcccctcagcacactgggagacat

SEQ ID NO: 7342 - DNA, 426 bp, Bos taurus
  Clone ID: 32-LIB188-002-Q1-E1-H11
acttctccatagagttgggcacacacttgtccaggccctggtcatcgccagcacacaaggcacagagtctggatttcgggtcagccccaggggcacagctctgactaaagaattcatcaaatgcgcaggagcctgtctggttgacgatcaggcccatggggatgttccagcctgcagtcctgtccacggcggtgtggcacgacttcttgtctttcagagaattccatgtgagcccctcatttgctttcttgacaactgccacggcaaggtacacgtaatcattaaaactattaaaagcatcacgggtaaaagttttaaaaggttaatttctgtcaaatgcggtagatgaagaaaggtcggtattatcagtgagtgttttcttaagcttttccttaaacctgcccaccccttctgaaattgggcatt

SEQ ID NO: 7343 - DNA, 272 bp, Bos taurus
  Clone ID: 32-LIB188-002-Q1-E1-H7
acgatgagtccggcccctccatcgtccaccgcaaatgcttctaggcggactgttagctgcgttacaccctttttcttgacaaaacctaacttgcgcagaaaacgagatgagattggcatggctttatttgtttttttttttttgtcttttttgatttttttttttttttcggcgcttgactcaggatttaaaaactggaacggtgaaggtgacagcagtcggttggatcgagcattcccaaagttctacagtgtggccgaggacttgattgt

SEQ ID NO: 7344 - DNA, 460 bp, Bos taurus
  unsure (366): unsure at all n locations; Clone ID: 32-LIB188-003-Q1-E1-H7
catgctaacgtacgccatggcggcgggatacatacaattttgtgtcttttttcactcagcacaattattttatgattcatccatgctactgctatttatcaacagttcatttttgctgctgagtagagtcagatacgactgagcgagttcactgtcacttttcactttcatgcgttggagaaggaaatggcaactcactccagtgttcttgcctggagaatcccagggatgggggagcctggtgggctgccgtctatggggtcgcacagagtcggagtattagcagtaacagcagtatcattgtatggccacatcattcacttgatggacatttggttgcttccagtttctggccattacaaacanaactgttaagattatctgtgcttaagtctttgtgtggacatatgctttcatttcctgagtaaattcctggaagtggaatagctggattgaatgg

SEQ ID NO: 7345 - DNA, 380 bp, Bos taurus
  Clone ID: 32-LIB188-004-Q1-E1-H7
acaaaaatgatccagcgaaactgtcttaaatatttttctacaggtgtaaaaccaaagtttcctgcaaaccccagtccacgcccttcatgaatctactgtgtatctattttgcctctctagttctagaaaagtagagacaactttgaatccagggtttggagctgccccgcgtctgtctttcctatgcactctgagttaaaacgggactcgcgggaccgttggcggcgtgctccggcccctcagcaccttctgtggatttggcgcctccggcctctttgtctccttcggaagtctccagggcctccggggggcttgtgcagttagcatccggcttagctttgtccacctcgttatcaatctcacccttatcttctggatgc

SEQ ID NO: 7346 - DNA, 423 bp, Bos taurus
  Clone ID: 32-LIB188-006-Q1-E1-H11
gcatgtacccgaccgcgacgggcgcgggatactatcagaacacagcctcagtttccttctgtcagtcacagcccctgaccataagattcgttatctgcagttctggctggtggattctgcaggtctctcccaccactgatcctctagccctagaagcatccttgccaacatcacgtgcctgttacttccctttgtccatcttcagaccacttagggatgaccccctggcagccaataccctgatataaaattaacacaaagtctgacttggtgaatattagttttgaacagaaaagtagaaaatctgaagatgtaatgtgtgttgaaggcagactcgagcagatcaagtgttccacccatgtgccaccaagacaatgggtggaggtgcacgcggcaagaggaaaacgggaccattcatgggtg

SEQ ID NO: 7347 - DNA, 404 bp, Bos taurus
  Clone ID: 32-LIB188-006-Q1-E1-H7
gcatgctaactaccgcgatcggcgcgggataccaatctaccattagaaccctggtgctaatataactttagagccttaacccttgtaaaggacaatctggacctcatctccagcccccacccctagcattcagtcataatgtgattcctagagagggtggggggagccaagtgaaagggtgctcgggcccaatggccttcactctggaaagctgtgcccggcatcgtcactgactatcctgtaaggaacaccaccaggtcctggcttcagcccagggaaagaaaggagtgttgcaaaagggactccagaggcaggcaggcaactgcttccatttactgtggggggggttctccccacaacctaagtgaggagcaaccctcacccgcagagagaggcctgggctc

SEQ ID NO: 7348 - DNA, 383 bp, Bos taurus
  Clone ID: 32-LIB188-008-Q1-E1-H11
actgtccctgtgggtcgtgtggagactggtgttctcaaacctggcatggtggtcacctttgctccagtcaatgtaacaactgaagtgaagtctgtagaaatgcaccatgaagcattgagtgaagcccttcctggggacaatgtgggctttaatgtcaaaaacgtgtctgtcaaagatgtccgtcgtggcaatgtggctggtgacagcaaaaatgatccacccatggaagctgctggcttcacagctcaggtgattattttgaaccatccaggccaaatcagtgctggatatgcacctgtgctggattgtcacacagctcacattgcttgcaagtttgctgagctgaaggagaagattgatcgtcgttctgggaaaaagctgga

SEQ ID NO: 7349 - DNA, 404 bp, Bos taurus
  Clone ID: 32-LIB188-009-Q1-E1-H7
actcgtagtatttctgggccatcctggtgatgtagttgcccatggaggcccaaagaggcacaatggccatgcccagggccacagctgagggcacaagcgtgtagtagcgctcccagtagttggtggagacgaagagggcgtagatgcccacagccaggaacatcatccacttggtaccagagaagcctccctgggaggtggcggtggcggcaaggtccgcatcaacgttgaggagtctgtggacgggaaggtggtttcttccagaaagagagaaatctaacagcccagtgcaggggagatgcccctgccacccctgccctccccaggctgagcataaagctggccagagggaccggaaaagcaaattccaggctctgctttcagatggtctggtccaaggggtc

SEQ ID NO: 7350 - DNA, 414 bp, Bos taurus
  Clone ID: 32-LIB188-010-Q1-E1-H11
acttatgatcggccagcccaccgggcactttgacaagcttgttgttgttcaaatgaagttccctcaaatgaggagtgttggccaaagagccattgtcaaccgcagagatgctgttgaaactcagtcccaacttagccaaattattcagtcctttcaggctagctgcatcaactttggtgattttgttgccatcgagatgtaattcagtaagggaaggaggaagaccttgagggatggtagttatatttgtgtcagcaatgcggatgtaggagagcttcttcattccctgaaaggctccattttcaatgcctgagctcttcagcgggttggtgccaagttctacgacgatcatctggttcaatccattgaacacagactttcgcactttggagatctcgttcccatggacacgca

SEQ ID NO: 7351 - DNA, 379 bp, Bos taurus
  Clone ID: 32-LIB188-011-Q1-E1-H7
accgctccaagcttatcctgttccccaggaagccctcggcccccaagaagggagacagctctgctgaagagcttaaactggccactcagctgaccggacctgttatgcccatacggaacgtctataagaaggagaaagccagagtcatcacagaggaggagaagaactttaaggcatttgtcagtctccgtatggcccgcgccaatgcccggctctttggcatccgggcgaaaagggccaaggaagccgcagaacaggatgttgaaaagaaaaataaagtgctttgggaacttgtaaaaaaaaaaggaaaaaaaaaaaaaaaaaaaaaaggcttgacttgcccgggcggccgctcgaaccaaataaatgtattttccct

SEQ ID NO: 7352 - DNA, 403 bp, Bos taurus
  Clone ID: 32-LIB188-012-Q1-E1-H11
accagatgagcatactcggcagggtcaccaagtcggctggggaagggcacctggctggccaggaagttgcgcactttatctgggagggtggtcaacagcggggtgccaaataggcctggagcaatggtcatcacccggatacccatgggagccagatcccgagcaatgggcaatgtcatgcccactatgccccccttggaagcagagtatgcagcttgtccaacctggccctcaaaggcagctacgctggctgtattgatgatgaccccacgttggcctccctggtctggttcgttctggcccatctcaccagccaccaggcggatcacattgaaggtgtctatgagattcacattgataactcgccgaaagtcctccaaggtatgggcctggcttttcctta

SEQ ID NO: 7353 - DNA, 420 bp, Bos taurus
  unsure (400): unsure at all n locations; Clone ID: 32-LIB188-012-Q1-E1-H7
actcttttaaccatgactgttgaagtgaaaggtccctatgaatacctcacgcttgaagaatacccactgatgatttttttcatggtgatgtgtattgtatatgtcctgtttggtgttctgtggctggcatggtctgcttgctattggagagatctcctgagaatccagttttggatcggtgctgtcatctttctgggaatgcttgagaaagccgtcttctatgcagaatttcaaaacatccgatacaaaggagaatctgtccagggtgccctaatccttgcagagctgctttctgcagttaaacgctcactggctcgaaccctggtcatcatagtcagtctgggatatggcatagtcaagcctcgccttggagtcactcttcacaaggttgtggtagcangggccctttatcttttgttc

SEQ ID NO: 7354 - DNA, 397 bp, Bos taurus
  Clone ID: 32-LIB188-013-Q1-E1-H7
acccgcacggcaacacccgagcgccacaaatccccattgctttgccctcccatctcttcacttgtgtattcactgatgagaaaagcaaaggaaacaagatgtgattctgtcggtctgtgctctagttgcagtcgcactgtgtgaacactgtctgcccaccgggggaagtcctatctgctgctgccacaatatagtcatgctgcttgtgaagtgcagggagttgttttgacactggcacccactgtaatgtacgtggagtggctccgcagatacctggagaacgggaaggacacgctgctgcgcgcagaccctccaaaggcacatgtgacccatcactccagctctgagcgtgaggtcaccctgaggtgctgggccctgggcttctaccctgaggaga

SEQ ID NO: 7355 - DNA, 443 bp, Bos taurus
  Clone ID: 32-LIB188-014-Q1-E1-H11
catggccggccgatacttggaagatcgaacaatcaggctgcagctgtgggatactgcgggtcaggaacgtttccgtagcctcattcccagttacatccgtgattctgctgcagctgtagtagtttatgatatcacaaatgttaactccttccagcaaactacaaaatggattgatgatgtcagaacagaaagaggaagtgatgttatcatcatgctagtaggaaataaaacagatcttgctgacaagaggcaagtgtcaatcgaggaaggagagaggaaagccaaagagctgaatgttatgtttattgaaactagtgcaaaagcaggatacaatgtaaagcagctcttccgacgtgttgcagcagctctacctggaatggaaagcacacaggacagaagcagagaagacatgattgacataaaactggaaaaacctcaagagc

SEQ ID NO: 7356 - DNA, 391 bp, Bos taurus
  Clone ID: 32-LIB188-015-Q1-E1-H7
acaagcttgtctggcttatcttcttcatactgggtctggggacgcagctgccctggaatttcttcatgagagccactaagtatttcacaaaccgcctggacatgtcccagaagatgtccttgggccgtgctgaagtaagcaaggacatcgaggcctcagcgagcgccctgacaccctcgccagagcggactcatctcagcacgatcttcaacaacgtgatggccttaggtgccatggtgcccctggtgatctacacctgcctcaactccttcctgcatcagaggatcccccagtctgtgcggatcctgggcggcctggtacccatcctgttggtgttcctgatcactgccatcctgatgaaggtgcccctacacgcgctgtccatcttcgt

SEQ ID NO: 7357 - DNA, 408 bp, Bos taurus
  Clone ID: 32-LIB188-016-Q1-E1-H11
acagccggccagtgccatcctgtatgactactacaaccctgagcacaagtgttctgtgttttatggggcaccacgtaagagcaaactcttgtccacgttgtgctctgcggatgtctgccagtgtgctgaggggaagtgccctcgacagcgccgggccctggagcgtgggcagcaggacttggagggttaccggatgaaattcgcctgctacgctccccgagtggactacggcttccaggttaaggttctccgacaatacagcatggctgctttccgcctctttgagacccgtatcacccaagtcctgcatttcaccaaggatgccatggccaccgctgatcagaccagatacttcctggtccgagcctcttgccgccttcagttggaacctgcgaaagaatatctgat

SEQ ID NO: 7358 - DNA, 410 bp, Bos taurus
  Clone ID: 32-LIB188-018-Q1-E1-H11
acagggtttacagcctaacggtgaggagatgaccctcaaacagttcctcgactacttcaagacagaacataagttggagatcactatgctgtcccagggcgtgtctatgctctactctttcttcatgccagccgccaagctcaaggaacgattggatcagccgatgaccgagattgtaagccgtgtgtcgaaacgaaagcttggccgccatgtgcgagcactggtgcttgagctgtgctgtaacgatgagagcggcgaggatgttgaggccccctatgtacaccaaaatcaaaaaatgaaattaaattaaaaaatgaaatggttaccaaggtaatgcaggtcaggggatcaaaggtgaagggtcacacattattaaaaagaaatccaaaaggacggctgcatcatgatct

SEQ ID NO: 7359 - DNA, 393 bp, Bos taurus
  Clone ID: 32-LIB188-019-Q1-E1-H7
accctggagctgagggagattcctgatgaaagctgccatattaccagatatggctactttaaagccaccatcacaattgtagagggcattctagaggttaacatcatccaagtgacagatgtcccgatgcctaggccacagcctgacaactccctggtggatttcgtcgtgacctgccacgggagcatccccacagaggtctgcaccatcatctctgaccccagctgccagatcacccagaacccagtctgcgaccccgtggccatggagctgggtgacacgtgcttgctgacggtgaggagagccttcagtgggtctgggacatactgtatgaacctcactctggggaatgatgcaagtctggccctcacgagcaccctcgtctctatcaac

SEQ ID NO: 7360 - DNA, 273 bp, Bos taurus
  Clone ID: 32-LIB188-020-Q1-E1-H11
acccttccgttggtctcagcacacaatctaggctactgtgtttggaggatttccggttctctgccaggacaggcaccaggccacacttgcccgcagtgtagatatatcctccatccaagttcagggcatctgcttcccctttcagcaccaggacgatgcagtcgtcagtggtggacgccgtggcacaggtcacgttctggccgctctgctggctccactgctggcacttcttctgctcctcaggtcccacggcacaccacacgaccctggtgt

SEQ ID NO: 7361 - DNA, 431 bp, Bos taurus
  Clone ID: 32-LIB188-020-Q1-E1-H7
catgcaccctaacgccatgggcgcgggataccaccagagttccagaagcgcgaagtctgtttaccttgtagtgggatatccttggcggcttgcttctcccacttgcagtcaaagctggcagagcttttctaactcctaaaatgttccctctaccagtatttctaaacatgttgcactttccttcacaggcatttggggtttttttggtgccctcctatctcctggaaagggaatggaagcagaagtgggacatgcagggctctgccatcttcggccctgggtgcaggctcctgccacacctgtccttgcttctggctcagggatgtgtcttcttgcccagcctatctccatggggagaggggcttaaacctctgatgcttccgcccttccatttaggccatgtgcccagaaacctggcctgatctttgtgt

SEQ ID NO: 7362 - DNA, 358 bp, Bos taurus
  Clone ID: 32-LIB188-022-Q1-E1-H11
accaaaagaccttcctcctgatactgcgctgctggacctgcaacacaacacaataactgagatcaaagatggagactttaagaacctgaagaaccttcatacactgattctcatcaacaacaaaattagcaaaatcagccctggggcatttgctcctttggtgaaattggaacgactttatctttccaagaatcaactgaaggaattgccagagaaaatgcccaaaactcttcaggagctgcgtgtccatgagaacgagatcaccaaagtgcgaaagtctgtgttcaatggattgaaccagatgatcgtcgtagaacttggcaccaacccgctgaagagctcaggcattgaaaatgga

SEQ ID NO: 7363 - DNA, 406 bp, Bos taurus
  Clone ID: 32-LIB188-022-Q1-E1-H7
accggaacgccatgtcgtcatacactttggtcgaggactcaacgtatgtggacttgtcctggaaggtcgggcggggcaagagccctgccaccttgtgctcccggtccagccggacatccatgaccttggtgatcttccacaggtcgatgaggaccccaatgaacacactgacctggaccacgaagttggtctcgttgtccaggatgtagagcaggaccacgaaggactggaagacgccgaagaagacggagcgcacggacaggccctccagggactgccggctgttccagaactggatatcattcttgaaggccaggaactcaaagacactgtggacgatggacacgatgatggtgagtgccagcaggtatgggttggtctccacgagggcgaccttcaccgagtc

SEQ ID NO: 7364 - DNA, 410 bp, Bos taurus
  Clone ID: 32-LIB188-023-Q1-E1-H11
accgggagggtgatgggagctgcttcccagacgccatcgaccccttcctgtgcacccatgtcatctacagctttgccaacataagcaacaatgagatcgacacctgggagtggaatgacgtgacgctctatgacacactgaacacactcaagaacaggaaccccaacctgaagaccctcctatctgttggaggatggaacttcggttctcaaagattttccaagatagcttccaagacccggagtcgcaggactttcatcaagtcggtgccaccatttctgcggacccatggctttgatggactggacctagcatggctctaccccgggtggagagacaagcggcatctcaccactctggtcaaggaaatgaaggctgagtttgtaagggaagcccaagcaggcacagag

SEQ ID NO: 7365 - DNA, 321 bp, Bos taurus
  Clone ID: 32-LIB188-023-Q1-E1-H7
gaccacataggatgacagtgccaaaacccttgcgggagtccatggccagcagctcgatcgtgtcgatcatgcccccggactttaggattgctactcgtcgtccagatggacgatctcaaagcacgtaccttcagtttcgacatcacctgctgacgatgatcagctgttatcgtccccactagtacagatgtgttgcctgcgtgaccacgtcacttcatcatccggcataaccgggaacgacacagcagtcatctgttactgcggtgtcaatgacaatcgcttgatgacaatctgcattaattgtggagtttgcacgtctgg

SEQ ID NO: 7366 - DNA, 379 bp, Bos taurus
  Clone ID: 32-LIB188-024-Q1-E1-H7
acaatccaaatttgtctacagacttgtgcaatatttactgttctgggtctgaggaaaatggaaaatttcacagggaagaaattccattgcttcagtttctcagtgacattggtgaggggtctttaagaccttgagtttcccagacccaagtccccttgcgaaggccacagctgggcgtctggtgaacctggctgctatctggctgtggcccgtagtgagggactttgctctccactgccggtcccctttcctggattgcttaactactcaattctgactcagaggtgctatttaccaaacactctccctacccattcctgccggttctgcctcttgaactttccaaatcccaagctaccttcccaggccctgtttccag

SEQ ID NO: 7367 - DNA, 327 bp, Bos taurus
  Clone ID: 32-LIB188-025-Q1-E1-H7
acatcctgacccaggagattcagatcctccacacagctaatcgagacaggcgccaatttcgcttaccacacatgcgacagcgctgttggttgtgacataaccgacgtgatgtcattcactgccgcaccatcaacaacgcattacagctacctcagtaggaactgctcaacgaagggaacctccatgttaacatatagccatatgcgcatgtaaatatgtggatcatatacttgcaccatgattgcgcctgcctgtcgtcaacgatacaggagagctcccacctccttggctgcaaaacgtgagtactctaaactctcagctagctaa

SEQ ID NO: 7368 - DNA, 421 bp, Bos taurus
  Clone ID: 32-LIB188-026-Q1-E1-H11
gggcccgggataaactccactcctgttttctctggctactgaaatgcagctctaatgactctgtcactgagcggctgcgtgggtctaaaattgtctcccaaaatcccgtcacagccctccacgagctctgcccccttcaggtgtgtcctcagccttcgaaattcttcaatctgtagctgggatattgtcagagggtatcggaataatatccaggtcacaccttcgctgcagggcgggatggtgagagagccttcatacacccagtaatcacgcagcaagggatctggtaataaagtgttaggattaaagcagggtattgttttggatttccccttatactgaatatcctggaggatttcagtcacagccttcatgcccacgtgctcttttccgatctggacaaacaaagcgatgatagcga

SEQ ID NO: 7369 - DNA, 390 bp, Bos taurus
  Clone ID: 32-LIB188-027-Q1-E1-H11
accttttggcactttgtaacttaaaactctgttgcgatctgggcgacaatttgctatttacgagaccaggtctggccttgacagtaaagccaccgtcaaaagctgcattaagaacttcatccaggcagcttgctgtgatgaaacttaaatcctgccggacgttggctgggatttcttcaaggtctttctcatgcctctgagggataatgacgcgcttcaatcccgctcagtgcactgccagcgccttgtcgttaattccacccactgtaagaacaagacctcgcactgtgatttcaccagtcatggctacatctgaaggcaccagccgcccattgaaaagtgaggcgagacaggttgctatggtgactccagcagatggtccatcttttg

SEQ ID NO: 7370 - DNA, 414 bp, Bos taurus
  Clone ID: 32-LIB188-027-Q1-E1-H7
catgatcccgagcgccatgggggcgggatactgaattaatgtttcctcagttttttggaaaatattcttgtctatagttaaccatgcagcctattcacggaggctaattatttactcacttcaaacaccactaattcctcagaaagacaatgcagcgtctgtaacatctgtttactcatcaaaagccaaggaaagccattcagaaccatctgccttgtgttttgaccattgatattggtcccaatgtcttcaactctgtaagcaagaattgtcaatgaaacattaacagtctttttttttttttttttttttaaatatttatttatttttggctgtgctgagtcttagttgctgcatgggcttttcactagttgcagtgtttgggcttctcattgtggtggcctcatccgttgt

SEQ ID NO: 7371 - DNA, 219 bp, Bos taurus
  Clone ID: 32-LIB188-028-Q1-E1-H7
acctgggagaccaggatgccactatgtccatcctggatatatccatgatgacaggcttctcacctgatgttgaagacctcaaaacgctgagcactggtgtcgacagatacatctctaagtatgagatgaacagagactccaacaagaacacactcatcatctacctggacaaggtctcacacacagtggaggactgtctgtccttcaaagttcaccagt

SEQ ID NO: 7372 - DNA, 395 bp, Bos taurus
  Clone ID: 32-LIB2809-002-Q1-E1-H7
acctggtgagattgtggaaagcctttcaagcagtgaggaatctattacacgcatcaataagaaaattgagaagtttcagagtgaggaacagcagcaaacagaggatgaactccaggataaaatccacccctttgcccagacacagtctctagtctatcccttccctgggcccatccctaacagcctcccacaaaacatccctcctcttactcaaacccctgtggtggtgccgcctttccttcagcctgaagtaatgggagtctccaaagtgaaggaggctatggctcctaagcacaaagaaatgcccttccctaaatatccagttgagccctttactgaaagccagagcctgactctcactgatgttgaaaatctgcaccttcctctgcctctgc

SEQ ID NO: 7373 - DNA, 487 bp, Bos taurus
  Clone ID: 32-LIB2809-004-Q1-E1-H11
catggccgcggcatacaagcttttttttttttttttttttttttttttttttttttttttttttttttttttttttttttttttttttttttaagcgccttaaaatgtaatttattgaaaagaagaaagacaaaacctcagttaatgcaaacaattatttgatatgatggcacttacaggagaagtgattcaaagggttttaaaaaattttccaaacaggaatttaatgaagactttaattccctttggcgcaatggcctttaaaccagcatgatacaacgggaatttaggtaacaagctgttaggaaaatttcacttaaggatgttacactatctaaaatacagtagagaactcatgaaaaaagagtgccttcaatttgaaattgccctattctaaaacagcagttgaagcctttggaaagaatggtttgacatgataaatggaaggacatgtagagcatgggattttcagaaccatcaaagacca

SEQ ID NO: 7374 - DNA, 381 bp, Bos taurus
  Clone ID: 32-LIB2809-004-Q1-E1-H7
acagcagaaaagcctgaatgggcatatctctctggggatagggcactgctttctggggaacaggcaggactttggactgagaaagggacagcacggactgaggaggaaacatgacagttggaggaagaggctggtgaggctggtgcatccaacactggagcagaggcagaggaaggtgcagattttcaacatcagtgagagtcaggctctggctttcagtaaagggctcaactggatatttagggaagggcatttctttgtgcttaggacccatagcctccttcactttggagactcccattacttcaggctgaatgaaaggcggcaccaccacaggggtttgagtaagacgagggatgttttgtgggacgctgttatgga

SEQ ID NO: 7375 - DNA, 449 bp, Bos taurus
  Clone ID: 32-LIB2809-006-Q1-E1-H11
acagtattcttaaaaattttctttttaaattgaaagccaacaactctgcctttatgatgctaagctcatgttcttatttcttctcctatcttctttctcttctgttcccattatccttccctttgttttgtccctgtcaccttcctttctccttctcctcattgccccccaggcaagcaggtggtcagtcattggtgggtttccagcttccaaagcctagacaaccctgctgtagtctcaaactagtggtctttgccccggctgaccctttccttgagctgtctgagctttaaggtggatggctcaagctagagatatgacagaatcttctgggaagggccttgatgatcttcagcccagacttttgctaaatgaaatggaaaaataactttattttggcaccaaactgaaaaaacaggtcaattgtcaggggagagagtcagcatgca

SEQ ID NO: 7376 - DNA, 356 bp, Bos taurus
  Clone ID: 32-LIB2809-007-Q1-E1-H7
tcgtggtacacgctttgggaaacgtcttaatgcccttctcgctgatctagatcttacagatggggatcttcacacctttgctgtccacctgcaccatcttgttgtgaggggcttcgtccatctccactccccccgtggctcgggaccacagtcccatctgtgtctacgtcgatcagggctcctgcctgatttagaatacgaactgtcaatcttattccacatttgctatgaattatgcccattcctctctttttcacacaattctccttcttcaccttgtcgacctcactctttcgctcctcctcctgatacctcttcacgcactcatcccatcctcttgccacgcttaccccctc

SEQ ID NO: 7377 - DNA, 142 bp, Bos taurus
  Clone ID: 32-LIB2809-009-Q1-E1-H7
tcggtgtccaccacatggactttgttctcattcaaggcatcgatcttgaacaccgcagggatcttggttttttccgcaacgatcttctccagatcatactcacggttcgtccatttctgcaacaggatgtccatgtcaccct

SEQ ID NO: 7378 - DNA, 370 bp, Bos taurus
  Clone ID: 32-LIB2809-010-Q1-E1-H11
actttgtattttttcagtctgagaagctgttcctattcaaaaagaaaaaatattgtcaatttcgtggataccatctatcatagtatctctttcccaggagtaaataatgagaaactaataatcttactttagtgttgtttctaccacagagaatttggattagcctaattcttcttctttttttttttttaatattaggaaaactactttgttacattatttttaacttaaaatatattataatgcagtcagatataaataagtattcagtcaatcctaaaagaaatcagtcctgaatattcactggaaagacttttgctgaaactccaatactttggccacctgatttgaagaactgatgcattggaaa

SEQ ID NO: 7379 - DNA, 412 bp, Bos taurus
  unsure (406): unsure at all n locations; Clone ID: 32-LIB2809-011-Q1-E1-H7
acagcagaaaggcctgaatgggcatatctctctggggatagggcactgctttctggggaacaggcaggactttggactgagaaagggacagcacggactgaggaggaaacatgacagttggaggaagaggctggtgaggctggtgcatccaagactggagcagaggcagaggaaggtgcagattttcaacatcagtgagagtcaggctctggctttcagtaaagggctcaactggatatttagggaagggcatttctttgtgcttaggagccatagcctccttcactttggagactcccattacttcaggctgaaggaaaggcggcaccaccacaggggtttgagtaagaggagggatgttttgtgggaggctgttatggatgggcccagggaagggatagactanagactg

SEQ ID NO: 7380 - DNA, 406 bp, Bos taurus
  Clone ID: 32-LIB2809-014-Q1-E1-H11
acttcagcaaatacatgatagctcatggtctttgtaatccattcacattcctgagattgaccacctccctcttcctgaatgttctctaaatgtcatcagttttttcctttccatctgaaataaggttatgattttggaggctgaaccctcagagagtctttgtgccaatcccatgggccctaaactgtcaaggagactccagtctcaccaccaggtctttagcctctcaagatgcagctgattatattgctatataggaattgctgataatactcctttctagccgcctcaacatttttttcagcagcctatccttcccatctctgaaacccttcctctttctcccctacgtcttttctgttgagtgtcatcgtgtagtggttgtttctcagcgcccccctcatcc

SEQ ID NO: 7381 - DNA, 366 bp, Bos taurus
  Clone ID: 32-LIB2809-016-Q1-E1-H7
cgtatgtgtatgatacataaggttatgtattaattgtagccgcgttctaacgacaatatgtacaagcctaattgtgtagcatctggcttactgaagcagaccctatcatctctctcgtaaactgccgtcagagtcggtttggttggacgaaccttctgagtttctggtaacgccgtcccgcacccggaaatggtcagcgaaccaatcagcagggtcatcgctagccagatcctctacgccggacgcatcgtggccggcatcaccggcgccacaggtgcggttgctggcgcctatatcgccgacatcaccgatggggaagatcgggctcgccacttcgggctcatgagcgcttgtttcggcgtgggt

SEQ ID NO: 7382 - DNA, 404 bp, Bos taurus
  Clone ID: 32-LIB2809-017-Q1-E1-H7
tggccgcgggatacatgtacatgtgtaggtgggggttgtccactgagtaaggaatactgtttttaaggttctaaagctaaattcaaatgatgcattaatgacccaaaaactcagatctgatggtgtctgaatttctaacagtccttgctttgtgggtatgctgacaacttatctggatgccttacatcttttctaaacagtgttgcctctgaacgtgctctgctccctccctgctccctctttggagcccctttgcaccccagagcctgcagaagtggctggtataaaagggggcctggctagagaatgatcagtgtagctgtttgcaggattcctttctgggcttcattttggaaactttgcttacggctatttttcgtaattgcccacatttgatggggggt

SEQ ID NO: 7383 - DNA, 395 bp, Bos taurus
  Clone ID: 32-LIB2809-018-Q1-E1-H11
acccaacactctgtgatcctatggatatagccctccaggctcctctgttcatggaattctcaaggtaagaatactagagtgggttgccatgccctcctccaggggattttcccaacccagtgatcaagcctgagtctcctgcattggtagaggggttccttaccactagcaccacctgggaagccccatttgttttctgatttttgcaaattaaatcagaatattggatgaagggaaaaatgatgtttctgatactagccacatttaccgagggcttacttcgcaattcaaaatggctcagacggtaaaccgtctgtctacagtgcgagagacctgggttcgattcctgggttgggaaaatcctctgcagaaggaaatgttgcctggaaaatccc

SEQ ID NO: 7384 - DNA, 429 bp, Bos taurus
  Clone ID: 32-LIB2809-019-Q1-E1-H11
gccatggtcgcgggatacagacaagtccattaatgagtccagaaatgcaacagatgaatcccgccgaagactgattgcacatctggctgagcacattctcttcactgctagcaagtcctgtgctattatgtccacgcacatcgtgacctgtctgctcctctacagacacaggcagggaattggcctctccacattggtggaagacttctttgtgatgaaggaggaagtcctggctcgtgattttgacttgggtttctcaggaaattcagaagatgtagtcatgcatgccatacagctcctgggaaattgtatcacaatcacccacaccatcaagaatgatgagttttttactactcctagcacaactatcgcatcagtctttgaactcaacttctacagcaatggggtgctccatgtctttatcatgga

SEQ ID NO: 7385 - DNA, 318 bp, Bos taurus
  Clone ID: 32-LIB2809-021-Q1-E1-H11
catggccgcgggaaacacctaacaccgaagcagtagagagcactgtagctactctagaagattctccagaagttattgagagcccacctgagatcaacacagtccaagttacttcaactgcagtctaaaaactctaaggagacatcaaagaagacaacgcaggtctagctgaaaccaaatgactacttcaaactttcctttggccagttgtctgccttcggtgaacagagaatatgattttcacagatctggctccttcctcgtctcctcttacattttacttttatgccagatttaattttttgattcctgcataat

SEQ ID NO: 7386 - DNA, 346 bp, Bos taurus
  unsure (38),(60),(64),(333): unsure at all n locations; Clone ID: 32-LIB2809-025-Q1-E1-H7
gcagaaaggccagaatgggcatatctctctggggatanggcactgctttctggggaacangcangactttggactgagaaaggaacagcacggactgaggaggaaacatgacagttggaggaagaggctggtgaggctggtgcatccaagactggagcagaggcagaggaaggtgcagattttcaacatcagtgagagtcaggctctggctttcagtaaagggctcaactggatatttaaggaagggcatttctttgtgcttaggagccatagcctccttcactttggagactcccattacttcaggctgaaggaaaggcggcaccaccacangggtttgagtaag

SEQ ID NO: 7387 - DNA, 372 bp, Bos taurus
  unsure (329): unsure at all n locations; Clone ID: 32-LIB2809-026-Q1-E1-H11
cgtatgtgtatgatacataaggttatgtattaattgtagccgcgttctaacgacaatatgtacaagcctaattgtgtagcatctggcttactgaagcagaccctatcatctctctcgtaaactgccgtcagagtcggtttggttggacgaaccttctgagtttctggtaacgccgtcccgcacccggaaatggtcagcgaaccaatcagcagggtcatcgctagccagatcctctacgccggacgcatcgtggccggcatcaccggcgccacaggtgcggttgctggcgcctatatcgccgacatcaccgatggggaagatcgggctcngcacttcgggctcatgagcgcttgtttcggcgtgggtatggtg

SEQ ID NO: 7388 - DNA, 440 bp, Bos taurus
  Clone ID: 32-LIB2809-028-Q1-E1-H11
gccatgggcccgggatacagcagaaaggcctgaatgggcatatctctctggggatagggcactgctttctggggaacaggcaggactttggactgagaaagggacagcacggactgaggaggaaacatgacagttggaggaagaggctggtgaggctggtgcatccaagactggagcagaggcagaggaaggtgcagattttcaacatcagtgagagtcaggctctggctttcagtaaagggctcaactggatatttagggaagggcatttctttgtgcttaggagccatagcctccttcacttccttttaggaaacgaggacaaagtaaacatgaagttcttcatctttacctgccttttggctgttgcccttgcaaagaatacgatggaacatgtctcctccagtgaggaatctatcatctcccaggaaacatataag

SEQ ID NO: 7389 - DNA, 416 bp, Bos taurus
  Clone ID: 32-LIB2809-028-Q1-E1-H7
cgtattttccatgggattttagtagatgaaaaagatccaaataaagaagaacaagcatttgtgaaaacagttaaagatcaagcttctgaaattcaggtgacaatgatgctcaccgaaagttgtaagctccgaggtcttcatcacagaaatcgtcttcctagtaccaagtgtgtgtatagaagaaggagaaaagcccatggtgatattgccttacatgaattgggggaatctgaaattgtttttacggcagtgcaaattagtagaggccaataatccgcaggcaatttctcaacaagacctggtccacatgactattcagattgcctgtggaatgagctatctggccagaatggaagtcatccacaaagacctggctgctaggaactgcgtcattgatgacacacttcaggttaaga

SEQ ID NO: 7390 - DNA, 428 bp, Bos taurus
  Clone ID: 32-LIB2809-029-Q1-E1-H7
accttcaaagatgatattcaagggacggctgcggtggctctggccggtctgcttgccgcgcaaaaagtcattgggaaaccgatctcagatcatagaatcttatttcttggagcaggagaggctgctcttggaattgcaaatctgataggtatggctatggttgaaaatggcctctcagaagaagaggcacgaaagaagatttggatggttgacaggtttggtttattatttaaggtgcggaaagctagagtacgaagtcatcaggaagcatttgctcactcagctccagagagcctacctgatacttttgaagaggcagtaaatatacttaagccttcagctataattggagttgcaggagctgggcgacttttcactcctggtgtaatcaaggcaatggctgagatcaatgaaagggctataaatat

SEQ ID NO: 7391 - DNA, 437 bp, Bos taurus
  Clone ID: 32-LIB2809-030-Q1-E1-H7
accccagatggaaattgttcccaatagtgctgaggaacgacttcacagtatgaaagagggaatccatgcccaacagaaagaacctatgataggagtgaatcaggaactggcctacttctaccctgagcttttcagacaattctaccagctggatgcctatccatctggtgcctggtattacgttccactaggcacacaatacactgatgccccatcattctctgacatccctaatcccattggctctgagaacagtgaaaagactactatgccactgtggtgaagagtcaagtgaattctgagggactccacagttatggtctttgatggttctgaaaattccatgctctacatgtcttttcatctatcatgtcaaaccattctatccaaaagcttcaactggtggtttaagaatagggcaatctcaaattgaaggc

SEQ ID NO: 7392 - DNA, 404 bp, Bos taurus
  unsure (394): unsure at all n locations; Clone ID: 32-LIB2809-031-Q1-E1-H7
gccatgggcccgggatacagcaaaaaggcctgaatgggcatatctctctggggatagggcactgctttctggggaacaggcaggactttggactgagaaagggacagcacggactgaggaggaaacatgacagttggaggaagaggctggtgaggctggtgcatccaagactggagcagaggcagaggaaggtgcagattttcaacatcagtgagagtcaggctctggctttcagtaaagggctcaactggatatttagggaagggcatttctttgtgcttaggagccatagcctccttcactttggagactcccattacttcaggctgaaggaaaggcggcaccaccacaggggtttgagtaagaggagggatgttttgtgggaggctgttanggatgggccc

SEQ ID NO: 7393 - DNA, 305 bp, Bos taurus
  unsure (299): unsure at all n locations; Clone ID: 32-LIB3057-001-Q1-K1-H7
tagatcgcagcgagggagctgctcttctacgtacgaaaccccgacccagaagcaggtcgtctacgaatggtttagcaccaggcgccccacgaacgtgcggtgcgtgacgggcgagggggcggccgcctttccggccgcgccccgtgtcccgggacgaagggctctccgcaccggaccccggtcccgactcgcggcgggggcgcgccgcgccgcgccccgggggacgcgggcgacggcccgtcggcggtgactgcggtggaccggctatccgaggccaaccgaggctcccgcggcgctgncgtatc

SEQ ID NO: 7394 - DNA, 249 bp, Bos taurus
  Clone ID: 32-LIB3057-002-Q1-K1-H7
cccgatcgactccacgcgtccgatttagcaccaggcgccccacttagttcggtgcgtgactgacgaggtattgtgtcatgtttttatttttactataggtcatctctcacataatatattatttttatattattttttatatatttatctatttattttttattttattatcacttttttatgttttttatatttatataaatttctttaattttatatttattaatttttttatttaatatatttttt

SEQ ID NO: 7395 - DNA, 371 bp, Bos taurus
  Clone ID: 32-LIB3057-003-Q1-K1-H11
ctcacgcgtccgggttcttctgatcatgtccggtggctcctccgattatagcataggacatttctgcccatacggaatggacccccatggtgtcatcctgagcaactacaatgagattgttgataactttgatgatatgaacttaaaggagtctcttcttcggcgcatctatgcttatggttatgagaagccatcagctattcagcagagagctattatttcatgtattaaagggtatgatgtgattgctcaagctcagtcatgtactggcaagacagccacatttgctatttccatcctgcaacagttgtagattgagttcaaggagacccatgcactagtattggccctcaccagataactggctcaac

SEQ ID NO: 7396 - DNA, 339 bp, Bos taurus
  Clone ID: 32-LIB3057-003-Q1-K1-H7
aagttctggctggcagttgcgtggaaatgggcactggtgggcagaatggtgttcgggctaacaaagggaacaccgaaggggttacagagggaaaggggaagactgatgaggtgacaatgacttcgaatactgatgcctcggcttcctgccagtacaggtgcatcgaatgcaaccaagaagccaaggaattgtaccgagactataaccacggcgtgttgaagataacaatctggaaatcctgccagaaacctgtagacaaatacattgagtatgatcctggaatcatcttggataatgctattttattgcaagcccaagcctacaggcatattctttttc

SEQ ID NO: 7397 - DNA, 354 bp, Bos taurus
  Clone ID: 32-LIB3057-005-Q1-K1-H11
caggttattcctggagccaaagagactgagccctaccctgtgtggtcaggactcccgtacctgcaaactaaggatgaagatgcacgttattccgctttgtataacctgctccactggctgcgcagggattcaagcgagattgacacttaccttaagctcctgaatcgcagaatcatctacaacaacaactgctaagcccacattcatcctatccatttctgagatggttcttaatgatccattccctggcaaacttctctgagctttatagctttgcaatgcatgcttggctctaatgggtttcatcttaaataaaaacagactctgtagcgatgtcaacaacagaaagattat

SEQ ID NO: 7398 - DNA, 284 bp, Bos taurus
  Clone ID: 32-LIB3057-005-Q1-K1-H7
tctagatcgcgagcggccgcccttttttttttgttttagattttgacatcgctacagagtctgggtttatttaagatgaaacccattagagccaagcatgcattacaaagctataaagctcagagaagtttggcagggaatggatcattaagaaccatctcagaaatggataggatgaatgtgggcttagcagttgttgttgtagatgattctgcaattcaggagcttaaggtaagtgtcaatcttcccacgcgtccgcccacgcgtccggttctagatcgcga

SEQ ID NO: 7399 - DNA, 437 bp, Bos taurus
  unsure (402): unsure at all n locations; Clone ID: 32-LIB3057-006-Q1-K1-H7
cggacgcgtgggcaaagggttcattaccatggccctcaacagctgccatacctcctccgttcctacccctgaagataaagaacaagcccaacagacccaccatgaagtccttatgagcttgattcttgggttgctgcgctcctggaatgaccctctctatcacctagtcaccgaggtgcggggtatgaaaggagccccagatgctatcctatcgagggccatagagattgaggaagaaaacaaacgacttctggaaggcatggagatgatatttggccaggttattcctggagccaaagagactgagccctaccctgtgtggtcaggactcccgtccctgcaaactaaggatgaagatgcacgttattctgctttttataacctgctccactgcctgcgcanggattcaagcaagattgacacttaccttaagctcc

SEQ ID NO: 7400 - DNA, 398 bp, Bos taurus
  Clone ID: 32-LIB3057-007-Q1-K1-H7
tcttgaaatcatcaccaccatggacagcaaaggttcgtcgcagaaagggtcccgggtgctcctgctgctggtggtgtcaaatctactcttgtgccagggtgtggtctccacccccgtctgtcccaatgggcctggcaactgccaggtatcccttcgagacctgtttgaccgggcagtcatggtgtcccactacatccatgacctctcctcggaaatgttcaacgaatttgataaacggtatgcccagggcaaagggttcattaccatggccctcaacagctgccatacctcctcccttcctacccctgaagataaagaacaagcccaacagacccaccatgaagtccttatgagcttgattcttgggttgctgcgctcctggaatgaccctctgtatc

SEQ ID NO: 7401 - DNA, 385 bp, Bos taurus
  Clone ID: 32-LIB3057-008-Q1-K1-H11
caacagcttggtgtttggcacctcggaccgtgtctatgagaagctgaaggacctggaggaaggcatcctggccctgatgcgggagctggaagatggcaccccccgggctgggcagatcctcaagcagacctatgacaaatttgacacaaacatgcgcagtgacgacgcgctgctcaagaactacggtctgctctcctgcttccggaaggacctgcataagacggagacgtacctgagggtcatgaagtgccgccgcttcggggaggccagctgtgccttctagttgccagccatctgttggttgccccttccccctgcctttccttgaccttgaaaggtgccattccaattgtcctttctaattaaattgaggaaatggcttcgc

SEQ ID NO: 7402 - DNA, 355 bp, Bos taurus
  Clone ID: 32-LIB3057-008-Q1-K1-H7
gccgggttgagaggagcgtggccttctcctctccccgccatggcgtgtgctcgtccactgatatcagtgtactccgaaaagggggagtcctctggcaaaaatgtcactttgcctgctgtgttcaaggctcccattcgacccgatattgttaactttgttcacaccaacttgcgcaaaaacaacagacagccctatgctgtcagtgaattagcaggtcatcaaaccagtgctgagtcttggggtaccggcagagctgtggctcgaattcccagggttcgaggtggcgggactcaccgttccggtcagggcgcttttggaaacatgtgtcgtgggggccgcatgtttgcgccaacta

SEQ ID NO: 7403 - DNA, 428 bp, Bos taurus
  unsure (290),(356),(363),(365): unsure at all n locations; Clone ID: 32-LIB3057-009-Q1-K1-H11
cttgaaatcatcaccaccatggacagcaaaggttcgtcgcagaaagggtcccgcctgctcctgctgctggtggtgtcaaatctactcttgtgccagggtgtggtctccacccccgtctgtcccaatgggcctggcaactgccaggtatcccttcgagacctgtttgaccgggcagtcatggtgtcccactacatccatgacctctcctcggaaatgttcaacgaatttgataaacggtatgcccagggcaaagggttcattaccatggccctcaacagctgccatacctnctcccttcctacccctgaagataaagaacaagcccaacagacccaccatgaagtccttatgagctngattctngngttgctgcgcttctggaatgaccctctctatcacctagtcaccgtagtgcggggtatgaaagg

SEQ ID NO: 7404 - DNA, 166 bp, Bos taurus
  Clone ID: 32-LIB3057-009-Q1-K1-H7
gagccacgcgtccgctgcgaatggctttattccaggcgcttttcgaacgtgcggtgcgtggcgggcgaggaggacgttctcctatttcggccgcgccccgtatgccgatacgaacggctctccgcaccgaaccctggtcccgacgcgcgtctgtggcagcgccgtg

SEQ ID NO: 7405 - DNA, 420 bp, Bos taurus
  Clone ID: 32-LIB3057-011-Q1-K1-H7
ctcagggtcctgtggacagctcaccagctatgatggctgcaggcccccggacctccctgctcctggctttcgccctgctctgcctgccctggactcaggtggtgggcgccttcccagccatgtccttgtccggcctgtttgccaacgctgtgctccgggctcagcacctgcatcagctggctgctgacaccttcaaagagtttgagcgcacctacatcccggagggacagagatactccatccagaacacccaggttgccttctgcttctctgaaaccatcccggcccccacgggcaagaatgaagcccagcagaaatcagacttggagctgcttcgcatctcactgctcctcattcagtcgtggcttgggcccctgcagttcctcagcagagtcttcaccaacagcttggtgtttggca

SEQ ID NO: 7406 - DNA, 380 bp, Bos taurus
  Clone ID: 32-LIB3057-012-Q1-K1-H7
ctgactctggcccagcccctgggggctctaccccaggccgtcatggctgcccaggccccaggagtcatcacaggtgtgacaccggctcggcctcccattccggtcaccatcccctctgttggtgtggtgaatcccatcctggccagccctccgacacttggtctcctggagcctaagaaggagaaggaggaggaggagctgtttcccgagtcggagcggccggagatgctgagtgagcaggagcacatgagcatctcaggaagcagcgcccgccacatggtgatgcagaagctcctccgcaagcaggagtccacagtgatggttctgcgtaacatggtggaccccaaggacatcgacgatgacctggaaggggaagtgac

SEQ ID NO: 7407 - DNA, 367 bp, Bos taurus
  unsure (336): unsure at all n locations; Clone ID: 32-LIB3057-013-Q1-K1-H7
cggacgcgtgggagggtgtggtctccacccccgtctgtcccaatgggcctggcaactggcaggtatcccttcgagacctgtttgaccgggcagtcatggtgtcccactacatccatgacctctcctcggaaatgttcaacgaatttgataaacggtatgcccagggcaaagggttcattaccatggccctcaacagctgccatacctcctcccttcctacccctgaagataaagaacaagcccaacagacccaccatgaagtccttatgagcttgattcttgggttgctgcgctcctggaatgaccctctctatcacctagtcaccgaggtgcggngtatgaaaagagccccagatgctatcctatc

SEQ ID NO: 7408 - DNA, 454 bp, Bos taurus
  Clone ID: 32-LIB3057-015-Q1-K1-H7
cactgagtggttcttcggatcatgtctggtggctccgcggattataacagcagagaacgtggcggcccagagggaatggaccccgatggtgtcatcgagagcaactggaatgagattgttgataactttgatgatatgaacttaaaggagtctcttcttcggggcatctatgcttatggttttgagaagccatcagctattcagcagagagctattattccatgtattaaagggtatgatgtgattgctcaagctcagtcaggtactggcaagacagccacatttgctatttccatcctgcaacagttggagattgagttcaaggagacccaagcactagtattggcccccaccagagaactggctcaacagatccaaaaggtaattctggcacttggagattatatgggagcaacttgtcatgcctgcattggtggaacaaatgttcgaaatg

SEQ ID NO: 7409 - DNA, 420 bp, Bos taurus
  Clone ID: 32-LIB3057-016-Q1-K1-H11
gtttcttgaaatcatcaccaccatggacagcaaaggttcgtcgcagaaagggtcccgcgtgctcctgctgctggtggtgtcaaatctactcttgtgccagggtgtggtctccacccccgtctgtcccaatgggcctggcaactgccaggtatcccttcgagacctgtttgaccgggcagtcatggtgtcccactacatccatgacctctcctcggaaatgttcaacgaatttgataaacggtatgcccagggcaaagggttcattaccatggccctcaacagctgccatacctcctcccttcctacccctgaagataaagaacaagcccaacagacccaccatgaagtccttatgagcttgattcttgggttgctgcgctcctggaatgaccctctctatcacctagtcaccgaggtgcg

SEQ ID NO: 7410 - DNA, 446 bp, Bos taurus
  Clone ID: 32-LIB3057-018-Q1-K1-H7
gctcaagaagaaagacagtcagatctgtgaactaaagtatgacaaacagatcgacctgagcgcagtggacctgaagaagctccgagttaaagagctaaagaagatcctggacgactggggggagacgtgcaaaggctgtgcggaaaagtctgactacatccggaagattaatgaactgatgcctaaatatgctcccaaggcagctagttcacggactgatttggagtcggctcgatccctgctgctcctgagggagaaaacacttcatttgtgtctaccccaaacagcctttttgtaatttattttttaggcaggctcctgacaaagtcaggttgtaagcctggagctttcttgatgatgctgggtgtacagcgtcctctttggggagattcactttgttcagttgcccatttactctaggacttttaaggttgtctgggattttt

SEQ ID NO: 7411 - DNA, 369 bp, Bos taurus
  Clone ID: 32-LIB3057-019-Q1-K1-H7
cacagtctcagtgaaggaagaacttgtagaagatgacttcattccagagctgggtatctgagatctgctttcaaccagcaactgcctgaagccatcttcctgcctgctggatgcttacagtgactgtagctatgagggttccccttctcccttgagtgacatgtcctccctgcttgatgcagaccattcttgggaggacccttttgccagtgaactctttccccagctgattagtgtctaaggagtgatccagtactgatgctcttgactgtgacactgcctggaggacagcacaaaggcctgtgcttcatccaaaaagccaaagtagagggggttgtgggtcctaagaggaattcccctttaaaggta

SEQ ID NO: 7412 - DNA, 417 bp, Bos taurus
  Clone ID: 32-LIB3057-020-Q1-K1-H11
agggtgtggtctccacccccgtctgtcccaatgggcctggcaactgccaggtatcccttcgagacctgtttgaccgggcagtcatggtgtcccactacatccatgacctctcctcggaaatgttcaacgaatttgataaacggtatgcccagggcaaagggttcattaccatggccctcaacagctgccatacctcctcccttcctacccctgaagataaagaacaagcccaacagacccaccatgaagtccttatgagcttgattcttgggttgctgcgctcctggaatgaccctctgtatcacctagtcaccgaggtacggggtatgaaaggagccccagatgctatcctatcgagggccatagagattgaggaagaaaacaaacgacttctggaaggcatggagatgatatttg

SEQ ID NO: 7413 - DNA, 434 bp, Bos taurus
  Clone ID: 32-LIB3057-020-Q1-K1-H7
aatgttttcaccacaaaaaaaaaagaaatggtaactatgcaatagcatgaaggtggtaggaaatgcgatgatggtaaacattttgcaatatagaagtgtattacatcaacactgttgtaggacataaatctacaggtttttgcatcaattatatctcaataaaactataaaaataaacaagacaaaagaaaaaacagttatcaagtgagacaatacatgggagaacaaaaattttttaaaagcaacatgaatgagcttgatgggctcagaaacaggctatatttttttgtaaaggagctcacaaaactctctctcactctccctcttacacacacacacacatacacacatagagttctgttcagaaacatccaagaatcctttttaatattagccaacaaagcaatagcatgtctgtgctgactcagcgttga

SEQ ID NO: 7414 - DNA, 409 bp, Bos taurus
  unsure (300): unsure at all n locations; Clone ID: 32-LIB3057-021-Q1-K1-H7
cactaataaaaattgtaaacaatgcattcatcgaccttccagccccatcaaacatttcatcatgatgaaatttcggttccctcctgggaatctgcctaatcctacaaatcctcacaggcctattcctagcaatacactacacatccgacacaacaacagcattctcctctgttacccatatctgccgagacgtgaactacggctgaatcatccgatacatacacgcaaacggagcttcaatgttttttatctgcttatatatgcacgtaggacgaggcttatattacgggtcttacactnttctagaaacatgaaatattggagtaatccttctgctcacagtaatagccacagcatttataggatacgtcctaccatgaggacaaatatcattctgaggagcaacagt

SEQ ID NO: 7415 - DNA, 414 bp, Bos taurus
  unsure (313): unsure at all n locations; Clone ID: 32-LIB3057-022-Q1-K1-H7
gagcttcctggtgaagtgtgtttcttgaaatcatcaccaccatggacagcagaggttcgtcgcagaaagggtcccgcctgctcctgctgctggtggtgtcaaatctactcttgtgccagggtgtggtctccacccccgtctgtcccaatgggcctggcaactgccaggtatcccttcgagacctgtttgaccgggcagtcatggtgtcccactacatccatgacctctcctcggaaatgttcaacgaatttgataaacggtatgcccagggcaaagggttcattaccatggccctcaacagctgccatacctnctcccttcctacccctgaagataaagaacaagcccaacagacccaccatgaagtccttatgagcttgattcttgggttgctgcgctcctggaatggaccct

SEQ ID NO: 7416 - DNA, 109 bp, Bos taurus
  Clone ID: 32-LIB3057-023-Q1-K1-H11
acacctgcatcaacttgctgcttacaccttcaaagagtttgagcgcacctacatcccggtaggacaaagatactccatccagaacacccaggttgccttctgcttctct

SEQ ID NO: 7417 - DNA, 316 bp, Bos taurus
  Clone ID: 32-LIB3057-023-Q1-K1-H7
tggcaaagggttcattaccatggccctcaacagctgccataccttctcccttgctacccgtgaagataaagaacaagcccaacagacccaccatgaagtccttatgagcttgattcttgggttgctgcgctcctggaatgaccctctgtatcacctagtcaccgaggtacggggtatgaaaggagccccagatgctattctatctagggccatagagattgaggaagaaaacatacgacttctggaaggcatggagattatatttggccaggtaattcctggagccttagagactgagccctaccctgtgtggtca

SEQ ID NO: 7418 - DNA, 453 bp, Bos taurus
  unsure (58),(104): unsure at all n locations; Clone ID: 32-LIB3057-024-Q1-K1-H7
tttgactgcagatgagctagagaactactcttccgtttaggggtaagaggaagttganacgtcattttctgttttagtgcttcttttctctttttccagttcancatatactattttccaatttgcctatgagtttaaatgatctatcgtgttatacttatttacattttctattatgactcctcctatatcatttaactctacctatttttattgctttttttttctatccagtcttcttatgttatctcttttacttacattttcttttttatttttttattttttatttttttttctttttattatttatttttatttcttttttttttttttttttttttatttatttttttttttttatttttattctttttttttttctattatttttttattttttttcttttttttattttttttttttttatttttatttttttattttttttt

SEQ ID NO: 7419 - DNA, 377 bp, Bos taurus
  Clone ID: 32-LIB3057-025-Q1-K1-H11
ctagttctagatcgcgagcggccgcacttttttttttttttttttttttttttggtttgtttttttatatatttttatatttttatttatttattttaaaataaaaaaataatataattaaaaaaaaaaaaaaaaataaaaaatttaaaattaatgaaaataaaaaaatccaacattaaataaaataattaaaacaaacataaattttaaataaaaatactaaaatcaaaatataaaaaaataataaatataaacatatatacaaaaaaaaaatacactaaaaaattctaaaaaaaaaaaaaggtccacaacataaaaaaatctaaattaacaaaagcgtacattcaaaaatataactattttaaagtaaaactaaa

SEQ ID NO: 7420 - DNA, 406 bp, Bos taurus
  Clone ID: 32-LIB3057-025-Q1-K1-H7
ggctctttgagaaaccacttgatcctcaatctatttatcagctgattgaaatcgctaggaatttacagataccccctgaagacttgattgacatgctcaaaactggagagaagccagtggaaccagagcaggaacttgagattcctgttgaacctgaagacatctcagaggttgacttagaccatccagatctgttccaaaataagatgctctccaagaatggctaccccaaagcacctggtcatgctgtggcagaggccctaccggaggggctcagtgtggaggacattctaaatcttttagggatggagagtgctgcaaatccaaagcctccatattttcccaatcagtataaccgagagaaagttctgtcaagactgccctatggtcctggaagatctaaagc

SEQ ID NO: 7421 - DNA, 431 bp, Bos taurus
  unsure (407): unsure at all n locations; Clone ID: 32-LIB3058-003-Q1-K1-H7
ggagatgagaaaatgagctccagaattttttcagggtgaataactctttttgtaattgtataataggaatgcaatcattgcaatattttccaaacagaatcatcagaaaatacacaataaatattatgattacagaggaactaagaggcttccctggtggctcagctggtagggagtccgcctgcaatgcaagagaccccagtttgattcctgggtcgggaggatccactgggggagggataggccatccgctccagtaatcttggacttccctggtggctcagctggtaaagaatctgtctgcagtgtgggagacctgtgcttgatccccagattgggaagatcccctggagaagggaacagctacccactccagtattctggcctgagaattccatagactgcanagtccatggggtcacaaagagtag

SEQ ID NO: 7422 - DNA, 451 bp, Bos taurus
  Clone ID: 32-LIB3058-004-Q1-K1-H7
cggacgcgtgggtgggactatgaacctcagaatgatgacgagctgcccatgaaagaaggagactgcatgacaattgtgcgcagggaagacgaagatgagattgaatggtggtgggcccgcctgaatgacaaggaaggatatgttccacgcaatttgctgggactatacccaagaattaaaccaagacaaaggagcttggcctgaaactttgcagatgtttagttcatgaagaattcatctctgttaccactaagaagaaacagtatgatcgtttgcggcagaaatttctcaagactgattttaatgacagagtaacttgaaagccatgaagaaggagctctggaagcagatgaaggcttggagcagccactgttggcgaaggatgctcagctcgctggagcagagcttggcaggaagctgatgcgctgtgctgggcaaggtgccctgtgtt

SEQ ID NO: 7423 - DNA, 428 bp, Bos taurus
  Clone ID: 32-LIB3058-005-Q1-K1-H11
gagttctgggcacacgtgtgtgtaaaagtgcatgtaagtgtgaacatgtgctgtgcatatgggagcacacgcctgcagagcccaaattagagcaaaaggactgactcgttcagcagttcaaggcctcggtatattcttactgtgggccacatgcagaattgaaggggtggggatggcaggccttgaactccccttgactttgttaaaaccgctctggggaggaggcgggcttccccggtgccccagacagcagtgtgcctgcagcacgggagacccggtttcgatccctggattgggaagtttccctggaggaggaaatggcaacccactccaggattcttgcctggagaactccatggacagagaagcctggtgggctacagtccatggggtggcagtcagatatgaccgaactactaacactgggg

SEQ ID NO: 7424 - DNA, 406 bp, Bos taurus
  Clone ID: 32-LIB3058-006-Q1-K1-H7
ctctgggttgtgttcgtttcgacgtccgcgaagatgcagctcaaaccaatggagattaaccccgagatgctgaacaaagtgctgacccggctgggggtcgccggccagtggcgcttcgaggatgttctgggactggaggaggagtctctgggctcggtgccagcgccggcctgcgcgctgctgctgctctttccgctcacggcgcagcatgagaacttcaggaaaaaacaaattgaagagctgaagggacaagaagtcagtcccaaggtgtacttcatgaagcagaccattggcaactcctgtggaaccatcggactcattcatgcagtggccaataatcaggacaaactggagttcgaggatgggtctgttctgaaacagtttctttcttgaacagagaagttgt

SEQ ID NO: 7425 - DNA, 380 bp, Bos taurus
  Clone ID: 32-LIB3058-008-Q1-K1-H7
gtccccgagttcacccccaagtctggagtcaagatccatgtctctgaccaggagctgcagagcgccaatgcctctgtggatgacagccgtctggaagagctcaaggctacactgcccagtcccgaaaagctccctgggttcaagatgtaccctatcgactttgagaaggatgatgacaccaacttccatatggatttcatcgtggccgcatccaacctccgggcagagaactatgacattccccctgcagaccggcacaagagcaagctgattgcaggaaagatcatcccagccattgccacaaccacagcagccgtggttggccttgtgtgtttagagctgtacaaggtggtgcaggggcaccgacagctcaactccta

SEQ ID NO: 7426 - DNA, 404 bp, Bos taurus
  Clone ID: 32-LIB3058-009-Q1-K1-H7
cggacgcgtggggaaggcctcctgcagaaggacaggacaaagaggctgggtgccaaggatgactttatggagattaagaatcatgtcttcttctccctaattaactgggaagatctcattaataagaagattactcccccttttaacccaaatgtgagcggacccagcgacctgcgacactttgatcctgagttcactgaagagccggtccccaactccatcggccggtccccggacagcctccttctcacagccagcgtcaaggaagcggctgaggccttcctgggcttttcctatgcacctcccatggactctttcctctgaacggtcttagggttggttgcaaaggattttttagttaaccttttggcagagctgccagctgacaggacatcttaaaagag

SEQ ID NO: 7427 - DNA, 425 bp, Bos taurus
  Clone ID: 32-LIB3058-010-Q1-K1-H7
ggcagcctgatgttccacaacgttacccgccaggcctactggcagatccacatggaccagctggatgtgggcagcagtctgaccgtgtgcaagggaggctgtgaggctatcgtggacacaggcacgtgcctgatcgtgggccctgtggaggaggtgcgggagctgcagaaggccatcggggccgtgccgctgatacagggcgagtacatgatcccctgcgagaaggtgtccagcctgcctcaggtcaccgtgaaactggggggtaaggactacgcgttgttcccagaggactactcgctcaaggtgtcgcaagccggcacgaccgtgtgcctgagcggcttcatgggcatggacatccccccgcctggctggccgctttggatcctgggcgacgtcttcatcgggcgttactacaccgtgttcga

SEQ ID NO: 7428 - DNA, 426 bp, Bos taurus
  Clone ID: 32-LIB3058-011-Q1-K1-H7
cgcgcatgctcaggcggagtctgcggagtggtgccgtggcggtggagcagcgcagcgtggtctgccagccggagatgcgtgacgttgtgttctgaggagcggccagcggcgcgatggagcgggccagggaccgtttacacttgagacggactacagaacagcacgtaccagaggtggaagtccaagtcaaacgtagaaggacagcctcactgaacaaccaggagtgtcacgtgtacctgaggcgatctcagcagcagcaagtacctgtggtggatttccaggcagaactgagacaggcattcttagctgagacaccaagaggtggttaaagcagtattggaacaccaaggctccatctactatttgaagcttctgcctcagcttgcattatttgtaagagaacctgcgtcatacctttatctgtag

SEQ ID NO: 7429 - DNA, 378 bp, Bos taurus
  Clone ID: 32-LIB3058-012-Q1-K1-H11
gatttctcaggaggcaggtcaggtggtctggtattcccatctcttgaattttccacagtttgttgtgatccacacagtcaaaggctttggcataatcaataaagcagatgtttttctggaactcttttgctttttctatgatccaactaatgttggcaatttgatctctggtttttttccttgtcagcactttaaaggcattgtttcattatcatctgacttccatcatttcatttgagcaggaagttttcagtcttattgttgctcctttgaaggtaatctctcctatcccataccagttttagataaccaggttttactttttattacaatgtgcctgcttggaatttgctcagctttttgaatctgtagattatc

SEQ ID NO: 7430 - DNA, 393 bp, Bos taurus
  Clone ID: 32-LIB3058-012-Q1-K1-H7
gaactacgccctcgtgtactcctgtaccacaatcatctggctttttcacatggatcatgtttggatcttgggaagaaacccttatctccctccagaaacagtgacctatctcaaagatatcctgacctctaataacattgaagttgagaaaatgacgatcacagatcaggtgaactgtcccgagtccatgtaaccaggctctaaagggagctgcattcactccatgttccttctcttgctttgcttttcccctataccgaccctcataaagacaaaccaaaccaccagagcaacctattacaaacctaccagaagggaaacgtggcagcagaagctaatggagaagaacccaaggcaagctggcccagacatttaaccatgcaccattctggt

SEQ ID NO: 7431 - DNA, 430 bp, Bos taurus
  Clone ID: 32-LIB3058-013-Q1-K1-H7
gaatagtgtaactttctccatcagattacttttaattgacatgtgttttaatatttaaagaagagttcttgtaggaaatatagttaggtcttgttttgttattcctctgacaattttatcttttatttggtgcatctagattattgctattcctattaatttttgatatagctgttggagaagactcttgagagtcccttggactgcaaggagatccaaccagtccattctaaaggagatcagccctgagatttctttggaaggaatgatgctaaagctgaaactccagtactttggccattgactcatagttaactcattggaaaagactctgatgctgggagggattggggacaggaggagaaggggacgacagaggatgagatggctggatggcatcactgactcgatggacgttagtctgagtgaa

SEQ ID NO: 7432 - DNA, 424 bp, Bos taurus
  Clone ID: 32-LIB3058-014-Q1-K1-H7
cagaaaaagacttacgtgaccttgggcgtggctgtggctggcttccttctgggcatccctcttaccagccaagcaggcatctactggctgctgctgatggacaactatgcggccagcttctccttggtcatcatctcttgtatcatgtgtgtgtccatcatgtacatttacgggcaccagaactacttccaggacatccagatgatgctggggttcccaccacccctcttcttccagatctgctggcgcttcgtctcaccagctatcatctttttcattctcatcttctcggtgatccagtaccagccaatcacctacaaccaataccagtatccaagctgggccgtggccattggcttcctcatggctctgtcctctgtcatttgcattccactctacgccctgttccagttctgcagaacag

SEQ ID NO: 7433 - DNA, 198 bp, Bos taurus
  Clone ID: 32-LIB3058-015-Q1-K1-H7
cccggagccagctgccctgtcctggaaaggagtagaggggggcggcgaggggcgcgctgagctgctgcgggtggtgccgcgtgtagtcctgcgtgatgacctcactgatgtgctgtgccagggtgacgacccgctggtgacctttgacccctggggtggtctggagcagcgggctggacgagggctggttctcgggca

SEQ ID NO: 7434 - DNA, 353 bp, Bos taurus
  unsure (4): unsure at all n locations; Clone ID: 32-LIB3058-016-Q1-K1-H7
gttntggcagcctatcaagcaaaggctagtggtatctttatgtaagaaaatgactgtggatctgaaataagaaaaatctcagcaactaataacaaatcatttatttcatttgggtcttactgctttgtaaacaggttaaaaaacactgtaatactctaagcttctcttttccacactagacacacttctaggtggattctccatactattagactgtatagtgatgtgatttcccaagtggattttaatctttccattgagtgtgtcaatggacaaatcaactaattgttttgatggtttttaaggatgtgcaatgggccatacataatgaccaagaaatttttaaaagggta

SEQ ID NO: 7435 - DNA, 371 bp, Bos taurus
  Clone ID: 32-LIB3058-017-Q1-K1-H11
acgcgtacgcatatcgtgagctgacgcccttcttcctatgagagactgttgtgtcattgccctaaggacacaggctctaccagattcgaacctacatgctgctaaacctaatttacaagcaataacacacatggactttaaagctgggcctaaattcaacagctctaaaatggttactcatattcacgagcaccgatgctatccaatggtctaactctgtaccaatatagcactttagaccttgctgagacactggaaatactgtaacctactgtgctcattttgaccgctagaaaactagactcaaagattaagcgatttgacccaagatcacatacctacaagtaatgaagctagaagtcaaaccaatt

SEQ ID NO: 7436 - DNA, 481 bp, Bos taurus
  Clone ID: 32-LIB3058-017-Q1-K1-H7
gtcgaggcagagccgcggaatcgccgcgagatccggtctcggtccacgctgcccgtcgcgcagccagtcggccaacccagcgtacgccgctaccgcagccatgggagtgcaggtggagaccatctatcccggagacgggcgcaccttcccgaagcgtggccagacctgcgtggtgcactacacggggatgcttgaagatggaaagaaattcgattcctcccgggacagaaacaagccctttaagtttgtgctgggcaagcaggaggtgatccgaggctgggaagaaggggttgcccagatgagtgtgggtcacagagccaagctgactatcttcccagactatgcctatggtgccactggccacccaggcatcatgccaccaaatgccactctcatctttgacgtggaacttctaaaactggaatgacaggagtggcctgctacctgagctccccattcttggatgtgccacagaaggatc

SEQ ID NO: 7437 - DNA, 319 bp, Bos taurus
  Clone ID: 32-LIB3058-018-Q1-K1-H7
gtttatatcaatacatgttttcctaaagaagaaacacaaaactcattccaggtagctaggcattaactaagaaaaaaaagcacaaagttattagagctcttgaggaaatcggttgtcccagtgcccccagtcagaccactgtcccctcctgctctgtaaataatctctcccctctctacccttgaccccttctcataccgcccatatcccaccatggggagtaaagggaccagagtggtatctctggcaccacactagggattatcaggtaataaaagctttgactccctgaaaaaaagatagaagataaacatacaag

SEQ ID NO: 7438 - DNA, 430 bp, Bos taurus
  Clone ID: 32-LIB3058-020-Q1-K1-H11
ggaggaagcacctcaaggggagctgcgaagatgctgtccgtgcgcgtcgccgcggccgtggcccgcgccctccctcggcgagcggggctggtctccaaaaatgctttgggatcatccttcattgctgcaaggaacctgcatgcctgtaactctcgtctgcagaagactggcactgctgaggtgtcctctattcttgaagagcgtattcttggagctgatacctctgttgaccttgaagagactgggcgtgttttaagtattggtgatggtattgctcgggtacatgggctaagaaatgttcaagcagaagaaatggtagagttttcttcacgtttaaagggtatgtctttgaacttggagcctgacaatgttggtgttgtcgtgtttggaaatgataaacttattaaggaaggagatattgtgaagagaa

SEQ ID NO: 7439 - DNA, 327 bp, Bos taurus
  unsure (257),(290): unsure at all n locations; Clone ID: 32-LIB3058-020-Q1-K1-H7
gtgggaagtaattctattataatccagtgattactaccaacacttccttcctggataagctaaaatttagtgaaaatgctgactgaagaaaaatagggacgctaaagctgtagaaatctgtattccggtcagagagttgggctactatcttcttttccctttagaaagatgtggtagcttgaagaatgtcttaatgccataacaacaacctgatttgatgaaacttctaatttttcctgtaaggcttaatgctcctnctttttcttagcagagaaaatgctcttagctgngaacaagatgtaaggcagtttggcgtgttcacagttg

SEQ ID NO: 7440 - DNA, 445 bp, Bos taurus
  Clone ID: 32-LIB3058-022-Q1-K1-H11
gactttgaaggaccaaaggttgtaaaagacgattggtatcaccccacactgctagggtagtgtggtgcatatgattatcaaattgggcacttacaacactgtactgcctgtctgctgctcttgactgacctgactgaacatatctgagctgtattggtctgaaccatctacttgttacgagtttgcaaacctgactatcaggacatgtaccctgtgcaactactattgtggcaagtatgcttaattctagtctgcacaggacactagcagctaaatccaccgaataatacactgtatgtcatggcacaacctgacttcagatcagcatctatgtcctgtgatgacaactggattgtgttaaaatactatcaatggcaagacacactgctagaactaatgacccctgttaccagcctgtatcccacgcctgagctggcatgcagct

SEQ ID NO: 7441 - DNA, 420 bp, Bos taurus
  unsure (367): unsure at all n locations; Clone ID: 32-LIB3058-023-Q1-K1-H7
gttgtcgcacatttccactatgttttatcaataggagctgtatttgctattatagggggatttgttcattgattcccactattctcaggttatactctcaacgatacatgagccaaaatccacttcgcaattatatttgtaggcgtcaatataaccttcttcccacaacactttctaggactatctggcatgcctcgacgatactccgactacccagatgcatacacaatatgaaatactatctcatcaataggctcattcatttccctaacagcagttatactaatagttttcatcatctgagaagcatttgcatctaaacgagaagtcttgactgtagacttaaccacgacaaatctagaatganttaaaccgggaaatttggccctccaccatatcacacatttgaagaacccacct

SEQ ID NO: 7442 - DNA, 413 bp, Bos taurus
  Clone ID: 32-LIB3058-024-Q1-K1-H11
gttctagatcgcgagcggtcgagcttttttccttccaatgaatatttgcgactgattggctttaagattgactggttggatcttcttgcattcctagggaccctaacatttcaaaagcattgattatttggtccgatatatttatagcccaactctcacatccatacatgactactggaaaatctgtagctttgactagatggacctttgttgataaagtaatggctctgctaattaatatgctgtctaagatggtcatagcttttctttacaaggagcaagcgtcttttaatatcatggctacagtcaccatctgtagtgattatgaagcccaagaaaatagtctctccgcgtttacattgtttcatcatctatttgtcaagaagtaatggaccggatgccatgatcttagt

SEQ ID NO: 7443 - DNA, 415 bp, Bos taurus
  Clone ID: 32-LIB3058-026-Q1-K1-H11
agcctggggaggagcaaccgggccaccgctgccaccgccatgaaccagcgcagctctcgctcgcacgccctggtcacgctgacactgcgcacagcgtccccatcgcgcggtcccggcaccgcaggtacctcggcgcctgagccctgcgggggcctcgctgcacccacgccgggcctccgtccacgccgggctcgctcgctcctgcaggcacgctacacctcgtcgacctggcggggtccgagcgcgcctggaaggcggggacggccggaacgtcgcaggaagaccgggacggcgcccagcgtctacgggaggctcggaccatcaaccgctccctgctggcactgggaggcgtgatggccgcgctgcgggcccgccggccccacgtgcccttccgcgactcgcagctcacgcgcct

SEQ ID NO: 7444 - DNA, 426 bp, Bos taurus
  Clone ID: 32-LIB3058-029-Q1-K1-H7
tctaatcgcgagcggccgcccttttttttttttttttttttttttttttttgtttgtgtttttttttttttttttggggaaaaaaatcacatttattaagacaaccaccggctggacacaacacacatgctaaaaagtggcctgtcttaaaatttacttcaaatagtttgtttttcacaaccccacaatcattccagtgtttacaaattaaaaggcccactttaaacattaaacagtcatctgtaataaaaactttaacctacccccaaaaacttcttttaagaactataatgaatgactaatcatgcctttgaaaactgttaaatttctaaaggggccattaattcttatgggcattcctaaaaataccatctctttgttttgccctggaaaaacttaatatgagttacattttaaaacttaagg

SEQ ID NO: 7445 - DNA, 423 bp, Bos taurus
  Clone ID: 32-LIB3058-030-Q1-K1-H11
cggacgcgtggggtgaaagaactacagctgatagacattcagtaatggagaatggcggagaaaacagcactattcctgaccagagagctccagtcgcttcaacacacagtattagcagcagcaccaccccagatcgaacccggttcccaagaggcactgccagtcgtagcactttccacggtcagccccgggagcggcgcacagccacgtacaatggcccacctgcctcgcccagcctgtcccatgaagccacaccgttgtcgcagactcgaagccgaggctccactaatctttttagtaaattaacttccaaactcacaaggagtcgcaacgtgtctgccgagcaaaaggaggaaaacaaagacgcgaagcctcgttccctgcgcttcacctggagcatgaaaaccactagctgcatggacc

SEQ ID NO: 7446 - DNA, 356 bp, Bos taurus
  Clone ID: 32-LIB3058-031-Q1-K1-H7
gaactatttaacctgaatagttgtagacaaagaacaaaggaaaaccctcagtaaagggcattcttttgtagcatggtcattgtagagggagaaaaaaaaaacttaatatgagagtaggaaaaatcctgactgtatcctatatcctaataaaccaaaacaaagcaaagtgaaagcaaagtcgctcattcgtgtccaactctttgcgaccccatggactgtaaccaggctcctccatctgtgggattttccaagcaagagttacttgattagtgggttgccatttccttcttcagaggatcttcctgaccaggaatctaactcgggtctttttcattgtatgcttactctttaccatt

SEQ ID NO: 7447 - DNA, 417 bp, Bos taurus
  Clone ID: 32-LIB3058-032-Q1-K1-H11
acaaaataaaagatctgtgatctcatatatataatatttgttatctaaaatgaatttgggtagcaaataaaggtaaagtaattgctgtctcatccagtttaagagaaaaaatgatgtttcttatcagatttctgtaaaggccttactgcttcagttgaagcttataattgtgacactatcttgattcatcttcaaacctggttagctttcagttattattattgattgctaattgtactttcttttgatgtgattatttccttttgaatttatttctcttttttttcatatttgtttttttttttttctttttcttttatttttcttttttttttttttttgtttattttttttaatttatttttctcttactttttttttttttatatttttttatttcttttatttctttttttt

SEQ ID NO: 7448 - DNA, 436 bp, Bos taurus
  Clone ID: 32-LIB3058-034-Q1-K1-H7
tttgtttttttttttttctttcttaaaatctttacttttgagacaggacataagtgttacagacacacatggaaaagcaatacatgatcatagttgaaagcgaagacaatctagtcaaagtttttacgcctgtcagctaatgctgaagttgagtatgacatgctgcaaggctgaaaggaatggtaattaatattcctctccttcttcctctccctctccttccacagaatccacaccaacctcctcataatccttctcaagggcagccatgtcctcacgggcctcagaaaactctccttcctccatgccctcacccacgtaccagtgaacaaaggcacgcttggcatacatcaggtcaaatttgtggtccaggcgagcccaggcctcagcgatggctgtggtgttgctcagcatgcacacagctcgctgtactttg

SEQ ID NO: 7449 - DNA, 434 bp, Bos taurus
  Clone ID: 32-LIB3058-036-Q1-K1-H7
ggggtattcaattttacatcgtttcaatgcagccatggggacagaatggcggaactatatttccgtctgtgggctacgcacacacggagaactaggcgggcacccagtatcggagctcatctatatccacagcaagatgcttatcgcagatgaccggacagtcatcattggctcagcaaacatcaatgaccggagcttgctggggaagcgagacagtgagctggccgtgctgatcgaggacacagaaatggagccatccctcatgaacggtgtggagtatcaggcaggcaggtttgccttgagtctgcggaagcactgcttcagcgtgattctaggggctgctgctcggccacatctggatctccgagaccctgtctgtgatgccttcttccagttgtggcaagacacagctgagagcaatgccaatatctatg

SEQ ID NO: 7450 - DNA, 438 bp, Bos taurus
  Clone ID: 32-LIB3058-037-Q1-K1-H7
ctggtggtcaagtacctgcagtgttgtgtacaagcaggcaggctgccagctgctggcacgtgggcacggagacggcatccgtttcatcctggacgtgttactgcctgaggccatcatctgcgcgatctcagcagtagatgcagtggactacaagacggccgaggagaagtacatccgaggaccggcgctgagctcccgggaaaaagaaatatttgataaccagctcctagaagaacggaatcggcgatgctgaagcaggcggtggcagtgctccatgcctgcgctctgggggccgggcaggccgtttgcctccttctgtctgtgggttctgttttcctggctcttgtggaaggtatacttcccaacagaacaggcttttaaagaaaagaaacactttattttttattttatttttttttaaatttcacatcattacct

SEQ ID NO: 7451 - DNA, 417 bp, Bos taurus
  Clone ID: 32-LIB3058-038-Q1-K1-H7
gacacacgctgcccatcctgggcttggttctgctcctctactcctgggccgcagccgtcgtggtcccctgcctgtcctccgtggtcgccggctatggctcgcccgggcagaagggcacggtcatgggcacgctgcggagcttgggcgccctggccagggccgtggggcccgtggtggccgcctcagcgtactggctggccggcgcccgtgtctgttacaccgtgtgcgcggcgctcttcctgctccccttctccatcctgcggaccctgagccccccggcgcggacactcaaggccgagtagctgggccgcccgcctgcgatgatgtgaggatggggggctgcgcgggccctggccggaagcccccaacactgccctctggggaagaagaggaagacacctggggcagggtgcttct

SEQ ID NO: 7452 - DNA, 324 bp, Bos taurus
  Clone ID: 32-LIB3058-040-Q1-K1-H7
gcggggtcatgacttcttgacctccactcaattctcacacttgccccaaaagcatggttgggtgccagtcccttcggctccttccagaacctgagaccaagctcaagtttttgggagacatggtcaccattcccatggtactgatgcttgctggatttagggagggcatcctgctaccatgcctcttcccaacatcctggggaccagtcttctgttctgttctgtttgtcatcatttaatgttcccactgcatgctgtgacttccccctacccaaacaagagaccccactgcatgttctgagacagtgtggggtgctaagataa

SEQ ID NO: 7453 - DNA, 405 bp, Bos taurus
  Clone ID: 32-LIB3058-041-Q1-K1-H11
tttgcatgcttctctcagcctccctgattctggggaggagaaacgctggaccagcatcggcactgatgtcaggtgacagggacaagctgcacgagaggcagagacaaggtgacactcaggactgtccactgagggtcactggggccgccgcagaagaaaccctgcaggaaggctacagctgcaggggtgcgagtgaagaaaaaataatctctgagaccctggacgctttggttttgtgatccaagcactcgtgaatcaaacaccaggcattggtacttgcggtccggacctcagtgatgccggggaggctgggtttcgacaccacagacgagaagcagacaggcggcactggggccaaacagaatgagccaggtagaagccgtgcactggtcccagcagagcatc

SEQ ID NO: 7454 - DNA, 418 bp, Bos taurus
  Clone ID: 32-LIB3058-041-Q1-K1-H7
atagatgttagctttgcctttttgagtatgttttcaatttctaagaacttacaataggtgaccccaaatccttcaaagaattttgttccacaaatgtttttcttaatgaagaagtgttaccttattaaaatgaccaccactcaaaaccatttttatgtggtctaaatagcaagtttacagtttcataccaattacccaaaacctaattaccaacagaccacagacctcctacttttatagacttgaatattgaattaatttcaattaggtttgatatttatttcatgttttcttatctaaagtttcctggaataaagttcaatattcaggaaaagaaagaaaaaaaaaaacccaaatgcttgagtttaagccatcttcaaaagaaacttgccttctaaatcattgtgtttcagaacat

SEQ ID NO: 7455 - DNA, 376 bp, Bos taurus
  unsure (308): unsure at all n locations; Clone ID: 32-LIB3058-042-Q1-K1-H11
ttaaatagtaggtctttgaactatggatctcgatgaaagaagataatatttgagactgaagccatgagttttatattgtttcaccaagagggctgaaagctatgaactcagagtttaatgtgaatgaggctgttgatagtttccaagaaacagttattggttcactagatcgctcattcctttctcaaaagctcaagtgtgtcttttagataatcttcagtcatcctgtctagttggtatgtttaacattatgtggtgttctgtattgtgaaattttaagattttgaagcatatgttgtatatgcatngctatctgtatatatgtgtaagaatgttggtatatatgagaacaaaagacagggaactcaaggaagaa

SEQ ID NO: 7456 - DNA, 352 bp, Bos taurus
  Clone ID: 32-LIB3058-042-Q1-K1-H7
gagaggagatgctcacactcagatggcatgcccttcgccttaaaatgtgtaggtgagagagcttcgtggccctaaccatggcctctgggctgcagaagggtctcccgcgtgctttccctgtttctctcccgcccgttggtcttggacccaaacatcccattggccacttccacacattgcccttagtgacccagaaatcagggtcagtgattcgagtgtgttatatgtatggtttcacagttttatatcccatgaggttgcgttctacaaactgtattttcaggtggagaaagtttcaagattgagctctgaaaacagcgctaaaatcaaagctggttcctgtgaagaatat

SEQ ID NO: 7457 - DNA, 413 bp, Bos taurus
  unsure (321): unsure at all n locations; Clone ID: 32-LIB3058-043-Q1-K1-H7
ccgccacgtgagttctctagcggctgctttaacacgcaccgtgggcagcatgtcggcgacacgggcggctcgtaagaggggaaagccggcctcaggggccggggctggtgcggaggccttcaagcggcggcgaaagggcgactcctctggggacaaagtcaagtccaagggtggcggcaagatgaatgaggagatctcgagcgactcggagagtgagagtctagctctcaggaggactgaggaggaggaggaagaggagctggaggagaccgcacaggagaagaagctgcgcttggccaaggtctacctggagcagctcangcagcaagaggaggagaaggctgaggcccgcgaatttgaagaggaccaggtggcaaggaggctgaaggaggatgtgctcgagcagaggggca

SEQ ID NO: 7458 - DNA, 432 bp, Bos taurus
  Clone ID: 32-LIB3058-044-Q1-K1-H11
cgacacacgagcctacttcacatcagcctttataattattgctattccaaccggggtaaaagtcttcagctgattggcaacacttcatggaggtaatatcaaatggtctcctgctataatgtgagccctaggctttattttcttatttacagtagggggtttaactggaattgtcttagccaactcttccctcgatattgttcttcacgacacatactacgttgtcgcacatttccactatgttttatcaataggagctgtatttgctattatagggggatttgttcattgattcccactattctcaggttatactctcaacgatacatgagccaaaatccacttcgcaattatatttgtaggcgtcaatataaccttcttcccacaacactttctaggactatctggcatgcctcgacgatactccgacta

SEQ ID NO: 7459 - DNA, 359 bp, Bos taurus
  Clone ID: 32-LIB3058-044-Q1-K1-H7
cccagaattgagttcccacttaatccttttgctcctcttcctgctccatctctatgccagcttgccaccctaggctccagcagcattaagcctgtcagacagcacccaccctacacccagcaacactaacagggcactcaccccaaagggtggcctggaggggcatggccagcagcttgggctagaattgggagggaggagagaaagcagggagggcagagagacctcataaatcaccctgccctccatatgccgaacctctgttgtcatggcaactgttgccagagctggaagtgtctggggcctccagaaaggggcctgtgagtttccttgagctgctagagggaaactgagagtct

SEQ ID NO: 7460 - DNA, 432 bp, Bos taurus
  Clone ID: 32-LIB3058-047-Q1-K1-H7
attgtggttaataaagaattaatgacttttttttaaggccatgtagcatcctacaacagggttaaactagtaccaagaatagtcagcctggccaataacaaatcttaccagttgctgattggttgatgtgtgggtttgtttgtgtgtatttttccctggtgaacccttttttttatcctgtggctttttcacttaaaactagcctaaccctggaattttcctgcgtccaagaaaacaatcacagaatactggtttaaatactttgatacctgtggctaattctgctgtcttgatgcaggctgttagagttggattagaagtcagtaattagtgctttatgccatcactgaactgaaacacagtgatcctcgctgaagatggagggcactctgtcagcgtgtactgtcagcgtacaaggtgttctggtatctt

SEQ ID NO: 7461 - DNA, 423 bp, Bos taurus
  Clone ID: 32-LIB3058-048-Q1-K1-H11
gtgtatttttagttgaattgaggaaactgaatctttccaatactgcaggctaagacttgcagtatgcacggctgtcctgtggggctctgtggctttctccccatcacaccacagaactgtatccttgggaggcatgtgggcccaattatcatcctcatgactatttcacttgatggaaaaatctgtagtaaatcaagaatattaagtctgtttgttaatattgaagtcttcagaagccagctgtgctaaaagtatttactgcttatatttttagacgagtttgttaaatgctaatattctctgtcatggaatggtctaattgtccattttctgagattgatagttacatagtaaatggaagagttatttatctcttgaggtcttctaaacttaaagttgaacatgtgcctttatgtaaataga

SEQ ID NO: 7462 - DNA, 396 bp, Bos taurus
  unsure (327),(371): unsure at all n locations; Clone ID: 32-LIB3058-048-Q1-K1-H7
caagtccaccacgactggccacctcatttacaaatgcgggggcatcgacaagaggaccatcgagaagtttgagaaggaggcggccgagatgggaaagggctccttcaagtatgcctgggtactggacaagctgaaggcagagcgggaacgcggcatcaccatcgacatctccctctggaaatttgagaccaccaaatactacatcaccatcatcgacgccccaggccaccgcgacttcattaagaacatgatcacaggcacatcccaggcggactgcgccgtgctgattgtggccgcaggagtgggtgagttcgaggcaggcatctncaagaatgggcagacccgggagcacgcgctgctggcctacacgnctggcgtgaagcagctcatcgtggg

SEQ ID NO: 7463 - DNA, 430 bp, Bos taurus
  Clone ID: 32-LIB3058-049-Q1-K1-H11
cggaaactctcgccttgcgagcacgctttgaatccagttcctcaggaacctcgccaaaacccacactaatagggacgccacttcccggccgggccctcagtcgctccaggcccccaccccctctaaatacagcacccccagccgaactctctcagtcaaggctccccagactgaaaactggtccctaaagccccgcctcctccataggttccgccccggctctgataaaaccccgcctccaggtcggcaggctccgccttcttttcttccctgcggggtgattcagtccggtgattgggtttgtggcgccaggccttgcccggatagttgtcagtatacttgtcactccacaccttctcccggcgtgagagccgagccccaggttagccagaaccctcaccctcacttccacttctgtctctcctccact

SEQ ID NO: 7464 - DNA, 433 bp, Bos taurus
  Clone ID: 32-LIB3058-049-Q1-K1-H7
ccggagttcactcaaactcatgtccatttactcagtgatgccatccagccatgaaatttaaagatgcttgctccttgaaagaggagctattacaaacctagagagcatattaaaaaccagaggcatcactttgctgacaaaagtctgtctggtcaaagctatggtttttccagtcatcatgtacgaatgtgatagctgtaccataaagaaggctgagtgccaaacaattgatgcttttgaactgtgttgtttcggaagactcctgagagtcccttggctagcaaggagatcaaaacagtcaatcctaaagttaatcaacactgaatattcattggaaggacagatgttgaagctcaggctccaatactttggtcacttgataccgagagctgactcaaagagtctgatgttagaaaagattgagggcaggatg

SEQ ID NO: 7465 - DNA, 445 bp, Bos taurus
  Clone ID: 32-LIB3058-050-Q1-K1-H11
aagaggtcagaagtgtcctgactgtggctttcagtcctgaaaaactgagtgagatgactcctttaatcagccgggcctgcgatgtgcttctggctcacctagagcgtcacgcacagtctggggaggcttttgacatccagaggacctactgctgctacaccacagatgtggtggccagtgttgcctttggcaccgaagtgaactcccaggaggctcctgagcaccccttcgtggagcactgcaggcgcttctttgcatcctccatccccaaacctctcctggttttactcttatcatttccatccataatggtcccactggcccggattttgcccaataagaaccgagatgaactgaatggcttttttaacaaactcattaggaatgtgattgccttgcgggaccagcaagcagccgaagagaggaggagagatttcctccaaat

SEQ ID NO: 7466 - DNA, 434 bp, Bos taurus
  Clone ID: 32-LIB3058-052-Q1-K1-H7
gagcgctttgccgagctgcctgagtttcggcctgaggaggtgctgccctcgcccaccttgcagtctttggccacctcaccccgggccatcctgggctcctaccgcaagaagaggaagaattccactgacctggactcggcccccgaggaccccacctcgcccaagcgcaagatgaggcggcgctccagctgtagctcggagcctaacacccccaagagtgccaagtgcgagggcgacatcttcacctttgaccgcacaggcacagaagcggaggacgtgcttggggagctggagtacgagaaagtgccctattcgtcgctgcggcgcaccctggaccagcgccgggccctggtcatgcagctcttccaggaccacggcttctttccaatcacccaagccacggcaggctttcaggcccgctatgcggacatctt

SEQ ID NO: 7467 - DNA, 307 bp, Bos taurus
  Clone ID: 32-LIB3058-053-Q1-K1-H7
tctagatcgcgagcgggcgacctttttttttttcttttctacttacaatgcttatacagattactcgaatgagatatactacaaggcctggtaaaaatgcaacctgataacgaatgacgagctatattctcaatagaactttggcataagaatgcgcatggacagaccctgtacgcagaacgtctatgctggcatcctcaagtcccacgagaacgggttcatggaagacctggacaagacgtgggttctgtaccaggagtgcgatttgtgcagtaacgtccctgctaccctcacctttcataatatg

SEQ ID NO: 7468 - DNA, 417 bp, Bos taurus
  unsure (339),(346),(348),(361),(366),(375): unsure at all n locations; Clone ID: 32-LIB3058-054-Q1-K1-H11
aaataaataaaggacaacagaaacacacacacccctgccccacccaataatgacttgagtgggtaggaagtgatgaccttccttgcctcaaatggagctttgtctttggagggtggggagatagaatgtgaagtgacgaggttccatgacttacatgcttcaaaaatatatagaatatattcacaagtcagatgccttgtcttcatgtttgcagacaactgagaccctggttcaattcctgggtcaggaagatttgctggagaagggataggctacccactccagtattcttgggcttcccttgtagctcagctggtaaagaatccacctgcaatgcangagactngngttcagtccctgngttgngaagatccnctggagaagggaaaggctccccactccagtgttctggcctgg

SEQ ID NO: 7469 - DNA, 348 bp, Bos taurus
  Clone ID: 32-LIB3058-054-Q1-K1-H7
tccctggtcgactccactcgtccgggaagaaataataattaaaaataaatgtaatcctgctgtgaaaggtatatattactctagatttttcttactgtaaatattgtaagattgtaatactgtcgatattttattaaccaacaaatgttaatctatgtgaattcagacttattttaaatgtgcttcttatttactgtgtgtggtccctgttgctgacagtattaagttatattctgatgttagattaactttattaatgaatgtaaacattaatgttttcttatgttaaatctaatatagtataaggattactattcttgtcattattatattctgtttatttattct

SEQ ID NO: 7470 - DNA, 325 bp, Bos taurus
  Clone ID: 32-LIB3058-056-Q1-K1-H7
ggcctcccaagggcacaggcctgcaccgctatgtctggctggtttacgagcaggaaggaccactgaagtgtgatgagcccattctcagcaaccgatctggagaccaccgtggcaaattcaaggtggcctctttccgcaaaaagtacgagcttggggccccagtggccggcacgtgttaccaggccgaatgggatgattatgtgcccaagctctacgagcagctgtctgggaagtagaggagatggacaccgtctcagagttcccaaacagtgtttcagtagagtgatgcatgtagattttcccccatctctctgcctaagccctg

SEQ ID NO: 7471 - DNA, 241 bp, Bos taurus
  Clone ID: 32-LIB3058-057-Q1-K1-H7
ccgaattgaaataagttctttatacagtggtctctctgaatcagttcagagatgggatgggggagaattgctttctaggtttcaaacttctatgcattagtgcagatgttgagaatgtgtaaagatattagtaatttgattatttctatgtatgtttttaaaagaatcgtttgttctttttgagatattatacctttttattggcattctaccaattgtatctaaaccttataactttatg

SEQ ID NO: 7472 - DNA, 449 bp, Bos taurus
  Clone ID: 32-LIB3058-058-Q1-K1-H7
ctttggtgggggaactggttctgggttcacctccctgctgatggaacgcctctcagttgattatggcaagaagtccaagctggagttctccatttacccagccccccaggtttccacagctgtcgttgagccctacaactccatcctcaccacccacaccaccctggagcactctgattgtgccttcatggtagacaatgaggccatctatgacatctgtcgtagaaacctcgacattgagcgcccgacatatactaacctgaataggctgataggtcaaattgtgtcctccatcactgcttccctgaggtttgatggcgccctgaatgtggatctgacagagttccagaccaacctggtgccctatccccgcatccacttccctctggccacatacgcccctgtcatctctgctgagaaagcctaccatgaacagctttctgtagcag

SEQ ID NO: 7473 - DNA, 396 bp, Bos taurus
  Clone ID: 32-LIB34-002-Q1-E1-H7
acttgggatatgaatatgtcactgctcttcagaatctaagagaaagtaaacccccggactcctcaaaggatgagtgcatggtgaagtggtgtgcaattggtcaccaggagaggacaaagtgtgatcggtggagtgggttcagcggcggggcaatagagtgtgaaacagcagagaacactgaagagtgcatcgccaagatcatgaaaggagaagctgatgccatgagcttggacggaggctacctctacatagcaggcaaatgtggcctggtgcctgtcctggcagagaactacaaaactgagggtgaaagttgcaagaacacaccagaaaaagggtatcttgctgtatctgtggttaaaacatcaaatgctaatatcaactggaacaatctgaaag

SEQ ID NO: 7474 - DNA, 400 bp, Bos taurus
  Clone ID: 32-LIB34-003-Q1-E1-H7
tgtcaaccccaacaagaccaccttcggggggaattgctccgccacactggcaactctggagctccacagcgagaacctcctgctcctggcgctccagttcgtgatgaacgagagctccagcagggtgttccttcaaggagtccagctgaacctgaccctgcccgacgccaaagaaggcagcttcacggccaccaacagctcactgagggcgctgcaggccacggcggggaactcgtacaagtgcaacgctgagcagcgtctgcgggtcaccagcagcttctccctcaacatgttccgagtgtggctgcaggcgttccgcgtggacggggacaagttcgggcctgtggaggagtgccagctggacgagaacagcatgctgatccccatcgctgtgggcggc

SEQ ID NO: 7475 - DNA, 393 bp, Bos taurus
  unsure (375): unsure at all n locations; Clone ID: 32-LIB34-004-Q1-E1-H11
ccaagctgaagataaaggtgcctgcctgctaccaaagattgaaactatgagagaaaaagtactgacttcatctgccagacagagactcaggtgtgccagtattcaaaaatttggagaaagagctttaaaagcatggtcagtagctcgcctgagccagaaatttcccaaggctgagtttgtagaagttaccaagctagtgacagatctcacataagtccacaagggatgctgccatggtgacctacttgaatgcgcaaatgacaaggcagattctggcaagttacaatgtgataaatcaagatacaatctccagtaaactgaacgaatgctgtgataagcctttgttggaaaaatcccactgcaatgctgaggtanaaaaaagatgcccatact

SEQ ID NO: 7476 - DNA, 412 bp, Bos taurus
  unsure (383): unsure at all n locations; Clone ID: 32-LIB34-005-Q1-E1-H11
aaaggctctcgcttctgctgctgctacagctgacttgctactttagcggtgggagttgtggaaaggtgctggtatggccagtggaatttagtcactggctgaatataaagacaattctggaggaacttgtcacaaggggtcatgaggtgactgttctgatatcttcagcttccactattcctaattccagcaaaccatctactatgaaatttgagacttttcctgtatctttaacacaaactgattatgagaattttatagaacgtcttcttgaggaatggacgtatgtgtcgaaagattccttttggtcctatctttcaacagtgagaagtttattttgggaattttttgatactactttaagtatatgtaaagacgctgtntccaacaagagattaatgacaaaactgca

SEQ ID NO: 7477 - DNA, 291 bp, Bos taurus
  Clone ID: 32-LIB34-005-Q1-E1-H7
aggctcctcctgagtcagccctatccacggcagagatgttttccgtgagggacctctgcctgggcctgagtttggtgggtgcaattaagacagaagatggtactgatcctcccagtggtgactttttaactgaaggaggaggggtgcgtggcccaagacttgtggaaagacagcatcctgcctgcaaagagacaggctggcccttctgctctgatgaagactgcaatacaagatgcccatctggctgcaggacgcaagggttgattgctgaagtcgatcaacattttacat

SEQ ID NO: 7478 - DNA, 201 bp, Bos taurus
  Clone ID: 32-LIB34-006-Q1-E1-H7
cacaggcatctcagcctaccctgagagtaagaggaaaaaagagaaatgaaaactcagagcttattcatctgttttccttttctgttggtgttaaaccaacactctcactaaagaacgtaaatttctttaaatattttgcttcttttgtttgtgctacaattaataaaaaatgaaaagactctaaaaaaagagaaaaaatca

SEQ ID NO: 7479 - DNA, 379 bp, Bos taurus
  Clone ID: 32-LIB34-007-Q1-E1-H11
gccaggcctagcaggcccctcgcgctgccgctgcctctgcctccggcccgcctgccgctgcggggccaccatgctcctgcccaggcctggagactgaccctaaaggcgcaccatctctcagctccgcccccacctgccggaccccagggtcccgccccggccccggaggtcagccggggaatcattaactagaggctgtgacatggcggagaaggagggtggccggactgtgccatgctgctccggacccaaggtggccgctctcactgtggggaccgtcctgctcctgacaggcatcggggcagcgtcctgggccattgtgactgttccactcaggagtgatcacgagccactgtttccagtgcaagtcggcccggcg

SEQ ID NO: 7480 - DNA, 397 bp, Bos taurus
  Clone ID: 32-LIB34-009-Q1-E1-H7
aggacgcggcggcggggccggcaaccgggcctagagcgcagagccgggcggcgcggcggcggcgccatgacgggctgctgcacggtgctgggggccttcctgttcgagtacgacacgccgcgcatcgtgctcatccgcagccgtaaagtggggctcatgaaccgcacggtgcagctgctcatcctggcctacgtcatcgggtgggtgtttgtgtgggaaaagggttaccaggaaacagactctgtggtcagctcagttactgtgaaagccaagggcgtcaccatgaccaacacctctaaacttggattccggatctgggatgtagctgattatgtgattccagctcaggacgaaaattctgtcgtcatcatgaccaacatggtcatcaccatgaatc

SEQ ID NO: 7481 - DNA, 415 bp, Bos taurus
  Clone ID: 32-LIB34-010-Q1-E1-H11
aggtgtaaagttgcatcccttcgtgaaacctatggtgacatggctgactgctgtgagaaacaagagcctgaaagaaatgaatgcttcctgagccacaaagatgatagcccagacctccctaaattgaaaccagaccccaatactttgtgtgatgagtttaaggcagatgaaaagaagttttggggaaaatacctatacgaaattgctagaagacatccctacttttatgcaccagaactcctttactatgctaataaatataatggagtttttcaagaatgctgccaagctgaagataaaggtgcctgcctgctaccaaagattgaaactatgagagaaaaagtactgacttcatctgccagacagagactcaggtgtgccagtattcaaaaatttggagaaagagctttaaaag

SEQ ID NO: 7482 - DNA, 376 bp, Bos taurus
  Clone ID: 32-LIB34-010-Q1-E2-H7
ttcgaaactgttgttatatacgaaaagtttttcacagttgaacctcagcacattccatgtgtactaatggctttcttagatcacaggggtctgcggcactctagtgctaaagtccggagcagaaccgcttacctattctccagatttgttaaatctcttaataaacaaatgaatcctttcattgaggatattctgaatagaatacaggatttattagagctttctccacctgagaatggttaccagtctttgttgagcagcgacgatcaattatttatctatgagacagctggagtgctaattgttaatagtgagtatccagcagagcggaagcaagcattaatgaggaatctgttgactccactcatggagaagt

SEQ ID NO: 7483 - DNA, 409 bp, Bos taurus
  Clone ID: 32-LIB34-011-Q1-E1-H7
cccacgcgtacgatacatcaaggcagagccagccagccctgacagcccaaagggttcctcggagactgagactgagccccccgtggctctggctcctggcccagcccccacccgctgcctcccaggccacaaggaagaggaggatggggatggggctgggcctggcgagcagggtggtgggaagctggtgctcagctccctgcccaaacgcctctgcctggtctgtggggatgtggcctccggctaccactatggtgtggcatcctgtgaggcctgcaaagccttcttcaagaggaccatccaggggagcatcgagtacagctgtccggcctccaacgagtgtgagatcaccaagccgagacgcaacgcctgccaggcctgtcgcttcaccaagtgcctgcgggtgggc

SEQ ID NO: 7484 - DNA, 415 bp, Bos taurus
  Clone ID: 32-LIB34-012-Q1-E1-H11
atctcgagcacaagcgttgtcttttatttccttcctcgggtagcggcggcttcccaccaccaccacctggaagcgcagggaggagacggaggggtgggcatggggacgaccctcgcagctccagggctgggtccatcctgagaggtcggggctgcaggaggcagggggctcccagtgcggggtgggggaaaggagccactccctccccagcagtgagagcgaatcacggtggctacatggacccagagctcagccagggaggaaggtggagacgaggagacgagacaccggctccatgactcagctggctgggagaagtggggctggatgcggactccgacccccggcagcacccacagtgaacaggcctgcgccagagagcctgccagagagcctgtgtgtcggggtggagaag

SEQ ID NO: 7485 - DNA, 399 bp, Bos taurus
  Clone ID: 32-LIB34-012-Q1-E1-H7
ttcgccggtccacccacgcgaccgagaatctaagagaaagtaaacccccggactcctcaaaggatgagtgcatggtgaagtggtgtgcaattggtcaccaggagaggacaaagtgtgatcggtggagtgggttcagcggcggggcaatagagtgtgaaacagcagagaacactgaagagtgcatcgccaagatcatgaaaggagaagctgatgccatgagcttggacggaggctacctctacatagcaggcaaatgtggcctggtgcctgtcctggcagagaactacaaaactgagggtgaaagttgcaagaacacaccagaaaaagggtatcttgctgtagctgtggttaaaacatcagatgctaatatcaactggaacaatctgaaagacaagaagt

SEQ ID NO: 7486 - DNA, 433 bp, Bos taurus
  Clone ID: 32-LIB34-014-Q1-E1-H11
aagaagcaaaagatgccttcctgggctcgtttttgtatgaatattcaagaaggcatcctgaatatgctgtctcagtgctattgagacttgccaaggaatatgaagccacactggaggaatgctgtgccaaagatgatccacatgcatgctattccacagtgtttgacaaacttaagcatcttgtggatgagcctcagaatttaatcaaacaaaactgtgaccaattcgaaaaacttggagagtatggattccaaaatgcgctcatagttcgttacaccaggaaagtaccccaagtgtcaactccaactctcgtggaggtttcaagaagcctaggaaaagtgggtactaggtgttgtacaaagccggaatcagaaagaatgccctgtactgaagactatctgagcttgatcctgaaccggttgtgcgtgctgca

SEQ ID NO: 7487 - DNA, 418 bp, Bos taurus
  Clone ID: 32-LIB34-014-Q1-E1-H7
aagaagccagaatgcagagttaagaatggagtaaggaatatcgaattaattttttaagtgtgtagatgcttttttctttgttgtttaaatataaacagaaatgtaccttttataataaaaaagaagttgagtaaaaaaaaaaaacacaaacctgttagtttcaaaagtgacattgcttgcttaaaggttctgaagttaaggcttgttaactttctcttagttttgatttgaggcatcccgtaaagttgtagttgcagaatcccaaactaggctacatttcaaaattcagggctgtttaagatttaaaatcacaaatgttaacggcagtaggtgccaccatgtaaaagtgagctcagatgtctctaaaaatgtttcctttatataaaaaaacacatggcggttgaatcttaaggttaaa

SEQ ID NO: 7488 - DNA, 393 bp, Bos taurus
  Clone ID: 32-LIB34-015-Q1-E1-H7
gttggcgttaacaaaatggattccactgagccaccctatagccagaagagatacgaagaaattgttaaggaagtcagcacctatattaagaaaattggctacaaccccgacacagtagcatttgtgccaatttctggctggaatggtgacaacatgctagaaccaagtgctaatatgccatggttcaagggatggaaagtcacccgtaaggacggcaatgccagtggaaccaccctgcttgaagctctggattgcattctgccaccaactcgcccaactgacaaacccttgcgtttgcctctccaggatgtctataaaattggtggtattggtactgtccctgtgggtcgtgtggagactggtgttctcaaacctggcatggtggtcaccttt

SEQ ID NO: 7489 - DNA, 396 bp, Bos taurus
  Clone ID: 32-LIB34-016-Q1-E1-H11
gctggtctcaacgtacttcgaatcatcaatgagccaactgctgctgctattgcctatggcttatacaaaaaggttggagcataaagaaacgtgctgatctttgatttagggggtggcacttttgatgtgtcaatcctcactattgaggatggaatctttgatgtcaaatctacagctggagatactcacttgggtggagaagactttgacaaccgcatggttaaccattttattgcggagttcaagcgtaaacacaagaaggatatcagtgaaaacaagagggctgtccgtcgcctccgtactgcttgtgagcgtcctaagcgcactctctcttccagcacccatgccagtattgagattgattccctctatgaaggaatcgacttctatacctct

SEQ ID NO: 7490 - DNA, 405 bp, Bos taurus
  Clone ID: 32-LIB34-016-Q1-E1-H7
gccccgggcccgccgacaccatgagttggtcctcgcaccctccgagtgtaatcttctacattctttcattgctttcttcagcatgcctggcatatgttgctacccgagacaactgctgcatcttagatgaaagatttggtaattattgccgaactacctgtggaattgcagatttcctgagtaattaccaaaccagtgtagacaaagatctacgaactttggaaggcatcttatatcatgttgagaacaaatcatcagaagccagagagctggtcaaagcattccaaatcagctataaccctgatcaaccatcaaagccatatagcatagagagtgctaccagtaattccaagagtatgatggaagacattacgacatatgaggcactggtatcaacacatgaat

SEQ ID NO: 7491 - DNA, 407 bp, Bos taurus
  Clone ID: 32-LIB34-017-Q1-E1-H11
accggaaccaatgatgcccatggaccagtcatccatgcactcagaccacgcacagacagtaattccatataatccttcaagtcatgagagtttggaccaagttggtgaagaaaaggaggcaatgaacaccagggaaagtggcaaagcttcttccagtttaggtcttcaggactttgatttgctccgagtaataggaagaggaagttatgctaaagtactgttggtacgattaaaaaaaacagatcgtatttatgcaatgaaagttgtgaaaaaagagctgcttttaaatggtactattttccttaggacgtttgttctcaaattttagaatgtggaataatcacctagtaagtttgttgtaaaaagcacattgttggatccaccttagaattctgttgggtctcggg

SEQ ID NO: 7492 - DNA, 410 bp, Bos taurus
  Clone ID: 32-LIB34-017-Q1-E1-H7
gttctagatcgcgagcggccgcccttttttttttttttttttttttttttttttttttttttttttttttttttttgctagtggaataaataatcttaaattttgtatggaaacacaaaagactccaaacagctaaaacaatcttgagaaagaagaataaagctggaggtatcacgctccctaaaaatttcaaactacactataaagctacagtcatcaaaatgttatgttacaaaaacacacagatcaaacagaatagagagcccagaaatgaacccacacttatatgggcaattaatctacagcaagggggccaagaatatacaataggaaaaagacagcctcttcaataaacaattttagaaaaactggatagctacaggcaaaagaatcaaactgccaactttctc

SEQ ID NO: 7493 - DNA, 417 bp, Bos taurus
  Clone ID: 32-LIB34-018-Q1-E1-H7
tcccgggccgaacacgcgtcagcttcgacctcctataatgaccatgatgagactggccaaaactcctctgactgtggcagggtacaccattcctccaggacaccaggtgtgtgtgtctcctacgtgtcaagcagagacttaaagactcatgggtagagcgtctggacttcaatcctgaccgctacttagaggacagcccagcatcaggagagaagtttgcttacgtgccatttggagctgggcgtcatcgttgcattggggagaattttgcctatgttcagatcaagacaatttggtccactatgcttcgtttatatgaatttgatctcattgatgggtattttcccactgtgaattatacaactatgattcacacccctgagaaacccatcatcagatacaaacgaagatcaaaat

SEQ ID NO: 7494 - DNA, 398 bp, Bos taurus
  Clone ID: 32-LIB34-019-Q1-E1-H11
cgagcgccatggccgccttacgtgccctgctgccccgcgtccgcgccccgctgcggccctggctcttctgcccggtgcagcgctccttcgcctcgagcgcagcctttgagtacatcatcacagcaaagaagggaaggaacagcaacgtggggttgatccagctgaaccgccccaaggccctcaatgcgctctgcaacggcctgatcgtggagctcaaccaggcactgcaggccttcgaggaagacccagccgtgggggccattgtcctcacaggcggggagaaggtatttgcagctggagccgacatcaaggaaatgcagagcctcacgttccagaactgttactctggcgggtttttgagccactgggaccagctcacacgtgtcaagaagccagtc

SEQ ID NO: 7495 - DNA, 394 bp, Bos taurus
  Clone ID: 32-LIB34-019-Q1-E1-H7
cggacgcgtgggcgcggtttttgagtgagccccggcccggtcccttcttccgccgccgccatggggtgcacgttgagcgccgaagataaggcggcggtggggcgaagcaagatgatcgaccgcaacttgcgggaggacggggagaaagcggccaaagaagtgaagctgctgctactcggtgctggagaatctggcaaaagcactattgtgaaacagatgaaaatcattcatgaagatggctattcagaggaagaatgtaaacaatataaagtagttgtctacagcaatactatacagtctatcattgcaatcataagagccatgggaccggcaaagaatgactttggggaaactgccagagcagaccatgcccggcaaataattggtttaactg

SEQ ID NO: 7496 - DNA, 408 bp, Bos taurus
  Clone ID: 32-LIB34-020-Q1-E2-H7
atgaattttagctaagcagcccgaaaccagacgagctactcacaaacagtttaccaagaactaactcatctatgtggcaaaatagtgagaagatttgtaagtagaggtgacatgcctaacgagcctggtgatagctggttgtccagaaaatgaatctaagttcagctttaaagataccataaattcagataaaccccactgtagctttaaaagttagtctaaaaaggtacagccttttagaaacggatacaaccttgactagagagtaaaatttaacactaccatagtaggcctaaaagcagccatcaattaagaaagcgttaaagctcaacaacaaagattaaatagattccaacaacaaatgattaactcctagccccaatactggactaatctattatagaatag

SEQ ID NO: 7497 - DNA, 421 bp, Bos taurus
  Clone ID: 32-LIB34-021-Q1-E1-H7
cgtcgagatacacacaagagtgagattgctcatcggtttaaagatttgggagaagaacattttaaaggcctggtactgattgccttttctcagtatctccagcagtgtccatttgatgagcatgtaaaattagtgaacgaactaactgagtttgcaaaaacatgtgttgctgatgagtcccatgccggctgtgaaaagtcacttcacactctctttggagatgaattgtgtaaagttgcatcccttcgtgaaacctatggtgacatggctgactgctgtgagaaacaagagcctgaaagaaatgaatgcttcctgagccacaaagatgatagcccagacctccctaaattgaaaccagaccccaatactttgtgtgatgagtttaaagcaaatgaaaagaagtttggggaaaatactatac

SEQ ID NO: 7498 - DNA, 438 bp, Bos taurus
  unsure (410): unsure at all n locations; Clone ID: 32-LIB34-022-Q1-E1-H11
agaaaaagtactgacttcatctgccagacagagactcaggtgtgccagtattcaaaaatttggagaaagagctttaaaagcatggtcagtagctcgcctgagccagaaatttcccaaggctgagtttgtagaagttaccaagctagtgacagatctcacaaaagtccacaaggaatgctgccatggtgacctacttgaatgcgcagatgacagggcagatcttgccaagtacatatgtgataatcaagatacaatctccagtaaactgaaggaatgctgtgataagcctttgttggaaaaatcccactgcattgctgaggtagaaaaagatgccatacctgaaaacctgcccccattaactgctgactttgctgaagataaggatgtttgcaaaaactatcaggaagcanaagatgccttcctgggctcgtttttgta

SEQ ID NO: 7499 - DNA, 298 bp, Bos taurus
  Clone ID: 32-LIB34-022-Q1-E1-H7
cagacgcgtgggtcgctgagcctgtcgcctgtgttccaggagcggaaccagcaatgtcgtcctcagccatgccagacgtacctgcgccactcagcaatttgcacttctatatataccaagatcttcataaacaatgaatggcatagttcagtgagtggtaacacatttccagtctttaatcctgcaactgaggagaacctctgtgaggtggaagatggagataaggaggatgttgacaaagcagtgaaggctgcaagacaagcttttcagattgggtctccatggcgtactatggatg

SEQ ID NO: 7500 - DNA, 428 bp, Bos taurus
  Clone ID: 32-LIB34-023-Q1-E1-H7
cattgtcgcacatttccactatgttttatcaataggagctgtatttgctattatagggggatttgttcattgattcccactattctcaggttatactctcaacgatacatgagccaaaatccacttcgcaattatatttgtaggcgtcaatataaccttcttcccacaacactttctaggactatctggcatgcctcgacgatactccgactacccagatgcatacacaatatgaaatactatctcatcaataggctcattcatttccctaacagcagttatactaatagttttcatcatctgagaagcatttgcatctaaacgagaagtcttgactgtagacttaaccacgacaaatctagaatgattaaacggatgccctccaccatatcacacattttaagaacccacctatgttaacctaaaat

SEQ ID NO: 7501 - DNA, 309 bp, Bos taurus
  Clone ID: 32-LIB34-024-Q1-E1-H11
actcgccggtcgacccacgcgaccgcagacacttgtgctaccgtggtatcccagagcaagggatgcttttcacattttaacaaaatgaaggtactcactgcagcactgctgtccatccttctgatcacacagcgggtgttcttgtgctgtgaatcccacaggctgcgatgccgttgagcctgtggctgtgagagctctggacctgatcaataacggacggtgggatggccagcttttccagttgctgcgggtcgctgatgcccacttggacgacggtggagtccagagctgtcgactatttactcttgg

SEQ ID NO: 7502 - DNA, 403 bp, Bos taurus
  Clone ID: 32-LIB34-024-Q1-E1-H7
atcagctttaacacatggtttctgggaacaaaccatttgttttcattatctgtgtgtaattagaattacaggttcatgatttattttctgacttaatgtgcaatttcttagcactagataactttcagtatctgtgacggttgcttgttactttaagttaaaagtaggatcttataaaaattaataaaatttgccagtaaatattcccataatatagaagaggatatgaacttgctaatttcagaattaattattcatttttaaaaagtcctttcttttaaggcatctgcctaaggagtggtataatttaacaaaatgtctctttttagagtggtcagagataaaatatcttagatgggctacattgaacttcaaatttcagatatgacagcattttcttgag

SEQ ID NO: 7503 - DNA, 404 bp, Bos taurus
  unsure (285),(347),(366),(371): unsure at all n locations; Clone ID: 32-LIB34-026-Q1-E1-H7
gggcaatttaagaagagtgatgcttttgtgcccttctccatcggaaagcggtactgtttcggagaaggcctcgccagaatggagctcttcctcttcttcaccaccatcatgcagaacttccgcttcaagtccccacaatcgccccaggacatcaacgtgtcccccaaactcgtgggctttgccactatccctccaaactacaccatgagcttcctgccccgttgaatcagggctgtgcccgggtggggctggtgggaggagcaaataggggagggaagggcctgngcgggggttaagagggaggggcggggctaaggatggggaaaggaggggtaaggggagcggangggaggggctaggggcggnggtanggaagggcggggctgtggatggggaatggtgga

SEQ ID NO: 7504 - DNA, 418 bp, Bos taurus
  Clone ID: 32-LIB34-027-Q1-E1-H7
catctgctaaaaaacatgtggaaaggaaggcagaatcaagtacaagataatgaaaatgtagtaaacgagtactcctcacatctggaaaagcaccagttatatatagatgagagtgtgaagaataatatcccaactaagcttcgtgtgctccgttcaattctggagaatttgagaagcaaaatacaaaaattagaatcggatgtctcaactcagatggaatactgccgcaccccgtgtactgttacttgcaatattcctgtggtgtctggcaaagaatgtgaggaaatcatcaggaatggaggtgaaacatctgaaatgtacctcattcagcctgaggattctagcataccatatagagtatactgtgatatgaaaacggaaaaaggacgatggacagtaaattaggaaccgtcaagat

SEQ ID NO: 7505 - DNA, 418 bp, Bos taurus
  Clone ID: 32-LIB34-028-Q1-E1-H11
agagggctggggcatgaagttcaagtggagcacatcaaggcttatctcaccaaatcccccgtggatgctggcaaagctgtggttgtcattcaggatatatttggctggcagttgcccaacaccagatatatggctgacatgattgcaggaaatggatacacaaccattgttccagacttctttgtcgggcaggagccatggcacccctcgggggactggtccaccttcccggagtggttgaagacaagaaatgccagacagattgataaagagttcgatgcagtcttgaagtatctgaagcaacagtgtcacaccaggagaatcggcgttgtgggattctgctggggtggaactgccgttcatcacctgatgtctatacacccagaactcaaggcacgggtgtccgtctatggcatca

SEQ ID NO: 7506 - DNA, 423 bp, Bos taurus
  Clone ID: 32-LIB34-029-Q1-E1-H7
ctggggttacaagatcctcttcctggatgtgctgtttccactggttgttgacaagttcctgtttgtggatgcggatcagattgtacgaacagatttgaaagagctaagagatttcaatttggatggtgctccttatggttacactcctttctgtgacagccgcagagagatggatggctacaggttctggaagtcagggtactgggccagtcacttagctgggcgaaagtaccatatcagtgcactgtatgttgtggatctgaagaagtttaggaaaatagcagctggtgacagactcaggggccagtaccaaggtctgagtcaggatcctaacagcctttcaaatcttgatcaagatttgcccaataacatgatccatcaggtgccaattaaatcactccctcaagaatggctttggtgtga

SEQ ID NO: 7507 - DNA, 379 bp, Bos taurus
  Clone ID: 32-LIB34-030-Q1-E1-H11
caaaacttggcaggactgtgactacaaggactctgcacaagctgccacaggagagtgcacagcgaccgtggccaagagagggaatatgaagttctccgtggctatccagacctgcctgatcactccagccgagggccccgtggtgacagcccagtatgagtgccttggctgtgtgcatcccatatctaccaagagccccgacttggagcctgttctgagatatgccatccaatattttaacaacaacaccagtcattcccacctctttgatctgaaagaagtaaaaagagcccaaagacaggtggtgtctggatggaactatgaagttaattactcaattgcacaaactaattgttccaaggaggaattttcattctta

SEQ ID NO: 7508 - DNA, 124 bp, Bos taurus
  Clone ID: 32-LIB34-030-Q1-E1-H7
ctgtgccaaagatcatcaacatggatgcgattcaacagtgttagttagacttaaacatcatgaggctgaacgacatcatttactcaaacagcactgtgaccaattcgacaaacttgaatagtat

SEQ ID NO: 7509 - DNA, 419 bp, Bos taurus
  Clone ID: 32-LIB34-032-Q1-E1-H11
ataaagatattggtaccctttatctactatttggtgcttgggccggtatagtaggaacagctctaagccttctaattcgcgctgaattaggccaacccggaactctgctcggagacgaccaaatctacaacgtagttgtaaccgcacacgcatttgtaataatcttcttcatagtaataccaatcataattggaggattcggtaactgacttgttcccctaataattggtgctcccgatatagcatttccccgaataaataatataagcttctgactcctccctccctcattcctactactcctcgcatcctctatagttgaagctggggcaggaacaggctgaaccgtgtaccctcccttagcaggcaacctagcccatgcaggagcttcagtagatctaaccattttctctttacac

SEQ ID NO: 7510 - DNA, 404 bp, Bos taurus
  Clone ID: 32-LIB34-032-Q1-E1-H7
gaacatcacacacagctgaaaggaaactcagaggagggaatcgccaagaaaagtggccatggagctaatcccaaacttttccgtggaaacctgggttctcctggctatcagcctggtgctcctctatctatatggaacttattcacatggactgtttaagaagctgggggttcctggcccaagacctctgcctctttttggaaacgttctatcctaccgaaagggtgtttgtgagtttgatgaagaatgttttaaaaagtatgggaaaatgtgggggatttttgaaggtaaacatcctctgttggttatcacggatccagacatgatcaaaacagtactagtgaaagaatgttattctgtcttcacaaaccggagggtttttggtccaatgggagttatgaaaa

SEQ ID NO: 7511 - DNA, 425 bp, Bos taurus
  Clone ID: 32-LIB34-033-Q1-E1-H7
catggctgactgctgtgagaaacaagagcctgaaacaaatgaatgcttcctgagccacaaagatgatagcccagacctccctaaattgaaaccagaccccaatactttgtgtgatgagtttaaggcagatgaaaagaagttttggggaaaatacctatacgaaattgctagaagacatccctacttttatgcaccagaactcctttactatgctaataaatataatggagtttttcacgaatgctgccaagctgaagataaaggtgcctgcctgctaccaaagattgaaactatgagagaaaaagtactgacgtcatctgccagacagagactcaagtgtgccagtattcaaaaatttggagaaagagctttaaaagcatggtcagtagctcgcctgagccagaaatttcccaaggctgaatttg

SEQ ID NO: 7512 - DNA, 434 bp, Bos taurus
  Clone ID: 32-LIB34-034-Q1-E1-H11
agataaagccccacagaaacagctaaatgaagcagagatcggcagccttccagtacaagaattcagaataatgatagtaaagatagtgatagtaaagatcataggatctcagaaatagaatggagaagatggaagagatgtttaccaaagacctgtaagaactagaaaaccaacagagatgaaccatacactagaagcaatcagtagcagaataactgaggcataagaacagataagtgacctggaggactgcgtggtgaaaatcactgccacagaacagactatagaataaagaatgaaaagaatgaagaccagactaagaggcctctgggacaacagtaaacacaccggcatttgcattatatgggccccagaatgagaatagagagagaaaggacccaagaaaatatttggaaagtagatgaaaatttccc

SEQ ID NO: 7513 - DNA, 429 bp, Bos taurus
  Clone ID: 32-LIB34-035-Q1-E1-H7
gacgccgggacacaggtgtcgtgaaaaccaccgttaaacctaagccaaaatgggaaaggagaagacccacatcaacatcgttgtcattgggcacgtagattcagggaagtctaccacgactggccatctgatctataaatgtggcgggatcgacaagagaacaattgaaaagttcgagaaggaggctgccgagatgggaaagggctccttcaaatatgcctgggtcttggacaaacttaaagctgaacgtgagcgtggtatcaccattgatatctccctgtggaaatttgagaccagcaagtactatgttaccatcattgatgccccaggacacagagacttcatcaaaaacatgattacaggcacatcccaggctgactgtgctgtcctgatcgttgctgctggtgttggtaaatttgaagcgggtat

SEQ ID NO: 7514 - DNA, 404 bp, Bos taurus
  Clone ID: 32-LIB34-036-Q1-E1-H11
ggcctctccagctcaccatggctcgggcattgagagtgccagttgcactgtggctgttgggcttgtgctggtctttggctaaagcccaccctctggctagagctcctgagcttgggcacggagttgaaggtgggaatgtggccaagccggatccagaagtgacggaacgctgctcggatggctggggctttgatgctaccaccctggatgagcatgggaacatgctgtttttaaaaggggagtttgtgtggaagggtcatgcctgggcccggcagttgatctcagagaggtggaaggatgcccccagtcccgtggatgctgcattccgctatgatcgtaacagtgtccttctgatcaagggggacaaattctgggtatatcctcctgagaagggggatgaatat

SEQ ID NO: 7515 - DNA, 382 bp, Bos taurus
  Clone ID: 32-LIB34-037-Q1-E1-H11
tgcttatgtgccctactccatcggaaagcggtactgtttcggagaaggcctcgccagaatggagctcttcctcttcttcaccaccatcatgcagaacttccgcttcaagtcgccacaatcgccccaggacatcaacgtgtcccccaaactcgtgggctttgccactatccctccaaactacaccatggagcttcctgccccgttgaatcagggctgtgcccgggtggggctggtgggaggagcaaatacgggagggaagggcctgggcgggggttaagagggacgggcggggctaaggatgggggaaaggaggggtaaggggagcggatgggaggggctaggggcggggggtagggaaggggcggggctgtggatggggaat

SEQ ID NO: 7516 - DNA, 374 bp, Bos taurus
  Clone ID: 32-LIB34-038-Q1-E1-H11
tgcacagagttctagcagcacacgcatgtgagtgatggcactgagtttggagggtccatctaccacaaggtgaatgagaagattgaaacgtcgataaacctcgcgtggacagctggcagtaacaacacccgcttcggcatcgctgctaagtacaagctggactgcagaacttctctctctgctaaagtaaacaatgccagcctgattggactgggttacacgcagacccttcgaccaggagtgaaactgacgctgtcagctctaattgatggaaagaacttcaatgcacgagggcacaaggtcggtctgggatttgaactacaagcttaatgtggttttgaataaagcatcagctttgtccctggatgtgaaga

SEQ ID NO: 7517 - DNA, 363 bp, Bos taurus
  Clone ID: 32-LIB34-038-Q1-E1-H7
agtaaccagttactgccacgagaccatgactggctgggtccatgacgtgctgggccggaactgggcctgtttcactggaaggaagacaggaaatacctcggagaacgtgaacgtgaacacagcacgccttgcgggtctcgaggaaacgtattctaataggctctacagatataaccatgactttgtgaaagctatcaatgccattcagaagtcttggactgcagccccatacatggaatatgagactcttaccctaaaagagatgattacgagaggtggtggccatagccggagaattccaaggcccacacctgcaccaatcactgctgaaatacagacgaaaaatttgcattttgccaacat

SEQ ID NO: 7518 - DNA, 424 bp, Bos taurus
  Clone ID: 32-LIB34-039-Q1-E1-H7
gcatcctgaatatgctgtctcagtgctattgagacttgccaaggaatatgaagccacactggaggaatgctgtgccaaagatgatccacatgcatgctattccacagtgtttgacaaacttaagcatcttgtggatgagcctcagaatttaatcaaacaaaactgtgaccaattcgaaaaacttggagagtatggattccaaaatgcgctcatagttcgttacaccaggaaagtaccccaagtgtcaactccaactctcgtggaggtttcaagaagcctaggaaaagtgggtactaggtgttgtacaaagccggaatcagaaagaatgccctgtactgaagactatctgagcttgatcctgaaccggttgtgcgtgctgcatgagaagacaccagtgagtgaaaaagtcaccaagtgctgcaca

SEQ ID NO: 7519 - DNA, 401 bp, Bos taurus
  Clone ID: 32-LIB34-040-Q1-E1-H7
gatgcctcgagcagggagctggtggctcttccatccccagaccagccaagcctgtgagtgacaccccagacagaggaaccagagccatgcggagtctcagcggactgctgttgttactgactgcctgcctggcagtaaacgccagctccgtgcccacattgcccgatgacattcaagtgcaggagaacttcgacctgtctaggatctatgggaagtggttcaatgtggccgtgggctccacctgcccatggctgaagaggttcaaggagaagatgaccatgagcacagtggtgttgaaagcggggccgacgagcaaggagatcagcgtcaccaacactcacaagcggaaaggtgtctgtgaatccatctccggtacttatgagaaaacaagcactgatggg

SEQ ID NO: 7520 - DNA, 364 bp, Bos taurus
  Clone ID: 32-LIB34-041-Q1-E1-H7
acatttgacaagtagaggtgggtgtggttggagtcgcttctcattcctaatcacatctgcggacacgagagggtcgattcgacctcaatcatcctgctattcaacagcctagccgctcacatgattgtgtcatccattattattgagtgtgttatgcagtacaattgccaatgtgctgaatcactattgagttaagaagcatctaactctctgctcttcgtaaatagtcttggcaaaaacgtttgttgctgagaatctctcagcaggcagttacaactaatgtcagtggctccttctgtaagctctgtggtccttcgcaactcttcatgctatgtagcgatacttggcagactgttctgtgctt

SEQ ID NO: 7521 - DNA, 372 bp, Bos taurus
  Clone ID: 32-LIB34-042-Q1-E1-H7
ggccaccacggtggccggtgtcccctgccaggagtgggcggcccaggagccccaccaccacagcatcttcactccagagacaaacccacagtcagggctggagagaaactactgccgtaatcctgacggtgatgtcaacgggccctggtgctacaccatgaacccaaggaagctttttgactactgtgacgtccctcagtgtgagtcctcattcgactgtggaaagcccaaagtggagccgaagaaatgttctggaaggattgtacgtgggtgtgtgtccaagccacactcttggccctggcaagtcagccttcgaacaagctcgaggcacttctgtggaggaactctgatatccccgaagtgggtgctgac

SEQ ID NO: 7522 - DNA, 407 bp, Bos taurus
  Clone ID: 32-LIB34-043-Q1-E1-H7
tcctcatataatacaacaaaaaccatgaacattcagaacagcctagagagaaataaatggtaagactccccatgggaacaccgtcaatctctatggatgacataaaactgtgtgcagaattctaactcctttctgaggtttcctcccaggttttcttaactagcacagaaaatggacaaactaatatacttgtggcctacttcagttgcttttctgataatgaatgtgtaccctcaaatgtacaatgtcaattttcatacaaagattcctgacattttgaataaactgtaacatctggtccttatgtggcaataagggaagttaagagactgaatgtcgaacttcttaatggagggaaaaaaataataaaaacctccagaagtcaaagaggaacaagagaaaaagac

SEQ ID NO: 7523 - DNA, 239 bp, Bos taurus
  Clone ID: 32-LIB34-044-Q1-E1-H11
tacactgtatttcaatacatcaatgatggctcaatagggaaaccaggtcctagaactctgaacttttttcaggggcaatactgttaaccagaaatgtagaacatgaatggagaaaatgtggttgtttagattcaccataaaactttacagcctcattccacgattctaccacatgtgaccatcaaatttaacgtcagccttgggaacaacctctggccatggagaggatcccccctatc

SEQ ID NO: 7524 - DNA, 423 bp, Bos taurus
  Clone ID: 32-LIB34-047-Q1-E1-H7
gaagttttggggaaaatacctatacgaaattgctagaagacatccctacttttatgcaccagaactcctttactatgctaataaatataatggagtttttcaagaatgctgccaagctgaagataaaggtgcctgcctgctaccaaagattgaaactatgagagaaaaagtactgacttcatctgccagacagagactcaggtgtgccagtattcaaaaatttggagaaagagctttaaaagcatggtcagtagctcgcctgagccagaaatttcccaaggctgagtttgtagaagttaccaagctagtgacagatctcacaaaagtccacaaggaatgctgccatggtgacctacttgaatgcgcagatgacagggcagattcttgcaagtacatatgtgataatcaagatacaatctccag

SEQ ID NO: 7525 - DNA, 405 bp, Bos taurus
  Clone ID: 32-LIB34-048-Q1-E1-H11
attagatccaaggtgtggttgttgggttgttgtttttgttctcttttttacagaagcattgacaacagtccactgtatgtctctcccatgacactgtcttccatcacaattgggctgtgttatgcgggagaactgtcactgcggcaaatctccagtatgtgaggaggcgtccaactctctgctcatcgtaaatattcatgccacatcggtttgcaggtgggaatctctgagcaagcagttggaccgagtgaccgtggatacctctgtcagctctgtggcccttcacaagtccagacgcgatgtagccacacttggcacacagttctgtgctttgaatctcgaaaatcactcagcagatgtcctggccacagtttctgaagagacatcaggcactcgattcaatga

SEQ ID NO: 7526 - DNA, 432 bp, Bos taurus
  Clone ID: 32-LIB34-048-Q1-E1-H7
caatttgtcgttcgctgggctggagcaagtgcctaagggactgccccctaagctcagcgtgcttgatctcagctgcaacaagctaagcagggagccacggcgagacgagctgcccgaggtaaatgacctgactctggacggaaatccctttctggaccctggagccctccagcaccaaaatgacccgatgatctccggcgtggtcccagcctgtgcgcgttctgccttgaccatgggggtgtcaggagccctggcgctgcttcaaggagcccgaggcttcgcgtaaggccaggggaagagagggaagaggaatgaattggctcagattgccctggctccgggagaccctcgccaggacatctcaaccaaccagccttctaccccatccttattaaaatcgtaaacagcagatccgtgtcattgactcagcag

SEQ ID NO: 7527 - DNA, 420 bp, Bos taurus
  Clone ID: 32-LIB34-049-Q1-E1-H11
gtgtaaagttgcatcccttcgtgaaacctatggtgacatggctgactgctgtgagaaacaagagcctgaaagaaatgaatgcttcctgagccacaaagatgatagcccagacctccctaaattgaaaccagaccccaatactttgtgtgatgagtttaaggcagatgaaaagaagttttggggaaaatacctatacgaaattgctagaagacatccctacttttatgcaccagaactcctttactatgctaataaatataatggagtttttcaagaatgctgccaagctgaagataaaggtgcctgcctgctaccaaagattgaaactatgagagaaaaagtactgacttcatctgccagacagagactcaggtgtgccagtattcaaaaatttggagaaagagctttaaaagcatggtc

SEQ ID NO: 7528 - DNA, 406 bp, Bos taurus
  Clone ID: 32-LIB34-049-Q1-E1-H7
atccgtggaccgcaaggacaggttctccttcgacctgcggaaaggggaggtcatcaaggcttgggatattgctgtagcgaccatgaaggtgggtgaagtgtgccatatcacgtgcaagccagagtacgcctatggcttagcgggcagccccccgaagatccctcccaacgccacgcttgtgtttgaggtggagctgttcgagttcaagggtgaggacctgacagaagaggaggacggcggaatcatcaggagaatacggacgcggggggagggctatgccaagcccaacgaaggtgctctcgtggaggttgcactggaaggatacttcaaggaccaggtgtttgaccggcgggagctccgctttgaggtcggcgaaggggagagcatggatctgccctgtgggctg

SEQ ID NO: 7529 - DNA, 426 bp, Bos taurus
  Clone ID: 32-LIB34-050-Q1-E1-H7
caccaaattactaccccaatagctttagtgctcccgagcatcagccttctgccctggaacacaggacccacttctctggggatgtacagcgcttcaacagtgccaacgatgacaatgtcactcaggtgcggactttctatttgaaagtgctgaatgaggagcagaggaaacgcctgtgtgagaacattgcgggccatctgaaagacgcacagctttttatccagaagaaagcggttaagaacttcagcgatgtccatcctgaatatggctcccgcatccaggctcttttggacaaatacaatgaggagaaacctaagaacgcagttcacacctatgtgcagcatgggtctcacttgtctgcaagggagaaagctaatctctgagggtcggaagcctggccctggcacacgttgccgtccgcttgtg

SEQ ID NO: 7530 - DNA, 202 bp, Bos taurus
  Clone ID: 32-LIB34-051-Q1-E1-H7
cagaggccacacagtgtcgctcaatcatggacaattcatacctgacctgggatttggaaccattgcacctctagacgtcccaaaatttggggcgctgagggtcatcaatcttactataaatgcagggttctgccatacagacattactcatctattccaaagtgaagagcaggtttctcagttcattcgaagcaagattgcc

SEQ ID NO: 7531 - DNA, 242 bp, Bos taurus
  Clone ID: 32-LIB34-052-Q1-E1-H11
gttggaaactttcggtggcgatggacatgccagaggagactctgtatctcaaggaacaggattagcaccaggaagtcccagaaagcctggaaccagtagtattggaaatgtgaaccctgggagctatggacctggaagtagtggcacttggaaccccggccgccctgagcccggaagtgctggcacctggaaccccggccgccccgagcccggaagtgctggcacctggaaccccggccgcc

SEQ ID NO: 7532 - DNA, 237 bp, Bos taurus
  Clone ID: 32-LIB34-054-Q1-E1-H7
gccaagccggatccagaagtgacggaacgctgctcggatggctggggctttgatgctaccaccctggatgagcatgggaacatgctgtttttaaaaggggagtttgtgtggaagggtcatgcctgggcccggcagttgatctcagagaggtggaaggatgcccccagtcccgtggatgctgcattccgctatgatcgtaacagtgtccttctgatcaagggggacaaattctgggta

SEQ ID NO: 7533 - DNA, 352 bp, Bos taurus
  Clone ID: 32-LIB34-055-Q1-E1-H7
gcggtggccgcgggcgtggtgggcggcgagctccaggagaagctgctgtcggccgagcgcgcggtcaccggctacaccgacccctacaccgggcagcagatctccctcttccaggccatgaagaaggacctcatcgtgcgcgagcacggcatccgcctgctggaggcccagatcgccacgggcggcgtcatcgaccccgtgcacagccaccgcgtgcccgtggacgtggcctaccagcgcggctacttcgacgaggagatgaaccgcgtgctggaggaccccagcgacgacaccaagggcttcttcgaccccaacacccacgagaacctcacgtacgtgcagctgctgcggc

SEQ ID NO: 7534 - DNA, 345 bp, Bos taurus
  Clone ID: 32-LIB34-056-Q1-E1-H11
tgatttcttgcaacttcgaaaaatttaaaaccatgaaacatctattactgctacttttctgtgcttttatagttcaggcccaatttcctactgactatgacgagggacaagatgacagacctaaggtaggtttgggtgcccgcggtcatcggccctatgacaagaagaaggaagaggcccccagcctgagacctgtgccccctcccatcagcggaggtggctatcgggctcgtcccgccacagcaactgtgggccagaagaaagtggagagaaagccccctgacgctgatggctgcctgcacgcggacccggatctgggtgtgttgtgtcctacaggatgtaagt

SEQ ID NO: 7535 - DNA, 361 bp, Bos taurus
  Clone ID: 32-LIB34-056-Q1-E1-H7
ctgaacatgatcatggcagaatcaccgggcctcgtcaccatctgccttttaggatatctactcagtgctgaatgtacagtttttcatgaccgtgaaaatgccaccaaaattctccatcggccaaagaggtacaattcaggtaaattggaagagtttgttcgagggaaccttgagagagaatgtaaagaagaaaaatgtacttttgaagaagcacgacaagtttttgaaaacactgagaaaactactgaattttggaagcaatatgttgatggagatcagtgtgaatccaatccatgtttaaatggccgcatgtgcaaggatgacattaattcctatgaatgttggtgtcaagctggatttg

SEQ ID NO: 7536 - DNA, 217 bp, Bos taurus
  Clone ID: 32-LIB34-057-Q1-E1-H7
ctttggcacaatgaagtgggtgacttttatttctcttctccttctcttcagctctgcttattccaggggtgtgtttcgtcgagatacacacaagagtgagattgctcatcggtttaaagatttgggagaagaacattttaaaggcctggtactgattgccttttctcagtatctccagcagtgtccatttgatgagcatgtaaaattagtgaacgaa

SEQ ID NO: 7537 - DNA, 204 bp, Bos taurus
  Clone ID: 32-LIB34-059-Q1-E1-H7
cctgtctctgggggcccgtggctccaccctgacagagatcctggaaggtctcaagttcaacctcacagagatccaggagaaagaaatacaccatagctttcagcacctcctgcaggcgctcaatcaacccagcaaccagctgcagctgagcgtgggcaacgccatgttcgtgcaggaggagctgaagctgctggacaagttcat

SEQ ID NO: 7538 - DNA, 237 bp, Bos taurus
  Clone ID: 32-LIB34-060-Q1-E1-H7
gagcagggagctggtggctcttccatccccagaccagccaagcctgtgagtgacaccccagacagaggaaccagagccatgcggagtctcagcggactgctgttgttactgactgcctgcctggcggtaaacgccagctccgtgcccacattgcccgatgacattcaagtgcaggagaacttcgacctgtctaggatctatgggaagtggttcaatgtggccgtgggctccacctgc

SEQ ID NO: 7539 - DNA, 355 bp, Bos taurus
  Clone ID: 32-LIB34-061-Q1-E1-H7
cagagatcctcaagtccgtggtggctcgctttgatgctggagaactgatcacccagagagagctggtctccagacaggtgagcgatgacctcacagagcgagcagcgacctttgggctcatcctggatgacgtatccttgacgcatctgacctttgggaaggagttcacagaagcggtggaagccaaacaggtggctcagcaggaagcagagagggccagatttgtggtggaaaaggctgagcagcagaagaaggcagccatcatctccgcagagggcgactccaaggcggcggagttaattgccaactcgctcgccactgcaggcgacggcctgatcgagctgcgcaagctgga

SEQ ID NO: 7540 - DNA, 371 bp, Bos taurus
  unsure (24): unsure at all n locations; Clone ID: 32-LIB34-063-Q1-E1-H7
cacgcgtccggaagagtttcctgngaaaagtgctacagaacgtctgccctctttcaactgtataaagcccccactcttagctggtaaatagattgcactggacacagcagccttgtaaacactggccccatagaatgaggggccatcctgaatgggtccttctgcctttccctgctgcaatcactgtcatgggcttgcagagccctttctgaataggtggcgggacagaggagagactcagccttgaatcacagaccgaaagtgtggcgggtccattgtctccttcaagattcagataactcgcctctcgtttgttatagctttttcattattgttattactacatttccatgctggtatgtccttgtttc

SEQ ID NO: 7541 - DNA, 207 bp, Bos taurus
  Clone ID: 32-LIB34-064-Q1-E1-H7
cccacgcgtacgaatctcttcagctctgcttattccaggggtgtgtttcgtccagatacacacaagagtgagattgctcatcggtttaaagatttgggagaaggacattttaaaggcctggtactgaatgccttttctcagtatctccagcagtgtccaattgatgaacaagttaaattactgaacgaactaactgagtttgcaaaa

SEQ ID NO: 7542 - DNA, 198 bp, Bos taurus
  Clone ID: 32-LIB34-065-Q1-E1-H11
cggggaggatgaggcccgctgtccgcgctctgttagcctgcgcggttctggggctgtgtctggcggaccctgagagaactgtgagatggtgcaccatttcaactcatgaggccaataagtgtgccagttttcgtgaaaatgtgcttcgtatcttggagagtgggccttttgtctcctgtgtgaagaaaacctcacaca

SEQ ID NO: 7543 - DNA, 215 bp, Bos taurus
  Clone ID: 32-LIB34-065-Q1-E1-H7
tctgagtccatagaaaaactcccagtctttaacaaatcagccttcaaacattatcagacgagcagcgaggctggagactggtgtatcccaagcaaggaaccaaagaacctggcgaaggaaaaagtggctgcgtgaggagggactcgcggacacgctaagggatcaaagtgggtctgtgccacagctgcatcctgaacgtttgcccatgaactctc

SEQ ID NO: 7544 - DNA, 258 bp, Bos taurus
  Clone ID: 32-LIB34-066-Q1-E1-H7
ataaagccccccgcaatgtcacaataccaaacccctctgttcgtatgatccgtaataattaccgccgtactactactactctcgctccctgtattagcagccggcatcacaatgctattaacagaccggaacctaaatacaaccttcttcgacccggcaggaggaggagaccctattctatatcaacacttattctgattctttggacaccccgaagtctatattttaatcttacctgggtttggaataatctctcat

SEQ ID NO: 7545 - DNA, 204 bp, Bos taurus
  Clone ID: 32-LIB34-067-Q1-E1-H11
cttggttcaaccctcagtcctaatgtccttaactggcaggcgctgaactatgaagcaaagggtgaggtgttcattaagcctcagctgtggtagtgaggttaggctgtggtcctggaagtgcttcctggcaattccaccttatggctctggacctccccccacccctgtacacacctctgcaagcctgctctgtgaacataggct

SEQ ID NO: 7546 - DNA, 233 bp, Bos taurus
  Clone ID: 32-LIB34-067-Q1-E1-H7
gccagaagagatacgaagaaattgttaaggaagtcagcacctatattaagaaaattggctacaaccccgacacagtagcatttgtgccaatttctggctggaatggtgacaacatgctagaaccaagtgctaatatgccatggttcaagggatggaaagtcacccgtaaggacggcaatgccagtggaaccaccctgcttgaagctctggattgcattctgccaccaactcgc

SEQ ID NO: 7547 - DNA, 238 bp, Bos taurus
  Clone ID: 32-LIB34-068-Q1-E1-H7
cgggactcccggttaaatacaaccctctagattgactcctattaacaggtgtcgtgaaaaccaccgttaaacctaagccaaaatgggaaaggagaagacccacatcaacatcgttgtcattgggcacgtatattcagggaagtcaccacgactggccatctgatcataaatgtggcgggatcgacaagagaacaattgaaaagttcgagaaggaggctgccgagatgggaaagggctc

SEQ ID NO: 7548 - DNA, 230 bp, Bos taurus
  unsure (190): unsure at all n locations; Clone ID: 32-LIB34-069-Q1-E1-H11
ggttgctccagaccatcataatgaccataagacatttatctataataacagcaagttcacccttgctcatggttctgtggtaatcgctgccattactagctgcacaaacaccagtaatccatctgtgatgttaggggcaggcttgttagcgaagaaggctgtggatgcaggcctgagcgtgaagccttancatcaaaactagcctgtctcctggcagttggtgttggtca

SEQ ID NO: 7549 - DNA, 205 bp, Bos taurus
  Clone ID: 32-LIB34-069-Q1-E1-H7
ggtgacatggctgactgctgtgagaaacaagagcctgaaagaaatgaatgcttcctgagccacaaagatgatagcccagacctccctaaattgaaaccagaccccaatactttgtgtgatgagtttaaggcagatgaaaagaagttttggggaaaatacctatacgaaatttttgaatactggcacacctgagtctctgtctggc

SEQ ID NO: 7550 - DNA, 226 bp, Bos taurus
  Clone ID: 32-LIB34-070-Q1-E1-H7
gtccgtgcgctgcactcgacactacactccggcgatgattaaggccactgtcctcactctgttaccatacgcggttctggtgctgtgtctgacgcgactcgagagcattgtaacatggatgcacatttcagctcacgatagccaataattgtgccaattttcgtcagtatgtggatcatgtcatgtgccagtgttccgctttgtcacccgtgtgccaaaaacctca

SEQ ID NO: 7551 - DNA, 411 bp, Bos taurus
  unsure (404): unsure at all n locations; Clone ID: 32-LIB34-071-Q1-E1-H7
caaaactttggcacaatgaagtgggtgacttttatttctcttctccttctcttcagctctgcttattccaggggtgtgtttcgtcgagatacacacaagagtgagattgctcatcggtttaaagatttgggagaagaacattttaaaggcctggtactgattgccttttctcagtatctccagcagtgtccatttgatgagcatgtaaaattagtgaacgaactaactgagtttgcaaaaacatgtgttgctgatgagtcccatgccggctgtgaaaagtcacttcacactctctttggagatgaattgtgtaaagttgcatcccttcgtgaaacctatggtgacatggctgactgctgtgagaaacaagagcctgaaagaaatgaatgcttcctgagccacanagatgat

SEQ ID NO: 7552 - DNA, 374 bp, Bos taurus
  Clone ID: 32-LIB34-073-Q1-E1-H7
atgaccatggaccctgtgacccaccaccacataggcaagatccccaagaccaccatcgccaaggccgtgacccaccacctaggcactccaaagaaagaggtccaggtaaaggacactttcgcttccactggagaccaactggatatattcaccgacttccttcactaaagaaaggtgaagttctccctcttccagaagccaattttcccagcttctcattgccaaaccacaataatcccctacagccagagattcaggccttcccccagtcagcctctgaatcatgtcccgggacattcaacattaagtttctacatatatcagagttttttgcatatacattaccaaaataaagtctgatttccttgatgggg

SEQ ID NO: 7553 - DNA, 398 bp, Bos taurus
  Clone ID: 32-LIB34-074-Q1-E1-H7
actgattccaaatggcaaacggacggtcatcgctggtaaaatgagtatatgtcttctccctttgctgcttattggcctctggggctgtgtgacctgtcatcggaaccctgtggtagacgtctgcacagccaatcctcgggacattcctgtgaatcccatgtgtatttaccgttcctcagagaagaaggcaactgaaggccaaggctccgaacaggatatccctggggccaccaatcggcgggtctgggaactgtctaacgccaattcacactttgccactgccgtctatcagcatttggaacactccataaatatcaatgagaacattttccagtcaccacctgattatctccacagcttgtgctatgaataatctgggtgcctgtgacaccacactc

SEQ ID NO: 7554 - DNA, 394 bp, Bos taurus
  unsure (389): unsure at all n locations; Clone ID: 32-LIB34-076-Q1-E1-H11
cgacacacacgtcaagttatattagtatatactaatataacaggagcagactttaggaattcaaatgcctaggtatttcattacctctcaatcattcctatttaattattcttttttaatggagataattatatctttttaatgtattttttgttttgatcataggctggagacgtataaaagaccatttcaaaagtgatttacttttttaaagaactttatctgaaaagaaaaagataatatttttcctatgggacaatggacttgcaaagcctcacttcactttaaaagtaaaaagaacccatgttgagaactccactaacagttttatgccggtgataatttatctacataccatttcaataaatattttgtttcctaagactaanaaaaa

SEQ ID NO: 7555 - DNA, 346 bp, Bos taurus
  Clone ID: 32-LIB34-076-Q1-E1-H7
gggtcgaccacgaatccggacataatagaacttcacgattgcttttctgccaatgaacttattacttacgaagcactgggactgtgtccagaaggtcaaggtggaaaactggttgaaagaggagataatacttatggaggaaagtgggtcataaatcctagtggcggattaatttcaaaggggcacccacttggagctacaggtctggctcagtgcgttgaactctgctggcatctgagaggggaagccggaaaaaggcaagttcctggtgcaaaggttgctctgcagcataatataggcatcggatgaactgtcgttgttacgctgtacaagatgggctttcctg

SEQ ID NO: 7556 - DNA, 361 bp, Bos taurus
  unsure (27): unsure at all n locations; Clone ID: 32-LIB34-077-Q1-E1-H7
caacaccctataaagagtcgtattagnctgtcggcccttgcgtttgcctctccagcctgtctatgctcttggtggtgttggtgctgtccctgtgggtcgtgtggtgactggtgttctcgggcctggcatggtggtctcctttgctcctgtcggtgtcctgctgtcgtgggtctgtgggtgtgctccatggggcattgagtgaagcccttcctgaggacaatgtgggctttaatgtcaaaaacgtgtcggtcaaagatgtccgtcgtggcaatgtggctggtgacagcaattatgatccacccatggaagctgcgggcttcacagctcaggtgattattttgaaccatccaggccaaatcag

SEQ ID NO: 7557 - DNA, 136 bp, Bos taurus
  Clone ID: 32-LIB34-078-Q1-E1-H11
tattagagcggccgcccttttttttttttttttttttttttttttttttttttttttttttttttttttttttcttttttttttttttttttttttttttttctttgtggtctggtccctgaaccggtttaagggg

SEQ ID NO: 7558 - DNA, 157 bp, Bos taurus
  Clone ID: 32-LIB34-079-Q1-E1-H11
gcagctggaggacaagctcaacatcgaactcctcgccaagttcctggagaagagatatgcaagttctgccaatttacacttgcccaaactgtccatttctgagacgctatgatataaaaaatgtcgtggacgatgtgggcaacagcgaggtcctcag

SEQ ID NO: 7559 - DNA, 343 bp, Bos taurus
  Clone ID: 32-LIB34-079-Q1-E1-H7
aggaaggtactgcaagtggacctcgccgatgctgtgtctctgactcatttctgactttacgcaggttcttccaatgggacaaatgtctaacatgtttacattcatccttgtcagcactgctctggtactgggcacgggaaactcggctctaggcaactgcgaccaagagcaggccctggtcacaggccatgtgtagcttctgggaatacgtgtcatgcatgaacaactcatcatctcacatcttttgcatgctactcaagtccaactccatgcaagaagtgacgagactaatgtcagtgaccatggaggaagtacgcacttaccaggttgttcagagattttc

SEQ ID NO: 7560 - DNA, 138 bp, Bos taurus
  Clone ID: 32-LIB34-080-Q1-E1-H7
atctggcctggtctgctgatggccagacactgtttgctggctacacggacaacctggtgcgagtgtggcaggtaaccatcggcacccgctaggaacaaacatggcagagctttaaaaattaaaaaaactggttttctg

SEQ ID NO: 7561 - DNA, 429 bp, Bos taurus
  Clone ID: 32-LIB34-082-Q1-E1-H11
agaaaaattcagacattacataaacagagaggatgatataatgtcacgtacatatcagcagcttcagtcattatcaacatggggccaatataattattccctacgtcctaacccctttcctcttttgggtttgttttgtagcaaatcttacacatcctgttattttaactctaagaatttttaaaaatacttaaaatggcatatcacacttaaaataaacataattctttaatattatccaatatcaattattactcccctgctactgctgctgctgggtcacttcagtcgtgtccgactctgtgtgaccccgtggactgcagccaccatgctcccccatccctgggattctccgggcaggaacgctggggtgggttgccatttccttctccagtgcatgaaagtgaaaagtgaaagtaaagtcactca

SEQ ID NO: 7562 - DNA, 378 bp, Bos taurus
  Clone ID: 32-LIB34-082-Q1-E1-H7
aggagttctgatttctcctgtttgccaacctttggagttattcttgctcagaaatctataatgaatggaggattagcagagattcctgggctttcaatcaatttagcaaagattcttcatggggagcagtacttggagttacataaaccaattcccagagcaggaaaattaagatgtgaagcaattgttgctgatatcctggataaaggatccggtttagtaattcttgtggatgtctacacttactctggggaggaacttatatgttataatcagttctccatctttgttgctggttctggaggctctggtggaaaacggacatcagacaacgccagtgcacctgtagccatacccaagtagacctcctggatgctg

SEQ ID NO: 7563 - DNA, 375 bp, Bos taurus
  Clone ID: 32-LIB34-083-Q1-E1-H11
ttcccggctcgacaaacgcgtcagctgtgacatcgcctcagaactcagccacatagctgaaaaagtcatcatcagctcccgaagtggctcctgggtgatgagccgggtctgggatgaaggctatccatgggacatgctgtttatcactcgatttgaaacattcctcaagaacaccttaccgacagtcatttctaactggtggtacatgaagcaaatgaacgccagattcaagcacgagaactacggcttgatgcctttaaacagcaccctgaggaaagagcctgtgttcaatgacgaactcccagcttgcattttatgtggcattgtgaccattaagccaaatgtgaaggagtttacagaggattcagctatttt

SEQ ID NO: 7564 - DNA, 404 bp, Bos taurus
  Clone ID: 32-LIB34-083-Q1-E1-H7
acgcggaagagggaagatggcgcttgacggaccagagcagatggagctggaagaggggaaagcaggcagtggactccgccaatattatctgtccaagattgaagaactccagctgattgtgaatgataagagccaaaatctccggaggctacaggcacagaggaatgagcttaatgcaaaagttcgcctgctgcgggaggagctacagctgctgcaggaacagggctcctacgtgggggaagtagtccgggccatggataagaaaaaagtgctagtcaaggtacatccggagggcaagtttgtcgtcgacgtggacaagaacatcgacatcaatgatgtgacacccaattgccgggtggccctcagaaatgatagctacactctgcacaagatcctgcctaaca

SEQ ID NO: 7565 - DNA, 346 bp, Bos taurus
  Clone ID: 32-LIB34-084-Q1-E1-H7
tgattacgtggcaaagcaaacgaaaggcaagattgtggacttgataaagagcctggatggcacccaggtcatggtcatggtgaattacattttctttaaagctaagtgggagacaagcttcaacctcaaaagcacccacgagcaggacttctacgtgaccccagagacggtggtgcgggtccccatgatgaaacaacaggaccagttttactacctcctggaccgaaacctctcctgcaaggtggtgggggtcccctaccaagggaacgccactgccttcttcattctcccccgcgagggggaaatggagcaagtggaaaatggcctgaaggaaaaaacactcaag

SEQ ID NO: 7566 - DNA, 383 bp, Bos taurus
  Clone ID: 32-LIB34-085-Q1-E1-H11
aggctgagcaagcccatcaccttccctgatggacgctccttacctgcaggaatcttagtctccctctccatttatgggcttcatcacaacccgaaggtgtggccgaacccagaggtgtttgacccaactcggtttgcgccaggttctactcgacacagccatgccttcctgcccttctcaggaggatccaggaactgcatcgggaagcagtttgccatgaatgagttgaaggtggccgtggccctgaccttgcttcgctttgagctgtcaccggattcctccagggtccctgtgcccatgccagtcattgtgctgagatccaaaaatgggatctacttgcagctcaggaagctctctgatccagggacttagaacaacacaaa

SEQ ID NO: 7567 - DNA, 388 bp, Bos taurus
  Clone ID: 32-LIB34-085-Q1-E1-H7
agcaagggcaacactcacactgagatcctgaagggcctgggtttcaacctcactgagctcgcagaggctgagatccacaaaggctttcagcatcttctccacaccctgtatcactccgaagccttctccatcaacttcagggatgctgaggaggccaagaagaagatcaacgattatgtagagaagggaagccatggaaaaattgtggagttggtaaaggttcttgacccaaacacagtttttgctctggtgaattacatttcctttaaaggaaaatgggagaagcccttcgagatgaagcacaccacagagagggacttccatgtggacgagcaaaccactgtgaaggtgcccatgatgaaccgcctgggcatgtttgacctccact

SEQ ID NO: 7568 - DNA, 455 bp, Bos taurus
  Clone ID: 32-LIB34-086-Q1-E1-H7
acatccggctagtcgcaatggcaagcaaaggagggtacatcgtgcttgggctcctgttcctggctgtcctctgccaactcggtcacagcctgcagtgctacagctgtattaaccaagttaactgcacttcaatcgtcaattgttcacataatcaagatgcttgtctcttcgttaaggctgtgccgctaaaattttaccaccagtgttggaagtacgaagaatgcagttttgagttcattgcaaaagccttaggggagaaggagctccactatgactgctgccagaagaacctgtgtaacaaaagtggcgggaggagcgtatccgagaagatactgctgctgctcaccctgctgctggaggcagtctgccacttttatcgctaaatctatgccaggagggcttctcctgaatatcctgtttctatctattccttccttcgtgtgatgctgtgttcc

SEQ ID NO: 7569 - DNA, 175 bp, Bos taurus
  Clone ID: 33-BOVMS1-001-Q1-E1-A2
aataatgacagtttccccttatgaaaagaataacttttctacaatcattagccgtattatcaacaatattacaacgactcacgccaattctatcagtgttagaatacaattggacggtcattggacgatttggaagaaagtatagtgaggaatctgaggcgggtgaatcaaaaat

SEQ ID NO: 7570 - DNA, 393 bp, Bos taurus
  Clone ID: 33-BOVMS1-002-Q1-E1-A2
atgaattaggcactgatgcagataaggaacagtggaaagcggttcacaaacaagtggttgacagtgcttatgaggtgatcaaactgaaaggctacacatcctgggccattggactgtcagtggccgatttggcagaaagtataatgaagaatcttaggcgggtgcatccgatttccaccatgattaagggtctctatggaataaaagaggatgtcttccttagtgttccttgcatcttgggacagaatggaatctcagacgttgtgaaagtgactctgactcatgaagaagaggcctgtttgaagaagagtgcagatacactttgggggatccagaaagaactgcagttttaaagtcttctaatgttgtatcacttcactgtctaagctacac

SEQ ID NO: 7571 - DNA, 404 bp, Bos taurus
  Clone ID: 33-BOVMS1-003-Q1-E1-A10
gtccgccgtattacacgcagagcagagcagatgagaaacccatcacaagaaatcaagactaacattcccaagattcggaagtaaaaccccttggcctcggtgataaaaccttgcctataaaagtagcatttctagtaaggtttcaaagaagaagaagaagcagggtgaggagagtaaagacagggaaaaagtgcctcctgggcaccttttctgtgtcatcttaaatttcacagaacttccgtttaccctttttctatgatgcgttatccatcctaaagaaatactgagtacttctatacgtgggcgtagaggagtctgcagattctgtagcagaaattaaagtgactgtgaacatcaagaatggagatgattatgcattttaacccttaaataaaccaataaga

SEQ ID NO: 7572 - DNA, 444 bp, Bos taurus
  unsure (12): unsure at all n locations; Clone ID: 33-BOVMS1-003-Q1-E1-A2
ttttatattctntgtttttttttttattttttttttttttttttttttttttttttttacgcagcaaaacagaacggctgagtttaatgcttcaagttttccatttccttccacaggggttcgttttaaaaataacaaaatgaggtaaacaatgtatgtacacattataaacagtgtgtcagtttgcggcagcggcaacgctgatggttggagagcagctgctgcgcggtggctcaaggtcagccgcctgcgccgcgagcaaattcgtcctgacaatgatcttatcaatattcttgaccctttttatcatctttcaactaaaagtttcaaaacacaacttttatcacagtccagaactgacaccaacaattatattaaaacaaaacaccccttgagaaacaaaatgaacgaaaatttatttacctcttttactaaccctgtaaa

SEQ ID NO: 7573 - DNA, 283 bp, Bos taurus
  unsure (32),(218): unsure at all n locations; Clone ID: 33-BOVMS1-004-Q1-E1-A2
agaaagccaaggatcattctgagactgagacncagacagaggagcacacagaacaagagaaagaagaggagaaagacaccaaaactattggaagtgaagtggaaacactgaaccttcaggtgacaaccctgtttaaggagcttcaggaagctcacacgaaactcagtgaagctgagctaatgaagaagagacttcaagaaaaatgtcaggcccttganaggaaaaaatccgcaaacccaacaaaactgaatgaaaaacaagaactgggttaataaaacaaaaa

SEQ ID NO: 7574 - DNA, 409 bp, Bos taurus
  Clone ID: 33-BOVMS1-005-Q1-E1-A10
atgcgacgtcatagctcttctatagtgtcacctaaattcaattcactggccgtcgttttacaacgtcgtgactgggaaaaccctggcgttacccaacttaatcgccttgcagcacatccccctttcgccagctggcgtaatagcgaagaggcccgcaccgatcgcccttcccaacagttgcgcagcctgaatggcgaatgggacgcgccctgtagcggcgcattaagcgcggcgggtgtggtggttacgcgcaccgtgaccgctaaacttgcaaccgccctaccgcccgtccctttcgcttccttcccttcctttcccgcaagtttcgccggttttccccttaagctccaaatccgggggtccccttaagggtcccaattaatgccttaacggaactccaacccaaaaa

SEQ ID NO: 7575 - DNA, 359 bp, Bos taurus; identical to SEQ ID NO: 3767
  Clone ID: 33-BOVMS1-006-Q1-E1-A2

SEQ ID NO: 7576 - DNA, 368 bp, Bos taurus
  Clone ID: 33-BOVMS1-007-Q1-E1-A10
atgcgacgtcatagctcttctatagtgtcacctaaattcaattcactggccgtcgttttacaacgtcgtgactgggaaaaccctggcgttacccaacttaatcgccttgcagcacatccccctttcgccagctggcgtaatagcgaagaggcccgcaccgatcgcccttcccaacagttgcgcagcctgaatggcgaatgggacgcgccctgtagcggcgcattaagcgcggcgggtgtggtggttacgcgcagcgtgaccgctacacttgccagcgccctagcgcccgctcctttcgctttcttcccttcctttctcgccacgttcgccggctttccccgtcaagctctaaatcgggggctcccttt

SEQ ID NO: 7577 - DNA, 436 bp, Bos taurus
  Clone ID: 33-BOVMS1-007-Q1-E1-A2
attaaacatatgacacattaactcaggaagtaaattgaattactctttctggctttttaatcatcttcagcaaagtccgaaggagccagaaccaatactagccaagtgatttattttcaaggactgaaactaagttctttaggtccaagatgtggaacactgtttcactggaatatcattaggctagtgcatcagtaacatgttaattattaataacgaattctcagtgacttttgtgaatagttaatcttggccactggctggtagacctaacttataccacaaaagccaatgatatgatgaaccaagattaatgccactccatatggagggctgcctggaagtgtgtaacttcagtaccaatcacatggtaccatcttataaagcctcttcttgtaacagtgaaaacctgtgggtacgacagtggatgaagttt

SEQ ID NO: 7578 - DNA, 460 bp, Bos taurus
  Clone ID: 33-BOVMS1-008-Q1-E1-A2
ggtcgacgacgcgtccgcattaataaaccttccagccccatcaaacatttcatcatgatgaaatttcggttccctcctgggaatctgcctaatcctacaaatcctcacaggcctattcctagcaatacactacacatccgacacaacaacagcattctcctctgttacccatatctgccgagacgtgaactacggctgaatcatccgatacatacacgcaaacggagcttcaatgttttttatctgcttatatatgcacgtaggacgaggcttatattacgggtcttacacttttctagaaacatgaaatattggagtaatccttctgctcacagtaatagccacagcatttataggatacgtcctaacatgaggacaaatatcaatctgaggagcaacagtcatcaccaacctcttatcagcaatcccatacatcggcacaaatttagtcgaatgaatc

SEQ ID NO: 7579 - DNA, 453 bp, Bos taurus
  unsure (197),(259),(289),(338): unsure at all n locations; Clone ID: 33-BOVMS1-009-Q1-E1-A2
ccttttaaaactcaacaaagttcaaacaacactttatcacaatccagaactgacaccaacaaaaatattaaaacaaacacccttgagaaacaaaatgaacgaaaatttatttacctcttttattaaccctgtaattttagggtcccctctccgtaaccttatcgtactattcccaagcctactattcccaacatcanaccgactagtaagcatcgcttgtaacctccaacaatgaatacttcaacttgtatcaaaacanataatgagtatccacaattctaaaggacanacatgaacattaatattaatatctctgatcctatttattggatcaacanacctactaggcctattaccccattcattcacaccaacaacacaactatcaataaacctaggcatagccatccccctgtgagcaagagccgtaattacaggattccgcaataaaac

SEQ ID NO: 7580 - DNA, 460 bp, Bos taurus
  Clone ID: 33-BOVMS1-010-Q1-E1-A2
aagaaaacagcctgtggataaaggagctgtgcctgctgaagagagtccaaccttttctgaggagaaaagcaccccaagctggaagttggcatctaagctcaccttgcctaagtcccagagtccattgacatttgaagatgtggccttctatttttccgaggaagaatggaaaataatgacccctgatgagaagaccctctaccttgatgtaatgcaggaactctatgaggatgtcgcctctgtagggttaaagctgaaaaatgacactggaaatgacccacctgtatctcttcctacattagagatacaaccatcaggatgcaaagtattaggaaaggccacaaggaaagatgctgagacaacagtgggcagtgaaaatcacggtgatacatgcagggtacggaaacgacctcacagtcccgaagccacagctctcgccagccacttcgtgcctggtgac

SEQ ID NO: 7581 - DNA, 369 bp, Bos taurus
  Clone ID: 33-BOVMS1-011-Q1-E1-A10
cagcagaggtggcagaaggactacaaccatctcccgacaggccctctggacaagtacaagattcaggcgattgacgccaccgattcctgtatcatgagcatcggatttgatcacatggaaggcctacagtatgttgaaaaaataagactatgcaagtgtcactatattgaggatggttgtttggagagacttagccaacttgaaaatttacaaaaaagcatgttggaaatggaaataatttcatgtgggaatgtcacagacaaaggtatcattgctttgcatcatttcaggaaccttaagtatttgtttccaagtgatcttcctggagtaaaagaaaaagaaaaaattgttcaagcctttaagacatca

SEQ ID NO: 7582 - DNA, 477 bp, Bos taurus
  unsure (326): unsure at all n locations; Clone ID: 33-BOVMS1-013-Q1-E1-A10
ggtcgaccacgcgtccgcaagaccatcaccctggaggtggtgcccagtgacaccatcgagaacgtgaaggccacgatccacgataaggaaggcattccccctgaccagcagaggctcatctttgccggcaagcatctggaagatggccgcactctttctgattacaacatccagaaagagtcgaccctgcacctggtcctccgtctgatgggtggtatgcagatcttcgtgatgaccctgagcggcaagaccatcaccctggtagtggagcccagtgacaccatcgagaacgtgaaggccaagatccagtataaggaaggcattcnccctgaccagcagatgctcatctttgccggcaagcagctggaagatggccgcactctttctgattacaatatccagaaagagtcgaccctgcacctggtccttcgtctgaagggtggctgttaattcttcagtcttctattcataatgttc

SEQ ID NO: 7583 - DNA, 322 bp, Bos taurus
  Clone ID: 33-BOVMS1-013-Q1-E1-A2
aaaaaaaaaaaaaaaagaaacaaatcaacaacaaaaaaaaaaaacacaataaacaaaaaaaaaaaaaaaatcaaataaattacaaaagactctgaaagaaaaaaaaacaaaaaataaaataaaaaatggggcggcctcccaaaaggttcaaaactaagttgccctatttgggaatggcaaaccccttgcaaaagagcctccaaactccatttcaagggccaacgtttaaaaacttcttaagggaaaaaactcgggcattaccaaattgaatcatcttccacaacatcacgctttcccaaacgggattaacaacgaaaaggcc

SEQ ID NO: 7584 - DNA, 401 bp, Bos taurus
  Clone ID: 33-BOVMS1-015-Q1-E1-A10
gacgtagcggtttactggacaagtggaagattgacgataagcctgtaaaaattgacaaatgggatggatcagctgtgaaaaattctttggatgattctgccaaaaaggtacttctggaaaagtacaagtatgtggagaattttggtctaattgatggccgcctcatcatctgtaccatctcctgtttcttcgccatcgtggctttgatttgggattatatgcatcccttcccagagtccaaacctgttctggccttgtgtgttatatcctattttgtgatgatggggatcctgaccatatatacttcgtaaaaggaaaagagcatttttctcgtggcccacaggaaagatcctacaggcatggatcctgatgatatctggcaactctcgtccagtctcaaa

SEQ ID NO: 7585 - DNA, 168 bp, Bos taurus
  Clone ID: 33-BOVMS1-018-Q1-E1-A2
atgcgacgtcatacctcttctatagtgtcacctaaattcaattcactggccgtcgttttacaacttcgtgactgggaaaaccctggcgttacccaacttaatcgccttgcagcaaatccccctttcgccagctggcgtaatagcgaaaaggcccgcaccgtttgccct

SEQ ID NO: 7586 - DNA, 352 bp, Bos taurus
  Clone ID: 33-BOVMS1-019-Q1-E1-A2
atgcgacgtcatagctcttctatagtgtcacctaaattcaattcactggccgtcgttttacaacgtcgtgactgggaaaaccctggcgttacccaacttaatcgccttgcagcacatccccctttcgccagctggcgtaatagcgaagaggcccgcaccgatcgcccttcccaacaattgcgcagcctgaatggcgaatgggacgcgccctgtaacggcgcattaagcgcggcgggtgtggtggttacgcgcagcgtgaccgctacacttgccagcgccctagcgcccgctcctttcgctttcttcccttcctttctcgccacgttcgccggctttccccgtcaagctctaa

SEQ ID NO: 7587 - DNA, 429 bp, Bos taurus
  Clone ID: 33-BOVMS1-020-Q1-E1-A2
ggcagatcttagtgaagacgatgttagtgcagcagtgacttaaccccagaagtccagtttcagtgaccttggtatgtggtgtttcaggtatatttaaaatgtgtaacaggaacaaacagcaccctcttccacatggttgaaaaacattataaaatattttattacaaatttgatcttagctctttaacaaacaaatcatcattcttaatcctcctttaaattttaagaacctcaagattaaagttgctaaattgatttctggatcaagaacagttttttttttttttttttttacttaaagacaagcccacagagctttgccagcaatcaaagaacagtccttttgctggttaccagggaatgatagaaaaagccaataatgaaaattcaaattttaaaaaccatccttttttaaaaaaaaacaaaaac

SEQ ID NO: 7588 - DNA, 380 bp, Bos taurus
  Clone ID: 33-BOVMS1-021-Q1-E1-A2
cccgggactgtgggcagggggccagggtccccaggatgtgaacttgggtgtgtccttgatgaagggccctccatgactacctccctcagcactgttctaggaaatgccaataaaatcgtgctcctagaaaaaaaaaaaaaaaaaaaaaaaaaaaaaaaaaaaaaaaaaaaaaaaaaaaaaaaaaaaaaaaaaaaaaaaaaaaaaaaaaaaaaaaaaaaaaaaaaaaaaaaaaaaacaaaaaaaaaaaaaaaaaaaaggggggcccctcaaaaggttcaaaccttaattacgcttgaatgcaagttcaaacccctccaaaagtgtccccaaatttaatttcaaggggcctctttttaaaaattcgaaattggaaaaacccg

SEQ ID NO: 7589 - DNA, 444 bp, Bos taurus
  Clone ID: 33-BOVMS1-022-Q1-E1-A2
agaatttacaccctgaattaggcactgatgcagataaggaacagtggaaagcggttcacaaacaagtggttgacagtgcttatgaggtgatcaaactgaaaggctacacatcctgggccattggactgtcagtggccgatttggcagaaagtataatgaagaatcttaggcgggtgcatccgatttccaccatgattaacggtctctatggaataaaagatgatgtcttccttagtgttccttgcatcttgggacagaatggaatctcagacgttgtgaaagtgactctgactcatgaagaagaggcctgtttgaagaagagtgcagatacactttgggggatccagaaagaactgcagttttaaagtcttctaatgttgtatcatttcactgtctacgctacacaggattttagttggaggttgtaattcatattgtccttta

SEQ ID NO: 7590 - DNA, 413 bp, Bos taurus
  unsure (246): unsure at all n locations; Clone ID: 33-BOVMS1-023-Q1-E1-A2
acgcgtccgaaatattcacatcctattggccgtagcattccttacgttagtggaacgaaaagttctaggctatatacaactccgaaaaggtccaaatgtcgtaggtccatatggcctacttcaacccatcgccgatgcaatcaaacttttcattaaagaaccactacgacccgctacatcttcagcctcaatatttatcctagcacctatcatagctttaggcctagccttaaccatgtgaattcncctaccaataccctatcctcttatcaacataaacctaggagtcctatttatactagccatatcaagcctagccgtatactccattccctgattaggctgagcttccaactcaaaatacgcactaatcggagccctacgagcagtaacacaaacaatctcatacgaag

SEQ ID NO: 7591 - DNA, 276 bp, Bos taurus
  unsure (75): unsure at all n locations; Clone ID: 33-LIB188-002-Q1-E1-A2
acaccgggactgcaaggcagggatgatctttgacagatagttacatatgaggcaaaatcctggtattttcagtanacttctcaatcactctcctcagggcgttctgggcatcctgagtcatggcatcagcctcatccaagatcaccagtttaaagcctttcttaaatattgtccttgtgctagcaaagctcaagattggtccccgaacgatatctattcctcggtcatctgaagcattcagctccaagaccatggagccaaattccttatctttgt

SEQ ID NO: 7592 - DNA, 439 bp, Bos taurus
  Clone ID: 33-LIB188-003-Q1-E1-A10
gatacacagataatcaatggaagtgtggatgttgattctgaagaccggcagaaaagaaaacctgactcagacggaagaactgctaaagctttgaggtcattacaatttgcaaatccaggaaagcaaactgaatttgctccagaaactggtaaaagagaaaaaagaaggcttaccaaaaatgcaacagctggttcagacagacaggtgatcccggcaaagagtaaggtctacgatagccagggtctcctgattttcagtggaatggacctctgtgactgcctcgatgaagactgcttaagctgtttctatgcttgtcctgcctgcggttctaccaaatgtggtgccgaatgccgctgtgatcgaaagtggctatatgagcaaattgaaatcgaaggaggagaaataattcataacaaacatgctggataatttgtggtgt

SEQ ID NO: 7593 - DNA, 248 bp, Bos taurus
  unsure (105),(134): unsure at all n locations; Clone ID: 33-LIB188-003-Q1-E1-A2
ggccgccggatactttttctagaacacagatctaattttcaacatgtccacttcactgcgcgagaccatgattctaatcaggaccttgtcgcgagtgcccttgcncttcatggagtcatacagtctgtcagcanaatacaggggcttattctgaatgcactgaaccagattcagaaaggcattttccaggtctcctttgacctccttcttgatgctctccagcatgtcgtaagggctgtagctcttgt

SEQ ID NO: 7594 - DNA, 422 bp, Bos taurus
  Clone ID: 33-LIB188-005-Q1-E1-A10
gatacggaagttacttggtaaatccagaatcaggatacaatgtctctttgctatacgaccttgaaaatctgcctgcatccaaggattccatcgtgcatcaggctggcatgttgaaacgaaactgttttgcctctgtctttgagaaatacttccagttccaagaagagggcaaggaaggagagaacagggcagttatccattatagggatgatgagaccatgtatgttgagtcaaaaaaagacagagtcacagtagtcttcagcacagtgtttaaggatgacgacgatgtggtcattggaaaggtgttcatgcaggagttcaaagaaggacgcagagccagccacacagccccacaggtcctcttcagccacagggaacctcccttagagctgaaagataccgatgccgccgtgggtgaaaaa

SEQ ID NO: 7595 - DNA, 304 bp, Bos taurus
  unsure (10): unsure at all n locations; Clone ID: 33-LIB188-005-Q1-E1-A2
ctcccgtacngaatggcggcgggatacttgtcctacgactcagcctgccggtttctctgccactccacggctacatcttctgggtagaagccggtgaccatgcaggtgacgctgagcgtgcttttgctgagctcttccttgggtgggtccaggacatacacctgcggctcccgggccggccctttgctcctggagatgatcctcacgatgggggccgagaggcctttgttgttgaccttgcacttgaactcctttcctccagtccagtcctggtgctggatgggcagggcgctgaccacgcggt

SEQ ID NO: 7596 - DNA, 408 bp, Bos taurus
  Clone ID: 33-LIB188-006-Q1-E1-A2
ctcccgaccgacatgggcccgggataccaccgaacacagcgacacagagacctgcacactcttcaccacggggacatttaatggcatctcccaacactccgttgtcttgggaagacagctccaccgaaaaacgtaaaaagtgcagcacagcaagaaggcaattagcctcaaagaagcaacaagtgtaagtttatcagatggcacgagcaagggagacaggtcgcgggtcctctctctccatgacagaggcgttagctcgctgtcaaccgcaagagaggccgtctgccacgtcaggctgacgagacaagtcttcttcctgagcccctacgttcgtggagtgagattaactaatatttcctgcagaaacgtcatgcaacttaaagcgaaaaacaaatcaagcctgtgaat

SEQ ID NO: 7597 - DNA, 397 bp, Bos taurus
  Clone ID: 33-LIB188-008-Q1-E1-A2
ttgtcctatgacacaggctgcccatttctctgccactccacggcgatgtagtctgggtagaagctggtgaccatgcaggtgaggctgaccgtgcttttgctgagctcttcctggggtggggccaggacatacacctgcggctcccgggccgggcctttggtcctggagatggtccccacgatgggggccgggaggccttcgttgtggaccttgcacttgaactcctttcctccagtccagtcctggtgctggatgcgcaaggcgctgaccacgcggtaggtgctgttgaactgctcctctctcggcttcgtcgtggctgtgtttacctccacgtcgtccacgaaccacgagaacttcaactcggggtcatcgtggcccacgtccaacaccacacacg

SEQ ID NO: 7598 - DNA, 182 bp, Bos taurus
  Clone ID: 33-LIB188-009-Q1-E1-A10
tggcggccggatacctctttgacaagcacaccctgggacacagtgagagctaagcctcaggctggtttcccacagccacaggggtgacttccctggtcaccaaggcagtgcatgcatatttgggttaccttcatcttttctataagttgtaacaaaacatctacttaagttctttctttagt

SEQ ID NO: 7599 - DNA, 381 bp, Bos taurus
  Clone ID: 33-LIB188-009-Q1-E1-A2
actgtcccagtgggtcgtgtggagactggtgttctcaaacctggcatggtggtcacctttgctccagtcaatgtaacaactgaagtgaagtctgtagaaatgcaccatgaagcattgagtgaagcccttcctggggacaatgtgggctttaatgtcaaaaacgtgtctgtcaaagatgtccgtcgtggcaatgtggctggtgacagcaaaaatgatccacccatggaagctgctggcttcacagctcaggtgattattttgaaccatccaggccaaatcagtgctggatatgcacctgtgctggattgtcacacagctcacattgcttgcaagtttgctgagctgaaggagaagattgatcgtcattctgggaaaaagctg

SEQ ID NO: 7600 - DNA, 435 bp, Bos taurus
  unsure (425): unsure at all n locations; Clone ID: 33-LIB188-010-Q1-E1-A2
actctgaacagcatcagttcctctgtcagcccttctttattctcagatgttagccacagtcctgagctgtaattgctacaggacagcctcttccaccccgggtgaatgctggtgatcctttagctaaattcagaggatatcaaacttctagcagaaaatcagttacatatcagtgtcctatagtcattaaaaaagaaagaaaaagcagaaagccatttggcaagatctcttctggactgctggtgtaatcctgcagggagagtacttatgatcggccagcccaccgggcactttgacaagcttgttgttgttcaaatgaagttccctcaaatgaggagtgttggccaaagagccattgtcaaccgcagagatgctgttgaaactcagtcccaacttagccaaattattcagtcctttcaggctanctgcatcaac

SEQ ID NO: 7601 - DNA, 409 bp, Bos taurus
  Clone ID: 33-LIB188-011-Q1-E1-A10
cattgtgccgaggtgcatgcgcaggacgccatggacgccggatactattttgaccgtgatgatgtggctttgaagaactttgccaaatactttcttcaccaatctcatgaggagagggaacatgctgagagactgatgaagctgcagaaccagcgaggcggccgaatcttccttcaggatatcaagaaaccagaccgtgatgactgggagaatgggctgactgcaatggaatgtgcgctgtgcttggagagaagtgtgaatcagtcactactggaactgcacaaactggccactgaaaaaaatgatccccatctgtgtgatttcattgagactcattacctgaatgagcaggtggaagccatcaaagaattgggtgaccacataaccaacctgcgcaagatgggggctc

SEQ ID NO: 7602 - DNA, 381 bp, Bos taurus
  Clone ID: 33-LIB188-011-Q1-E1-A2
ggcgcgggatcggccgcccgggcaggtgcaccatgaagcattgagtgaagcccttcctggggacaatgtgggctttaatgtcaaaaacgtgtctgtcaaagatgtccgtcgtggcaatgtggctggtgacagcaaaaatgatccacccatggaagctgctggcttcacagctcaggtgattattttgaaccatccaggccaaatcagtgctggatatgcacctgtgctggattgtcacacagctcacattgcttgcaagtttgctgagctgaaggagaagattgatcgtcgttctgggaaaaagctggaagatggccctaaattcttgaaatctggtgacgctgccatcgttgatatggttcctggcaagcccatgtgtgt

SEQ ID NO: 7603 - DNA, 415 bp, Bos taurus
  Clone ID: 33-LIB188-012-Q1-E1-A2
acaaagccgtctggcttatcttcttcatactgggtctggggacgctgctgccctggatttcttcatgacagccactaagtatttcacaaaccgcctggacatgtcccagaatatgtccttgggccctgctgaagtaagcaaggacatccaggcctcagccagccccctggcaccctcgccagagcggactcatctcagcaccatcttcaacaacgtcatgaccttatgtgccatggtgcccctgctgatcttcacctgccttaactccttcctgcatcagaggatcccccagtctgtgcggatcctgggcggcctggtagccatcctgttggtgttcctgattactgccatcctggtgaaggtgcccctacacgcgctgtccttcttcgtcatcgacatgctcaagatcatgctc

SEQ ID NO: 7604 - DNA, 298 bp, Bos taurus
  Clone ID: 33-LIB188-013-Q1-E1-A10
ggccgccggatactcgagaggaaaagtgtttcacatcatagattccacttccaaatccttggaatgttcatttctttggctataaagagggactagccgggaaagccaggtaatgcgtaggaaactaaactaacagaagagcgggtggggcgggcagcgctaatgtcatcctcccggggacgggcacagggggctgttagccgcgggctgactgcggagaactgttatctggagcacggagcagccgtcctcgatgcttgggctgtcgcggggcttcagtcatccccaccacacaggt

SEQ ID NO: 7605 - DNA, 395 bp, Bos taurus
  Clone ID: 33-LIB188-013-Q1-E1-A2
actgatgttaagtcaaatgaaaaaaaatacacaatacagctcagcagcagaggagtatctctcctcaaattctcctagcaccatcaacattcttcaagtatctgaaatactgttaattagcaccttcgtattttgaacaaaagaacacaaatacctcagctcatctctggtcagcacctcacggtgtggatcacactcacaggaaagtgttttgaggtagtttaaacctttggaagtttgggttttaaacttccctccgtggaagatattcaaaagccacaagtggtgcaaatgttcatggtttttagttttcaatttttattttggttttcttacaaaggttgacattttccacaacaggtgtaacagtgttgaaaaaaaaattccaaatcttt

SEQ ID NO: 7606 - DNA, 444 bp, Bos taurus
  unsure (437): unsure at all n locations; Clone ID: 33-LIB188-015-Q1-E1-A10
acgcatatttgtgtaggaagttgctacaaggctgtgtgaagatactgaatcagaaggagctggaaggtgccctgtttctcaatccatccactgtttttcccatattgtagacaaatggaaccataggggacacaatctttttattctggctcctgttttaagaagctgcttggaacaggtcagtaggaattgaagggaaagcatgaccaactcaattgagggggataaacgtaagcttgggaaagcacagatcacatcatacttgtgtccccacagcagccagcccagtgccgtgcacctggctagatgaatgtgcctaggaaatcacagacaccctggtgtgcttgttcataaagcgtcagcgtccatggccctccctgcagaggtgacacgactgacataactgggggtcttttgccttttacaggagatagtantgctgtt

SEQ ID NO: 7607 - DNA, 294 bp, Bos taurus
  Clone ID: 33-LIB188-015-Q1-E1-A2
ccatagccgccggatacttgtcctacgactcagtctgccggtctctctgccactccacgtctacatcttctgggtagaagccgatgaccatgcaggtgacgctggccgtgcttttgctgagctcttccttgggtgggtccaggacatacacctgcgggtcccgggccggccctttgctcctggagatgatcctcacgatggaggccgagaggcctttgatgttgaccttgcacttgaactcctttcctccagtccagtcctggtgctggatgggcagggcgctgaccacgcggt

SEQ ID NO: 7608 - DNA, 366 bp, Bos taurus
  unsure (143),(302): unsure at all n locations; Clone ID: 33-LIB188-016-Q1-E1-A2
ccatagccgccggatacacccaacaacaatcaaggttgtaagaaaggtttccaatttaaccacacacaccacctaagactggtaattctaaagttttctgaggtgcaaaaggggtcaaagcaagaggagcaagaatggctganggaaggagtgagactcaatgaaggagccaagaactgcttaagaaaagcagtagtgattcctcactggacagctcccgcggggctctagaggatgcctagctcaagagtgagaccgaagtccaagtcgtccctgggaaggtcaggaaagactagcacgangaaccgaagatgatgacaagagtctgaatttttaaacttcaagatttcaacagaatgtggattt

SEQ ID NO: 7609 - DNA, 413 bp, Bos taurus
  Clone ID: 33-LIB188-017-Q1-E1-A10
atgctgccgtacgccatggtaggcggatacagcgctaaagcacaacatggttgtttccaagagttaggggggcagcagtggagatgggaagcaagccctcttggacgctgggtcccccggtgggcttcttggctgggggctgggcctcagccccgagccccagcaaacccaaggctgtgttgaagaggttgatgggcgtggaaccatcggtgatgagggtggattttacgcccaggctctgcagcaattttacctgcatctccggccctgccacagccatgtctctgatggtgctgggccccagggcctctgtcatctgcttgaacttcttcacctccacctcagccagctgctgggccttgctcacttccagctccagctgggcccgggcatagagcagctccagctctcgt

SEQ ID NO: 7610 - DNA, 435 bp, Bos taurus
  unsure (338): unsure at all n locations; Clone ID: 33-LIB188-017-Q1-E1-A2
ggcgccgggacaaccggcaagccaaattcaagaacccccaacctgcccaaggtgggtaagttggcaaccaaatccttggagggcttcaactggcccatccaggtaagaatcccaatggaatccccccaattgggaataattttttcaattggcaatttggggcattcccattattgacggatcaaaacttcccccaaacaaaagggaaaattcaatggcattcagccaattccccaattcaccacggccgggttcctgaaaacccgaaaggaaaattcggccgcctcgctggttctgcagcttcatcaacctgcccggacagccgctcgaacctgcanggaaagatgctattgacagaggctatgacatcgcccagatatcccgacacctggacttcatcagccttttgacctatgactttcacggagcctggcg

SEQ ID NO: 7611 - DNA, 433 bp, Bos taurus
  Clone ID: 33-LIB188-019-Q1-E1-A10
actctttctaccccattctgatgcctatgtcagaagctttctctatctcctttatactttaataaaactttattacacaaaagctctgagtgatcaagcctcgtctctggccccggattgaattcttctcctccgggggccaagaatcccggtgtcttcacgtgattcaacaacctttcagtattacggtgatggtggcctcatagaaggagtttggaagtttaccttcctctgcaactttctggaagaattggagtaggataggtgttagctcttctctaaatttttggtagaattcagctgtgaagccgtctggacctgggcttttgtttgctggaagatttttgattacagtttcaatttctgtgcttgtgatgggtctgttaagattttctatttcttcctggtccagctttggaaagttgtacattac

SEQ ID NO: 7612 - DNA, 432 bp, Bos taurus
  Clone ID: 33-LIB188-020-Q1-E1-A2
ctcccgtagcgcaatgggggccgggatacacgtaaacattaaaactattaaaagcatcacgggtaaaagttttaaaaggttaatttctgtcaaatgcggtagatgaagaaaggtcggtattatcagtgagtgttttcttaagcttttccttaaacctgcccaccccttctgaaattgggcatttaatcatctctgacctggtcatcctcatagttgctaacttagtaagtgcttttcttatagaactcattcttaatgagcaatatgcctccttgtattataaaatctttctgaatatgcattagaaaatttttttgtaggttagtaaaagtgcactcctgttttcatgttgctttattcaaagctaataagtgctttccttagttttctagtaactaggttataaaaatcacgtgttgcagctttatggtt

SEQ ID NO: 7613 - DNA, 384 bp, Bos taurus
  Clone ID: 33-LIB188-021-Q1-E1-A10
accagctgtaccaaccccaacccaaggaccatgcccgctggttctgcaagagtcccaaagccaagcatggcccggagaagctgtctgagaagttccaccgcttcacagggtttaccctcagcaaggatttcaaagatggacacagctactactacatctccaagcccatccaccaccaggaagaccgttgcttgaggctgaaggtgatgatcgctggcaaaatcactcacagccctcaggctcatcccaatgcacaagagaagagacttccagcagatgacccggaggtgcaggttctgcatagcatcgggcacagcgccgctcctcgcctcttcccactagcctgggctgtgctgctcctgcaattcctgctgctgcaaatcc

SEQ ID NO: 7614 - DNA, 380 bp, Bos taurus
  Clone ID: 33-LIB188-021-Q1-E1-A2
gccatggcggcgggatacggcaacaaggggctgcccgacatcgacagcaagatgctgatgggtatcaacgtgacgcccatcgccgccctgctctacacgcccgtgctcatcaggttctttggcaccaagtggatgatgttcctggctgtgggcatctacgccctcttcgtctccaccaactaccgggagcgctactacacgcttgtgccctcagctgtggccctgggcatggccattgtgcctctttgggcctccatgggcaactacatcaccaggatggcccagaaatactacgagtacttctccttagagttgggcacacacttgtccgggccctggtcatcgccagcacacaaggcacaaagtctggatttccggtc

SEQ ID NO: 7615 - DNA, 332 bp, Bos taurus
  Clone ID: 33-LIB188-023-Q1-E1-A2
catggcagggcgataccattacagatattaaaaaaaaaaaatttaacaagcaaggctagagtttgataaattccatcttgtgatccattcttgtgcattcttcacttcttgagtcactcccaaaatccatttgtattgtaactcctaaaggatgatttacaggtcagtatcaaaccaggccagctgattgctgtcgcccgggggcagcccatccatgaggtcctgggcatgccccagatctggcagcccgtcaactggatagtcagcaccagggtggtggccgcccatctcatgttccatcatggggtccatccccaaggcgtcctggccgt

SEQ ID NO: 7616 - DNA, 424 bp, Bos taurus
  unsure (411): unsure at all n locations; Clone ID: 33-LIB188-024-Q1-E1-A10
ccaaggccgccggatactcttgccaggaaaatcccatggatggaggagcctggtgggctgcaatccatggggtcctgaagagtcggacacgactgagcgacttcactttcacttttcactttcctgcattggagaaggaaatggcaacccactccagtgttcttgcctggagaaccccagggatgggggagcctggtgggctgccgtctatggggtcgcacagagtcggacacgactgaagtgacttagcagcagtagcagcgatcttgaatcatacaagtactatattgaagacaccaccgattataaaatacaccattctgtgtgccactaagggaaaaacactgccaattttaactgtaaggtgccacagctatacaactcattttattcagacatgttatgtagaanagctgtgttcttt

SEQ ID NO: 7617 - DNA, 334 bp, Bos taurus
  Clone ID: 33-LIB188-024-Q1-E1-A2
actcaatctgccggtctctctgccactccacgtctacatcttctgggtagaagccgatgaccatgcaggtgacgctgaccgtgcttttgctgatctcttccatgggtgggtcgggtacatacacctgcggttcccgggccgagcctttgctcctggagatgatcctcaccatggaggccgacaggcctttgatgttgaccttgcacttgaactcgtttcctcgagtccagtcctggctgctggatgggcagggcgctgaccacgcggttagcctcccagctggaggagggtgacggcaccggctccagctctgtggcccccctcctccctttgg

SEQ ID NO: 7618 - DNA, 246 bp, Bos taurus
  Clone ID: 33-LIB188-025-Q1-E1-A10
gggatacttgctattgcaatgtttggaggcccgggtggtctccacgttgcgggtgatggtgctgccgtctgccttccagaccacggtcacgctacccgggtagaagtcgctgatgagacacaccagggtggccttgttgccgttgagctcctccgtggagggcgggaacagggtgaccgacggtggggacttgggctgactcacgacgctcagtgtggtcccgctgccgacttcagcagtctcggt

SEQ ID NO: 7619 - DNA, 368 bp, Bos taurus
  unsure (15): unsure at all n locations; Clone ID: 33-LIB188-025-Q1-E1-A2
gatacatggacaganagtggatgaccaggtatcaattgcaccaccttaagattactttggcaaacttgtggaatgacataaatcaagccgggttcaacaagtgggcaacgaagaaggctaaagggtggaattaactttttccaagttcctttgaaaaaaggaaatgttttgaccatttccgcaaccgtcatccccaaaattggaatttgttcgcaagagacatctgtattcacattccggtaaaaatcatcgtagaagtgccaaacattaacacctgtgtagatctgtgttgcatttatcacatgtatatctgcatatatagatgttgataccttactacaattgatactttttcacattgggttttt

SEQ ID NO: 7620 - DNA, 369 bp, Bos taurus
  Clone ID: 33-LIB188-027-Q1-E1-A2
cactatggctatacaagggctttcacgtgcctgcctgaggacgttggggacgttgcctttgtgaaaaacgacacagtctgggagaacacgaatggagagagcactgcagactgggctaagaacttgaatcgtgaggacttcaggttgctctgcctcgatggcaccaggaagcctgtgacggaggctcagagctgccacctggcggtggccccgaatcacgctgtggtgtctcggagcgatagggcagcacacgtgaaacaggtgttgctccaccagcaggctctgtttgggaaaaatggaaaaaactgcccggacaagttttgtttgttcaaatctgaaacaaaaacccttcggtcaatgacaacactg

SEQ ID NO: 7621 - DNA, 393 bp, Bos taurus
  Clone ID: 33-LIB188-028-Q1-E1-A2
catgcgccaagccgccatgagcccgggatacctgccagggcggccgctcgaaccattctgtttctggaaggcagctttcttgaaaggttgctctgccacctgctgcttaaccttctcagcccctgtggtgtttccaaagggctggtcacggtcctcaggcttgggtgtggcctgggtcttggagagggatggtgctgcgggcaagtctgtgtccatggccttgggaggagcatgctgcttccggaaggcagctttcctggaggactgcagtttgggtgaatgttgctttagcttcccagcctccttcggttccctgaccactgctgctgtttcgggcggctgactactgtcctggagcttggaggacgcctgggcctttgtgacagcagacac

SEQ ID NO: 7622 - DNA, 347 bp, Bos taurus
  unsure (56): unsure at all n locations; Clone ID: 33-LIB2809-001-Q1-E1-A2
actggctgtaattcctggggtcaggcacaggaatctggcatcggtgctggatgtangggctgccagtctccttctgcacgggagagcattcttcctcccgtgcactggggccggtcttgtagaagagggtgaaggagacggagtgggttacctcggacctcacttcccaggtgcatgtaagcagggtggccccgtcaaagaagcactggaggttctgaagctgggcctcatcccctggctgggagttccaggaaacctcctggctccactggctgggtcgtcctgagagccccgagcctgcggccagcctggtgcgcactcgggccacgtaggtgctgctgggctga

SEQ ID NO: 7623 - DNA, 284 bp, Bos taurus
  Clone ID: 33-LIB2809-002-Q1-E1-A2
attgtggtcaagcacttcaactagtgcatgaatctattacacgcatcactacgagacgtgatcagtttcagagtgaggtacatcaccacacagacgatgacctccagggtggaatccagccctttgcacagagacagtctctactcgatcccttctctgggtccagctcgaacaggctcccacggtacatccctcctcgtaggcagagccgtgtggtggtgccgcctttctgtcaacttgaggtaatggcagtctccaacttgagggatgctctgggtcggcac

SEQ ID NO: 7624 - DNA, 339 bp, Bos taurus
  Clone ID: 33-LIB2809-003-Q1-E1-A2
tagacaacaatgacagcacagaatatggactcttccagataaataataaaatttggtgcaaagacgaccagaaccctcactcaagcaaaatctgtaacatctcctgtgacaagttcctgaatgatgatcttacggatgacattatgtgtgtcaagaagattctggataaagtaggaattaactacgggttggcccataaagcactctgttctgagaagctggatcagtggccctgtaaaaatttgtgaacacctgctgtctttgcggcttccgtcccctttcggttcctggaactcctctgccccgtggctacctcgttttgcttctttgtaccacaat

SEQ ID NO: 7625 - DNA, 441 bp, Bos taurus
  Clone ID: 33-LIB2809-004-Q1-E1-A2
catgaccgcgggatacttacaggaaaagtgattcaaaggcttttaaaacattttccatacagaaatttaatgaagactttaattccctttgactcagtggcctttataccagcatgatactactggaatttaggtaacaagctgttaggacaatttcacttaaggatgttacactatctaaaatacagtagagaactcaagaagaaagagtgccttcaatttgagattgccctattctaaaacagcagttgaagcctttggatagaatggtttgacatgatagatgaaaagacatgtagagcatggaattttcagaaccatcaaagaccataactgtggagtccctcagaattcacttgactcttcaccacagtggcatagtagtcgtttcactgttctcagagccaatgggattagggatgtcacagaatgatggggcat

SEQ ID NO: 7626 - DNA, 449 bp, Bos taurus
  unsure (363),(392),(439): unsure at all n locations; Clone ID: 33-LIB2809-005-Q1-E1-A10
catggccagccgatacagcacaaagacctgaatgggcatatctctctggggatagggcactgctttctggggaacaggcaggactttggactgagaaagggacagcacggactgaggaggaaacatgacagttggaggaagaggctggtgaggctggtgcatccaagactggagcagaggcagaggaaggtgcagattttcaacatcagtgagagtcaggctctggctttcagtaaagggctcaactggatatttagggaagggcatttctttgtgcttaggagccatagcctccttcactttggagactcccattacttcaggctgaaggaaaggcggcaccaccacaggggtttgagtaanacgacggatgttttgtgggacgctgttanggatgggcccacggaagggatagactagagactgtgtctgggcaaangggtggattt

SEQ ID NO: 7627 - DNA, 345 bp, Bos taurus
  Clone ID: 33-LIB2809-006-Q1-E1-A2
cgtatgtgtatgatacataaggttatgtattaattgtagccgcgttctaacgacaatatgtacaagcctaattgtgtagcatctggcttactgaagcagaccctatcatctctctcgtaaactgccgtcagagtcggtttggttggacgaaccttctgagtttctggtaacgccgtcccgcacccggaaatggtcagcgaaccaatcagcagggtcatcgctagccagatcctctacgccggacgcatcgtggccggcatcaccggcgccacaggtgcggttgctggcgcctatatcgccgacatcaccgatggggaagatcgggctcgccacttcgggctcatg

SEQ ID NO: 7628 - DNA, 379 bp, Bos taurus
  Clone ID: 33-LIB2809-007-Q1-E1-A10
gcccgggatcgagcggacgcccaggcaggtgcctggactacttgtcttccttttaggaaacgaggacaaagtaaacatgaagttcttcatctttacctgccttttggctgttgcccttgcaaagaatacgatggaacatgtctcctccagtgaggaatctatcatctcccaggaaacatataagcaggaaaagaatatggccattaattccagcaaggagaacctttgctccacattctgcaaggaagttgtaaggaacgcaaatgaagaggaatattctatcggctcatctagtgaggaatctgctgaagttgccacagaggaagttaagattactgtggacgataagcactaccagaaagcactgaatgaaatcaat

SEQ ID NO: 7629 - DNA, 410 bp, Bos taurus
  unsure (109): unsure at all n locations; Clone ID: 33-LIB2809-007-Q1-E1-A2
ggccgcgggatacctggtgagatatgtggaaagcctttcaagcagtgaggaatctattacacgcatcaataagaaaattgagaagtttcagagtgaggaacagcagcanacagaggatgaactccaggataaaatccacccctttgcccagacacagtccctagtctaccccttccctgggcccatccctaacagcctcccacaaaacatccctcctcttactcaaacccctgtggtggtgccgcctttccttcagcctgaagtaataggagtctccaaagtgaaggaggctatggctcctaagcacaaagaaatgcccttccctaaatatccagttgagccctttactgaaagtcagagcctgactctcactgatgttgaaaatctgcaccttcctctgcctctgctcc

SEQ ID NO: 7630 - DNA, 391 bp, Bos taurus
  Clone ID: 33-LIB2809-008-Q1-E1-A10
gaatgggcatatctctctggggatagggcactgctttctggggaacaggcaggactttggactgagaaagggacagcacggactgaggaggaaacatgacagttggacgaagaggctggtgaggctggtgcatccaagactggagcataggcagaggaaggtgcagattttcaacatcagtgagagtcaggctctggctttcagtaaagggctcaactggatatttagggaagggcatttctttgtgcttaggagccatagcctccttcactttggagactcccattacttcaggctgaatgaaaagcggcaccaccacaggggtttgagtaagaggagggatgttttgtgggaggctgttatggatgggcccatggaagggatagactag

SEQ ID NO: 7631 - DNA, 388 bp, Bos taurus
  Clone ID: 33-LIB2809-009-Q1-E1-A2
acagcagaaacgcctgaatgggcatatctctctggggatagggcactgctttctggggaacaggcaggactttggactgagaaagggacagcacggactgaggaggaaacatgacagttggaggaagaggctggtgaggctggtgcatccaagactggagcagaggcagaggaaggtgcagattttcaacatcagtgagagtcaggctctggctttcagtaaagggctcaactggatatttagggaagggcatttctttgtgcttaggagccataacctccttcactttggagactcccattacttcaggctgaaggaaaggcggcaccaccacaggggttgtagtaagaggagggatgttttgtgggacggtgtgagggatgggccc

SEQ ID NO: 7632 - DNA, 255 bp, Bos taurus
  Clone ID: 33-LIB2809-011-Q1-E1-A10
gagacgaagattcagaatcagtccgactggaagattcacgtcagaaacttcctgagaaaccagagagatttgactcctggccctgtgtgatgggtcgtgaggccttcatctcggggagacattactgggaggtggaggtgggagacaggacggactgggcaattggggtgtgtagggagaatgtgatgaacaaaggatttgaccccatgactcccgagaatgggttctgggctgtggagctctatggaaatgggt

SEQ ID NO: 7633 - DNA, 365 bp, Bos taurus
  unsure (339): unsure at all n locations; Clone ID: 33-LIB2809-013-Q1-E1-A2
gatacagcagaaaggcctgaatgggcatatctctctggggatagggcactgctttctggggaacaggcatgactttggactgataaagggacagcacggtctgatgaggaaacatgacagttggacgaatatgctggtgaggctggtgcatccaagactggagcataggcacaggaaggtgcagattttcaacatcagtgagagtcaggctctggctttcactaaagggctcaactggatatttagggaacggcatttctttgtgcttaggaaccatagcctccttcactttggagactcccattacttcaagctgaatgaaatgcggcaccaccacangggtttgagtaagatgacggatgttt

SEQ ID NO: 7634 - DNA, 387 bp, Bos taurus
  Clone ID: 33-LIB2809-015-Q1-E1-A2
cctgatcacgagaaccgagaggagggttgccgtgtacgctgagagcgccacttactgtctcgtgaagaatgctgtgaagacgtttaaggatatcggggttttcaaagagaccaaacaaaagagagtgtctgttttagaactcagcaacacttttctacctcaatgcaaccggcaaaaactcctggaatatattctgagttttgtggtgctgtaggtaacttcgggcacctctggcaagtgaagggagcgggaccggttcctcgtaggccccgcctgtggcacgagagtggacggcgccaccgtgtggtcgggcctgacctgtcctgacgcgacctcctggaagacaagtgccttctcccctccgtgatctgtgattgctgggcactg

SEQ ID NO: 7635 - DNA, 410 bp, Bos taurus
  Clone ID: 33-LIB2809-017-Q1-E1-A10
cgccatggctacgggatacggtctactttagcatttacattttagattgacagccataaactctgcctttatgatgctaagctcatgttcttatttcttctcctatcttctttctcttctgttcccattatccttccctttgttttgtccctgtcaccttcctttctccttctcctcattgccccccaggcaagcacgtggtcagtcattggtgggtttccagcttccaaagcctaaacaatcctgctgtactctcaaactagtggtctttgccccggctgatcctttccttgagctgtctgaactttaaggtggatggctcaagctagagatattacagaatcttttgggaatggccttgatgatcttcaacccagacttttgctaaattaaattggaaaataacttta

SEQ ID NO: 7636 - DNA, 335 bp, Bos taurus
  Clone ID: 33-LIB2809-023-Q1-E1-A2
ctcccctcacaactttcaccacagacgggcctgccgggaatgccgtctcttcaatgacgaagagttgccaggcctgcacaggccaaccgtcctggggctcaccctcacgctgggccccgcacacgtagcgccctgcgtcctctttcctcaggctggtaatgtgcacactgaagacaccattgtccttgggcacggacacgatcctgccctggaagtcctgagccttcttccccaacgtgttgatgaccacattgcaagctcccccaatcttcttctggcacacaaatttgggcacattttccaccctcccccgggcggggggccccccccccccc

SEQ ID NO: 7637 - DNA, 399 bp, Bos taurus
  unsure (66),(92),(292),(334),(341),(361),(379): unsure at all n locations; Clone ID: 33-LIB2809-024-Q1-E1-A2
gctcctaccaccatgggcccgcgatacagcagaaaagcctgaatgggcatatctctctggggatanggcactgctttctggggaacaagcangaacttggactgaaaaaaggaacacaacgactgggggaggaacatgacaattgggggaaaaaggctggtaagctggtgcatcaaagactggagcagaagcagaggaaggtgcagattttcaacatcagtgagagtcaggctctggctttcagtaaagggctcaactggatatttaaggaagggcatttctttgtgcttangagccatagcctccttcactttggagactcccattacttcangctgaangaaaggcggcaccaccacangggtttgagtaagaaganggatgttttgtgggaagctg

SEQ ID NO: 7638 - DNA, 426 bp, Bos taurus
  unsure (46),(68),(72),(411): unsure at all n locations; Clone ID: 33-LIB2809-025-Q1-E1-A10
gggatccagcagaaaggccagaatgggcatatctctctggggatanggcactgctttctggggaacangcangactttggactgagaaagggacagcacggactgaggaggaaacatgacagttggaggaagaggctggtgaggctggtgcatccaagactggagcagaggcagaggaaggtgcagattttcaacatcagtgagagtcaggctctggctttcagtaaagggctcaactggatatttagggaagggcatttctttgtgcttaggagccatagcctccttcactttggagactcccattacttcaggctgaaggaaaggcggcaccaccacaggggtttgagtaagaggagggatgttttgtgggaggctgttatggatgggcccaaggaagggatagactanagactgtgtctgggc

SEQ ID NO: 7639 - DNA, 324 bp, Bos taurus
  Clone ID: 33-LIB2809-027-Q1-E1-A10
tctggggaacaggcaggactttggactgagaattggacagcactgactgaggatgacacatgacacttggaggaagacgctggtgacgctggtgcatccaatactggatcagaggcagaggaatgtgcagattttcaatatcagtgagagtcacgctctggccttcagtaaagggctcaactggatgtttagggaagggcatttccttgtgcttacgagccataacctccttcactttggagactcccattacttcacgcctgaatgaaacgctgcaccaccacatgggtttgacttacaagagggatgttttgtgggaggctg

SEQ ID NO: 7640 - DNA, 385 bp, Bos taurus
  unsure (178),(247): unsure at all n locations; Clone ID: 33-LIB2809-027-Q1-E1-A2
tgggccgggatactcagtacaggtcacaccatcatcaccatacgccaccctgtaggcagccacatattgaatgtggccaaagtctcgggcaccctgggtgatgatgcccgtgactcgcttctgggagcccaggtcaatctgcagccactcagaggcactgttggtctgggcggtccangcgttgaacttgccctgattatccagtcgtgcgtagtagggaaaccagctaaaggcactcaggccccangttttgtagtagctggaggctgtgatctgcttgttggggatggtattatccttcaggcctacgggttcagtgcatccattcaactcacagccaacgagttcaaagcggatggtgcagccccggtggcagatgatgggt

SEQ ID NO: 7641 - DNA, 394 bp, Bos taurus
  Clone ID: 33-LIB2809-028-Q1-E1-A2
tactgtcctgctggtaatattgttggcagacaacatgtcgcttaccaaaagggaacaccttgtggcagctgccccaatcattgtgacaacggactatgcaccaatagttgtgagtatgaagatacctattctaactgtgcatctttaaaggaaacatggacctgtgcctctgattttgtgaagaccaattgcaaggctgcctgcaattgtcaaggcaaaatttattaaattccaagcactgaccgagcagggctacatgaaggaagggtgcaacaactactcagatttgatatttactaacaaggaaatcacagacatgttagctacaaatttgatttcaagtagtaaagagtctttttctcctggatctgctttttactttacagaatttttt

SEQ ID NO: 7642 - DNA, 370 bp, Bos taurus
  unsure (7),(331): unsure at all n locations; Clone ID: 33-LIB2809-029-Q1-E1-A2
atgctcncgtatgccatgggcgcgcgatactgccgaaaaaaccagatagtccatccccttacaaatctgaacggcgtattttaattgctgtttgaggttaattttgttcttagtctttggaagatattccttaaggctccctgaaggcagaaactccatgatgagcttaataccatttcgaccatcttctgtgcagatgcctttatacttcacaatgttctcatgataaagatttcttaagatttcaatctccttcttcagatcagcgatgtggttccctccactctcgggcttcagggatttgacagccacttgctcccctgtattgtcnccctcagggtcatacctgcagagctcgacctttccaaag

SEQ ID NO: 7643 - DNA, 372 bp, Bos taurus
  Clone ID: 33-LIB2809-030-Q1-E1-A10
gccaagggcccgggataccccagatggaaattgttcccaatagtgctgaggaacgacttcacagtatgaaagaaggaatccatgcccaacagaaagaacctatgataagagtgaatcaagaactgggctacttctaccctgagcttttcagacaattccaccaactggatgcctaaccaactggtgcctggtattacattccactaagcacacaatacactgatgccccaacaatctctgacatccctaatcccattggctctgagaacagtgaaaagactactatgccactgtggtgaagagtcaagtgaattctgagggactccacagttatggtctttgatggttctgaaaattccatgctctacatgt

SEQ ID NO: 7644 - DNA, 407 bp, Bos taurus
  Clone ID: 33-LIB2809-030-Q1-E1-A2
gccaagggcccgggatactgcttatgagcgagctaagcgcactctctcttccagcacccaggccagtattgagattgattccctctatgaaggaatcgacttctatacctctattacccgtgcccgatttgaagaattgaatgctgacttgttccgtggcaccctggaccctgtggagaaagcccttagggatgccaaactggacaagtctcagattcatgatattgtcttggttggtggctcaacccgtatccccaagattcagaaacttctccaggacttcttcaacgggaaagaactgaataagagcatcaaccctgatgaggctgttgcatatggtgcaggtaatctctttagctaaacagcagttacgaggcctaagctaaatttcgctgtgatgaaatgat

SEQ ID NO: 7645 - DNA, 243 bp, Bos taurus
  Clone ID: 33-LIB2809-031-Q1-E1-A2
gggatcctccttaagcatgagggccaacgacatctccctgctggacccccaaagtgcccccctgagagtgttggtggatgagctgaagcccacccctgacggcgacctggcgatcccgctgcagaaatcggagaatgatcaatgtgctcacaacaatctattgcatcaatgagcacgatccctgcagtgttcaacatcgatgccctgaatgagaacaaagtccttgtgctggacaccgactac

SEQ ID NO: 7646 - DNA, 405 bp, Bos taurus
  Clone ID: 33-LIB2809-032-Q1-E1-A10
catggcccgatcgccatgaggcgccgggatactcttatagcggccctgatccgggccaggcgagcatcttgacctcggcacctgtgtcctccaccatgagacgctcgctgaccgtatgccctgacgagtctcaggcgatctgctgtagattccatgtgaaatcgcgcatagctcctcaatgttggctttaatgacgccttgaacgactatgactgacacggctttgtgtttagcgatgtggacttcatcacattgaacgagcatgacacctataggtgcttttcataaccacaggaaaattgtgtagcactggataaatttggatttatcctaccttacgtgcattattttggaggtgtctctgctctaatttaggaacagtttctcagcatcaatggatttcct

SEQ ID NO: 7647 - DNA, 320 bp, Bos taurus
  Clone ID: 33-LIB3057-003-Q1-K1-A2
gtcaccaaagagggcctggaacttccagaagatgaggaagagaaaaagaaacaagaagagaaaaagacaaagtttgaaaacctctgcaaaatcatgaaggacattttggagaagaaagttgaaaaggtggttgtgtcaaaccggttggtgacattcccatgctggattgtcacaagcacatacggctggacagcaaacatggaacggatcatgaaggcgcaagccctgagagacaacttcacgatgggttacatggctgccaagaagcacctggagatcaaccctgaccattccatcattgagaccttgaagcaaaaggc

SEQ ID NO: 7648 - DNA, 375 bp, Bos taurus
  Clone ID: 33-LIB3057-004-Q1-K1-A10
cgcggtggaagcgggtgcgcgggtcgcctctctgagttatccagttccatccttgtcgctgcggcgacacccgcattctccgtcgccatgactgaacagatgacccttcgtggcaccctcaagggccacaacggctgggtgacccagatcgctaccactccccagttcccggacatgatattgtccgcctctcgagataagaccatcattatgtggaagctgaccagagatgagaccaactatggtatcccacagcgtgctcttcggggtcactcccactttgttagtgatgtggtcatttcctcagatggccaatttgccctctcaggctcctgggatggaacccttcgcctttgggatctcacaacgggcacc

SEQ ID NO: 7649 - DNA, 251 bp, Bos taurus
  unsure (82): unsure at all n locations; Clone ID: 33-LIB3057-004-Q1-K1-A2
cgggtcgacccacacgtacgctgggaagaacgttatattgacacctacaacactttctaggactatctggcatgcctggacnagactccgactacccagatgcatacacaatatgaaatactatctcatcaataggctcattcatttccctaacagcagttatactaatagttttcatcatctgagaagcatttgcatctaaacgagaagtcttgactgtagacttaaccacgacaaatctagaatgatta

SEQ ID NO: 7650 - DNA, 427 bp, Bos taurus
  Clone ID: 33-LIB3057-005-Q1-K1-A2
cttagggggagcagactcctgagatctgtgcacaggcaacgcattcagatctggaccaagtcgggacagcaccatcccagccccgcaggcatggccatgccagcaggccgcaccacagagatccagacaactacaccagccagcagaatggacattccaacatcaccagccgaagccctgaatctcggtgcagcagacgagcgacaactctgtgcctgtgtggcaggactggagggcagagggtgaggggagagggttaagaagcagagcagggccctcactgtcctttgcctacagcatgtgcattccagccttgctgcctttgctccctcgattcccctttcttcctcactgccaccccaaagaaatggggcaactaatttggaactactgagcacgaaaacgaatcccatctttatcaaaacac

SEQ ID NO: 7651 - DNA, 401 bp, Bos taurus
  Clone ID: 33-LIB3057-006-Q1-K1-A10
gaaggatggcaccgggtggatcgcaactcgcccggcctcagagcaggtccgggctgcctgcccccttggagctctgacccagactcacaccgggagttaccactgccattcctgggaggagatggctgtgtctgagcccagtgaggcacttgagctggtgggcacagatatcctccccaagcctgtcatctctgcttcccccccaattcggggcaaggagctgcaaatccgctgcaaaggatggctggcaggcatggggtttgctctgtacaaggagggaatgcaggaacccatccagcaacttggtgccgttgggagagaagccttctttacaatccagagaatggaggataaagacgaaggcaattatagctgccgaactcacactgaaaagcgcccct

SEQ ID NO: 7652 - DNA, 294 bp, Bos taurus
  Clone ID: 33-LIB3057-006-Q1-K1-A2
ttttacatatcctatctacttccacataactttcctttcaatactcattctcttccaatctcctacattcacccaccatctccactaattttacatcccaaaaccataaaatctgacactgtttccattctatccccatctatttcccatgaacttataatactacatcccataatcttcattcacttaatatataaccataatccaactcaatcactatactctttccctttcatcaagatgctatttagttcctcttcactttcttccatatcaatattcataatatccata

SEQ ID NO: 7653 - DNA, 343 bp, Bos taurus
  Clone ID: 33-LIB3057-007-Q1-K1-A2
tctcgacccacgcctcccattctacatctcaaaccacctccctttattattataccttttttttttttattttttgtcgttttttttttttttttgcattctcttataattttcacccattattactattttataccttaaccaccttttcatacctttttaatcataaacaatcaaatttaaataaacttaatatattcttaaatacacatattattattaatacatatttattcaacaaacatctattactgtaaatctttcttcacaatatatacatacttactaatatctacaaataaaacaacaaatcatacttttttaaacaacactttattcatca

SEQ ID NO: 7654 - DNA, 399 bp, Bos taurus
  Clone ID: 33-LIB3057-009-Q1-K1-A2
gcgcaacgtccacggtgcccgggcgttcaccatgagtgtcccggcgttcatcgacatcagcgaggaagatcaggctgctgaacttcgcgcttatttgaagtctaaaggagctgaaatttcagaagagaattcagaaggtggacttcatgtagatttagctcagattattgaagcctgcgatgtatgtctgaaggaagatgataaagatgttgaaagtgtgatgaacagcgtggtatccctcctgttgatcctggaaccagataagcaagaagctctgattgaaagcctatgtgagaaactggtcaaatttcgggaaggtgaacgtccgtctctgagactgcagttgctaagcaaccttttccatgggatggataagaatactcctgtaagatatacagt

SEQ ID NO: 7655 - DNA, 444 bp, Bos taurus
  unsure (420)...(421): unsure at all n locations; Clone ID: 33-LIB3057-010-Q1-K1-A2
cagagttggctgggatgggccaggttagactaggagggttgggaaacaaaggcaaatgacaatgggaaggatgaaatgaaaaaggaccagactttctaaatctttacaactcaagaggtggtggccaccctctagcagacaaaattccctccactgacaaggctttgggagtccttaagtctcttggctgtggtgtcattatacctaaaacctgcatttttacctacaagcctgtagttcagtgttccatggggggccaaccagggcaacagaagcagatctgatgtgtttcctgtatatgtccttgtgctcactttattaaaaattcttttgcacacaatgttatgaaaaggtcagatcctttttcaacaacacatatgccaaagcaaaagaaaaccccaacaacttactttatgctgnnttgtgtttgatagatttatttaa

SEQ ID NO: 7656 - DNA, 387 bp, Bos taurus
  Clone ID: 33-LIB3057-012-Q1-K1-A2
cgaggggcgggggcctttgggggcggccccgtgtccgggacgataggctcttcgcaacggaccccggtcccgacgcgcggcgggggcgcgccgcgccgcgccccgggggacgcggtcgacggtccgccggcggtgacagctgtggaccgggtatccgaagccaaccgaggctaccgcggcgcttccgtatcgttacgcctgggcgggattctgacttagaggcgttcaatcataatccccagatggtagcttcgacccattggctcctcagccaagcacatactccaaatgtctgaacctgcggttcctctcgtactgagcatgattaccatggcatcaacacatcatcagtagggtaaaactaacctgtctcacgacggtctaaac

SEQ ID NO: 7657 - DNA, 440 bp, Bos taurus
  unsure (304),(370),(431): unsure at all n locations; Clone ID: 33-LIB3057-014-Q1-K1-A10
ggtgaagtgtgtttcttgaaatcatcaccaccatggacagcaaaggttcgtcgcagagggggtgccgcctgctcctgctgctggtggtgtcaaatctactcttgtgccagggtgtggtctccacccccgtctgtcccaatgggcctggcaactgccaggtatcccttcgagacctgtttgaccgggcagtcatggtgtcccactacatccatgacctctcctcggaaatgttcaacgaatttgataaacggtatgcccagggcaaagggttcattaccatggccctcaacagctgccatacctnctcccttcctacccctgaagataaagaacaagcccaacagacccaccatgaagtccttatgagctngattctggggtgctgcgctcctggaatgaccctctctatcacctagtcacccgagtgcggngtatgaaag

SEQ ID NO: 7658 - DNA, 291 bp, Bos taurus
  Clone ID: 33-LIB3057-014-Q1-K1-A2
cggacgcgtgggcagcggccggtggccgagcacagaggggcgagccagagggccagcggtagcgccgagcaaccggcagtaccctcacaaataccccgggaaccggcggcggcgtgtgcgtgtggcccgtgtgcgggcggcggcgcgggaggagcgcggagcggcagccggttcgggcgggtggcatcatggacgagaaggtgttcaccaaggagctggaccagtggatcgagcagctgaacgagtgcaagcagctgtctgagtcccaggttaaagagcctctgcgagaag

SEQ ID NO: 7659 - DNA, 413 bp, Bos taurus
  Clone ID: 33-LIB3057-015-Q1-K1-A10
acaaaaagtgttcctgaacctaatctcctagttgtgttgacagtttgatgttactcagtttagggggattctgttagtcatcttagcagagtgttggcatccctgttctatgggggacggacctgtggatccagggcttccttggtggttcagaaggtaaagaatttgcttgcaaagcaggagacccagggagaccaagttcaatcccctggagaagggaatggctacctacttcattattcttgcctgaagaattccatggacagaggctacagtccatggggtctcaaagagtcagacacaatggagtgactatcactttcacactttaggacccaggagacactgctactgagccagcagtcttaagagcgtgggaaggagggagagaaaggagcaaagagggagtctct

SEQ ID NO: 7660 - DNA, 462 bp, Bos taurus
  Clone ID: 33-LIB3057-015-Q1-K1-A2
taaccttcttcccacaacactttctaggactatctggcatgcctcgacgatactccgagtaccggtatgcatacacaatatgaaatactatctcatcaataggctcattcatttccctaacagcagttatactaatagttttcatcatctgagaagcatttgcatctaaacgagaagtcttgactgtagacttaaccacgacaaatctagaatgattaaactgatgctcttcaccatattacacatttgaagaacccacctatgttaacctaaaatatgaatggattggattctatccccctactagtgggttttaagcctacattataaccttttattttttttttaataatctttttttattaattatttattttttttttattatatgtgttgtttgttcttattttttaattctttttttttctttctttttatgttttattttaattatttttttat

SEQ ID NO: 7661 - DNA, 263 bp, Bos taurus
  Clone ID: 33-LIB3057-018-Q1-K1-A10
atttccgaatcgacccacgcatccagccttccatcgcaagctgcctcccttttttttttttttttttttttttaaaattttttttagattctgttcaatttttttattttattttctttaaatttattttaaaatttttattttaatttttttccttttatcaattttttctttttattaacatttttctttttctttaaaaaaatttcttaatactttaaaataaaaaacccaaaattcttcttttaaaaaaaatattatta

SEQ ID NO: 7662 - DNA, 435 bp, Bos taurus
  unsure (273),(277),(316),(382): unsure at all n locations; Clone ID: 33-LIB3057-021-Q1-K1-A10
tcggagcttcctggtgaagtgtgtttcttgaaatcatcaccaccatggacagcaaaggttcgtcgcagaaagggtcccgcctgctcctgctgctggtggtgtcaaatctactcttgtgccagggtgtggtcttcacccccgtctgtcccaatgggcctggcaactgccaagtatcccttcgagaccttgttgaccgggcagtcatggtgtcccactacatccatgacctcatctcggatatgttcaacgtaattgataaacggtatgcccagngcanagggttcattaccatggccctcaacagctgccatacctnctcccttcctacccctgaagataaagaacaagcccaacagacccaccatgaagtccttatgagctngattcttgggttgctgcgctcctggaatgaccctctctatcacctagtcaccg

SEQ ID NO: 7663 - DNA, 377 bp, Bos taurus
  Clone ID: 33-LIB3057-021-Q1-K1-A2
cgagcggccgcccttttttttttttttttggagtgagacccaaagtatgtgtttattctggagttgatagcagcagcagtggggggaatcggccagactcagggtgtggtgaacagaaagggtggacacgggtgtgtgcgtgtctaggggaacatgggagattggtccgttgacattcacagccagcacgagggttaggacactaagtcttgtacaaacagcaaagagacagacgacagacagacagaggttttggggggacagggatcccccagacatgcatggcccctcacctggctggggaaccccggggagggaagacagacacagtggagactgaatgccccccaccctgaaacagggagctgggcccgcct

SEQ ID NO: 7664 - DNA, 425 bp, Bos taurus
  Clone ID: 33-LIB3057-022-Q1-K1-A10
gtcgacgacgcgtccggacgcaccatgaagtccttatgagcttgattcttgggttgctgcgctcctggaatgacgctctgtatcgcctagtcaccgaggtacggggtatgaaaggagccccagatgctatcctaattctggccattgagactgaggaagagcacatactacatctggaaggcgtggaaatgatatctggccaggtaattcctggagccaaacagactgagccctaccctgtgtggtcaggactcccgtccctgcaaaatagcgttgaatactcacgttatagcgcttactataacctgctgcactgtctgagcacggattcaagcacgattgacacttaccttaaggtcctgaactgcagaatcatcgacaacaacaactgctaagcccacattcatgctttacatttctgagat

SEQ ID NO: 7665 - DNA, 298 bp, Bos taurus
  Clone ID: 33-LIB3057-022-Q1-K1-A2
ccagagatgtccctggaccctgcagaccttacccatgacaccacgggcctcacggccgagtgactggaatccctggacgacgtcttcaccagagtgtacaaagccaaatacccgatcgtcggctacacggcccgaagaatcctcaatgaggacggcagccccaacctggacttcaagcctgaagaccagccccactttgacataaaggacgagttctgatcatcatgagtttggccctgggaaggcaatgcggcgagacccttcaacgcgagatctcctgcaaaacaggcgttcggag

SEQ ID NO: 7666 - DNA, 459 bp, Bos taurus
  unsure (70): unsure at all n locations; Clone ID: 33-LIB3057-024-Q1-K1-A2
tgacacttttactgaagtgcagaaaaattaaaattatcaagtgacattctcctggcccctgcccagtttntatcagcatggttgctccttcaatctaaagcatccatctttctcttgcctgaagcatgatgtagatggtccagtcatattacagaaccgtatgcaatccatcttattaatgttaccttaatgccacacttgttcgacatttgtactgctattctttatcttttatatctttattttattaattatatttctttttttatttttattttttttttttttactttttattatttttttttttttttttttttttattattttttttttattatttttatttttttattattttttttttttaattttttttattttttttctttttttttttttttatttttttcttcttattttttttattttttttattttttattttttcttttattt

SEQ ID NO: 7667 - DNA, 395 bp, Bos taurus
  Clone ID: 33-LIB3058-001-Q1-K1-A2
tttaaacttttaagaaggcttctaattaattgcttttaatctatataatgtatgtagtatgatgtaatgtggccattttcttttagattttgtgcagttaatatttaacattgatttatttttcatcatttaaatattaatagacattacttaaaatagactcttaggttaaaatataagaacttggtctataacattcattttcgtatatatgtgatacagaggactgtagaagagatttgagtgattttgccatgttaggcttagatacaatattccatatgttatttacaatatagaactttttgagtaattctaggttttaaaaattagtgagtccacttatggttgctgtaagggaagaagagatatggagtctgggatcagcatgttca

SEQ ID NO: 7668 - DNA, 408 bp, Bos taurus
  Clone ID: 33-LIB3058-002-Q1-K1-A10
tgcagacttccgttgcctacattgctccattggccagaggctgttcaccttggagacctgatgcggttatgagtacgaccgggcgtggacggtattcggtcctccggattttcaagggccgccgggggcgcaccggacaccgcgcgatgtgcggtgctcttccggccgctggaccctacctgcggctgaaccgattccagggttggcgggccgttaagcagaaaagataactcttcccgaggcccccgccggcgtctccggacttcctaacgtcgccgtctgtcgacacgtcccggctcgggaaatcttaacccgattccctttcgggtgacgcgcgtgatcgcgctatctgccggggtttccccgtcccttaggatcggcttacccatgtgcaagtgccggtcacat

SEQ ID NO: 7669 - DNA, 181 bp, Bos taurus
  Clone ID: 33-LIB3058-002-Q1-K1-A2
aaaaaaaaaaaaaaaaaaaaaaaaaaaaataaaaaaaaaaaaaaaaatataaaaaaaaaagaggaaaaatacacaagcatgcaaatatataaaatctaatataaactggcctgcctttttttagcttccctttttcttttccccttcttgactggcaataccttttctttaaccaacttaa

SEQ ID NO: 7670 - DNA, 308 bp, Bos taurus
  Clone ID: 33-LIB3058-003-Q1-K1-A2
ctagatcgcgagcggccgccctttttttttttttttttttttttttttttttttttttttgtttttttttttttttttttttttttttttttttttttttttttttttttttttttttttttaaaagaaaaaaaaaaaattttaaaaaaaagtaagttttaaaaaaaaaaattaaaaaaaggggccccgttaaaaattttgaaaaatttttaaaaaatggaattaaaaaaaaaaaaggggaattcactactaggggtttaaataaaaaaagttttttgggaaaaagaaaaaaaaaaaaaacgggcttt

SEQ ID NO: 7671 - DNA, 415 bp, Bos taurus
  Clone ID: 33-LIB3058-004-Q1-K1-A2
acggttctagatcgcgagcggccgcccttttttttttttttttaagagttaacaatagaccttgagcctctaacttataaacatctggataacatgaccttgagaagtcaattacaagtgggggcaatttatatcagacacatcttgtaacgaactataactacgagtcaagactcggctgttagacctgcatactgaacggcagaatgggacaaccttggctaaggagactatggacgatatatgtcgaggctatagtatcgacacggcacttatttaactgatatgcacaggacatcaggagaaatgccagactggatgaagcacatgctggaatcactgatgctgggagaataatcaataacctgatatatgcagatgatgccactctatgagataacgtgaagaggaacta

SEQ ID NO: 7672 - DNA, 426 bp, Bos taurus
  unsure (366): unsure at all n locations; Clone ID: 33-LIB3058-006-Q1-K1-A10
cgagaagtttgagaaggaggcggccgagatgggaaagggctccttcaagtatgcctgggtactggacaagctgaaggcagagcgggaacgcggcatcaccatcgacatctccctctggaaatttgagaccaccaaatactacatcaccatcatcgacgccccaggccaccgcgacttcattaagaacatgatcacaggcacatcccaggcggactgcgccgtgctgattgtggccgcaggagtgggtgagttcgaggcaggcatctccaagaatgggcagacccgggagcacgcgctgctggcctacacgctgggcgtgaagcagctcatcgtgggggtgaacaagatggactccacggagcccgnctacagcgagaagcgctatgatgaaattgtcaaggaggtcagcgcctacatcaagaagat

SEQ ID NO: 7673 - DNA, 203 bp, Bos taurus
  Clone ID: 33-LIB3058-006-Q1-K1-A2
ctctgggttgtgatcgtttcgacgtccgtgaagatgcagctcaaaccaatggagattggccccgagatgctgaacaaagtgctgacccggctgggggtcgccggccagtggcgcttcgaggatgttctgggactggaggaggagtctctgggctcggtgccagctgccggcctgcgcgctgctgctgctctttccgctcacgg

SEQ ID NO: 7674 - DNA, 394 bp, Bos taurus
  Clone ID: 33-LIB3058-007-Q1-K1-A10
gaataagattacaattgttggggttggtgctgttggcatggcctgtgccatcagtatcttaatgaaggacttggcagatgaagttgctcttgttgatgtcatggaagataaactgaagggagagatgatggatctccaacatggcagccttttccttagaacaccaaaaattgtctctggcaaagactataatgtgacagcaaactccaggctggttattatcacagctggggcacgtcagcaagagggagagagccgtctgaatttggtccagcgtaacgtgaacatctttaaattcatcattcctaatattgtaaaatacagcccaaattgcaagttgcttgttgtttccaatccagtcgatattttgacctatgtggcttggaagataagt

SEQ ID NO: 7675 - DNA, 404 bp, Bos taurus
  Clone ID: 33-LIB3058-007-Q1-K1-A2
cggacgcgtgggctggctagtcagtgtctgcattattctctctcctccaagatatgcaatagccttgcagctagtacaaagggatagtcctacgaaagcaagatctgattaaataaactggtctgtacattgctcttttcactgtcttatgtactaggttttcttatttttcctcagcacacttcccaaccttttggatattcattttaaatagggaaagctccctacattataaagaatattggcaccatttattttatacaaaggctaaaggttaacttttagaaatgatgaactactttcctatatgtgtctacttgtgcttcatgatatttctggatcattccagtcataaagacttattacatgtaatatttcctgctacctgggaaaagatatatttt

SEQ ID NO: 7676 - DNA, 424 bp, Bos taurus
  Clone ID: 33-LIB3058-009-Q1-K1-A10
gtttcccagttgtatacttatctccaaattcattgagttttatacattatatatgtacagctttttgtatgtcaatcatacctaatcaggtgggctttttaaactgaagtatagttgatttacaatatttcaggtgtacagcaaagtgattcagttttatagatatatatatatgctttttcagattattttccattataggttattacaagatactggatataattttctctgttccacagcaagaccttgtttatcttctttacatatagtagtgtatatctgtcaatcctagattcctgacttatccctcgcccccccttttccctttggtagccataaatttgttttctctgtgagtctatttctgttttgtaaataagttcatttgtatcattttttagattctacatataagtgatat

SEQ ID NO: 7677 - DNA, 192 bp, Bos taurus
  Clone ID: 33-LIB3058-010-Q1-K1-A2
ggcagttttatggaaggacgttacagtttctgcctagcgccctccggagttcccacaggtcctgtgatgctcgggtgaaagcatgttggcagattccttcactctgctcccagttctaacccagcgggtggtatacgccatccgaaacctcacggaagacaacatccaaaaccaagacctgattgcgaagat

SEQ ID NO: 7678 - DNA, 429 bp, Bos taurus
  unsure (2),(404): unsure at all n locations; Clone ID: 33-LIB3058-012-Q1-K1-A2
gnggagcttcgccggctttagtctccctttctcccatctcctgtgttaggtctgacctccggccgatcgtccgccgccgcacggcttgccgccatggccctcagcgatgccgacgtgcagaagcagattaagcacatgatggcttttattgaacaagaagccaatgagaaagcagaagaaattgatgcaaaggcagaagaagagttcaacattgagaaaggtcgtcttgtccaaacccaaagactgaagattatggaatattatgagaagaaagaaaagcagattgagcagcagaagaaaattcagatgtccaatttgatgaatcaagcgaggctcaaagtcctcagagcgagagatgaccttatcacagacctactaaatgaagcaaaacagagactcagcanagtggtaaaagatacaaccaggtac

SEQ ID NO: 7679 - DNA, 392 bp, Bos taurus
  Clone ID: 33-LIB3058-013-Q1-K1-A2
gttctagatcgcgagcggccgcctttttttttttttttttttttttttttttttttttttttgtttttttttttttttttttttttttttttttttttttttttttttttaaaaccggcagttttggggttttttaaatatcctcaaggccaattaagccttccccttaaccaattccaattccggccgctttaaagggggcggggcgggggggaggccccttccccaagccaagggtctaaggccccggggggttgaagaaggccggccaaaacacagggccccccccccagttgggggacacacggactggggacccaaaaaagccaggggggcaaagggccagggccaggattcaggccgccggggggtttcaaggggccctgggccct

SEQ ID NO: 7680 - DNA, 351 bp, Bos taurus
  Clone ID: 33-LIB3058-014-Q1-K1-A2
cgccctgctctacacagagggtgtccgaggcccggggcaggacttccgcatggccacgctctacagccgctcccagaacccccgagccgaggtcaaggaacacttcaccacctttgccaagagcctgggcttcacagaggaaggcattgtgttcctgccgaagactgacaagtgcatggaggagcacccataggtgagtctgcctctcaggacctggcccttctgccctgctcagccgttttctggaacaaccgagacccccacctgggaccccaagcccgggcccctcggcatccatgcccccctcaacccttattcccgctctgaaaataaactctgaagcaagtcaat

SEQ ID NO: 7681 - DNA, 445 bp, Bos taurus
  Clone ID: 33-LIB3058-015-Q1-K1-A2
gaagaagaggagcaggaatctgagcacgtttcacacttgggaaagcccctttccctcggcacaggaagatgaccacgccagcctctcagatctgtccatgctgacatctcagtatcacaggaattgtctatggttatgttcaagccttggcctaaaagccctctgcctaatgtcttcctgacaatcagacttattccatgcctttggagtaccatgatgctggccaacaggaaagttttaaattaagtgctattagtgtgacatgatggggaccagccactgaaagagcagagtgccctttactcctgatgcagggtcatcaggactgatccatcatggatgcctttctgctcccctctcaaccccatcagttcctctctcaatggctaagctaacccctggggaccagtcttaaacggggaatgtgactttctccaggtgtctc

SEQ ID NO: 7682 - DNA, 406 bp, Bos taurus
  Clone ID: 33-LIB3058-017-Q1-K1-A2
atcttcaccagtgtaataaaaacaaagctataagcattagaaagagacttctatggtattgatttagcagaacagaagagattctgcaaaaacctatgcatttattagaatttataatacagaaaaggcatcaggagctgagaagctaatgggactatttttaaaagtgctttggaggtaatgtgttctccaaggttgggggtggggtggggggatagaacatgaactatacacagagataaagggattgggttaaaagcagaagtatgataaagctatatagtaaaatggtgatgaccttgggaatgggaaacattccttatggcaaattgaaaaatatctagcaattctactcttgggtttgtatgctcagaaaagtatggtccagactatttactgtggcatg

SEQ ID NO: 7683 - DNA, 345 bp, Bos taurus
  Clone ID: 33-LIB3058-018-Q1-K1-A10
cgcgagcggccgcccttttttttttttttttttttttttttttttttgacgggttaaagaatttattgattatacaaagtgatcgcaccgggacgcggggcggcggcggccccgacgccgagcccgagccgggccgccgtataacttactctgtaaaaatatatatacacactgcggcgcgggcggctgcgagggcgcccaactgcttccacaccctcttcgcctgaaaggtacgtgagattgtcccatgtgtagtaataccaactgttttacgtgagacttcctatagcagatgggcctggaaagaaaattctgctcttgtgttcactgtagagaggacaagga

SEQ ID NO: 7684 - DNA, 431 bp, Bos taurus
  Clone ID: 33-LIB3058-019-Q1-K1-A10
gttcgtttcgacgtccgcgaagatgcagctcaaaccaatggagattaaccccgagatgctgaacaaagtgctgacccggctgggggtcgccggccagtggcgcttcgaggatgttctgggactggaggaggagtctctgggctcggtgccagcgccggcctgcgcgctgctgctgctctttccgctcacggcgcagcatgagaacttcaggaaaaaacaaattgaagagctgaagggacaagaagtcagtcccaaggtgtacttcatgaagcagaccattggcaactcctgtggaaccatcggactcattcatgcagtggccaataatcaggacaaactggagttcgaggatgggtctgttctgaaacagtttctttctgaaacagagaagttgtcccctgaagacagagcaaagtgctttgaaaagaatg

SEQ ID NO: 7685 - DNA, 319 bp, Bos taurus
  Clone ID: 33-LIB3058-020-Q1-K1-A2
gttctagatcgcgagcggccgcccttttttttttttttttgactgtagtaatcagttgattacacagattaatcattcttgaacgtaaaagctccactgacctgtaggagattgttttttaagtgaaatactattaaactcaaaacagttatgaaaagcaaggtgaaaaacatgaagctgtttctgtattccttttattccgaaggacttacgtcttaggtgaaagttatgaccaaccagattaaactctacccacatcctgaattttaaggtctaagtttaactggtcaacatttaaatggattggagctattagtaa

SEQ ID NO: 7686 - DNA, 462 bp, Bos taurus
  unsure (370): unsure at all n locations; Clone ID: 33-LIB3058-021-Q1-K1-A10
cggagcaacgactcttaccagagccgcgtggtgcgcgtggtgcgcgcccgcaagcaggtcgtgtcagggatgaactatttcttggacgtggagcttggccggactacatgtaccaagtcccaggccaacttagacagctgtcccttccataaccagccgcacctgaagagggaaaagctgtgctccttccaggtttacgtcgtcccatggatgaacaccatcaacctggtgaagtttagctgccaggattaacaggcaggccactgaccgcctctcactcatgctcctgcagagtgcccacacttgtggtgggtgactgcctactggccgtgccttccccatgccgcccctgcagacacaggctccttgngcattgtctgatctgccagggggactctaactcgtttctttcttctaattgctttccaagtgcatggtgctctgctattttactcaataaaa

SEQ ID NO: 7687 - DNA, 304 bp, Bos taurus
  Clone ID: 33-LIB3058-025-Q1-K1-A2
ctgacgcgtggggtctgatgaagagctgcgctgctacagtatccaggagccaagtgaggagagcgaggaggaggtgccgtccgtcccagtggtggtggctgagagccagagcgcgcgcaacttgcgcagactgcttaagatgccaggcctgctgtccgaggccttttaggaaggcctggagcgcaagaataaagctgtgtccttattcgacgacgtcactaggtacctctacgaccaggacagccccaaccgatagctcagtgagcccttcgctggtgccaaggagtcactcgacacgttccca

SEQ ID NO: 7688 - DNA, 419 bp, Bos taurus
  unsure (361): unsure at all n locations; Clone ID: 33-LIB3058-027-Q1-K1-A10
gtcatgttcgactctttgcagccccatggactgtggactgcctggctcctccgtccatgggatgtttccaggcgggaatgctggagtgggttgccatttccttctccgggggatcttcctgacccagggatcgaatccgggtctcctgcattgcaggcagactctttaccatctgagccattagggaatccctggacccagggaatacccttgatttcatttatttccaaggaaacaactgcacacacatggttaaaaatgaaatagaaaagaaagcagcagtttcccactccattcttttctaaccactttccaggggagcaaccaggtttttaaactctgctttcatcgtggataactntattcctctaaatgatgattatacgatgccatatgggtccagttatctgcaacaagat

SEQ ID NO: 7689 - DNA, 329 bp, Bos taurus
  Clone ID: 33-LIB3058-029-Q1-K1-A10
accgggccggacccacgcgtcgaagcacgcgtccactgtcccgaggggagcacgaactacgagatgctacacattcaataggggaccaagcaggagtcaacgctctacacatgcaccgcatatgcactatagcttcaatacgctcagttagctgaaggagctaaagctatcgagcaggatctgaaaggggctgcctgactgaatgctttgcacggatagccgcacctgcggcgcacagcctcgtacaatggccacactagatagctcagacaggactatgaagccacagcgatatcggatactccaatgctagggtccactagtatggt

SEQ ID NO: 7690 - DNA, 370 bp, Bos taurus
  Clone ID: 33-LIB3058-032-Q1-K1-A2
cctcccttccctcctctcctccctgcccctcttccctcccttccctcctctcttgcctgtacctcctccctgcccctcctccctcccttccctcctctcctcccttcctctcctctctccctgcccctcctccctgccctaccctgagaaacctgcttccttagccccaggaccagagctcttgttggatgaggccaggccagccacccaggtgccatttctgacctgatttccagaaattgtgtaccagggcctggagcacagaaccaattggctaaagcctcctgggagggctcaaactgtccagctttgtaagaaaagcctggaaaggatttgctggcaccatcaatctgcttgggctactgtgact

SEQ ID NO: 7691 - DNA, 311 bp, Bos taurus
  Clone ID: 33-LIB3058-033-Q1-K1-A10
aagaggtcataagtgtactgacttttgctttcagtcctgaaaaacttactgtgcggacggtgttaattagcctggtgtgcgagatgctctgtgctcacctagatcgatgcgcacaggctgctgaggctgaatgcatccagagtaccaacagatgctacaccacagatgtggtgtccagtgttgccttagactcctaagtgatctactaagaggcttctgatcaccactacacggagcactgcgagtgcttttttgcatcctgcattcacaaaccatttgctggttttactcttatcatgatcatccataat

SEQ ID NO: 7692 - DNA, 243 bp, Bos taurus
  Clone ID: 33-LIB3058-034-Q1-K1-A2
gtccagcaaggggctccttttattcattcggggcggggggggagtgttctgaaatgtggtgcaacgttataaagtcaagggtgcctggaaagcgagcctgccaggtgcaggaaagtgcaagaagcctgcaaagcctcctggcccgatgggcactcaagacttgcctttggctgcaactggtggcccaggaggggccaaagagacttcagaatgagatcagggtgcccgctccatccggagctt

SEQ ID NO: 7693 - DNA, 441 bp, Bos taurus
  Clone ID: 33-LIB3058-035-Q1-K1-A10
cggattcccggtcgaccagcgtccggtgatggactgaaagccagacttgatttggcagccccgtgtgtccgtatgtgcagccccggggcctgggcctgcctgctcccgccccgaccccgggccagcagcgtgagtactcactgaactcgatcagcagcttgccatagccccggcgctggtaggggggcagggtcaggatgcaggccacgttgtagtcttccgtggactccttttcctggaaaagccaggccggagtgagcgtgaggggagggacccagctcagggcgggactgagggaccgcctgcaggagcgctcaccttggagaagtagcccactatatggaagcccttgcagtcgtactctgtcatgacgtagaagaggaaagggtctgtgtcatagtacaacgtcttgtgatcgaagaaacacttagccagaagaca

SEQ ID NO: 7694 - DNA, 419 bp, Bos taurus
  Clone ID: 33-LIB3058-036-Q1-K1-A10
gagaacttcgtggtgactgcttttggatgcctgcatacagtggcagctcagagttcctatagagttccctcagagacccccctttttgcctctaggttccatggaagacaactcagtcagcagcagcgtggccaaggtcattagaaatgtttctagacagagttctcgtcaagctatgccagcgtttcatgtaggcatcactgagcaagctcatgtggagaaaactggtccgaggtgtcccacatcaccatcctagccaggtggaggaggcctaagctggggcttgctgggtccaggggtgggaggtaatgtttcctgaagtgaacaagggccaggcagaagagcaaagctccccacacaccccagccccttcctgtcacctgaagcgcagcactgtgccatatactccctatccaccc

SEQ ID NO: 7695 - DNA, 441 bp, Bos taurus
  Clone ID: 33-LIB3058-036-Q1-K1-A2
ccggtcgacagatagccgtaacttctgtgctgtgtcagccgcatccctgagacaagatggtgaaggtcggagtgaacggattcggccgcatcgggcgcctggtcaccagggctgcttttaattctggcaaagtggacatcgtcgccatcaatgaccccttcattgaccttcactacatggtctacatgttccagtatgattccacccacggcaagttcaacggcacagtcaaggcagagaacgggaagctcgtcatcaatggaaaggccatcaccatcttccaggagcgagatcctgccaacatcaagtggggtgatgctggtgctgagtatgtggtggagtccactggggtcttcactaccatggagaaggctggggctcacttgaagggtggcgccaagagggtcatcatctctgcaccttctgccgatgcccccatgt

SEQ ID NO: 7696 - DNA, 403 bp, Bos taurus
  Clone ID: 33-LIB3058-037-Q1-K1-A10
ctgaggataggataatgagccaaagttttaataataggattacatgatggattttaactaatagttttgagattttcttggaaagataaaatttgagccatggctttacgtagacttcaggaacatgaccattaagttttgtttgtttgtttgttttaacagaaatttactatggtctatagtataatactgtacacttcttttggtcaagaggactaacagatgtaaaagaacctgaactgtgggaagtaattctattataatccagtgattactaccaacactttcttcctggataagctaaaatttaatgaaaatgctgactggagaaaaatagggacgcttaaactggagaaatctgtatttccgtcaaagagttgggctactatcttcttttcccttt

SEQ ID NO: 7697 - DNA, 434 bp, Bos taurus
  Clone ID: 33-LIB3058-042-Q1-K1-A2
cacaggtgtcgtgaaaaccaccgttaatcctatgccaaaatgggaaaggagaagacccacatgaacatcgttgtcattgggcacgtagattcagggaagtctaccacgactggccatctgatctataaatgtggcgggatcgacaagagaacaattgaaaagttcgagaaggaggctgccgagatgggaaagggctccttcaaatatgcctgggtcttggacaaacttaaagctgaacgtgagcgtggtatcaccattgatatctccctgtggaaaatttgagaccagcaagtactatgttaccatcattgatgccccaggacacagagacttcatcaaaaacatgattacaggcacattccaggctgactgtgctgtcctgatcgttgctgctggtgttggtgaatttgaagccggtttcttcaaaaacgggc

SEQ ID NO: 7698 - DNA, 365 bp, Bos taurus
  Clone ID: 33-LIB3058-045-Q1-K1-A10
cggacgcgtgggaaaaaaaaaaaaaatttaaaaaaaaaatttaaaaaaaaaaaaaaaaaggaaaaaaaaaggaaaaaaaaaaaaaaaaaaaaaaaagagaaaacaacaaaaaaaaaccaacattaaaaacacctacatgcaaaaaactagccgtcctattacaacacctaaatctaataaaaaacccgcgtttctaaaaaaattagactggtaaaacaccagcgtttcccaacttgaaggctttaaaaaaaatccccctttgaaaaccttgcgtaacaacaaagaagcccgaatggataacggtacacaccctgtagagacccataatgcgcaaggggactggcctttacacgcaccataaaccc

SEQ ID NO: 7699 - DNA, 392 bp, Bos taurus
  Clone ID: 33-LIB3058-047-Q1-K1-A2
tcgaagggtgttactgaattctttatggagatcgtttaatagatgaatgcatatacataccgcaaggtctttatgcctaaccgcggaaatagaactttcaaatgcatccagactaatgtgaacaattgaaccaataacacttgaggagcatgcacatttcaaaatcaaggtttctccacatacattcccaataaaacgattgacggatcatgtggtagttctaatgatctaatatttacgaggaaccatcaatcttaccaacagtgtaagaggtctccttcgtctccacatgttctccagcattaattatctgcagactctgtcatgacggttactctgactggtgtcacgtgacaactcatagtttgataccgcattctctaataattaac

SEQ ID NO: 7700 - DNA, 398 bp, Bos taurus
  Clone ID: 33-LIB3058-048-Q1-K1-A2
cccacccctggtgtgattatttcatcagttagctgtggctgttttgcgtagcatcgtgtgccgcccctgcccatccccagccgccccccaccccgacccgtgtgcgccccctcactgcgatgtatgacccttgcccctcccacacattaataatttatatatataaatatctatatgacgctctttaaagaacatcccacacgaaaccaaccaaacaaaaacatcctcacgactacccaggaaaaaacaagaacacaagcacataccaagcagactgcaccatgctgaattgagacacaagagtgaatgagttcaaaaggggcgatcgctataaatgatccaaccttacatccccctcctttcgacctacatactgttctataggcaacccaaaattc

SEQ ID NO: 7701 - DNA, 431 bp, Bos taurus
  Clone ID: 33-LIB3058-049-Q1-K1-A2
ctcgtatataaatcaaatcataacagatttattaaaggagattctatctcaattaaaatgtgtactaaattatgtcaaaaagtaagacttacagataaaaatctgtaagccaacttctatgtattactgagaaagaatctcaatatcaagaagagtttacaggggtttaagaataaacaaggtcagaacattttctacctgctattcttgccagtggtttaacattgagcctcttagctgcatctgcagtcatcagaaccacagcagctgctccatcattcaatgtgctggcattggcagctgttactgtacctgaaagtatcaatgagcatgacatcagaacattctttcacactgaattcacttgggtcaatttaacaaattcctacagaatactgactgagttgctggatgcatgaagatatggatgg

SEQ ID NO: 7702 - DNA, 413 bp, Bos taurus
  Clone ID: 33-LIB3058-051-Q1-K1-A10
gacgaccagcagtgtgaagtcggcctcatcattggtaccggcaccaacgcgtgctacatggaggagctgagacacatcgacctggtggagggcgacgaggggaggatgtgcgtcaacaccgagtggggggcctttggggacgacggggccctggaggacatccgcaccgagttcgaccgggagatagaccgggggtcgctcaaccccgggaagcagctgtttgagaagatggtcagtggcatgtacctgggcgagctggtccgactgatcctggtcaagatggccaaagagggcctcttatttgaagggcggatcaccccagagctgctcaccagagggaagtttaacaccagtgacgtgttggccatcgaaaagaattatgaaaggcttcccaatgccaaagaaatcctgac

SEQ ID NO: 7703 - DNA, 298 bp, Bos taurus
  Clone ID: 33-LIB3058-052-Q1-K1-A2
aggcgtctcgagcgcttagaccagcagttttgagttctgcctgaggaggcgctgcgctaggtcaggttgcagtcactgacactactaaccccaggccatactcggcttttaccacatgaagctgaagacatcgactgaccagcactcgacacacgaggacccgatctattacaagcgcaagatgagtcgatcctacagctgaaactaggagcctaacactgccaagagtgccaagtgcagtgcccacgtctagacctttgaccgcacagacgcaccagctgagctctagctcatggag

SEQ ID NO: 7704 - DNA, 420 bp, Bos taurus
  Clone ID: 33-LIB3058-053-Q1-K1-A10
tcgcggacgcgtgggcgcgagcggccgcccttttttttttttttttatcattaaaagtgtattactttatttcaatactcaagaacagtgcatactttccttgagacccgtggtcacagctctcattgttgggtgtggccacgaatggaggtcactcagtcacaaccagctcaatgacgcagtgtgtgtgtcgagcaatttggagattttgtttctgaaattttctttttttttcttatcctctcatcattgaggctatgtattaatagacattatagtaaacccacgcgaaatattcagaattagaaggggattaaagagccacgtttgggcgttacgttgactattcctcattttcatcctaaggggggttgtgacgccagtgtggggacttcgtgggggtctggtagaagagatgct

SEQ ID NO: 7705 - DNA, 198 bp, Bos taurus
  Clone ID: 33-LIB3058-053-Q1-K1-A2
ttgatcgctagccatcgcccttgtggtttccctctactactaacaatagtcagtgaggcgtccaatctgcaggaggccgtgcctataccccagataggctactggtgagccctatcttaataaagattaatcaagctttatggcaaaaaaagaaattaaaaaaaaaataaacaattaaataaagggccgtcgttttta

SEQ ID NO: 7706 - DNA, 242 bp, Bos taurus
  Clone ID: 33-LIB3058-054-Q1-K1-A2
ctctgcccgagccatctaggcacagattcccatgggatgcaggagccctacacacgacacagggcccgccctaactcctgtcccccttccttcccaacttccttgctctactgtgttaacctcctcttggagctgccacaggcacagtaaaggtagccccaggaaaaaaaaaaaaaaaaaaaaaaaaaaaaaaaaaaaaaaaaaaaaaaaaaaaaaaaagaagggcaaaaagtaaaaatcaa

SEQ ID NO: 7707 - DNA, 164 bp, Bos taurus
  Clone ID: 33-LIB3058-057-Q1-K1-A10
attcacacctggaaatggattcatccttttaatttatgtaaggtttttgtacgcaattgggaattcttttaagagatgagaaccgactttgagtttctaacgcgaagtgagaaaattaagccccaaaaacgggtcattgtgaggaaataaaaaagctgcggttg

SEQ ID NO: 7708 - DNA, 317 bp, Bos taurus
  Clone ID: 33-LIB3058-057-Q1-K1-A2
gaataaggtcttatccagggtcttttttgatcaactcaaaaattggattggggaaaattgctttctagggttcaaacttctatgcattaatgcagatgttgtgaatgggtaaagatattagtaatttgattatttctatgtatggttttaaaagaatcgtttggtctttttgagatattataccttttttttggcattctaccattgtagtctaaacctaaaacttttatgcctcaatttagactatattttttaaaggagcacctctctgtggtgcaaagaacttttttaaaagtcccatttagaactgaatcttg

SEQ ID NO: 7709 - DNA, 228 bp, Bos taurus
  Clone ID: 33-LIB34-001-Q1-E1-A10
gacccacgcgtcaagaaaaaactgagtacaattacaggccctgttctcagatagttcaagagccagctccaagacgcccctctataatggaaggcactgctggaaatgcatcagactaaaatggtgttggaaactttcggtggcgatggacatgccagaggagactctgtatctcaaggaacaagattaccactaggaattctcacagatcttggactcagtattctt

SEQ ID NO: 7710 - DNA, 434 bp, Bos taurus
  Clone ID: 33-LIB34-001-Q1-E1-A2
tttcggcgtcaagtcactgcaaggcactagtcattttagtttggtctcaaacgtcacctcccagacaccttcgggaagttgtgcctctccttgtctctggtccctcactattttatcttcttcctagcagctgtcagaaattgttttgctattagtttttttttcttgtttaccattttcctcaagaccttaacagaaactttattggtttggtttggtttttctctattgtccccaccaaccagtgcttggcacacagtggacactttaagtacttactgaattagtatttgttgaattgatttttctgtccctcttcttttaaaaatagccttcgtggatggatgggtgcggttcatttccattaggtgtatgggaagacatgatgaaaatgggaatgtttcggagctccttttccaagtttgctatggtca

SEQ ID NO: 7711 - DNA, 389 bp, Bos taurus
  Clone ID: 33-LIB34-002-Q1-E1-A2
acggacgcgtgggtccccatctctccgcttcctcctttcctcaggcatcaaagcagagaccacgggaacctagttcaccaggctcgaggctggaggccccgccatgacatccctaaggccccttctgatgctggccctgctggcgtgggttgttgtggctgaccaagagtcctgcaagggccgctgcaccgagggcttcaacgccaccaggaagtgtcagtgtgacgagctctgttcttactaccagagctgctgtgccgacttcatggctgagtgcaagccccaagtgactcgtggggatgtgttccatctgccagaagatgagtacgggttccatgactacagcgacgcgcagaccgtcaacagcaacgtggaagcacagcccgaga

SEQ ID NO: 7712 - DNA, 373 bp, Bos taurus
  Clone ID: 33-LIB34-003-Q1-E1-A10
atttgcaataggcatgaagaatcagattccagacgcaatcctcactaatgtacttaagtcaatgctgaacatgcttgacgcaagatgctacgctgaatcttctactgcctgttgagatgcaacaggcactcaattgacaaaggaattaacatctgtcactcactctggacaagaatcatgtgctgtctactcagacaatacatttactgactacaagatctaactggcagaccgactaacatgcaaaattcctgatagcacggagactgatcgccaacagctggatgacattcactcagactttgcctccaagtattgatctgtaaaatcacgtcctctctaatgcaattcacataatggtacttacattaaa

SEQ ID NO: 7713 - DNA, 163 bp, Bos taurus
  Clone ID: 33-LIB34-004-Q1-E1-A2
attctagggtccacgcacgcgtccgaagggatctactcaatctacttagaatttccttgcaagaaacatgggctgcgatcgaaactgtgggctcgtcactggcgctgtcattggtgcagttgtggctctgttcagagggactctaatgccagttggaaacatg

SEQ ID NO: 7714 - DNA, 394 bp, Bos taurus
  Clone ID: 33-LIB34-005-Q1-E1-A2
ctagttctagatcgcgagcggccgccctttttttttttttttttttttttttttttttttttttttttttttttttttttttaattgtgagtggtggggttggctgcaaaaacgtcttgcctcccggaagcgtgtgtctcctgaggagttcacagaaataatgaaccaaagagaacaatactaccacaagatgaatttctcaccacctggtgataagaacagccttttcccaggcacttggtacctggagcgagtggatgagctgtatcgcaggaagtacgcccggcgtcccgtttaaagatatgtggagagtttcctgggaaaagtgctacagaacgtctgccctctttcaactgtataaagcccccactcttaactggtaaatagattgcac

SEQ ID NO: 7715 - DNA, 381 bp, Bos taurus
  Clone ID: 33-LIB34-006-Q1-E1-A10
atctggatggtgcgctgatcacgtgtcatactagccacctcaatggcctttattatcatagtgggacttactcatgtacatctactcggaatggttatgataatggcattacttgagccatatggaactccctgtggtattccatgatgaagaccaccatctcgataatcccacttaatctacttgccagcggagaacgacatcaacaccaactgctgggagccagccaggtcggattacaacatcaggttgctataaattatgactacgtcatcttgcccggaactgttcaatctgttaacatacaatgtttcacaaactttcatgatattttcttctcgttttctcataccgtactgattatttttaagtctttcttta

SEQ ID NO: 7716 - DNA, 366 bp, Bos taurus
  Clone ID: 33-LIB34-006-Q1-E1-A2
agaagagcttcttacatcacagagaaactttgagagaaacttccaaggcaaatttcccaaacaaaatgggcaccactggaaaccttattagatgcagagcagctatcacctgcgaagcagacaagcccctcagcattgaagatggtgacgtatctctccccaaggatcatgaagttcgaatccagatcattgccactgctctgtgccattctgatgcccatattcgctatcctcaatttgacgcgggggttttcccagtgattcttggacatgagggtgcaggaattgtgcaaagtattgggccatgagtgaccaactttaaagcatctttcaaggtaattccattccacgcacctcaatgtggaa

SEQ ID NO: 7717 - DNA, 393 bp, Bos taurus
  Clone ID: 33-LIB34-007-Q1-E1-A2
agggcctttaaatgtctgatggagggcgctggggatgtggcctttgtcaagcactcaacggtattcgacaacctgcctaacccagaagacaggaaaaactatgagctgctctgcggggacaacacccggaagtctgtagatgattaccaagaatgctacttggcaatggttccttcccatgcggttgtggctcgaactgtgggcggcaaggaggatgtgatctgggaacttctcaatcacgcccaggaacattttggcaaagataaaccagacaatttccagcttttccaatcccctcatgggaaggacctgctgtttaaggactctgctgatgggtttttaaagattccttctaagatggattttgagctgtacctgggatatgaatatgtc

SEQ ID NO: 7718 - DNA, 392 bp, Bos taurus
  Clone ID: 33-LIB34-008-Q1-E1-A10
taccaatcataattggaggattcggtaactgacttgttcccctaataattggtgctcccgatatagcatttccccgaataaataatataagcttctgactcctccctccctcattcctactactcctcgcatcctctatagttgaagctggggcaggaacaggctgaaccgtgtaccctcccttagcaggcaacctagcccatgcaggagcttcagtagatctaaccattttctctttacacttagcaggagtttcctcaattttaggagccatcaacttcattacaacaattatcaacataaagccccccgcaatgtcacaataccaaacccctctgttcgtatgatccgtaataattaccgccgtactactactactctcgctccctgta

SEQ ID NO: 7719 - DNA, 388 bp, Bos taurus
  Clone ID: 33-LIB34-009-Q1-E1-A10
gtcaaaattgccaaggtcacccagggctccacctgtgccgtgtttggcctgggaggagttggcctgtctgttatcatgggctgcaaagcagctggagcagccaggatcattgcagtggacatcaacaaagacaaatttgcaagggccaaacaggtgggtgccacggagtgcatcaaccctcaggactacgagaaacccatcgaggaggtgctgaaagaagtgagtggtggaggtgtagatttttcatttgaagtcatcggtcggcttgacaccatgatgtctgccttgctgtgctgtcaagaagcatatggtgtaagcgtcatagtaggagtacctcctcatgcccaaaatatctctatgaaccccatgttgctgttgactggacgta

SEQ ID NO: 7720 - DNA, 325 bp, Bos taurus
  Clone ID: 33-LIB34-009-Q1-E1-A2
ggcttttgtagacaagtgctgtgcagctgatgacaaagaagcctgctttgctgtggagggtccaaaacttgttgtttcaactcaaacagccttagcctaaacacgacacaaccacaggcatctcagcctaccctgagagtaagaggaaaaaagagaaatgaaaactcagagcttattcatctgttttccttttctgttggtgttaaaccaacactctcactaaagaacgtaaatttctttaaatattttgcttcatttggttgtgctacaattaataaaaaattgaaaagactctaaaaaaaaaacaaaagaaaaaaaggggggc

SEQ ID NO: 7721 - DNA, 412 bp, Bos taurus
  Clone ID: 33-LIB34-010-Q1-E2-A10
tcagtgacttgtacagtcacacggctacttaaccgagagcagggagagtctcagtctggctgttggctctcctggcccgggttcctccttaaacagtgcttgtgggtacaggacccttgtcccaagtttccctagttcctgcctcattcccaacctttcaggcccccctgagtccatgagggaacatgtggttgctgcctctaaggccatgaagatgggcgactggaagacctgccacagttttatcatcaatgagaagatgaatggcaaagtgtgggaccttttcccggaggccgacaaagtcagaaccatgctggttaggtgagccgagagtgagatcctggtggggggaaaagaaaagaccggttggtcttctctctgacagtctccccctttgcttccttctccccac

SEQ ID NO: 7722 - DNA, 391 bp, Bos taurus
  unsure (281),(380): unsure at all n locations; Clone ID: 33-LIB34-010-Q1-E2-A2
caggcagcagcagtgcacagcaaagtcaagtgtgacacaacactacatattaaatgtttttaatttttctaaacaatgcaattttgctaaagttacaattttggaaaagtaaccggcccccagactacttgcagcctttctgtcaagtgtatctggccctctaccgtctcagtgcttcctacgtttctcccaggacttggggggagtgaaggtgggtagaggagattctttaaaggccttctgacttgcagagcccaagagaatcctgggtaaggccctgngcttcttgaatgctgtgtctggcagcctctctctgcccttgttcccaagctcccttttgccttcctcaggtttgatagttgggaagtgtgattatccanaggaaatgaaa

SEQ ID NO: 7723 - DNA, 418 bp, Bos taurus
  Clone ID: 33-LIB34-011-Q1-E1-A10
aacactattcaccttcattgattcatgcaggaatgaatgatagaagttggcaaacacctggaatgtatcagtaatggttttaagcctgaatatgggtttccctggtggctcagtggtaaagaatatgccttccaatgcaagagatgcaggttcaatccctgggttgggaagatgccctggagagggaaatggcaacccactccagtattcttgcctgggcaatcccatagacagaggagcctggcaggttacagtccatggtgtcgcaaaagagtcagacatgactgagcaagtaaacaacaacaacaacgtggaaatgaatagtttcgggaatgttcctcaagttttcttccaataggaatgcctgactttgaaagacaaactatctccagcacaatcaagggcttttcaataaaaa

SEQ ID NO: 7724 - DNA, 401 bp, Bos taurus
  Clone ID: 33-LIB34-011-Q1-E1-A2
agagaggtacgggccggtgttcaccctgtacctgggctctcagcgtgccgtggtcgtgcatggctacaagcccgtgaaggaggtcctgcttgactacaagaacgagttttctggcagaggagaaaaccctgggttccagatgcacaagaacaatgggatcattttcaacaatggatcaacctggcgggacacccgacggttctcgttgaccaccctccgtgacttaaggatgggaaaacagggcaatgagcagcggatccagagggaggcccacttcctgctggaggtgctcaggaagacccagggccagccctttgaccccacgtttgtcgtcggctttgcaccttacaatgtcatctctgacatcctccttcacaaacgctttgactataaagatcaga

SEQ ID NO: 7725 - DNA, 410 bp, Bos taurus
  Clone ID: 33-LIB34-012-Q1-E1-A2
aacccaaagataccctctcgactaaacaaccaagatagaataaaacaaaacatttaatcccaatttaaagtataggagatagaaatctaagtacggcgctatagagaaagtaccgcaagggaacgatgaaagaaaaaactaaaagtataaaaaagcaaagattaccccttgtaccttttgcataatgaattaactagtataagacttaacaaaatgaattttagctaagcagcccgaaaccagacgagctactcacaaacagtttaccaagaactaactcatctatgtggcaaaatagtgagaagatttgtaagtagaggtgacatgcctaacgagcctggtgatagctggttgtccagaaaatgaatctaagttcagctttaaagataccaaaaattcaaataaacccc

SEQ ID NO: 7726 - DNA, 366 bp, Bos taurus
  Clone ID: 33-LIB34-013-Q1-E1-A10
gtccacggacgcgtcagaacttttaaagaccacagtagccagacgagacctgtcatcttctggtatgctcttcagcatcttgtatctggcggcgatctccacagacactgactgagaagacattgttaaacgtgaaagccagtgaggatcactgctctaagaagccaggctcgtggcacgtcactggagcagctgatccagaagattgcgagtgggatagaatttcggactgctgagagttatatcacgtgaaaatgcactggatcgctttgagaaagctgtctcaagcatttaccatatacggttaactgtcctgactccgatagaacttctcgctgaataatgacaagcttttgttctgaattg

SEQ ID NO: 7727 - DNA, 364 bp, Bos taurus
  Clone ID: 33-LIB34-013-Q1-E1-A2
aggacgcgtgggcttcagcatcctcagtatctttgcctatgaaaaatgaagaaaagagtcaaatggctagtttgaccaagactggacaaaatgttactgacactgtaactggtttcctccagtccttgaaaagcatccttaccaatcccttgtatgttttaacattatttttgacactgctacaagccagcagccatattggttctattacttatgtgttcaaatacgtagagcagcagtatggcaattcagcatctgagacgagcattttgcttggattcatatccataccatctttggcagctggaatgtttacaggaggatttattgttaaaaagttcaagtttaccttggatggaattgc

SEQ ID NO: 7728 - DNA, 437 bp, Bos taurus
  unsure (326),(413): unsure at all n locations; Clone ID: 33-LIB34-014-Q1-E1-A2
gggtccaggcacgcgtccgagcggaagctctggatccactgcccacaccccgctctcgcaggcagacatgaggacagagagaacttccttcctcctggctctggggctcctggtgtctgggttctgctccagggtccactgcctcccagagaatgtgaccccagaagaacagcacaaagggacgtctgtggatggccactcattagcctccagcaacactgacttcgccttcagcctctacaagcagttggctttgaaggaccccaataagaatgtcatcttctcccctctgagcatctccatagccttggccttcctgtccctgngggctcatgaccacactgtgacagagatcctggaaggtctcaagttcaactcacagagaccccgagacagaaatccacaaggcttcnagcacctcctgcagacgttcaatc

SEQ ID NO: 7729 - DNA, 386 bp, Bos taurus
  Clone ID: 33-LIB34-015-Q1-E1-A10
cagacagatcgctgcacctgttgggtccgatcctccacgggacagccctgtgtgcggcataaccccgtcgccggatccggcgtggccagtcggctccagcccactcccggacctacagggcatccgtgcatgtgaaaggcaagcacctctgcagtcgcatcctgataacacagcagtgggtgatgcagcgcagcacactgcactgtaggacatggccaatgggaaagtgcaggtcgtcctacgcgcgcactccctgtcgcaatcggagccctccacgagcctgtacgacgtgctccgcatattgccccacccgagcagccggtcagatgactatagaccacgatgcactcctgcaggagctctctgacaattccctgctgagccct

SEQ ID NO: 7730 - DNA, 399 bp, Bos taurus
  Clone ID: 33-LIB34-015-Q1-E1-A2
gccagtctttaacggaacggtctcccagaagcaatttagaatgactggtaaaacgaaatatacccaaagctcgcagcaacaaaaaaggatacagttctttctggccagcttcctgcttctgccctttctgctcgtctgcatcgtagagtctctcctgaagctttttattcctaagaagagaaaatcagtcaccggagagattgtccttattaccggagctggacacggtattggcaggcagactgcctacgaatttgccaaacttaagtgcaagctggtcctgtgggatataaataagcatggacttgaggaaacagccaccgaatgcaagagactgggtgcaaaggctcatacctttgtggtagactgtagtaaccgagaagatatttacagctctgc

SEQ ID NO: 7731 - DNA, 414 bp, Bos taurus
  Clone ID: 33-LIB34-016-Q1-E1-A2
gacacggattcgctttacgatcctatttcccaacatgcaggaaattgttgcagctgaagatgtctgatgtcttctggtgcctgtcagacacaggctggattctggctgccttggggtccctgcttgaaccatggacaacggggtctacaatctttgctcatcatctgcctcagtttgaccctaaggtcattatagagacatttttcaaatatccaattacccaatgccttgctgcaccttctgtatatcgaatgattttgcagcagaattacaccagtcttaggttccccactctggaacactgctgtactggtggggaatccctgctgcccgaggagcaagaacagtggaaaagacaaacacgtgttctgctctaccaggcctatggacagtcagaatcgggaataagctgtg

SEQ ID NO: 7732 - DNA, 398 bp, Bos taurus
  Clone ID: 33-LIB34-017-Q1-E1-A2
ggtgtaacctcttattctcaagtgactggaagaaccggtgagtctgtcaggctaccctgcttatatactggagaaatcacaactgcatgctggggccgaggggaatgttcttggtggagctgcagagaagacattatccagactgatggatacaaagtcacttttcagaaggacagacgttatcaactaagaggatatattggcgaaaggaatttgaccttgaccataaagaatgctgacccatctgacagtggcttgtattgctgccgtattgagaaaaaagggtggttcaatgatataataatcactcaagagttgagtataagagattccccaggagacatgtagtctgctattcccatctcttcaagaatattccagtttgttgtgatccacag

SEQ ID NO: 7733 - DNA, 412 bp, Bos taurus
  Clone ID: 33-LIB34-018-Q1-E1-A2
agaaaactttggcacaatgaagtgggtgacttttatttctcttctccttctcttcagctctgcttattccaggggtgtgtttcgtcgagatacacacaagagtgagattgctcatcggtttaaagatttgggagaagaacattttaaaggcctggtactgattgccttttctcagtatctccagcagtgtccatttgatgagcatgtaaaattagtgaacgaactaactgagtttgcaaaaacatgtgttgctgatgagtcccatgccggctgtgaaaagtcacttcacactctctttggagatgaattgtgtaaagttgcatcccttcgtgaaacctatggtgacatggctgactgctgtgagaaacaagagcctgaaagaaatgaatgcttcctgagccacaaagatgat

SEQ ID NO: 7734 - DNA, 390 bp, Bos taurus
  Clone ID: 33-LIB34-019-Q1-E1-A2
aaaaccttcagaaggaaaggagaatgtttttgtggaccatatgttttgtgtgtggcagtttaagttattagtttttaaaatcagtactttttaatgaaaacaacttgaccaggaatctgtcacagaatttgagacccattaaaaaaagtttaatgagaaacctgtgtcttccttttgggcaacactgtaactccctacagtactactttggtaagagttgctcataagctatttctgggaaaacaattttcaaaataagggtttgtaattctaaggtggagcttcagggttgttaaccttgtgttgagaactcatctggtttaataacatcgtaagcattggtgcaacacttttctaaaataggacagatgaacaaagtaactatgtttt

SEQ ID NO: 7735 - DNA, 399 bp, Bos taurus
  Clone ID: 33-LIB34-020-Q1-E2-A2
gatgcacaaccactgcacagcaatgtcaagtatgacacaacactacatagcaaatgttcttaacttttctaatacatgcacatttgctaacagtacaagtttagggacatgaccagaccccaaacgactttcagcctttctgtcaagtgtatctggaccactagcgtctcaatgcttcctacatttctcccaggacttggggggagtgaacgtgggtagaggacattctttaaaggccttctgacttgcagagcccaggagaatccatggtaaggccctgggcttcttgaatgccgtgtctggcagcctctctctgcccttgttcccaagctcccttttgccttcctcaggtttgataattgggaggtttgattatccagacgaaatgaaatatttttg

SEQ ID NO: 7736 - DNA, 430 bp, Bos taurus
  Clone ID: 33-LIB34-021-Q1-E1-A10
cacctgccacgtactggaccccacgcccctggcgaactgcagcgtgaggcagcagacgcagcacgcggtggaaggagactgcgatatccacgtgctgaaacaagatggccagttttccgtgctgtttacaaaatgtgattccagtccagattccgccgaggacgtgcgcaagttgtgcccagactgccccctgctggcgccactcaacgacagccgggtggtgcacgcagtggaggtcgcgctggctaccttcaatgccgagagcaacggctcctacttacagctggtggaaatttctcgggctcaatttgtgcctcttccagtttctgtctctgtggagtttgcagtggctgctactgactgtattgctaaagaagtcgtagatccaaccaagtgcaacctactggcagaaaagcaatatggcttctgt

SEQ ID NO: 7737 - DNA, 292 bp, Bos taurus
  Clone ID: 33-LIB34-021-Q1-E1-A2
cggacgcgtgggccgctgactattctcaaccaaccataaagatattggtaccctttatctactatttggtgcttgggccggtatagtaggaacagctctaagccttctaattcgcgctgaattaggccaacccggaactctgctcggagacgaccaaatctacaacgtagttgtaaccgcacacgcatttgtaataatcttcttcatagtaataccaatcataattggaggattcggtaactgacttgttcccctaataatttgtgctcccgatatagcaattccccgaata

SEQ ID NO: 7738 - DNA, 271 bp, Bos taurus
  Clone ID: 33-LIB34-023-Q1-E1-A10
gcgggtcgacgcaagcctctaaagtgagtcgtattagtgccacatgtttgggacctgcgcacatgacgttgtatcaagttcctataaggtcacctgacagaaatatatggaataaatttctcccccactggctagcacagtgcaactggcagtggcgacaacacctgcagactgtgggacctccgacagcgacattgtgtctacaccattcctgcacatcagaacttactgacacgtgtcaagttcgaaccgaaccaaaggaatttcctgc

SEQ ID NO: 7739 - DNA, 352 bp, Bos taurus
  Clone ID: 33-LIB34-024-Q1-E1-A2
aaattaagaccagttctgtaacacgaagtatttctgataccaaaatagcacacggtttggagaagaataaaactgtcaacccgttacctgggaaggctgttcaacagcagcctttggtgaaattttctgaacctttgaaacaaccttcaacagaagaagaagagaaaaatagaaagtgttctccggaagaaattcagagaaaaagacaagcagcgctgattagaagaatggccaaagcacaggcatcatctgtaaagaaaggcagatgatttatttaatgaaatgttacttgggagataaagacagttgataactatctatgataggaaatgtttttcttgatttctccatg

SEQ ID NO: 7740 - DNA, 372 bp, Bos taurus
  Clone ID: 33-LIB34-025-Q1-E1-A2
gggttctgaaaccctaaaggacccaacggtgagtgtctctgtcctagcctctcaacttgctttcctgtgtccaatagcactgcagactccagtactagcctgtccagagcagcaagtgagaggaaacaagccagcattgtaagaggacatgcttctcctccctctctccgtgctgctcctgctcacacagccctggagatccctgggagcagaaatgacaaccttttctcagaaaatactggccaatgcctgtaccctggttatgtgtagccccctggagagtggcttgcctggtcatgatggacaagatgggagagaatgtccccatggagagaagggggatccaggttcaccaggacctgcagggcgagc

SEQ ID NO: 7741 - DNA, 402 bp, Bos taurus
  Clone ID: 33-LIB34-026-Q1-E1-A10
ggaaatggagcaatactgggccattggcagcctggccagtgggattaatttgttcacaaacaacttggagggcccagttctagatcataggtagtatgccggtctgtgctccccgcattacatactcaacacaaggtttcggaagccatacaacgtggaaaacttcattccacagacccgaggcaaatatgactttacgttgacagaatatgaatcgtactcagattttgaacataacgtcacagggacggcaattagcaagtctagtttcagcttgggtttcagaattgctggaatatttgaacttggctacagcagcatgaataatattgggcaacattttattagcaggatcaaacgattctctcatacgaaaagcaaattcctgcacgcacgctctga

SEQ ID NO: 7742 - DNA, 377 bp, Bos taurus
  Clone ID: 33-LIB34-026-Q1-E1-A2
cagctcctgtccttgagtgccatgaccccagtgaccgtctggttcctgagcttgacacaattgtccctttggaatctaccaaagcctacaacatggtggacatcatacatgctgttgtggatgagcgagaattttttgagatcatgcccaattatgccaagaacatcattgttggttttgcaagaatgaacgggaggactgttggaattgttggcaaccaacctaaggtggcttcaggctgcttggacattaattcttctgtgaaaggggctcgtttcgtccgattctgtgactcgttcaacattcgcctcatcacttttgtggatgtcgccggcttcctgcctggcaccgcccatgagtatggtggcatcatccgc

SEQ ID NO: 7743 - DNA, 416 bp, Bos taurus
  unsure (308): unsure at all n locations; Clone ID: 33-LIB34-027-Q1-E1-A10
caccctcgttccttctaacttaccccatgctgtggtccaggacacgaaattcagacaatatgtcatccccaagggtactactgtattgccgttactgtcttccatcttgtacgactgcaaggagtttcctaacccagagaagtttgacccaggccattttttggataaaaatggcagcttcaggaaaacaaaatactttgtggctttttccattgggaaacgggcctgtgttggagagggccttgcccaaatggagctgttcctgttcttcaccaccattctgcaaaattttgtcctgaaacccctgngggagacaaaggacatagagaccaaacccattgttattggactgatcaacatgccaccacccttcaagctatgccttatccccagataaaagaagagcttttctcttt

SEQ ID NO: 7744 - DNA, 404 bp, Bos taurus
  Clone ID: 33-LIB34-029-Q1-E1-A2
gcttattccaggggtgtgtttcgtcgagatacacacaagagtgagattgctcatcggtttaaagatttgggagaagaacattttaaaggcctggtactgattgccttttctcagtatctccagcagtgtccatttgatgagcatgtaaaattagtgaacgaactaactgagtttgcaaaaacatgtgttgctgatgagtcccatgccggctgtgaaaagtcacttcacactctctttggagatgaattgtgtaaagttgcatcccttcgtgaaacctatggtgacatggctgactgctgtgagaaacaagagcctgaaagaaatgaatgcttcctgagccacaaagatgatagcccagacctcgctaaattgaaaccagaccccaatactttgtgtgatgagtt

SEQ ID NO: 7745 - DNA, 413 bp, Bos taurus
  Clone ID: 33-LIB34-031-Q1-E1-A10
gagcgagctgagtggttgtgtgattgcgtcccggagaccggtagcgcttgcagcatggctgaccaactgactgaagagcagattgcagaattcaaagaagctttttcactatttgacaaggatggtgatggaactataacaacaaaggaattgggaactgtaatgagatctcttgggcagaatcccacagaagcagagttacaggacatgattaatgaagtggatgctgatggtaatggcacaattgacttcccggaatttctgacaatgatggcaagaaaaatgaaagatacagacagtgaagaagaaattagagaagcattccgtgtgtttgataaagatggtaatggctatattagtgcagcagagcttcgccatgtgatgacaaaccttggtgagaagttaacagatga

SEQ ID NO: 7746 - DNA, 424 bp, Bos taurus
  Clone ID: 33-LIB34-031-Q1-E1-A2
gacgctctggcagcgccggcgtgacccacccgccatgctccccccagcgctcgtcttgctgttggggtttctctgccacgttgctatcgcaggacgaacctgccccaagccagatgagctaccgttttccacggtggttccactgaaacggacctatgagcccggggagcagatagtcttctcctgccagccgggctacgtgtcccggggagggatccggcggtttacatgcccgctcacaggactctggcccatcaacacgctgaaatgcatgcccagagtatgtccttttgctgggatcttagaaaacggaacggtacgctatacaacgtttgagtatcccaacaccatcggcttttcttgccacacggggttttatctgagaggagctagttctgcaaaatgcactgaggaagggaagtgg

SEQ ID NO: 7747 - DNA, 398 bp, Bos taurus
  Clone ID: 33-LIB34-032-Q1-E1-A2
cccagaccagccaagcctgtgagtgacaccccagacagaggaaccagagccatgcggagtctcagcggactgctgttgttactgactgcctgcctggcagtaaacgccagctccgtgcccacattgcccgatgacattcaagtgcaggagaacttcgacctgtctaggatctatgggaagtggttcaatgtggccgtgggctccacctgcccatggctgaagaggttcaaggagaagatgaccatgagcacagtggtgttgaaagcggggccgacgagcaatgagatcagcgtcaccaacactcacagggcggaaggtgtctgttaatccatctctgggacttatgagaaaacaagcactgatgggaagtttctctatcacagagccaagtggaatat

SEQ ID NO: 7748 - DNA, 385 bp, Bos taurus
  Clone ID: 33-LIB34-033-Q1-E1-A10
gagcggtgtccgcagagcaggtaattgctggcttcaaccgtcataggcaggaacagcggggcctggcatccaaagcagctgagctggagatggagttgaatgagcatagcctagtgattgatactctgaaagaggtcgatgaaacccgcaagtgctaccgcatggttggacgggtgctggtggagcggaccgtcaaagaggtgctgcctgccctggagaacaactcttcgcatggggtggccaaagtactggagtttcagctttagcatcagtccttccaatgaacacctatgactgatctcctttagaatggactggttggattcccttgcagtccaacggactctcaagagtcttctccaacaccacagttcaagagcatcaa

SEQ ID NO: 7749 - DNA, 388 bp, Bos taurus
  Clone ID: 33-LIB34-033-Q1-E1-A2
ctatcagcatttggcagactccaagaataacaatgacaacattttcctgtcacgcctgagtatctccacagcttttgctatgaccaagctgggtgcctgtgacaacacagtcaagcagttgatggaggtttttaagtttgataccatctctgagaaaacttctgatcagatccactttttccttgccaaactgaactgccgactctatcgaaaagccaataaatcctctgagttggtatcagccaaccgtctttttggagacaaatccattacattcaatgagacctatcaggacatcagtgaggtggtatatggggccaagctccagcccctggacttcaacggaaatgcagaacagtctagattgagtatcaaccaatggatatcc

SEQ ID NO: 7750 - DNA, 414 bp, Bos taurus
  Clone ID: 33-LIB34-035-Q1-E1-A10
aaataatgctggtatagtctagacagcagacgtgttcgctacacaagaccctcagattgaaaacacttttgaagttaatatccttgcacatttctggactacaaaggcatttcttcctgagatgatgaataataatcatgggcatattgtcactgtggcttcagcagctgggcatactggggtccccttcttactggcttactgttcaagcaagtttgctgctgttggatttcataaagctctgactgaagaattgagtgccttacaaataaacggcgtcaaaacatcatgtctctgccctaatttcatatacactggcttcatcaaaataccaagtaccagtttgggacccatcctgcaacctgatgaagtggtaaacaagctgatacatgggatcctgactgaacacaaaat

SEQ ID NO: 7751 - DNA, 228 bp, Bos taurus
  Clone ID: 33-LIB34-035-Q1-E1-A2
accgggccgtgattcccggaaccaccacgcgtccgaaaaagatggtattacctttgctgacccgatgtaaatatgtaccaaaacggtttcaaagtgtgttccttcatgaatgcgtcatttggctccaggaagcctgtgtcacctgtgtaagttggtctttgggcactttatatttttctaaaaacgtgttttggatcctgtactctaataaatcataagtttcttttt

SEQ ID NO: 7752 - DNA, 412 bp, Bos taurus
  Clone ID: 33-LIB34-036-Q1-E1-A2
caggacgtggtggcagaaaaatgaagaggatcctggttttcctccttgctgtagcctttgtgcatgctctagagagaggccgagattatgagaaagataaagtctgcaaggaccttgccagcctgggaagagatgacttcacatctttgtcaatggtcctatacagcagaaaatttcccagtggcacctttgaacagatcagccatcttgtgaatgaagttgtttccttaacagtaacctgctgtgcggaaggggccgatcctgactgctatgacaacaggacttcagcattgtctgacaagtcctgtgaaagcaactctccattcccagtgcaccctggaactcctgagtgctgcacccatgagggccttgaaaagaagctctgtatggctgccctgaagcaccagcacaa

SEQ ID NO: 7753 - DNA, 432 bp, Bos taurus
  Clone ID: 33-LIB34-038-Q1-E1-A2
agaggatcctggttttcctccttgctgtagcctttgtgcatgctctagagagaggccgagattatgagaaagataaagtctgcaaggaccttgccagcctgggaagagatgacttcacatctttgtcaatggtcctatacagcagaaaatttcccagtggcacctttgaacagatcagccatcttgtgaatgaagttgtttccttaacagtaacctgctgtgcggaaggggccgatcctgactgctatgacaacaggacttcagcattgtctgacaagtcctgtgaaagcaactctccattcccagtgcaccctggaactcctgagtgctgcacccatgagggccttgaaaagaagctctgtatggctgccctgaagcaccagccacaagaatttccaacttacgtagagccaacaaatgacgagatctgtg

SEQ ID NO: 7754 - DNA, 359 bp, Bos taurus
  Clone ID: 33-LIB34-039-Q1-E1-A10
gaatgaaaacaagcctgagaagcttccgccagttggagccgactcagccaagctgaaaaaggtccccagcgatgtgttgccagtattacctgacctcccattacctgtgatccaggccaattaccgtccacttccttcccctgaattgatgtcatctttccaaccaaagcgaaaagcactctcctcaccccaggaagaggaagaagctggattcaccggaagaagaatgaattctaagatgcaggtctattctggttccaagtgtgcctatctccccaaaatgatgaccttgcacgagcagtgcatccgggtgcttaaaaacaacatcgactcgatctttgaagtgggaggcgtcccat

SEQ ID NO: 7755 - DNA, 330 bp, Bos taurus
  Clone ID: 33-LIB34-040-Q1-E1-A10
gtttttctctgcaaaatataatttctgttctatttaatattcttttctcctctctacaaatatgttctttcatcgttttatccttcatactggaccaaatattgcctccttgccatggagactcacggtcaatagatgctgtgatttgacagtctgaatcacagacttggtggagtaaaaatgtattgatgcttatagaaagaaatctgacatcccttcagagtttgtacactacttcctaagctggagtttagtccacattttggccctgcagagttatacaatcttcagtgcaggtgatgagaataattctgtggttgtattttcctg

SEQ ID NO: 7756 - DNA, 424 bp, Bos taurus
  Clone ID: 33-LIB34-041-Q1-E1-A10
ggcaggaacaggctgaatcgtgtaccctcccttagcaggcaacctagcccatgcaggagcttcagtagatctaaccattttctctttacacttagcaggagtttcctcaattttaggagccatcaacttcattacaacaattatcaacataaagccccccgcaatgtcacaataccaaacccctctgttcgtatgatccgtaataattaccgccgtactactactactctcgctccctgtattagcagccggcatcacaatgctattaacagaccggaacctaaatacaaccttcttcgacccggcaggaggaggagaccctattctatatcaacacttattctgattctttggacaccccgaagtctatattttaatcttacctgggtttggaataatctctcatatcgtggactactactca

SEQ ID NO: 7757 - DNA, 146 bp, Bos taurus
  Clone ID: 33-LIB34-041-Q1-E1-A2
ataaaactaaagcatcacttgcccatttcttaccacaaggaacacccactccactaatcccaatacaagttgaagtattcattgttggagggttacaaagcgattgcttactagtcggtttgatgttgggaatagtaagcttggga

SEQ ID NO: 7758 - DNA, 359 bp, Bos taurus
  Clone ID: 33-LIB34-042-Q1-E1-A2
cggacgcgtgggtgaacgataattcaattagagtgtcccagaaaaaactgcttgggctccctcttcggagtctggctggcagccctgagcattgccaatggccccaactcgccctgactttgtgtcctcgtttggaggcctcatctctgtgcacggcttccgccccagtcggctggaagcaacttggggtgtgttttgttgggagttgtttggccagggcctttgaacagtagtgtcccaatgaagtactacagagtatttatgtaagaatgagcttttcttttttttttaaacaataatatccttttaaaaatttctaactactttgtaactgcatgacttaacctggtgatacaaca

SEQ ID NO: 7759 - DNA, 211 bp, Bos taurus
  Clone ID: 33-LIB34-043-Q1-E1-A10
cggtctagttatccgggcgtttttttgccaatattgaaagatagatgggaaaagataaaagaatgttgtctaactcttgattgcttagaaagtatttccatagtcaatgatggttcaataggcaaaccaggtcctataaacctgaattttttttatggtcaatactgttaagcagaaatgtagaacaggactggcaaaaatgtggatgttt

SEQ ID NO: 7760 - DNA, 363 bp, Bos taurus
  Clone ID: 33-LIB34-043-Q1-E1-A2
accagtgcgagaagtgccaggagatcctggaagtggactgttcggccagcaacccaactcagacgctgctgcgccagcagctgaacgcatccctgcagctggcggagaagttcagcaggctgtacgaccagctgctccagtcctaccagcagaagatgctcaacacgtcggccctgctcaagcagctgaacgagcagttcacctgggtgtcccagctggccaacctcacgcagagcgacgaccagcactacctgcaggtcttcacggtgaattcccacaactccgaccccagcatcccgtctggcctcaccaaggtgattgtgaaactcttcaactccttccccatcacagtgacggtcccgc

SEQ ID NO: 7761 - DNA, 324 bp, Bos taurus
  Clone ID: 33-LIB34-044-Q1-E1-A2
acaaaactttggcacaatgaagtgggtgacctttatttctcttctccttctcgtcagctctgcttattccagtggtgtgtttcgtcgagatacacacaagagtgagattgctcatcggtttaaagatttgggagaagaacattttaaaggcctggtactgattgccttttctcagtatctccagcagtgtccagttgatgagcacgtagaattagtgaacgaacgaactgattttgcaaaaacatgtgttgctgatgagtcccatgccgggtgtgaaaagtcacatcacactctccttggagatgaattgtgtaaagttgcatc

SEQ ID NO: 7762 - DNA, 395 bp, Bos taurus
  Clone ID: 33-LIB34-045-Q1-E1-A2
aacagaacagcaagtgtatgatattgggtttgtattgagctacaagtgccattttggctataagccagagacagatggacctacaactgtgacttgtcagagcaatttggagtggagcccatacatagaatgtaaggaggtatgttgcccagaaccaaacctgaataattatggaagcatcactctacacagaagacctagcactagtactcactgtacctatatcagtggagataagatttcatatgaatgtcatagtaaatatatgtttgatgctttatgtacaaaacatggcacttggagtcctagaacaccagaatgcagaccagattgtaaatcccctccggtcattgcccatggccaacataaattagcctcaaaattctttacatttg

SEQ ID NO: 7763 - DNA, 427 bp, Bos taurus
  Clone ID: 33-LIB34-047-Q1-E1-A10
taggaatctgccagcctcctgcgctcataagagactaaggaaaatgagcgtttcacagtaaaagctgaacggaaaggacaaggcaccttgtcggtagtgaccgtgtaccatgccaagctcaaatgcaaagtctcctgcaaaaagttcgacctccgggtttccatacgcccagcccccgaaacagtcaagaagcctcatgacgccaaaggttccatgatccttgacatctgtaccaagtacctgagagaccaggatgccactatgtccatcctggatatatccatgatgacaggcttctcacctgatgttgaagacctcaaaacgctgagcactggtgtcgacagatacatctctaagtatgagatgaacagagactccaacaagaacacactcaacatctacctggacaaagtctcacacacagtgg

SEQ ID NO: 7764 - DNA, 361 bp, Bos taurus
  Clone ID: 33-LIB34-047-Q1-E1-A2
acaatgaagatcctggtgtcgccatgggccgccgccccgcccggtgttaccggtattgtaagaacaagccgtacccaaagtctcgcttctgtcgaggtgtccctgatgctaagattcgcatctttgacttggggcgtaagaaggccaaagtggatgagttcccactctgtggccacatggtgtcagatgagtatgagcagctctcctctgaagccctggaggctgcccgtatttgtgccaacaagtacatggtgaaaagctgtggcaaagatggttttcacatccgagtgcggctccaccccttccatgtcatccgcatcaccaagatgttgtcctgtgctggagctgatagactccagac

SEQ ID NO: 7765 - DNA, 382 bp, Bos taurus
  Clone ID: 33-LIB34-048-Q1-E1-A2
attaggcaacttcctggtttggctgcttggaggctgcttctcctttactgggaagtctttgctagtcatggacccatatgtgattcagatgcacgatcacggcagcctcccctcagttctggatgtgcatgtcaacgttgctgggagaagctctgtgctgggaaaagtgaacagcatgaaggccacatggtccgtgaggccctcggacatgtcgaacaaaactttcaatcccatccgggccattgtggacaacatgaaggtgaagccatatccagacatgaccatgattgctttgtcgattggggaccctactgtcattgggaacctgccgacagattctgaagttacccaagcaatgacagatgccctcgactcagggaag

SEQ ID NO: 7766 - DNA, 389 bp, Bos taurus
  Clone ID: 33-LIB34-049-Q1-E1-A2
aagagaagtcatgacaggataccacatgatcagcagagaatcaattgcgcatttcgtaccacaatgaaaacccagtccactgatcccagtaccatcacatactgatactagcagcctttttagtcaaactaaagacctcatcgtgcagtttccaactcacatcaatgcacgacaccgaataaatcacctaaacagatgagatacacttgcatcaactcacagtaacgatataacatctctagatacagtcaacaggctaatcctaataccatctctaaagtttgcagtaccgataatccagatcctaagtagtcactctcctacacaatctataacagcatgacaacacagactcctcaaaagatgagtgcatggtgaagtggtgtgca

SEQ ID NO: 7767 - DNA, 427 bp, Bos taurus
  Clone ID: 33-LIB34-050-Q1-E1-A10
ttcccggtagccacccacgcctccgcaaagttgcaaacagatgggatattcaaaagtatgccagagaggcctacaacctgggggtcaggtacataggtgggtgctgtggatttgaaccctaccacatcagggcaattgccagaggagctggctccggagaggggatttttgccactggcttcagaaaaacatggcagctggggaagtggtttggatatgcacaccaaaccctggattagagccagggccaggaaggaatactgggagaatcttcagatagcctcgggcaggccgtacaacccttccatgtcaaagccggacgcctggggagtgaccaaaggaacagccgagcttatgcagcagaaggaagccacaacggagcaacaactgagagagctcttcgaaaaacagaattcaagtcggcaca

SEQ ID NO: 7768 - DNA, 414 bp, Bos taurus
  Clone ID: 33-LIB34-050-Q1-E1-A2
aaagctttaaaagcatggtcagtagctcgcctgagccagaaatttcccaaggctgagtttgtagaagttaccaagctagtgacagatctcacaaaagtccacaaggaatgctgccatggtgacctacttgaatgcgcagatgacagggcagatcttgccaagtacatatgtgataatcaagatacaatctccagtaaactgaaggaatgctgtgataagcctttgttggaaaaatcccactgcattgctgaggtagaaaaagatgccatacctgaaaacctgcccccattaactgctgactttgctgaagataaggatgtttgcaaaaactatcaggaagcaaaagatgccttcctgggctcgtttttgtatgaatattcaagaaggcatcctgaatatgctgtctcagtgcta

SEQ ID NO: 7769 - DNA, 247 bp, Bos taurus
  Clone ID: 33-LIB34-051-Q1-E1-A10
gccatgctcccccgcagcgctcgtcttgctgttggggtttctctgccacgttgctatcgcaagactaacctgccccaagcgagatgagctaccgttttccacggtggttccactgaaacggacctatgagcccggggagcagatagtcttctcctgccagccgggctacgtgtcccggggagggatccggcggtttacatgcccgctcacaggactctgggccatcaacacgctgaaatgcatgccc

SEQ ID NO: 7770 - DNA, 231 bp, Bos taurus
  Clone ID: 33-LIB34-051-Q1-E1-A2
cgtgctgcggcccggaggtcgccgggaagaagcccagtaccggcccgccgtgtctgtcctccatggctgccacgctgctcgcccgggcctgtggccttgtccgcggagccccctggccttggggctggcgtcgcctacataccgtctaccagtctgttgaactgcccgagactcaccagatgctgcggcagacgtgccgcgactttgccgagaaggagctctttcccatcg

SEQ ID NO: 7771 - DNA, 241 bp, Bos taurus
  Clone ID: 33-LIB34-052-Q1-E1-A2
cgagcgccatggccgccttacgtgccctgctgccccgcgtccgcgccccgctgcggccctggctcttctgcccggtgcagcgctccttcgcctcgagcgcagcctttgagtacatcatcacagcaaagaagggaaggaacagcaacgtggggttgatccagctgaaccgccccaaggccctcaatgcgctctgcaacggcctgatcgtggagctcaaccaggcactgcaggccttcgagga

SEQ ID NO: 7772 - DNA, 377 bp, Bos taurus
  Clone ID: 33-LIB34-056-Q1-E1-A2
aaagtactgacttcatctgccagacagagactcaggtgtgccagtattcaaaaatttggagaaagagctttaaaagcatggtcagtagctcgcctgagccagaaatttcccaaggctgagtttgtagaagttaccaagctagtgacagatctcacaaaagtccacaaggaatgctgccatggtgacctacttgaatgcgcagatgacagggcagatcttgccaagtacatatgtgataatcaagatacaatctccagtaaactgaaggaatgctgtgataagcctttgttggaaaaatcccactgcattgctgaggtagaaaaagatgccatacctgaaaacctgcccccattaactgctgactttgctgaagataa

SEQ ID NO: 7773 - DNA, 224 bp, Bos taurus
  Clone ID: 33-LIB34-057-Q1-E1-A10
tggaaatggggtgtatacttttaacaataagcaatggataaacaaggacattggacagcaacttcctgaatgtgaagaagatgacagctgcccagagccccccaagattgaaaatggctacgtggagtacttggttcgctatcattgcaaacccaattacacatgtgcacctgtggagatagagtgtacacctttaacagtaagaagcagtggataaataagaa

SEQ ID NO: 7774 - DNA, 227 bp, Bos taurus
  Clone ID: 33-LIB34-057-Q1-E1-A2
acggtccgatgcccgcgggtgcctggctgcctggccctgactgccctgttcagcctcgtgcacagccagcatgtgttcctggcccatcagcaagcatcctcgctgctccagagggcccgccgtgccaacaagggcttcctgcaggaggtgcggaagggcaacctggagcgagagtgcctgaaggagccatgcagccgcgaggaggccttcgaggccctggagtctct

SEQ ID NO: 7775 - DNA, 229 bp, Bos taurus
  Clone ID: 33-LIB34-058-Q1-E1-A2
cccccaggtaccttcctgctgagattcagtgaaagcagcaaagaaggaggcgtcaccttcacctgggtggagaaggacatcagcggcaagacccagatccagtcagtggaaccttacaccaagcagcagctgaacaacatgtcatttgctgaaataatcatgggctataagatcatggatgccaccaatatcctggtgtctccactggtctatctctaccccgacattc

SEQ ID NO: 7776 - DNA, 205 bp, Bos taurus
  Clone ID: 33-LIB34-059-Q1-E1-A2
ccaacagatggttctcagacccgacattaacctccctggccaagctgatgaaagaatgctggtatcaaaatccatctgccagactcacagccctgcgtatcaaaaagactttgaccaaaattgataattccctagacaaattgaaaactgactgttgacattttcatggtgtcaagaaggaagatctgacattattggttgtcca

SEQ ID NO: 7777 - DNA, 319 bp, Bos taurus
  Clone ID: 33-LIB34-060-Q1-E1-A10
acggcaatgtggactccaagagtctcttccactacaggcagtacagagctgggaaagaactatagagaaatagagacacgctgtctccattcttaaatcaacctaagccactctttatctaaaggaactgatttgcagctttcttttctagagacaaatattgataccaaactttatttcagtatacttaggtgtgccttaatattctttctttcacaattaaattgttgtcagtcaccttttaaaaattttacttagagaggcctccctaagtaactgttcttcatgagagccttcacttattaatgccttatttttg

SEQ ID NO: 7778 - DNA, 241 bp, Bos taurus
  Clone ID: 33-LIB34-060-Q1-E1-A2
gtggcggctactgcaatgtggtcatgcagggctgtatggcaggtgtggtggagattgacaagtactggagagaatacatcctgtctctggaagaactggtgaacggcatgtacagagtctatgacatggagaatgtactgcttggtctcttttcaacgatccatgactccatccagtacgtccagaagaatggaggaaagctcaccaccacgattggcaagttatgtgcccattctcaaca

SEQ ID NO: 7779 - DNA, 397 bp, Bos taurus
  Clone ID: 33-LIB34-061-Q1-E1-A10
actggattaaattaaagattattctggatgaactccaccttcgtgggcatgagataactgtcctcgtaccttcaacaagttctctgcttgatcatacccagattccctttaacgtggagatccttgaaactccaataagtaaagaaagtttcatggaagaattcactgctaatctctacacactttggtttgaactgccgaaagtttcatggtgggagaggcaagtacgactgacaaaaatgttgaaagagtttttagcaacaaccagaagcatttgtgacagtgttgtcacaaacaaggagttgctcaccaggcttcaggaagctaagtttgatatctgtattgctgaccctttaagcttctgtggggagttagtggctgagcttctcaacattcc

SEQ ID NO: 7780 - DNA, 417 bp, Bos taurus
  Clone ID: 33-LIB34-061-Q1-E1-A2
acgaaaagttctaggctatatacaactccgaaaaggtccaaatgtcgtaggtccatatggcctacttcaacccatcgccgatgcaatcaaacttttcattaaagaaccactacgacccgctacatcttcagcctcaatatttatcctagcacctatcatagctttaggcctagccttaaccatgtgaattcccctaccaataccctatcctcttatcaacataaacctaggagtcctatttatactagccatatcaagcctagccgtatactccattctctgatcaggctgagcttccaactcaaaatacgcactaatcggagccctacgagcagtagcacaaacaatctcatatggagttacgccaggaaattacccggtaatcagtacccctaataagtgggtcctttaccctct

SEQ ID NO: 7781 - DNA, 211 bp, Bos taurus
  Clone ID: 33-LIB34-062-Q1-E1-A10
ggcggcggctctggatccactgcccacaccccgctctcgcaggcagacatgaggacagagagaatgtcccccctcctggctctggggatcctggtggctgggctctgctccagggtccactgcctcccagagaatgtgcccccagaagaacagcacaaagtgacatctgtggatggccactcattagcctccagcaacactgacttcgcct

SEQ ID NO: 7782 - DNA, 134 bp, Bos taurus
  Clone ID: 33-LIB34-062-Q1-E1-A2
acaatgtccggagcccttgatgtcctgcaaatgaatgaggaggatgtcctcaaatccttgcagcacgaacccacttaggtggcaccaaccttgacttccaaatggaacattaatctacaacaggaaaagtgatg

SEQ ID NO: 7783 - DNA, 393 bp, Bos taurus
  Clone ID: 33-LIB34-063-Q1-E1-A2
aaccagggagctggtggctcttcaatccccagaccagccaagcctgtgagtgacaccccagacagaggaaccagagccatgcggagtctcagcggactgctgttgttactgactgcctgcctggcagtaaacgccagctccgtgcccacattgcccgatgacattcaagtgcaggagaacttcgacctgtctaggatctatgggaagtggttcaatgtggccgtgggctccacctgcccatggctgaagaggttcaaggagaagatgaccatgagcacagtggtgttgaaagcggggccgacgagcaaggagatcagcgtcaccaacactcacaggcggaaaggtgtctgtgaatcgatctctggtacttatgagaaaacaagcactgatggg

SEQ ID NO: 7784 - DNA, 432 bp, Bos taurus
  unsure (123),(285): unsure at all n locations; Clone ID: 33-LIB34-064-Q1-E1-A10
ggaaaaaaacctcctaaatccagcgaaaacctttgaaaaaaacttcaagggcaaatttcccaagaaaaatgggcacaaaggaaaaaattattaaatgcaaagcaactatcgcctgggaagcanacaagcccctcagcattgaagaggttgaggtagctccccccaaggatcatgaagttcgaatccagataattgccactgctctgtgccattctgatgcccatattctccatcctcaatttgaggggggggttttcccagtgattcttggccatgaggctgcangaattgtggaaagtattgggccaagagtgaccaacttcaaaccaagtgacaaagtaattccactccacgcacctcaatgtggaaaatgcaagttctgtctaagtccacgcacaaatttttgtggaaaactcaagcattttaaaaatc

SEQ ID NO: 7785 - DNA, 430 bp, Bos taurus
  unsure (417): unsure at all n locations; Clone ID: 33-LIB34-064-Q1-E1-A2
accgtcacctgtgagcacaccatcgagatcctccgggagaagggcttcgaccaggcgcccgtggtggacgagtcgggggtgatcctagggatggtgaccctggggaacatgctgtcgtccctgctcgcagggaaggttcagccatcggaccaggtttgcaaagtcatctacaagcagttcaaacagatctatctgacggacccgctgggcaagctctcgcacatcctggagatggaccacttcgccctggtggtccacgagcagatccagtaccgctgccatggggagtccagtaagaggcagatggtgttcggggtcgtcactgccatcgacttgctgaacttcgtggccacccgggagcggaaccagaggacgaaaccagaaagtgctttgaagctgggaagcgcgggggctgangcccagctctgac

SEQ ID NO: 7786 - DNA, 199 bp, Bos taurus
  Clone ID: 33-LIB34-068-Q1-E1-A10
gtcagggtttaagtaacagccgctcacccttgctccagccccattaggacccccaccacaagacaaagctcaggatgctggctaagctaggaacatacccccctcacccccacccccatattctcccagcagccctcaccagctccaccagtcaaaccagtgattttctcaaccttgcctcacagtgactccgcagtac

SEQ ID NO: 7787 - DNA, 242 bp, Bos taurus
  Clone ID: 33-LIB34-070-Q1-E1-A10
agggcaaagaatgtgaggaaatcatcaggaatggaggtgaaacatctgaaatgtacctcattcagcctgaggattctagcaaaccatatagagtatactgtgatatgaaaacggaaaaaggaggatggacagtaattcagaaccgtcaagatggtagtgttgactttggcaggaaatgggatccatataaacaagggatttggaaatattgcaaccaatgcaggaaggggaaagaaaatact

SEQ ID NO: 7788 - DNA, 380 bp, Bos taurus
  Clone ID: 33-LIB34-072-Q1-E1-A2
cacacatcaactcatgccttgtgggaaagatatgaccaccagacacaaacagaacagcaagtgtatgatattgggtttgtattgagctacaagtgccattttggctataagccagagacagatggacctacaactgtgacttgtcagagcaatttggagtggagcccatacatagaatgtaaggaggtatgttgcccagaaccaaacctgaataattatggaagcatcactctacacagaagacctagcactagtactcactgtacctatatcagtggagataagatttcatatgaatgtcatagtaaatatatgtttgatgccttatgtacacaacatggcacttggagtcctaaagacacagaatgcagatcagattg

SEQ ID NO: 7789 - DNA, 425 bp, Bos taurus
  unsure (261): unsure at all n locations; Clone ID: 33-LIB34-073-Q1-E1-A2
caaaacttaggcacaatgaagtgggtgacttttatttctcttctccttctcttcagctctgcttattccagaggtgtgtttcgtcgagatacacacaagagtgagattgctcatcggtttaaagatttgggagaagaacattttaaaggcctggtactgattgccttttctcagtatctccagcagtgtccatttgatgagcatgtaaaattagtgaacgaactaactgagtttgcaaaaacatgtgttgctgatgagtcncatgccggctgtgaaaagtcacttcacactctctttggagatgaattgtgtaaagttgcatcccttcgtgaaacctatggtgacatggctgactgctgtgagaaacaagagcctgaaagaaatgaatgcttcctgagccacagagatgatagcccagacctccc

SEQ ID NO: 7790 - DNA, 399 bp, Bos taurus
  unsure (86): unsure at all n locations; Clone ID: 33-LIB34-074-Q1-E1-A2
actacattatccaacccacagttttctctgatgttactgatgatatgcgcattgccaaagaggagatatttggacctgtgcagcanatcatgaagtttaagtctttagaagatgtaatcaagagagcaaacaatactttctatgggttatctgcaggaatatttaccaatgatattgataaagccatcacagtctcctctgctttgcagtctggaaccgtgtgggtgaactgctatagtgtggtatctgcccagtgcccctttggtggattcaagatgtctggaaatggtcgagaactgggagaatatggtttccatgaatacacagaagtcaagacggtcacaatcaaaatttctcagaagaactcataaactatgagagtacagagatgactcctca

SEQ ID NO: 7791 - DNA, 394 bp, Bos taurus
  Clone ID: 33-LIB34-075-Q1-E1-A10
agtcgtattaagtcctctcaccatgtggctgtacctggcagtcatcttgggcctgtactacctcctgcgctggtaccgagagaggcaggtggtgagccacctccaggacatgtttgtcttcatcacgggctgtgactcgggctttgggaaccagctggccaggcagctggtcctgcgaggcttgagggtcctggctgggtgtctgacggagcagggggccgagcagctgaggaaccagacatcagacaggctgcagacagtgattctggacgtcaccaagacagagagcatcgctgcggccactgagtgggtgaaggagtgtgttggggacgacggctctggggtctggtcaacaatgcaagcatttttcactcacatggctatgctgagtgga

SEQ ID NO: 7792 - DNA, 313 bp, Bos taurus
  Clone ID: 33-LIB34-076-Q1-E1-A2
acaccaccaaactgaccgcatcaaagagaaatttcatcatctacagagggctcctcttcaggtgttcctgcaaagcttggtgtgaagacagctttccaggcttacgtgtcttgcatgatgttcctgctgcaaggtgcccagatgctgcagatgctggagaaatccttgaggaagagccttcctatgtccttaaaggtttatgggaccgtcatgcacatgaaccatggaaacccattcaatctaaaggccctggtggacaagtggcctgattttcagaccgtggttatccgccctcaagagcaagacatgaaag

SEQ ID NO: 7793 - DNA, 309 bp, Bos taurus
  Clone ID: 33-LIB34-077-Q1-E1-A2
gtctgacaaacccgccatgctccccccagcgctcgtcttgctgttggggtttctctgccacgttgctatcgcaggacgaacctgccccaagccagatgagctaccgttttccacggtggttccactgaaacggacctatgagcccggggagcagatagtcttctcctgccagccgggctacgtgtcccggggagggatccggcggtttacatgcccgctcacaggactctggcccatcaacacgctgaaatgcatgcccagagtatgtccttttgctgggatcttagaacacggaacggtacgctatac

SEQ ID NO: 7794 - DNA, 424 bp, Bos taurus
  unsure (129): unsure at all n locations; Clone ID: 33-LIB34-078-Q1-E1-A2
gatgagcatgtaaaattagtgaacgaactaactgagtttgcaaaaacatgtgttgctgatgagtcccatgccggctgtgaaaagtcacttcacactctctttggagatgaattgtgtaaagttgcatcncttcgtgaaacctatggtgacatggctgactgctgtgagaaacaagagcctgaaagaaatgaatgcttcctgagccacaaagatgatagcccagacctccctaaattgaaaccagaccccaatactttgtgtgatgagtttaaggcagatgaaaagaagttttggggaaaaatactatacgaaattggcaaaagacatccctacttttatgcaccagaactcctttactatgctaatagatataatggagtttttcaagaatgctggcaagctgaagataaggttgctgcctgct

SEQ ID NO: 7795 - DNA, 428 bp, Bos taurus
  Clone ID: 33-LIB34-079-Q1-E1-A2
tgacatgtgtactagtggtgtaatctccaagtaaaagtgtccctaaaggccacttcctataggattttccccagtaaatgatgaggcaagcagtttatcttacacaaaatatctagtcatctaaaatggagagatgaatcctcctgcctatataaacaagctagctattagagggtggtcggggtatgctactcttaggatttcagagtgtcttcaaactgaaatctcaaatgttctcagtatgaaaaacctgagatcagatgcatatatgtaaggaaagtgctattcgcccagtaaacccagaaaaaagcaaatggataatgctggccatattttgcctttctgacatttccttgggaatctacaagaactccccttttcccctccccattaagaccatttaggtgtgtgttaagcaacttacagat

SEQ ID NO: 7796 - DNA, 414 bp, Bos taurus
  unsure (327),(407): unsure at all n locations; Clone ID: 33-LIB34-080-Q1-E1-A10
acacaaaactttggcacaatgaagtgggtgacttttatttctcttctccttctcttcagctctgcttattccaggggtgtgtttcgtcgagatacacacaagagtgagattgctcatcggtttaaagatttgggagaagaacattttaaaggcctggtactgattgccttttctcagtatctccagcagtgtccatttgatgagcatgtaaaattagtgaacgaactaactgagtttgcaaaaacatgtgttgctgatgagtcccatgccggctgtgaaaagtcacttcacactctctttggagatgaattgtgtaaagttgcatcncttcgtgaaacctatggtgacatggctgactgctgtgagaaacaagagcctgaaagaaatgaatgcttcctgagccacanagatgat

SEQ ID NO: 7797 - DNA, 423 bp, Bos taurus
  Clone ID: 33-LIB34-080-Q1-E1-A2
ggaaagacttaattcataagtaaagactgcagaaaattaggcagtgtttagtttttgtaaacctcccccctctgttcagttgataccagttactgatggttacatgtcttagggaaatttgaaaattagaaatgctgatatttcacattactgatttctaaatcctagaaagaagagcctggagagtttctgaatgtagagaagttccatttagggaagaggtcccttaatagatgtttcaaattgttgcagattctaaaccaagacttaatcctcaaatgtgtttattttacttgtcctaaaataatctgtccacaaatataaaattataagtgataagttgttgttttcccactgggaatttctaatgtgaaaatgtattccatgaaggtaattttttaaaaaaataaaatgctgcataat

SEQ ID NO: 7798 - DNA, 429 bp, Bos taurus
  unsure (343): unsure at all n locations; Clone ID: 33-LIB34-081-Q1-E1-A10
atggctgctgcacgcgaccggatctgggtgtgttgtgtcctacaagatgtaagttgcaagatactttggtaagacaggagagacaaatccgaaagagtatagaagatttacgtaatactgtggactctgtttcccggacctcttcttccacctttcaatatataactctgctaaaaaacatgtggaaaggaaggcagaatcaagtacaagataatgaaaatgtagtaaacgagtactcctcacatctggaaaagcaccagttatatatagatgagactgtgaagaataatatcccaactaagcttcgtgtgctccgttcaattctggagaatttgagaagcanaatacaaaaattagaatcggatgtctcaactcagatggaatactgccgcaccccgtgtactgttacttgcaatattcctgtggtgt

SEQ ID NO: 7799 - DNA, 429 bp, Bos taurus
  Clone ID: 33-LIB34-082-Q1-E1-A2
agagacttgcacagcgtgacccctggcgagtgtgcagtgcgcctggttaaagcaggaccttctatcgtgggggtaaactgccattttgaccccacaattagcttacatacagtgaagctcatgacagaaagcttggacgctgccggactgaaagcccacctcatgagccagcccttggcctaccacactcctgactgcggcaagcatgggtttattgacctgccagaattcccctttggactggaacccagagttgcaatcacatgggatattcatgagtatgccagagaggcctacaacctgggggtcaagtacatacgtgggtgctgtggatttgaaccctatcacatcacggcaattgcagacgagctggctccggacatgggatttctgccactggcttcacaaaaacatgaaacttgggaaatt

SEQ ID NO: 7800 - DNA, 391 bp, Bos taurus
  Clone ID: 33-LIB34-083-Q1-E1-A2
aagaatatcagcaaatccataagcaagctagcagaagattatggtcctgtgttcactctgtattttggcatgaagcccactgtggtgttgcatggatatgaagcagtgaagcaagtcctgattgatcagagtgaggaattttctggcagaggtagtttaccagtggcagacaacatcaaccagggattaggaattgttttcagcaatggagaaatatggaagcaaactcggcgtttctccctcatggttttgaggaatatggggatggggaagaggactattgaacacagaattcaagaggaagccttatgtttggtggaagcattaaaaaaaaccaatggatctccttgtgatcctactttacttctgagctgtgctccctgcaatgtga

SEQ ID NO: 7801 - DNA, 345 bp, Bos taurus
  Clone ID: 33-LIB34-084-Q1-E1-A10
acacgcggtcaaagcagctccaaaaacttggtcttcctgtccctgggggctcatgatcacactgtgacagagatcctggaaggtctcaagttcaacctcacagacgaccccgagacagaagtccaccagggcttccagcacctcctgcagacgttcaatcagcccagcatccagctgcagctgagcgtgggcaacgccatgtttgtgtcagaggagctgatgctgctggacatattcatgaaagatgccgatgctttttacgcctctgaggttttatccactaacttcaaggattcagaagctgccgtaaagcttatcaatcaatatgtgaggaatacaactcat

SEQ ID NO: 7802 - DNA, 394 bp, Bos taurus
  unsure (364): unsure at all n locations; Clone ID: 33-LIB34-084-Q1-E1-A2
aagaaaataagtccaagtttggtgcgaacgccatcctgggcgtgtccctggctgtctgcaaggctggtgctgtggagaagggggtgcccctctaccgccacatcgccgacttggctggcaatgctgaggtcatcctgccagttccggctttcaatgtcatcaacggtggctctcatgctggcaacaagctggccatgcaggagtttatgatccttcctgttggggccgaaaacttccgggaggccatgcgcatcggagcagaggtttaccacaacctgaagaatgtcatcaaggagaaatatgggaaggatgccaccaacgtgggagatgagggcggctttgcccccaacatcctggagaacanagaagccctggagctgctgaagaatgccat

SEQ ID NO: 7803 - DNA, 427 bp, Bos taurus
  unsure (402): unsure at all n locations; Clone ID: 33-LIB34-085-Q1-E1-A2
ttccaggccgacccacgcgtccagctgactaatctcaaccaaccataaagatattggtaccctttatctactatttggtgcttgggccggtatagtaggaacagctctaagccttctaattcgcgctgaattaggccaacccggaactctgctcggagacgaccaaatctacaacgtagttgtaaccgcacacgcatttgtaataatcttcttcatagtaataccaatcataattggaggattcggtaactgacttgttcccctaataattggtgctcccgatatagcatttccccgaataaataatataagcttctgactcctccctccctcattcctactactcctcgcatcctctatagttgaagctggggcaggaacaggctgaaccgttgtacctcncttagcaggcaaactagcccatgca

SEQ ID NO: 7804 - DNA, 369 bp, Bos taurus
  Clone ID: 33-LIB34-086-Q1-E1-A10
agcaggagcaccttctgtggaaaatgtaaagaatggaatcagaacaggcttcctggagattgatgaacatatgagagttatgtcagagaagaaacatggtgctgataggagtgggtcaacagctgtgggtgtcttaatttctcctcaacacacgtatttcattaactgtggagactcaagaggtttactttgtaggaacaggaaagtttacttcttcacacaagatcacaaaccaagtaatccgctggaaaaagaacgaattcagaatgcaggtggttctgtaatgattcagcgtgtgaatggctctctggctgtgtcgagggcccttggggactttgattacaaatgtgtccatggaaaaggtcctac

SEQ ID NO: 7805 - DNA, 397 bp, Bos taurus
  Clone ID: 34-BOVMS1-002-Q1-E1-A6
atctgcttatatatgcacgtaggacgaggcttatattacgggtcttacacttttctagaaacatgaaatattggagtaatccttctgctcacagtaatagccacagcatttataggatacgtcctaccatgaggacaaatatcattctgaggagcaacagtcatcaccaacctcttatcagcaatcccatacatcggcacaaatttagtcgaatgaatctgaggcggattctcagtagacaaagcaacccttacccgattcttcgctttccattttatccttccatttatcatcatagcaattgccatagtccacctactattcctccacgaaacaggctccaacaacccaacaggaatttcctcagacgtagacaaaatcccattccacccctact

SEQ ID NO: 7806 - DNA, 385 bp, Bos taurus
  unsure (307),(370): unsure at all n locations; Clone ID: 34-BOVMS1-003-Q1-E1-A6
atgcgacgtcatagctcttctatagtgtcacctaaattcaattcactggccgtcgttttacaacgtcgtgactgggaaaaccctggcgttacccaacttaatcgccttgcagcacatccccctttcgccagctggcgtaatagcgaagaggcccgcaccgatcgcccttcccaacagttgcgcagcctgaatggcgaatgggacgcgccctgtagcggcgcattaagcgcggcgggtgtggtggttacgcgcagcgtgaccgctacacttgccagcgccctagcgcccgctcctttcgctttcttcncttcctttctcgccacgttcgccggctttccccgtcaagctctaaatcgggggctccctttanggttccgatttagtg

SEQ ID NO: 7807 - DNA, 358 bp, Bos taurus
  Clone ID: 34-BOVMS1-004-Q1-E1-A6
atgcgacgtcatacctcttctatagtgtcacctaaattcaattcactggccgtcgttttacaacgtcgtgactgggaagaccctggcgttacccaacttaatcgccttgcagcacatcccgctttcgccagctggcgtaataccgaagaggcccgcaccgatcgcccttcccaacagttgcgcagcctgaatggcgaatgggacgcgccctgtagctgcgcattaagcgcggcgggtgtggtggttacgcgcagcgtgagcgctacacttgccagtgctctagcgcccgctcctttcgcttccatcacttccttcctcgccacgttcgccggctttccccgtcaacctcgaaatctgg

SEQ ID NO: 7808 - DNA, 181 bp, Bos taurus
  unsure (98): unsure at all n locations; Clone ID: 34-BOVMS1-005-Q1-E1-A6
ttgaatgcaacttcatacctcttcaatagggtcacctaaattcaattcactggccgtccgttttacaacgtcgtgactgggaaaaccctggcgttacncaacttaatcgccttgcagcacatccccctttcgccaactggcgtaatagcgaaaaaggccgcaccgattgccctttccaaaa

SEQ ID NO: 7809 - DNA, 401 bp, Bos taurus
  Clone ID: 34-BOVMS1-006-Q1-E1-A10
ttgaaatcgggttgcaatgagaaagcatttgtttttccaccaggctcccaagtgtggtcgttttttttcctcctgatgctgaagaaaaaaaaaaaatgtttgcacggattgcttaattaaaaattgcaaacaaaatctcatttgaagttagcattttggtcattgttgtctttgcttggtcactgtactttccaaaaaaatgcaagctatagaataatcagaaacagttattttagcttaacataatagactctgaaatctttttttcccttagagtaaatatatatatatatatatacacacacacacacacacaatagacagcaatgtaaccttaaacccatccttccccgggatcaaaaaaattttccaaccaagaaaaattggttaatttccaaaaa

SEQ ID NO: 7810 - DNA, 309 bp, Bos taurus
  Clone ID: 34-BOVMS1-008-Q1-E1-A10
cagaatataagcacatccgatggcgctgatcaggcataataaggaacatacagatttggccggtgacactccaacataacgttctgcacgtccagttggggatgcaatgtttcattgggaagccacaattatgggacctaatgacagcctacatcaaggcggtgtattctttttgacagttcattttcctacagactattccttcacatcacctaatgttgcatttacaacaagatctgatcaaccacatagtagcattcatggcagcagttgtctcgatattctaagatcacagtggtctcatgcatt

SEQ ID NO: 7811 - DNA, 406 bp, Bos taurus
  Clone ID: 34-BOVMS1-008-Q1-E1-A6
atgcgacgtcatagctcttctatagtgtcacctaaattcaattcactggccgtcgttttacaacgtcgtgactgggaaaaccctggcgttacccaacttaatcgccttgcagcacatccccctttcgccaactggcgtaatagcgaagaggcccgcaccgatcgcccttcccaacagttgcgcagcctgaatggcgaatgggacgcgccctgtaacggcgcattaagcgcggcgggtgtggtggttacgcgcatcgtgaccgctacacttgccagcgccctaacgcccgctcctttcgctttcttcccttcctttctcgccacgttcgcccgctttccccgtcaagctctaaatcgggggctccctttaaggttccgaattaatgctttaagggacctcgacccca

SEQ ID NO: 7812 - DNA, 441 bp, Bos taurus
  Clone ID: 34-BOVMS1-010-Q1-E1-A10
ggcaagatcgtctcaagatgaccacaatgatcatcatatgagacactcagcgcctgagttcccagttccgtgaacaggatttgcactgcagacgaaatcagtgtgcaaagcgcgtatctgaaatgtggcatcgtaatagatctgacattgataatcaacagcatgggcagttaaattccacacggtggtgtgcgaatcatgtgtaatcagtcaccttggcatgttgaaaatttatcgctcagtagaaaatcaccttagaattttgaatggtgttgagacaaatatatgtcacaatgagtgtttgtatattatagagtgtgacatattatcacatgtttatatatttacatcggtagttacatagatactccaaatctccatttacattgcctcagcacttttaacgtggctaaacattgggaattttaaattattgggggg

SEQ ID NO: 7813 - DNA, 278 bp, Bos taurus
  unsure (169): unsure at all n locations; Clone ID: 34-BOVMS1-012-Q1-E1-A10
tgactctagtgtgcctgtatggagtggagtgaatgttgctggtgtctccctgaagaatttacaccctgaattaggcactgatgcagataaggaacagtggaaagcggttcacaaacaagtggttgacagtgcttatgaggtgatcaaactgaaaggctacacatcctgngccattggactgtcagtggccgatttggcagaaagtataatgaagaatcttaagcgggtgcatccgatttccaccatgattaagggtctctatggaataaaagaggatg

SEQ ID NO: 7814 - DNA, 348 bp, Bos taurus
  Clone ID: 34-BOVMS1-012-Q1-E1-A8
atgcgacgtcatagctcttctatagtgtcacctaaattcaattcactggccgtcgttttacaacgtcgtgactgggaaaaccctggcgttacccaacttaatcgccttgcagcacatccccctttcgccagctggcgtaatagcgaagaggcccgcaccgatcgcccttcccaacagttgcgcagcctgaatggcgaatgggacgcgccctgtagcggcgcattaagcgcggcgggtgtggtggttacgcgcagcgtgaccgctacacttgccagcgccctagcgcccgctcctttcgctttcttcccttcctttctcgccaagttcgccggctttccccgttaagct

SEQ ID NO: 7815 - DNA, 444 bp, Bos taurus
  Clone ID: 34-BOVMS1-014-Q1-E1-A6
ctgaatgtgagtatataactgatgaaagtgtcttactcttgtgaggttactacgttatgcttcactgcccccgctacctcatctcggaatgattggttcatctgccaccatgtcgagcaggaggtcactgaccagtaccaccaaccatccacgcccatcttcctacctccaacgtgttcgccatgtttgaccagtctcacattcacgggtccaaaggagccgtcatcatgatccatcaaattatttcatcggttcatatgatattgaagacttgcatgatatgcatgcttccctgtgaacaaatccaactgatgaatatctggatgccatgatgaactctgctccatgtcccacatcttttaccatgtttctcacagtgtttcgacatatcttaactagcatatattcagaagatgtcatcagtaatgcttttgcttgccttga

SEQ ID NO: 7816 - DNA, 118 bp, Bos taurus
  Clone ID: 34-BOVMS1-016-Q1-E1-A6
aaaaaaaaaaaaaaaccaactctatttctaatacctgttgtaaacattatacatgtcatttggtgacggaggaatccaaaataaaagcttcagaataaacacaactatgaactgggtc

SEQ ID NO: 7817 - DNA, 245 bp, Bos taurus
  Clone ID: 34-BOVMS1-017-Q1-E1-A10
aggacgaatctgctcgcggcgcaggcggctgacctcgagccaccgcgcagcagctgctctccaaccatcagcgttgccgctgccgcaaactgacacactgtttataatgtgtacatacattgtttacctcattttgttatttttaaaacgaagccctgtggaaggaaatggaaaacttgacgcattaaactcaaccgttctgttttgctgcgtaaaacatgatctcttcgcagaatcgaaaccag

SEQ ID NO: 7818 - DNA, 360 bp, Bos taurus
  unsure (319): unsure at all n locations; Clone ID: 34-BOVMS1-018-Q1-E1-A10
cagattttgaacttgtgtgcacaatttgttgttttactttcaccatttatacttgagaccaacttttcaatgtgattcttcaaaagcactggtttcaagagtgtagagactggaaaacattacggtacagagatggagatgtaaaattggttttgtatcatcacgaatattattatcctttcctagagttaccttgtttactattcttagtctttccattcaacttgtggatgtagttgttaaatatatctagaactagcatttttacactagttgctgatgtttggaattgagcaactgtatattgctgaagaggtcncaaagaattggaatcctcgttaatttaattgctttgaaatg

SEQ ID NO: 7819 - DNA, 387 bp, Bos taurus
  unsure (309): unsure at all n locations; Clone ID: 34-BOVMS1-018-Q1-E1-A6
tagatcgcgagcggccgccctttttttttttttttttttttttggagaccaaatggagtttattaagcagcagagagtgtggaggccgacagtagagggaggagtggatggatatagaaggatgaagcaagtgccaggatgggcagcggatgtggtgagggctctcctaggctgcacccagcctggctttgcagtgttggcaatttctgctcctcctgctggccctgcttcccatagagaaaatggaaaggagaagagagacaattttacactagccaccctactcgtcatcatcgcattctgacttcnccaactaaatgtatactctgagaaaacaagcccatacgaatgtggatttgaccccataggatcagcccgccttccctt

SEQ ID NO: 7820 - DNA, 415 bp, Bos taurus
  Clone ID: 34-BOVMS1-020-Q1-E1-A10
gctgaaactactctgcggttgtaatacaaaagcagccagtaggctctagtgactcagacagtaaagaatctgcctgcagtggaggcgacccaggttcaatccctgggcaggcagatcccctggagaagggaatggctacccactcccgtattctttcctggagaattcagtggacagaggggcctggtaggctatagtccatggggttgcaaagggtcagaaacaaccgagcgactttcactttaggcaaaaattgtaccacagcatttgcaaaaacaagcagccggctggacttgacctgcaggccacagtttgctgacctcaatctagaagatacagttgttttttaaaactttagaattctcatcttactttatttaggagtattttcgttaacaccagctttttcctcagt

SEQ ID NO: 7821 - DNA, 245 bp, Bos taurus
  Clone ID: 34-BOVMS1-020-Q1-E1-A6
ataaaaaataaaaaaaaaaaaaaaaaaaaaaaaaaaaaaaaaaaaaaaatcaaaaaaaaaaaaaaaataaaaaaaaaagaaataaaaaaaaaaaaaaaaaaaataaaaaaaaaaaaaaaaaaaaagggtggccatccaaaaggttcaaagcttacttacccatgaatgcaatgtcttaactcttctaaagtgtcaccaaatttcaattaatgggccttccttttaaaatgtcctcacgggaaaaa

SEQ ID NO: 7822 - DNA, 101 bp, Bos taurus
  Clone ID: 34-BOVMS1-021-Q1-E1-A6
aaaaaaaaaaaaaaaaaaaaaaaaaaaaaaaaaaaaaaaaaaaaaaaaaaaaaaaaaaaaaaaaaaaaaaaaaaaaaaaaaaaaaaaaaaaaaaaaaaaag

SEQ ID NO: 7823 - DNA, 272 bp, Bos taurus
  Clone ID: 34-BOVMS1-022-Q1-E1-A10
gcaaaacatactgttgctatgatgtaactgcatttgacctaaccactgcgaaaattcattccgctgtaatgttttcacaatatttaaaagcagaagcacgtcagttaggatttccttctgcataaggtttttttgtagtgtaatgtcttaatcatagtctaccatcaaatattttaggagtatctttaatgtttagatagtatattagcagcatgcaataattacatcataagttctcaagcagaggcagtctattgcaacgaccttcattg

SEQ ID NO: 7824 - DNA, 446 bp, Bos taurus
  Clone ID: 34-BOVMS1-023-Q1-E1-A10
tccggggccacccacgcgtccgtagaacccttgccacttattttccagatcacaccgctgaatgtgacccaatggctgatggtgctgaaaatctccttgcctgtgattctaatggatgagaccctcaagtttgtggcccgcaactacctagaacctgcaatactggagtaaccgcttcctaaaccattttgcagaaatttaagggtgttcagttgcgtgcatgtgcgttttttagcaacacatctaccagccctctgcatgattgatgttgggggaaaaagaaaattagaaaaaagtccccaacttgttgtgtgttatgtggaggaaacgtgtattaccagtggggttttagcttttgaatcaaaataataacaaatgtacaatttaacttaatgaatcagaaagcctctccagagaagtctggtttctttgctgcaagaagaatg

SEQ ID NO: 7825 - DNA, 404 bp, Bos taurus
  Clone ID: 34-LIB188-001-Q1-E1-A10
acaccagggtcgtgtggtgtgccgtgggacctgaggagcagaagaagtgccagcagtggagccagcagagcggccagaacgtgacctgtgccacggcgtccaccactgacgactgcatcgtcctggtgctgaaaggagaacacgaatggagagagcactgcagactgggctaagaacttgaatcgtgaggacttcaggttgctctgcctcgatggcaccaggaagcctgtgacggaggctcagagctgccacctggcggtggccccgaatcacgctgtggtgtctcggagcgatagggcagcacacgtgaaacaggtgctgctccaccagcaggctctgtttgggaaaaatgggaaaaacttgcccggccatgtttggttggttcaaatctgaaaccaaaaacc

SEQ ID NO: 7826 - DNA, 342 bp, Bos taurus
  Clone ID: 34-LIB188-001-Q1-E1-A6
actctctcagcagcatggtgaccgtgcccgccagcagctcaggacagaccttcacctgcaacgtagcccacccggccagcagcaccaaggtggacaagactgttggggtctccagtgactgctccaagcctaataaccaccattgcgtgagggaaccatctgtcttcatcttcccaccgaaacccaaagacaccctgatgatcacaggaacgcccgaggtcacgtgtgtggtggtgaacgtgggccacgataaccccgaggtgcagttctcctggttcgtggacgacgtggaggtgcacacggccaggacgaagccgagagaggagcagttcaacagcacgt

SEQ ID NO: 7827 - DNA, 401 bp, Bos taurus
  Clone ID: 34-LIB188-002-Q1-E1-A10
acagaggaactacctggagggcgaatgcgtggagtggctccgcagacacctggagaatgggaaggacacgctgctgcgcgcagaccctccaaaggcacatgtgacccatcaccccatctctgaccgtgaggtcaccctgaggtgctgggccctgggcttctgccctgaggagatctcactgacctggcagcacaatggggaggaccagacccaggacatggagcttgtggagaccaggccttcaggggatggaaccttccagaagtgggcggccctggtggtgccttctggagaggagcagaaatacacatgccgagtgcagcacgaggggcttcaggagcccctcaccctgaaatgggaacctcctcagccctccttcctcaccatgggcatcattgttg

SEQ ID NO: 7828 - DNA, 347 bp, Bos taurus
  unsure (335): unsure at all n locations; Clone ID: 34-LIB188-004-Q1-E1-A10
catgatcccgagcgccatgggggcgggatactaaaggaagtgatggaggtggtgggaattatgcttgcagttccgacatcgatgcctggggccaaggactccgggtcaccgtctcctcagcctccaccacagccccgaaagtctaccctctgagttcttgctgcggggacaagtccagctccaccgtgaccctgggctgcctggtgtccagctacatgcccgagccggtgaccgtgacctggaactcgggtgccctgaagagcggcgtgcacaccttcccggctgtccttcagtcctccggggctctactctctcagcagcatggggaccgtgcncggcagcagctc

SEQ ID NO: 7829 - DNA, 439 bp, Bos taurus
  Clone ID: 34-LIB188-004-Q1-E1-A6
accaggaaatgagcttgacaaagtggtcgttgagggcaatgccagccccagcatcgaaggtagaagagtgagtgtcgctgttgaagtcgcaggagacaacctggtcctcagtgtagcctagaatgcccttgagagggccctctgacgcctgcttcaccaccttcttgatctcatcatacttggcaggtttctccaggcggcaggtcagatccacaacagacacgttgggagtggggacgcggaaggccatgccagtgagcttcccgttgagctcagggatgaccttgcccacggccttggcagcgccagtagaagcagggatgatattctgggcagcccctcggccgtcacgccacagcttcccggaggggccatccacagtcttctgggtggcagtgatggcgtggacagtggtcataagtccctccacgatgccaaa

SEQ ID NO: 7830 - DNA, 373 bp, Bos taurus
  Clone ID: 34-LIB188-005-Q1-E1-A6
accaatttaataactggaatggggaagagctgcccgcagaacccaaagaactggtcttgatgatccagaatctcaaacaaaaacttcccaagaagaattctgccgaagggaataaatatcacaggaatgtgcctcttctcatccactgcagagatggatctcagcaaacaggaatattttgcgcgttgttcaacctcttagaaagcgctgacacagaagaagtgatagatgtgtttcaagctgtgaagtcgctccgcaaagctcggccaggaatggtccccaccttcgagcaataccaatttctgtatgacgtcattgctagcacctatcctgcccagaatggacaagtaaagaaaagcaagcatccagaaga

SEQ ID NO: 7831 - DNA, 385 bp, Bos taurus
  Clone ID: 34-LIB188-006-Q1-E1-A10
gggataccaaattaaacttggcaaactttctatggcctgtcccatgtgcatcttatttaaaatttcccccctggaaatcactctcctgtttaatatttccagagctctagttgtttaggcagcgtgtggtttctcaagaggccagagcggcattatgggctgatttttattactgggttacccagaaccagattggagggtctgcttcctgctgccgctctgcagcctggacctgtggaccctggttgtaaagagtaaattgtatcttagaaaaccagtgtcacctttttttcaccttttagttttatattatttgtgtcatacatttcctataatggaagtgttaattttactgtactatccggggggatcgtgagcacagacg

SEQ ID NO: 7832 - DNA, 337 bp, Bos taurus
  Clone ID: 34-LIB188-006-Q1-E1-A6
cgcatgctaactaccgccatgcggcccgggatacaagcttattttttttttttttttttttttttttaaaaccaagccatttaattgtgtctttgaaggtaaacaatatcttgatcccaagccctgagaataccagagctacgggtctgagaagtcccgcagggcagtattctcacagagtcctgagggtcagacctcaaagtgttccaaggcagagcacttaaggaattcatgcattccattctgcaattttgcagacagccagaaacagaccccaagagtctcttgagatgggaaaaattcaactcctggtctcatagataaaaggagggagagt

SEQ ID NO: 7833 - DNA, 344 bp, Bos taurus
  Clone ID: 34-LIB188-007-Q1-E1-A6
acaagcttatttttttttttttttttttttttaccttaaaatgtagtttattgaaaagaaaaaagacacaatctcacttaatgcacacaattatttgagatgagggcacatacaggagaagtgagtcacaggcgtttaaaacattttccatacagaaatttaatgaggactttaaatccctttgtctcactgggctttataccaccatgatactactgggatttaggtgtcaagctgtgaggacaatttcacataaggaggtgacactatctaaaatacagtagagaactcacgaagaaagagtgccttcaaattgtgattgccctattctaaaacagcagttg

SEQ ID NO: 7834 - DNA, 411 bp, Bos taurus
  Clone ID: 34-LIB188-008-Q1-E1-A10
gccatgggcccgggatactcatgcatccactgttggcagtagccaaagctagcttcatagtcttaccaggagagacagcattctgccgtaatgaactgtggtgctgccagagggatttttttccccctttcaactgttttacttaagttactggataagcagttgagtttacattaaaacaatgaaatgctatatcttgtctatattctgcctcttccaaattggatgttttttttttgttaataatttttcacttccttatcaatcttttatagggggctagtgatgagaggggttaaaataaaactgcctacctttgaatacccctggggagcctggtgggctgccgtctatggggttgcacagagtcggacacgactgaagtgacttagcatagcatagcattccctc

SEQ ID NO: 7835 - DNA, 400 bp, Bos taurus
  Clone ID: 34-LIB188-008-Q1-E1-A6
acttgtcctactgactcaggctgcccatttctctgccactccacggcgatgtagtctgggtagaagctggtgaccatgcaggtgaggctgaccgtgcttttgctgagctcttcctggggtggggccaggacatacacctgcggctcccgggccggccctttggtcctggagatggtcctcacgatgggggccgggaggccttcgttgtggaccttgcacttgaactcctttcctccagtccagtcctggtgctggatgcgcagggcgctgaccacgcggtaggtgctgttgaactgctcctctctcggcttcgtcgtggctgtgtttacctccacgtcgtccacgaaccaggagaacttcacctcggggtcatcgtggcccacgtccaccaccacacacg

SEQ ID NO: 7836 - DNA, 401 bp, Bos taurus
  Clone ID: 34-LIB188-009-Q1-E1-A6
acagaaaccacaaactgatcggcagagaaaagagaagcagggaagatgtaaccggaaaccacttggggccagttcccctccttgcctgggtttcttcttccccctaacagcttggcctaaagtctgctgggaaacctgatgtctggagctgccctggtggggaccccccaccccacatgcatctggatatggccttcacccctttcccccagagtctcaactggcagcattcagacatgtagaaaaacaagacaaaaatcacagaaagacccaaaaacccagatggggcaatgatgtggggagatggcccgcatgggtgtcttagtagcctgcctcctcctggtagtagggaggacactctgagggttcccctgggcctggggcatctccagcagctgctg

SEQ ID NO: 7837 - DNA, 351 bp, Bos taurus
  Clone ID: 34-LIB188-010-Q1-E1-A10
catgcttacgaccgccatgcgcggcgggatactccaggtactggcactccatctcactacggagctcactcagctgggcctcaatgctgctgatgagaccctggatctgctgcagctgcgcagcatagcggcactctgtctctgccagcgtgctctccagcccggctttcatgctgagctgggactgcagctcaatctccagcccctgtatcgtgcgtctcaggtctgtgatctccgtcttgctggtctggatcatctctgtgttggaggccacctccttattcagctcctctgtcttgctaaagaaccaggcctcggcatcccggcggttcttctccgccatggcctcgt

SEQ ID NO: 7838 - DNA, 448 bp, Bos taurus
  Clone ID: 34-LIB188-011-Q1-E1-A6
gccatgggcgcgggatacaaagataaggaatttggctccatggtcttggagctgaatgcttcagatgaccgaggaatagatatcgttcggggaccaatcctgagctttgctatcacaaggacaatatttaagaaaggctttaaactggtgatcttggatgaggctgatgccatgactcaggatgcccagaacgccctgaggagagtgattgagaagtttactgaaaataccatattttgcctcatatgtaactatctgtcaaagatcatccctgccttgcagtcccggtgtacccacatctgccaccagaagctgacccccggctgattgattccttctcccagatgctgtccatggggttccctgatgaaggtggctggctcaccaggcttctgcagaccaggaattacgacatcggggctgccctgaacaccatccagtattcaaa

SEQ ID NO: 7839 - DNA, 389 bp, Bos taurus
  Clone ID: 34-LIB188-012-Q1-E1-A10
actattttgaccgtgatgatgtggctttgaagaactttgccatatactttcttcaccaatctcatgaggagagggaacatgctgagagactgatgaagctgcagaaccagcgaggcggccgaatcttccttcaggatatcaagaaaccagaccatgatgactgggagaatgggctgactgcaatggaatgtgcgctgtgcttggagagaagtgtgaatcagccactactggaactgcacaaactggccactgaaaaaaatgatccccatctgtgtgatttcattgagactcattacctgaatgagcaggtggaagccatcaaagaattgggtgaccacataaccaacctgcgcaagatgggggctcctggatctggcatggcaaagtta

SEQ ID NO: 7840 - DNA, 234 bp, Bos taurus
  Clone ID: 34-LIB188-012-Q1-E1-A6
actccgagattgccacaaccacctctgggtctggctctagccacaatcagactcaggccctcaggccctcagagtctggcatgtgaaggcgcagatctggccaaccagcatctcctgtggcctcagcagcttttgcacacacagatgacctcctctcctccctctatgctctgctccctcctgcctcgggccccacacacaccacggagaggagggtgacagccaccgtctggt

SEQ ID NO: 7841 - DNA, 397 bp, Bos taurus
  Clone ID: 34-LIB188-013-Q1-E1-A6
accggctgaggcatggcaggcggctctggcttcccacccttctgttcagagatgggggtggtgggcagtatttcatctttgggttccacaatgctcacgtgatcaagcagaggcttcttatggccaatcttaccagtcgggtcccaatgcagcatgatctttaccttgatgcccagcacaccctgtctgaacagcacatggcgcacagccgtgtccacatagtagttaacagggtccccactgtggatcatgacgccatccacaaacttcatggatttagccctctgtcctcgaagtttcccagacaccacgacctcgcagcctttggccccactctccatgatgaaccgcagcacaccatagcaggccctccgcacagcaaggcctcctaggagtt

SEQ ID NO: 7842 - DNA, 347 bp, Bos taurus
  Clone ID: 34-LIB188-014-Q1-E1-A6
accagagaagcctccctgggaggtggcggtggcggcaaggtccgcatcaacgttgaggagtctgtggacgggaaggtggtttcttccagaaagagagaaatctaacagcccagtgcaggggagatgcccctgccacccctgccctccccaggctgagcagaaagctggccagagggaccggaaaagcaaattccaggctctgctttcagagggtctggtccaaggggtccttcgtttcttagttgggtgcttcccgtgctctcccctgctccctccagctttcctgcctctgatagagcagggaggtgcaagtaacagctgtattgtgtaacaagttcatggtctgt

SEQ ID NO: 7843 - DNA, 366 bp, Bos taurus
  Clone ID: 34-LIB188-015-Q1-E1-A6
acagcgccaactcgtatagcatgttggtgcgtggcgggttggtgatgtccaggtatctacgtaagggcccgtgtggtatgaggtggggcaggggaaggggtgcttcttgttggactcctcatcaaggttgttcatggacatgatgatgtccaagtcgacacccaggatctcgccaagctggttcaccagggcacagtcattagccggataaacagccacatggtccccagactcatacctgattttggagtccgatatgtctaattccaggtgcatgaggtgccgctcggtttcctggttcagcttccggttggtggtgacaacatccatgaatgggttcttggcttctaaggggggtttctggtt

SEQ ID NO: 7844 - DNA, 423 bp, Bos taurus
  Clone ID: 34-LIB188-016-Q1-E1-A10
accagctggcacaggagcagggggcatggcacctctgttgtttatgcccatagcacctcccatagccatctgacccatccgtatctcttgctctctcgcatcagggaaggttcccttgaatccttcctgctgtcgtcgcatcatttcttcttgttgccgccgcatctcttcctcacggcgcctgcgctcctcctcctgcctgagctccagctgctttcgtttttgcacttcttgattgtgcagctcttccatcctccgaagttcttcttgacgcctcatcaaatcctgcctcattagcatgacctggtgctcatggcgagcagcctccatctccatctccagcttctcacgagcttccttgatgtttcggtccacttggtcctgctgctgcttttccatctcaataagtgccttccagcgcat

SEQ ID NO: 7845 - DNA, 433 bp, Bos taurus
  Clone ID: 34-LIB188-016-Q1-E1-A6
ccatggcggcgggatacataaaggatgccaccaccaagtagaaatacacattttcagacatttttatcaaagccattaaaaagtatctccaccattatcttgtccttctctcttaatggcttctgaactttgtaagcaaaggacagccttaagtattttttgagatttctcacaatgcacttacataaaagtatgcaaagtttgaaatttcttcagaaaaaaattacaaaaacttaaaatatacataaaggagaccacacaataagtttcttctttgttttagtcgctttatgtccaacttgcaaccccatggactgtagcctcccagattcctctgtccatgggatatcccaggcaagaatactggagtgggtagccattcccttctccaggggatgttcctgaccaaggatcgaacctgtgtctcctgcat

SEQ ID NO: 7846 - DNA, 430 bp, Bos taurus
  Clone ID: 34-LIB188-018-Q1-E1-A10
actccactaagtcagtgacggtgtaggcgttgggtggcgctgtctcgcccacccgatgatgggacacgggccccacccggaggaccccctcctccttgaacacccagcgggaaagggccacagccagctcgtagttgccagtctgggaatacctctgggagccgggtgcagccttctgcactgctgagttgatgaaggcgtcgctgaagaagtcaagggagccgctgaagatgacccgggcgttgttccgggcctgcagccccgcgatgagaagggtgttcttccccatggcgtgcgggtacggctacgaaggcagagattacatcaccctgaacgaggacctgcgctcctgtaccgcggcggacacggcggctcagatcaccaagcgcaagtgggacgcggcagattatgctgagtctttgaggaacta

SEQ ID NO: 7847 - DNA, 365 bp, Bos taurus
  Clone ID: 34-LIB188-018-Q1-E1-A6
actgagtgtcctggggcctccggaggaagaaccggtcctggaagagctcgtccatgatgctggacgcccgggtgaagctgtcctccatgacgtccatcacgtggctctgctcccggtcattctccatcagggaatcgatgcggtcaccgttgatccagaagtagaagggggagctctggtttaggaactcctcaagctggtggccaaccagtcccgatccgcttctgcacacccgcgcgtagaacttcatgcaggtctgcttgaggcagggcttacattcctcccaaagggctgtcatggtctcattgcacaccccctgggacgccttcagcttgttttcagaatccctggtgtcattcagggcg

SEQ ID NO: 7848 - DNA, 407 bp, Bos taurus
  Clone ID: 34-LIB188-019-Q1-E1-A6
actgtcccagtgggtcgtgtggagactggtgttctcaaacctggcatggtggtcacctttgctccagtcaatgtaacaactgaagtgaagtctgtagaaatgcaccatgaagcattgagtgaagcccttcctggggacaatgtgggctttaatgtcaaaaacgtgtctgtcaaagatgtccgtcgtggcaatgtggctggtgacagcaaaaatgatccacccatggaagctgctggcttcacagctcaggtgattattttgaaccatccaggccaaatcagtgctggatatgcacctgtgctggattgtcacacagctcacattgcttgcaagtttgctgagctgaaggagaagattgatcgtcgttctgggaaaaagctggaagatggccctaaattcttgaaatc

SEQ ID NO: 7849 - DNA, 426 bp, Bos taurus
  Clone ID: 34-LIB188-020-Q1-E1-A10
acaagcatactgggttaccagatgagggattccttttgttcccacaaatatctttcttactttgcacaatttatacttggcctcctcaggtgtaatacgatgaacagcaaagcgacccttggtgtcatagatcaaacgaaagttctctccagtcttatcaatgctgatgacatccataaaaccagcagggtaggttatatctgtgcggactttgccatcgatcttaatgaaacgctgcatgcaaatcttctttacttcatctccagttagggcatacttaagtctattccttaggaaaatgattagggggagacactcccttagcttgtgggggccggtagatggacgaggggcaaacacgccggtcagtttatccagcatccaatgttttggacctgctactcgtctcaggtacaaaatggcatc

SEQ ID NO: 7850 - DNA, 371 bp, Bos taurus
  Clone ID: 34-LIB188-020-Q1-E1-A6
acttgagctggacagagtcactcgagcccctccagggagctgtggctaaattcttctctgccagctgtgttccctgcattgatagacaagcataccccaacctgtgtcaactgtgcaagggggagggggagaaccagtgtgcctgctcctcccgggaaccatacttcggttattctggtgccttcaagtgtctgcaggacggggctggagacgtggcttttgttaaagaggcgacagtgtttgagaacttgccagagaaggctgacagggaccagtatgagctcctctgcctgaacaacagtcgggcgccagtggatgcgttcaaggagtgccacctggcccaggtcccttctcatgctgtcgtggcccga

SEQ ID NO: 7851 - DNA, 438 bp, Bos taurus
  Clone ID: 34-LIB188-022-Q1-E1-A6
acaattcccattcttcagaagtcattttggaaaacagcaaattgccggaaggagtaacaataaattacaagtcttactgcaagaatggggtgaatggaacaggggaaaatgggagaaaatgctctaatatttccattggggatgaggttcagtttgaaattagcataactgcaaataaatgtccaaataagaactctgaaaccattaaaattaagcctctgggcttcactgaggaagtggagattatccttcagttcatctgtgaatgtgagtgccagggtgaaggcatcccaggaagccccaagtgccacgacggcaacgggaccttcgagtgtggggcctgcaggtgcaacgagggacgtgtcgggagacactgtgaatgtagcacagatgaggtgaacagcgaagacatggatgcctactgcaggaaagaaaaca

SEQ ID NO: 7852 - DNA, 197 bp, Bos taurus
  Clone ID: 34-LIB188-023-Q1-E1-A10
gatactcctattaaacctggatgaaacttgtatccgcttctatcacccggataaagaggacggaatgctgagcaaactctgccacaaagatacctgccgctgtgcagaggagaactgcttcatgcaccacacagagaaggaggtcactctggaggaccggctggacaaggcttgcgagccgggcgtggactatgtgt

SEQ ID NO: 7853 - DNA, 418 bp, Bos taurus
  Clone ID: 34-LIB188-023-Q1-E1-A6
ggccgcgcgatacatctcgtcagggggtgctgcgtcctccccagagcagttggcatcatttctccggtaaagcgggaagtgctgtagcaggatgggggccgaggccggcagccgctgcctgtctccacacccacgggggctatgctcctcccgagagcagttcagccagtgagagatttccaggagctcagcctctgccctggagcagatgtcacagccgtccccttccagtgcaacactgttgaccatcacaaaattaattcctttccaagaaaacagcctttcagggttgaaaactttctcaaatcgttttattctgtatgtgtccatctggtagtggaagccgatgtcgtggttgccagccacggcccgcagctgcacgtggggcgggtgtcggaacaccttccagaagcgcccc

SEQ ID NO: 7854 - DNA, 367 bp, Bos taurus
  Clone ID: 34-LIB188-024-Q1-E1-A6
acctggtccctggtcatacccttaaacagagggtctgtgattccctgaatagtctctctggcgttacttatcactttagcagcccaggcgccccccggtcccctttgggcagcgtcatagtttccgcgggcatggaagtatttgtctgcacccttgtagttggcttctttcatgtcttggtaagctctccacatgtctttagccccttgaccagcttccttgaggaatgtcccccatccctggctgctgatgcccaggatcaggaagcagaaaatgatgcccgtggaaaggttcatcctgtggccgtgccctcctgctgaagctcctggtgaagctgagctgccacctgcccgggcggccgctcgaa

SEQ ID NO: 7855 - DNA, 399 bp, Bos taurus
  Clone ID: 34-LIB188-026-Q1-E1-A10
acagcccaccctagtctcctccgtggccccgtcccagaccagagccccccacccctatggagtccctactccctcagctggggcttactccagggctggagtcatgaaaaccatgacaggaggcagagctcagagcattggccggaggggcaaggtagaacagttgtccccagaagaagaagagaaaaggcgaatccgaagggaaaggaataagatggctgcagccaaatgccggaaccggaggagggagctgactgacaccctccaagcggagacagaccaactagaatatgagaagtcggctttgcagacagagattgccaatctgctgaaggagaaggaaaaactcgagttcatcctagcggctcaccgacctgcctgcaagatccccgatgacct

SEQ ID NO: 7856 - DNA, 414 bp, Bos taurus
  Clone ID: 34-LIB188-026-Q1-E1-A6
gccgccatggcgcgggatacacctgccaggtagaacacaacaaggaaaccttccagaagaacgtgtcctcctcatgtgatgttgcaccaccatctcccatcggggtcttcaccatccccccatccttcgccgacatcttcctcacgaagtcagccaagctgtcctgtctggtcacaaacctggcctcctatgatggcctgaacatcagctggtcccgtcagaacggcaaggccctggagacccacacgtatttttgagcgacacctcaacgacaccttcagcgcccggggtgaggcctcggtctgctcggaggactgggagtccggagaggagttcacgtgcacagtggcccactcggacctgcccttcccagaaaagaacaccgtctccaagcccaaagatgtcgccatgaaa

SEQ ID NO: 7857 - DNA, 395 bp, Bos taurus
  Clone ID: 34-LIB188-027-Q1-E1-A10
actggaacagccagaaggacttcctggaggagaggcgggccgaggtggacagggtgtgcagacacaactacggggtcggtgagagtttcactgtgcagcggcgagtggagcctacagtgactgtgtatcctgcaaagactcagcccctgcagcaccacaacctcctggtctgctctgtgaacggtttctacccaggccacattgaagtcaggtggttccggaatggccatgaacaggaggctggggtgatctccacaggcctgatccagaatggagactggaccttccagaccatggtgatgcttgaaacagttcctcagagtggagaggtctacacctgccaagtggagcaccccagccagacaagccctatcacagtagaatggagggcacgg

SEQ ID NO: 7858 - DNA, 400 bp, Bos taurus
  Clone ID: 34-LIB188-027-Q1-E1-A6
acctctccaaggatactgccaccgagaggcagctctttggtctggaaaaacagtcagtgcaaatgtccagggattgagttctgggggagtcaaggtggcacaatgccccagggcgggcagtctctggacagtcctctacccatcatgggcaacacgtgggcttcttcttgctggcagttaggtagaggttgctgtcatcactgttgatgcggacaacatcccctatgcgccgggatcccgatttctccagctcagccagcacgttgacctcaaaggtcagcgccgccacacgaaagaagaactcccggacattttcaccagtgagagatgagactgcccaatactcagccttcatctcttgggccaccttgagtgcatctttctccatcagtatatactg

SEQ ID NO: 7859 - DNA, 450 bp, Bos taurus
  Clone ID: 34-LIB188-028-Q1-E1-A6
atgctcctaaccgccatgggcccgggatactgacaactattatttgattcactcatgactattaagttggttcttagcaaataaaccctttaaaggcaaaattcacctcatttgagtgtgacccagaagttcaacaacaatcacgaagtccacggtcttattggcaaaactgatatacagtgtctctaagtcactatgctcaaggttaagagcgatgcatattccatctttacatttactggaattttacatgttcaattcatggttttaaatctctaggttttcattcctccaaactgtctgaagacacagtgtgccacagacttaagacttctgtttctccctctattttcttcaaacagaaacatttctcaagtgtctacatgttccaaaatggggattttttcggaggtggccacttcttcggaatagtccgacgccatcaggcct

SEQ ID NO: 7860 - DNA, 431 bp, Bos taurus
  unsure (384): unsure at all n locations; Clone ID: 34-LIB2809-001-Q1-E1-A6
acacctagctttggagttgacactactagaaattattccaaaattactcttatgtcacaaataactactatcccacataaaaatggaaaaatcccacccaattagggaaaaggtatcctgtgtatgtttccatggcaatgagtttatgcattctcagattttgtccggctagttatccaccctttatctgatgcatttattccatctcacagatagaaccatatagattcctgacagcatccaggacacgtagctcatggtggacacacttcatggtggatactgctactatagctctactcacaacttatgacaattccaagatgctttatatgtcgcattagtcatgcctcataactgccctttgaggtatgtcactattantatcccattttaacacaaggataactgaggcacattatagttaaatg

SEQ ID NO: 7861 - DNA, 410 bp, Bos taurus
  unsure (193),(402): unsure at all n locations; Clone ID: 34-LIB2809-002-Q1-E1-A6
actaccagaggatgttggtggtcctccttcaggctaatagagaccctgacgctagaattgatgaagcacaggttgaacaagatgctcaggctttgttccaggctggagaactgaaatggggaacagatgaagaaaagtttattaccatctttggaacacgaagtgtatctcgcttgagaagagtgtttgacanatacatgactatatccgggtttcaaattgaagaaaccattgaccgggagacttctggcaatttggaacagcttctccttgctgttgtgaaatccattcgcagtatacctgcctaccttgcagaaaccctctactatgctatgaagggagctggaacagatgatcataccctcatcagagttgtggtttccagaagtgagattgatctgntatacatc

SEQ ID NO: 7862 - DNA, 255 bp, Bos taurus
  Clone ID: 34-LIB2809-003-Q1-E1-A6
tttgacccatcactggctcctagggctccatcgttgttgggaggcagccatgcgcacaagcacaggactaccgtacctctatcagcagtctcacaatgccgtgtgcgtccaccaacaccaacgggagcttaccctgtttcctgacaggacattttcgagccacaaagcagattcggcagtttactgagctgatgcactttctccgggaggacatccggatggtcaggaattctatgtaatctcaaccctcactgc

SEQ ID NO: 7863 - DNA, 412 bp, Bos taurus
  Clone ID: 34-LIB2809-004-Q1-E1-A10
atggccggggcatacatcttgctgcttcttttggctctgaccttgttgatctcgtagcccatgttgttgcaacggttctttctgcagctcaggcagagacctttctcaaaggcttctttggaattgcaccggtaggccttacttggattttcttcattcaacagagagtcaatgaagagatgaacggaacgttcatgggagcacttcactagctgatccacatctccaaggcctctctctgcaatcacacggagagcttccccaatgttacatcctggttggaaagtgcctccgttagggtaaatgtccacatgccctactggtttctggattccgatacttcgacctggtgaccccctggtgaatgtgtgtaaaacgtctacaaaatccgcatcatcaggagaaaggcgac

SEQ ID NO: 7864 - DNA, 310 bp, Bos taurus
  Clone ID: 34-LIB2809-004-Q1-E1-A6
ccatggccgccggatacgaatacagaacgtgaaagcggggcctcacgatccttctgacctttggggttttaagcaggaggtgtcagaaaagttaccacagggataactggcttgtggcggccaagcgttcatagcgacgtcgctttttgatccttcgatgtcggctcttccgatcattgtgaagcagaattcaccaagcgttggattgttcacccactaatagggaacgtgagctgggtttagaccgtcgtgagacaggttagttttaccctactgatgatgtgttgttgccatggtaatcctgctcagt

SEQ ID NO: 7865 - DNA, 411 bp, Bos taurus
  Clone ID: 34-LIB2809-005-Q1-E1-A6
atggcggccggatacaccagcacagcctgaatgggcatatctctctggggatagggcactgctttctggggaacaggcatgactttgggctgagaaagggacatcacggactgaggaggcaacattacagttggaggaagaggctggtgatgctggtgcatccaatacgggaccataggcacaggaaggtgcacattttcaacatcagtgatattcaagctctggctttcagtagagggctcaactgtctatttacggaagggcatttctttgtgcttacgagccatagcctccttcactttgaagactctcattacttcaggcataaggaaacgctgtaccaccacaggggtttgagtactaggagggatcttttgtgggaggatgttagtgattggcccagggaatgga

SEQ ID NO: 7866 - DNA, 396 bp, Bos taurus
  Clone ID: 34-LIB2809-007-Q1-E1-A6
cgtatgtgtatgatacataaggttatgtattaattgtagccgcgttctaacgacaatatgtacaagcctaattgtgtagcatctggcttactgaagcagaccctatcatctctctcgtaaactgccgtcagagtcggtttggttggacgaaccttctgagtttctggtaacgccgtcccgcacccggaaatggtcagcgaaccaatcagcagggtcatcgctagccagatcctctacgccggacgcatcgtggccggcatcaccggcgccacaggtgcggttgctggcgcctatatcgccgacatcaccgatggggaagatcgggctcgccacttcgggctcatgagcgcttgtttcggcgtgggtatggtggcaggccccgtggccgggggactg

SEQ ID NO: 7867 - DNA, 365 bp, Bos taurus
  Clone ID: 34-LIB2809-010-Q1-E1-A10
acatcttactgcttcttttggctctgaccttgttgatctcgtagcccatgttgttgcaacggttctttctgcagctcaggcagagacctttctcaaaggcttctttggaattgcaccggtaggccttacttggattttcttcattcaacagagagtcaatgaagagatgaacggaacgttcatgggagcacttcactagctgatccacatctccaaggcctctctctgcaatcacacggagagcttccccaatgttacatcctggttggaaagtgcctccgttagggtaaatgtccacatgccctactggtttctggattccgatacttcgacctggtgaccccctggtgaatgtgtgtaaaacg

SEQ ID NO: 7868 - DNA, 338 bp, Bos taurus
  Clone ID: 34-LIB2809-011-Q1-E1-A6
gccatgggggcgggatactaattcacatgacattggtgccttcggtacaaggatgggtattactggataactggcaggatcaaaggcagtctgaaactatctggacacctgcagatcactgcataaggtggagctcatactcgtggtagatcacgctgttgcagaggcacctctgtttggacactctcatcctgtgaagggccaatggttccactggtatgtcaccttgtgcgatggttaaatcttcatcgtacctctcactgatgaactcaaaggacaaatgatagaaagaattggacccattgccagatcgggttacatccataatgcatctgcat

SEQ ID NO: 7869 - DNA, 395 bp, Bos taurus
  Clone ID: 34-LIB2809-012-Q1-E1-A10
acaagctttttttttttttttttttttttttaaaagaaagaaacccagagtaagtttttaatagaaaaaattttgcacgtgcaggatcaatcagtgatatcagaacactgacaccaatccatttatttctgagcattgatgagtttgacagacactctggatccaggcatctctttgtaacaagaaacttttgaaaccttttctgctttttttacaaatacagtgataccagctcttcttttgaaatagtgggggctctgaaaagagcctttgggtttgaaagcacttccggaaactcaggtctcagtccaattacttgcccttggccttatggtgactctcggttttctttggcagcagcaccgcctggatgttaggcagcacaccaccctgag

SEQ ID NO: 7870 - DNA, 419 bp, Bos taurus
  Clone ID: 34-LIB2809-013-Q1-E1-A6
acctggtgagattgtggaaagcctttcaagcagtgaggaatctattacacgcatcaataagaaaattgagaagtttcagagtgaggaacagcagcaaacagaggatgaactccaggataaaatccacccctttgcccagacacagtctctagtctatcccttccctgggcccatccctaacagcctcccacaaaacatccctcctcttactcaaacccctgtggtggtgccgcctttccttcagcctgaagtaatgggagtctccaaagtgaatgaggctatggctcctaagcacaaagaaatgcccttccctaaatatccagttgagccctttactgaaagccagagcctgactctcactgatgttgaaaatctgcaccttcctctgcctctgctccagtcttggatgcaccagcctc

SEQ ID NO: 7871 - DNA, 396 bp, Bos taurus
  Clone ID: 34-LIB2809-015-Q1-E1-A10
acagtggaaaactcacaggggagaagagtttccatccatgtcagagtccaggaatcctgatgaagaaggtttgtttactgtgagagcttcagtgatcatcagggacagctctatgaagaatgtgtcctgctgcatccggaacctccttcttggccaggagaaagatgtagaggtttccataccagcctccttcttcccaaggctgactccctggatggtggctgtggctgtcatcttggtggtcctaggacttctcacaattgggtccatattttttacctggagactatacaaggaaagatccagacagaggaggaatgaattcagctctaaagagaaactcctggaagagctcaaatggaaaagggctacattgcatgcagtggatgtgactct

SEQ ID NO: 7872 - DNA, 400 bp, Bos taurus
  Clone ID: 34-LIB2809-015-Q1-E1-A6
gccatggcggcgggatacccaggcatcccatggtctcggcaacgctgtaagttgatagcagccaggtcaaagccgtggatcttgtgagtgggctggaaaagcttgttgcgcagtcactcgtcaccattttatcctgattcatcagtttggacttcttggccagcagaccccgcaccagagggtcaattccaccgtctttgattatcctccaggtgttgaagaagagggtgtgtagggggagctctgcttccggactccatggctggtaattctcatccaggcgggacacagtggagggaacctccatgtggccaaagcggaaggcaaaggtgaagacattggaaattcggggatccacagagttattatagccttggtagggcgggattcacttctgcat

SEQ ID NO: 7873 - DNA, 276 bp, Bos taurus
  Clone ID: 34-LIB2809-016-Q1-E1-A6
gcatgtatccataccgcgacgggtctgggatacaaggtacgattgtggaaagtctttcacacagtgaggaggtcattagtcgcatcagtaatgaaatttgtgaagtttcagtatgaggtacatgaccattcacacgctgctctcgatgataaactcaatccctttgcccaaacacggtctctattctatcccttcccgtgggcccatccttaacagcatctcacaggatatcgctctgcttatttacacgcctgtggtggtaccgcctttccttca

SEQ ID NO: 7874 - DNA, 380 bp, Bos taurus
  Clone ID: 34-LIB2809-018-Q1-E1-A10
acagcaaaaaggcctgaatgggcatatctctctggggatagggcactgctttctggggaacaggcaggactttggacggagaaagggacagcacggactgaggaggaaacatgacagttggaggaagaggctggtgaggctggtgcatccaagactggagcagaggcagaggaaggtgcagattttcaagctttttttttttttttttttttttttttaatagtgccttaaaatgtaatttattgaaaagaagaaagacaaaatctcagttaatgcacacaattatttgatatgatggcacttacaggagaagtgattcaaaggcttttaaaacattttccatacagaaatttaatgaagactttaattccctttgactc

SEQ ID NO: 7875 - DNA, 408 bp, Bos taurus
  unsure (397): unsure at all n locations; Clone ID: 34-LIB2809-019-Q1-E1-A10
acctggtgagattgtggaaagcctttcaagcagtgagaaaattgagaagtttcagagtgaggaacagcagcaaacagaggatgaactccaggataaaatccacccctttgcccagacacagtctctagtctatcccttccctgggcccatccctaacagcctcccacaaaacatccctcctcttactcaaacccctgtggtggtgccgcctttccttcagcctgaagtaatgggagtctccaaagtgaaggaggctatggctcctaagcacaaagaaatgcccttccctaaatatccagttgagccctttactgaaagccagagcctgactctcactgatgttgaaaatctgcaccttcctctgcctctgctccagtcctggatgcaccagcctcancagcctcttcc

SEQ ID NO: 7876 - DNA, 99 bp, Bos taurus
  unsure (6),(11): unsure at all n locations; Clone ID: 34-LIB2809-020-Q1-E1-A6
gcccantctgngtatccgtctccggaacctcatcagccccctgggcctcatggctgtgatccaccaagcctgtgaccacgggctgtcctatctgccctt

SEQ ID NO: 7877 - DNA, 380 bp, Bos taurus
  Clone ID: 34-LIB2809-021-Q1-E1-A10
acctcacatagggaataacctttgtcttaggttgaatccatggcttcatagctttctgatgctgataaacagtcttgagatactggggcaaggcgaatttctggtaacgctggctgatttttttcagaaaatttaggcgattcttttcttcttcagtcagtttagttttcttagtgaatacttctgttgattccatgtcaacggtcttctttgaattttccttaaaaaataaaagaattagacatttaattcccactgtattgtctatacataatttccttttgactatatttagaaatactcctcttttataaagaataattcaatttatttttattgctttgtaaatcactgttgtatcccaagagtctaacataatg

SEQ ID NO: 7878 - DNA, 229 bp, Bos taurus
  Clone ID: 34-LIB2809-022-Q1-E1-A6
gccatgggcgcgggatacagcagaaaggcctgaatgggcatatctctctggggatagggcactgctttctggggaacaggcaggactttggactgagaaagggacagcacggactgaggaggaaacatgacagttggaggaagaggctggtgaggctggtgcatccaagactggagcagaggcagaggaaggtgcagattttcaacatcagtgagagtcaggctctggc

SEQ ID NO: 7879 - DNA, 416 bp, Bos taurus
  Clone ID: 34-LIB2809-025-Q1-E1-A6
gccatgggcgcgggacccttgtaggctcaccactagcaatggtattgatggtaaggatttctgttttatcctgatttttctttggtggaatggccataaatgataaatgtgggtgtgggtgacgtgccatggtagttggctgggcttggcaggacttggcaagcacagtatttgacaaaacttgccattgaagaatttgggcaggtgacctaactgcagctggctttgcataatatgggtatggcagaaattgattattaattagtgcaactggtttctgttggtagtaattgagtccataactaggatacctactcagcacatactgaattgggatatatttggctactttgtcactgaagaatctttcatctttctcacagcgtattggttgttcatgggtttgctcctgggca

SEQ ID NO: 7880 - DNA, 449 bp, Bos taurus
  Clone ID: 34-LIB2809-026-Q1-E1-A10
cgcaagctcctatacgccatgggcgcgggatcgtggtcacgcccgaggtacagcagaaaggcctgaatgggcatatctctctggggatagggcactgctttctggggaacaggcaggactttggactgagaaagggacagcacggactgaggaggaaacatgacagttggaggaagaggctggtgaggctggtgcatccaagactggagcagaggcagaggaaggtgcagattttcaacatcagtgagagtcaggctctggctttcagtaaagggctcaactggatatttaaggaatggcatttctttgtgcttaagagccatagcctccttcactttggagactcccattacttcaggctgaacgaaaggcgggaaccaccacaggggtttgagtaagaggagggatgttttgtgggaggctgttacggatgggcccaaggaatggat

SEQ ID NO: 7881 - DNA, 441 bp, Bos taurus
  unsure (394): unsure at all n locations; Clone ID: 34-LIB2809-028-Q1-E1-A10
gccatgggcccgggatacagcagacaggcctgaatgggcatatctctctggggatagggcactgctttctggggaacaggcaggactttggactgagaaagggacagcacggactgaggaggaaacatgacagttggaggaagaggctggtgaggctggtgcatccaagactggagcagaggcagaggaaggtgcagattttcaacatcagtgagagtcaggctctggctttcagtaaagggctcaactggatatttagggaagggcatttctttgtgcttaggagccatagcctccttcactttggagactcccattacttcaggctgaaggaaaggcggcaccaccacaggggtttgagtaagaagaaggatgttttgtgggacgctgttanggatgggcccagcgaagggatagactagagactgtgtctgggcaaag

SEQ ID NO: 7882 - DNA, 392 bp, Bos taurus
  Clone ID: 34-LIB2809-029-Q1-E1-A10
acccaactctctgtgatcctatggatatagccctccaggctcctttgttcatggaattctcaaggtaagaatactagagtgggttgccatgccctcctccaggggattttcccaacccagtgatcaagcccgagtcacctgcattggtagaggggttccttaccactagcaccacctgcgaagccccatttgttttcggatttttgcaaattagttcagaatattggatgaagggaaacatgatgtttctgatactagccacatttaccgagggcttacttcgcaattcataatggctcagacggtaaaccgtctgtctacagtgcgagagacctgtgttcgacacctgcgttgggaaaatcctctgcagaaggaaatgttgcctggaaaat

SEQ ID NO: 7883 - DNA, 388 bp, Bos taurus
  Clone ID: 34-LIB2809-029-Q1-E1-A6
acagcagaaaggcctgaatgggcatatctctctggggatagggcactgctttctggggaacaggcaggactttggactgagaaagggacagcacggactgaggaggaaacatgacagttggaggaagaggctggtgaggctggtgcatccaagactggagcaggggcagaggaaggtgcagattttcaacatcagtgacagtcaggctctggctttcagtaaagggctcaactggatatttagggaagggcatttctttgtgcttaggagccatagcctccttcactttggagactcccattacttcaggctgaaggaaaggcggcaccaccacaggggtttgagtaagaggagggatgttttgtcggaagctgttacggatgggccc

SEQ ID NO: 7884 - DNA, 377 bp, Bos taurus
  unsure (312): unsure at all n locations; Clone ID: 34-LIB2809-030-Q1-E1-A6
acttcatagtcaggaacagctgcccaaatcaacgtgattccaccatctccgtggaagagaatggggtgtcagcagaaagccggttctcagttcagatgttcaagtttgctggaaattatgacctagttttcctgcattgtgaggtttctctctgtgatttcattaaagaagagtgccaaccgtcttgctcaagaagtcaactccgcagtgaaggggtggctattgatccagcccgagttctagatctgggacccatcactcgcaaaggtgcccagtctcttggtgtcatgagtggaacacccaacactgcanggttcctggtggcctggcccctggttctcctgcctgtcctcctggctgggctgttctgagagctc

SEQ ID NO: 7885 - DNA, 399 bp, Bos taurus
  Clone ID: 34-LIB2809-031-Q1-E1-A10
acagcagaaaggcctgaatgggcatatctctctggggatagggcactgctttctggggaacaggcaggactttggactgagaaagggaaagcacggactgaggaagaaacatgacagttggaggaagaagctggtgaagctggtgcatccaaaactggagcaaaaggaaaaggaaggtccaaatttctcaaatcattaaaattcaggctctggtttacattaaatttgtagggaacccatgtgaagaggaatattctatcggcacatctattgaggaatctgcaaatttctccacaggggattttaatattagtgtggactattagcactaccagaacacactgagtgatatcacatcagttttaacagattttcccacagtatcaccagtatctgtat

SEQ ID NO: 7886 - DNA, 281 bp, Bos taurus
  unsure (272): unsure at all n locations; Clone ID: 34-LIB3057-001-Q1-K1-A6
ctgcgggtgcgggggcggcgagccgttgaccgagcgaccgcggcctgagcgcgccggccaccgcccgcaccccccttccgcccgccctccggtcggccgcagccctgcgggtctccgctccagacctacccccgccccaccccgcgcgcctctgccgcctcttcctgagccccagcttgccgagcggccgccgctgccgctgtcgccgtcgtcgtcgtcaccgcgccaggttccggccgcggccagcctctgccgtccagggcccttccgtncaggccccg

SEQ ID NO: 7887 - DNA, 343 bp, Bos taurus
  Clone ID: 34-LIB3057-002-Q1-K1-A6
gggaaacccggagctgcggagacaaccggagacccggagctgtggcgtccgacatgtcgcctcctatgtctcctatgaagccacccaagggctttgcccctatgtcctgctgctggtccactgagaccatgcagaagtggctgcctttcctgggctggctgcctgactacacctggtacgccctgaagatggacttcattgctgggatctcagtcgggctcacagtcattccccaggcgctggcctacgccgaggtggctggactggcctcccagtacggcctctactctgccctcatggggtgcttcggataatttcttctgggtacctcccgagatgtgac

SEQ ID NO: 7888 - DNA, 342 bp, Bos taurus
  Clone ID: 34-LIB3057-003-Q1-K1-A10
cggacgcgtgggaacagcttggtgtttggcacctcggaccgtgtctatgagaagcggaaggacctggaggaaggcatcctggccctgatgcgggaggtggaagatggcaccccccgggctgggcagatcctcaagcagacctatgacaaatttgacacaaacatgcgcagtgacgacgcgctgctcaagaactacggtctgctctcctgcttccggaaggacctgcataagacggagacgtacctgagggtcatgaagtgccgccgcttcggggaggccagctgtgccttctagttgccagccatctgttgtttgcccctcccccgtgccttccttgaccct

SEQ ID NO: 7889 - DNA, 351 bp, Bos taurus
  Clone ID: 34-LIB3057-003-Q1-K1-A6
gcgttcgcttaggcgcagacgggcaaacagagccagcatgccggtcgcccggagctgggtttgtcgcaaaacctatgtgaccccgcggagacccttcgagaagtcccgcctcgaccaagagctgaagctgatcggcgagtatgggctccggaacaaacgtgaggtctggagggtcaaattcaccctggccaagatccgaaaggctgcccgggagctgctgacgctggatgagaaagacccgcggcgtctgttcgaaggtaatgccctgttgcggcggctcgtccgtatcggggtgctggatgagggcaagatgaagctggattacatcctgggccctgaagatggaggatt

SEQ ID NO: 7890 - DNA, 413 bp, Bos taurus
  Clone ID: 34-LIB3057-004-Q1-K1-A6
cagcaacttgcctgaaagagaccactcgacctggacgaaccctttggcagcttgagggggtccttgaggaggatgactgagacactatgggccacgcgctttgcatctgctctcggggaactctcaccattgaccataagcgctatctcttcatccataaactgggggagggtgggttcagctttgtggacctagtggaggggttacatgatggacagttctacgccctgaagcgaatcctgtgtcatgagcagcaggaccaggaggaggcccaacgagaagcagacatgcatcgcctcttccatcaccccaacatccttcgcctcgttgcttattgtctgagagagcgaagcactaaacatgatgccttgctgctgctacccttttcaagagaagtacgctgtggaatgaga

SEQ ID NO: 7891 - DNA, 363 bp, Bos taurus
  Clone ID: 34-LIB3057-005-Q1-K1-A10
cgagcggccgctcgcgatctagctgagtggttcttcggatcatgtctggtggctccgcggattataacagagaacatggcggcccagagggaatggaccccgatggtgtcatcgagagcaactggaatgagattgttgataactttgatgatatgaacttaaaggagtctcttcttcggggcatctatgcttatggttttgagaagccatcagctattcagcagagagctattattccatgtattaaagggtatgatgtgattgctcaagctcagtcaggtactggcaagacagccacatttgctatttccatcctgcaacagttggagattgagttcaaggagacccaagcactagtattgg

SEQ ID NO: 7892 - DNA, 441 bp, Bos taurus
  unsure (373),(385): unsure at all n locations; Clone ID: 34-LIB3057-005-Q1-K1-A6
cagccgccgccgcgccgccgtcgctctccaacgccagcgccgcctctagctcgccgagctccagccgaaggagaaggggggtaagtaaggaggtctctataccatggctcgtacaaagcagactgcccgcaaatcgaccggtggtaaagcaccgaggaagcaactcgctacaaaagccgctcgcaagagtgcgccctctactggaggggtgaagaaacctcatcgttacaggcctggtactgtggcactccgtgaaattagacgttatcagaagtccactgaacttctgattcgcaaacttcccttccagcgtctggtgcgggaaattgctcaggacttcaaaacagatctgcgcttccagagtgcagctatnggtgctttgcangatgcaagtgaggcctatctggttgggcctttttgaagacaccaacctgtgtgcta

SEQ ID NO: 7893 - DNA, 383 bp, Bos taurus
  unsure (311): unsure at all n locations; Clone ID: 34-LIB3057-006-Q1-K1-A6
ctcacatccatatatgaccactggaaaaaccatagccttgactaaacggacctttgatggtaaagcaatatctctgattttaaatatgctatctacgttggacataactttccttccaaggagtaagtgtctgtcactttcatggctgcagtcaccatctgcagtgattttggagcccaaaaccataaagtatgacactgtttccattgtttccccatctatttcccatgaagtgatcggactgaatgccatgatctgtgtgctctgaatgttcgagctttaagccaacttgctcactctactgtatcacnatcataccgaggctctgtagttgctgttcactctctgacataaaggtggtgtcatctgcatatctgaagtta

SEQ ID NO: 7894 - DNA, 429 bp, Bos taurus
  Clone ID: 34-LIB3057-007-Q1-K1-A6
actctggttttcctctcagggatcctctaatgatcaccttcctttctggtttcactgccttccctcttctcaaaaaacagttgggaaatagggacacccaggatgactgttttatacctcaaccaccttttcagacctgtgtcagtcttaaacaagctaagtgaaagaaactgagtattttctgaaatacggatattattatcaatacagttttatgcaacagactctgcttactgtaaatctttcttgacaagatatacagacttaggaagatggagaaagaaaagaacagaggagactcttggaagcagcactgtgttcgtcaaagtgaaagtgaagtcactcggtcgtgtctggctctttgcgaccccatggactggggcctaccggggctctccgtccatgggatttcccggcaggagtactgga

SEQ ID NO: 7895 - DNA, 430 bp, Bos taurus
  unsure (413): unsure at all n locations; Clone ID: 34-LIB3057-008-Q1-K1-A10
gtttgccgccgggacacaggtgtcgtgaaaaccaccgttaaacctaagccaaaatgggaaaggagaagacccacatcaacatcgttgtcattgggcacgtagattcagggaagtctaccacgactggccatctgatctataaatgtggcgggatcgacaagagaacaattgaaaagttcgagaaggaggctgccgagatgggaaagggctccttcaaatatgcctgggtcttggacaaacttaaagctgaacgtgagcgtggtatcaccattgatatctccctgtggaaatttgagaccagcaagtactatggtaccatcattggatgccccaggaccccgaggccttcatcaaaaacatgattacaggcaccttccaaggctgactgtcctgtcctgatcgttgctgctggngttggtgaatttgaagc

SEQ ID NO: 7896 - DNA, 379 bp, Bos taurus
  Clone ID: 34-LIB3057-008-Q1-K1-A6
gtttgccgccgggacacaggtgtcgtgaaaaccaccgttaaacctaagccaaaatgggaaaggagaagacccacatcaacatcgttgtcattgggcacgtagattcagggaagtctaccacgactggccatctgatctataaatgtggcgggatcgacaagagaacaattgaaaagttcgagaaggaggctgccgagatgggaaagggctccttcaaatatgcctgggtcttggacaaacttaaagctgaacgtgagcgtggtatcaccattgatatctccctgtggaaatttgagaccagcaagtactatgttaccatcattgatgccccaggacacagagacttcatcaaaaacatgattaccggcacattccaagc

SEQ ID NO: 7897 - DNA, 442 bp, Bos taurus
  Clone ID: 34-LIB3057-010-Q1-K1-A6
aacttttatcacaatccagaactgacaccaacaaaaatattaaaacaaaacaccccttgagaaacaaaatgaacgaaaatttatttacctcttttattacccctgtaattttaggtctccctctcgtaacccttatcgtactattcccaagcctactattcccaacatcaaaccgactagtaagcaatcgctttgtaaccctccaacaatgaatacttcaacttgtatcaaaacaaataatgagtatccacaattctaaaggacaaacatgaacattaatattaatatctctgatcctatctattggatcaacaaacctactaggcctattaccccattcattcacaccaacaacacaactatcaataaacctaagcatagccatccccctgtgagcaggagccgtaattacaggattccgcaataaaactaaagcatcact

SEQ ID NO: 7898 - DNA, 394 bp, Bos taurus
  Clone ID: 34-LIB3057-011-Q1-K1-A6
gcgagcggccggcctttttttttttttttttaatctgaaagtcctgtttctaggttgatggaatattgactcttaacattttatatattatatcctaccaacatagtcgagcagcaatttgaaatatattgtgagataagataaagtggggagagaataggactgagtatgaaagccacgaagggtgaggtgtctacctaattaagcactataagaagtgtacgagggaagaaaagaccacaggatttgttcacaggctgattacagggcatccatctgaaggaacacttcagtgatttcaagccttttaggatgaaagatagcaccccactccagtactcttgcctggaaaatcccatggatggaggagcctggtaggctgcagtccatgggg

SEQ ID NO: 7899 - DNA, 307 bp, Bos taurus
  Clone ID: 34-LIB3057-012-Q1-K1-A10
ctttcttttccttaatgctttaaactatttgctaatggtcgctctactgatcttatgtgggacagtggagccactcacaccactgctatttctgttcacgacggctatgtccttcatcacggcattgtgaagttccctcttgctggagactttatcactatgcaatgcagggaactcttgctagtaatgaatatcgatctgattcctccatatatgattgcatcatatgaagctgatcgtgaagggtcttcagcaaactggtggcgtttttaccagctggcccaggataccaatgcttagtgccatt

SEQ ID NO: 7900 - DNA, 441 bp, Bos taurus
  unsure (335): unsure at all n locations; Clone ID: 34-LIB3057-012-Q1-K1-A6
gttctagatcgcgagcggccgctcgcttcctggtgaagtgtgtttcttgaaatcatcagcaccatggacagcaaaggttcgtcgcagaaagggtcccgcctgctcctgctgctggtggtgtcaaatctactcttgtgccagggtgtggtctccacccccgtctgtcccaatgggcctggcaactgccaggtatcccttcgagacctgtttgaccgggcagtcatggtgtcccactacatccatgacctctcctcggaaatgttcaacgaatttgataaacggtatgcccagggcaaagggttcattaccatggccctcaacagctgccatacctnctcccttcctacccctgaagataaagaacaagcccaacagacccaccatgaagtccttatgagcttgattcttgggttgctgcgctcctggaatgaccctctctat

SEQ ID NO: 7901 - DNA, 414 bp, Bos taurus
  Clone ID: 34-LIB3057-013-Q1-K1-A10
gagagcttcctggtgaagtgtgtttcttgaaatcatcaccaccatggacagcaaaggttcgtcgcagaaagggtcccgcctgctcctgctgctggtggtgtcaaatctactcttgtgccagggtgtggtctccacccccgtctgtcccaatgggcctggcaactgccaggtatcccttcgagacctgtttgaccgggcagtcatggtgtcccactacatccatgacctctcctcggaaatgttcaacgaatttgataaacggtatgcccagggcaaagggttcattaccatggccctcaacagctgccatacctcctcccttcctacccctgaagataaagaacaagcccaacagacccaccatgaagtccttatgagcttgattcttgggttgctgcgctcctggaatgaccc

SEQ ID NO: 7902 - DNA, 216 bp, Bos taurus
  Clone ID: 34-LIB3057-014-Q1-K1-A6
ctagatcgcgagcgtccgcccttttttttttttttttcttttttttttttatttttttgtgtgtttttttttttttttattttattttctattctttcattttatatttttttattttttaacttttactttcaacatttacatctttttcaatttaatttttcattttttttttctcacaaattgtaacaaatatctatgcatttttagactaaa

SEQ ID NO: 7903 - DNA, 413 bp, Bos taurus
  Clone ID: 34-LIB3057-016-Q1-K1-A6
gaagccggcggccccgagcggcccggggtacgtggtgaacgtggtgttcgtagagcggtgaggccaacggattccggtgagcggcagagtcggggacaatgttctccacctggcccagcgccatgggttggatctggaaggggcctgcgaagcgtccttggcgtgctccacctgccacgtgtatgtgagtgaggaccacctggaccttctgccgcctcctgatgagagggaggacgacatgctggatatggcccctctcctccaagagaactcccggctgggctgccagatcgtgctgacgcctgagctggaaggggccgaattcaccctgcccaagatcaccaggaacttctatgtggatggccacgtcctcaagccccattgacatgggcaaccggactgcctcagacact

SEQ ID NO: 7904 - DNA, 241 bp, Bos taurus
  Clone ID: 34-LIB3057-019-Q1-K1-A10
atcgcgagcggccgccctttttttttttttttttttttttttttttttttttttgtttttgtttttttttttttttttttttttttttttttttttttttttttttttttttttttttttttttttatttttttttttttttttttttattttatatttaatttttattaattttttaaattttttttaaaaaaattcattatttctattagtataattatatgcattaaattaactttat

SEQ ID NO: 7905 - DNA, 241 bp, Bos taurus
  Clone ID: 34-LIB3057-020-Q1-K1-A10
cttcgcgtgacctatcatccatcgtagctaaccagctgctctgcttcgtaccaaggcagatcccatatgcaggtcgtgtacgaatggatcaccaccacacgctaccaccaacattgcgatgcgtgacgctcgacgggccgaccgtcttttcggtcgcgcccagtatcccgttactaatgtctcttaccacctgacccaggtcccgactcgcgactggtgctcgcctcgccgcacccaggct

SEQ ID NO: 7906 - DNA, 180 bp, Bos taurus
  Clone ID: 34-LIB3057-023-Q1-K1-A10
gacaaaactaaaattcttcttcagatccacagtcaactgccctgactagattctgcaggagatccataggacgaagagccatggattactacagaaaatatgcagctgtcattctggccattttgactctgtctctgcaaattctccattcctttcctgatggagagtttacaatgcacg

SEQ ID NO: 7907 - DNA, 214 bp, Bos taurus
  Clone ID: 34-LIB3057-025-Q1-K1-A10
cccactcgtcctgttctagatcgcgagcggcctccctttttttatataaacttttttatacttttgttaagtttttttttaatttttttttttcctattttatttttttttttttttttttttttttatataaaaaaaataaaaattttaatttttaaaataaaaaattttaaaaaaatttaaaaaaataaatttataatttaaaaaataaaaa

SEQ ID NO: 7908 - DNA, 358 bp, Bos taurus
  Clone ID: 34-LIB3057-025-Q1-K1-A6
tctagatcgcgagcggccgctcgcgatctagacttcttagtgacttgaccctgggccgtgtgcctcagtgccccacacctggctagcccaccggccacacccaaggccgacaaggagccgctggagatggcccggccgcccggcccaccccgtggccccgctgcagccgctgctggctatggctgcccacttcttagtgacttgaccctgtcccctgtgccgagggactcgctgctgcccctgcaagatactgcctacaggtatccaagctttatgccgcaagcgcattccggcctgggtgggggccccaagagcggctttctggggcctatggcggaacctcaccctgaggacacat

SEQ ID NO: 7909 - DNA, 419 bp, Bos taurus
  Clone ID: 34-LIB3058-001-Q1-K1-A10
ggatgaagagcagaggctacatgaggaggaggaggagaagaaaggcaaggaggaggaagaggcagacaaagatgatgtcgagatgcaggaacattatgatgagttctttgaggaggttttcacagaaatggaggagaagtatggggaggtggaggagatgaacgtctgtgacaacctaggagaccacctcgtggggaacgtgtatgtcaagtttcgccgtgaagaagatgcggaaaaggctgtgattgacttgaacaaccgctggtttaacggccagccgatccatgccgagctctcccccgtgaccgacttcagagaagcctgctgccgccagtacgagatgggggagtgcacgcggggcggcttctgcaacttcatgcacctgaagcccatctcccgggagctgcgacgggagctgt

SEQ ID NO: 7910 - DNA, 294 bp, Bos taurus
  Clone ID: 34-LIB3058-002-Q1-K1-A6
tccacgcgttcgggcggaccgacgcggattgtcgttcgggcgggctgagccaatggcacgggcccgtggagcgcgaacgctctaacgtgagtcgatgcggtcggcgagcagaggcgccggatgctagcttggattctgacttagaggcgttcagtcataatccggcacacggtagcttctcgccactggctttacaaccaaacgcgatgaccaattgtgtgaatcaacggtacctctcgtactatgttgaattactatcgcggcgcggtcatcagttgggtaaaactaacctgt

SEQ ID NO: 7911 - DNA, 346 bp, Bos taurus
  Clone ID: 34-LIB3058-003-Q1-K1-A6
cggacgcgtgggcggacgccctttttttttttttttctcagctttctgtttgtgtgtgcatctgtatacttttttttttttttttttaactgttgttgcagcttgtgctattaaaatgatagagaatgttaaattattttgatgtgaattgcaaatgattttttcataaagtttaacatttctatcagcattgcttagctttgtacttgtctaaatgtgattcattttagtactttaaaatatacttgcctgtttctaagatgcctaactcatgttatagctgctatttgtgaaatcagttcctttgtgaaaaatattaaaaacgatactatgacatgaaaaatta

SEQ ID NO: 7912 - DNA, 449 bp, Bos taurus
  Clone ID: 34-LIB3058-004-Q1-K1-A6
cccacgcgtccggaaaaagcaaagaaatttaaaaaaaaaatctacttctgtgtcattgactacactaaagcttttatatggatcacaacaaactgtgaaaaaatcttaaagaggtgggaatatcagaccaccttacctgacacagaaatctgtgtgcaggacaagaaacaacagttagtactggacatggaacaacagagtggttcaaaattgggaaaggagtcaaaggacaatatatgtcaaggctatatattgtcaccctgcttatttaacttatatgcacagtacatcatgagaaatgccagactggatgaagcacaagctggaatcaagattgctgggagaaatatcaataacctcagatatgcagatgatgccactttatggtagaaagtgaagaggaactaaagagcctcttgatgaaggtgaaagaggagagtgaaaaagct

SEQ ID NO: 7913 - DNA, 425 bp, Bos taurus
  unsure (381),(395),(417): unsure at all n locations; Clone ID: 34-LIB3058-007-Q1-K1-A6
cctggttttacaaaggagacaaagataataagtatgttccatactcggagagcttcagcgaagttctagaggaaacttacatgcttgctgtaactctggatgaatggaaaaagaaattggagtctcccaacagagaaattattatattacacaatccaaagcgattctacataggataacctttggaaatttttatattgcattcataagaatctgcctgcaatgcaggagccccaggtttgatccttgggttgggaaaattcccctggagaaggaaatgacaatccattccattattcttgcctggtgacttctatggacagaggagcctggtgggctacagctcatgggattacagagttggacacaactgagtgactntctctttcacactntatgttttgaaagacttgtccncacccctc

SEQ ID NO: 7914 - DNA, 336 bp, Bos taurus
  Clone ID: 34-LIB3058-008-Q1-K1-A10
aagagacactgatgtatagaacagtcttttggactctgtgggagagggagagggtgggatgatttgggagaatggcattgaaatacgtataatatcatatatggaacgagtcgccagtccaggttcgatgcacgatactggatgcttggggctggtgcactgggatgacccagagggatggtatggggaggcaggaggaaggaaggttcacgatggggaatacatgtctacctgtcgcggattgaattccctatttggcataacccatacaatcttgtacagcttaaaaatcatctttcctaaatttgtaaattacaacacaatttgctagattct

SEQ ID NO: 7915 - DNA, 381 bp, Bos taurus
  Clone ID: 34-LIB3058-009-Q1-K1-A6
ggaggaggcctttgatgccatctgccagctggtggccggcaaggaaccagccaacgtaggcgttactaaagcaaaaacggggggtgctgtggaacggctgactgacaccagcaagtacacgggctcccacaaggaacgctttgatgagagtggcaagggcaaaggtattgctgggcggcaggacatcctggatgacagtggctacgtgagtgcctacaagaatgcaggtacctatgatgccaaggtgaagaagtgaggcctaggaaggccacccccccgcccaccagcgcaactgcccctgccagaggctcgggcctggcctaaggggcacgtggagcaagagagcctggtcccttccttgctggatctgccacccagagc

SEQ ID NO: 7916 - DNA, 431 bp, Bos taurus
  Clone ID: 34-LIB3058-010-Q1-K1-A6
atcagattgttttaaagcacactttatatttgttatcttgtactaatatatagaaggagtaaatgtatcttccataaggaacttcattggtgagattgcactgtccagattacataagcatatgcatcttctttggtaattgaatgtaaaagagagatatacaaggcttttctttcttactcttccaagtgaaatcctgaaatgtttcatggctaatgtttatctggctgtgatcttaatacaaacctaactgatatttcatctaagagattatttctgtcttgtagttaaaaattaatcctgtattctgcattcttattgtttctctttaccttcaagtaatattggtgctattaaataacatttaaaataatggctatttctgatacttaagtacaatttcagctacagtaattcatgtattaaacttc

SEQ ID NO: 7917 - DNA, 192 bp, Bos taurus
  Clone ID: 34-LIB3058-012-Q1-K1-A6
gccagaagccaggattcggctatggaggcagagcgtctgactacaaatcggctcacaagggactcaaggggcacgacgcccagggcacgctttccaaaatcttcaagctgggaggacgagacagccgttccgggtccccgatggcaagacgctgaagcccagctcccctcccagaaccccgtccccagcttc

SEQ ID NO: 7918 - DNA, 379 bp, Bos taurus
  Clone ID: 34-LIB3058-013-Q1-K1-A6
gacctctcatacgctggcacaacccctgggggcccagtggaattcctgacctgtctgctgtctgcctgtccctacatccccactgacacgattacattcccaatctaagccgtgcacatggtggagaccaggccttcaagaggcttggcctcttgcaggcacttgggaaaccctaggtacctagccacacgtgcccagtcatatgagctgtgggactcatgagtgccacgcacctgctctagatgggcagacagccgtcccagtccctgctttggaagtgggatacagggccctcttgagcaggccattgatgctaatgagggggatggccttgatgtgggtgctcagcctggcttacgcagtattgacccggtgcgct

SEQ ID NO: 7919 - DNA, 404 bp, Bos taurus
  unsure (395): unsure at all n locations; Clone ID: 34-LIB3058-014-Q1-K1-A6
ggctcacgtcattgaaaatttgcatgctgccgcttacagaaatgccttggctaattccttatattgtcctgattataggattggaaaagtgacaccagttgagttacatgactatgtacagaatcattttacaagtgcaagaatggctttgattggacttggtgtgagtcatcctgtcctaaagcaagttgctgaacagtttcttaacataaggggtggccttggtttatctggtgcaaaagccaagtaccatggaagtgaaattcgagaacagaatggagacagtctcgtccatgccgctcttgtagcagagagtgcagccataggaagtgcagaagcaaacgcgttcagtgttctccagcacgtccttggtgctggaccacacgttaagaggngcagcaatg

SEQ ID NO: 7920 - DNA, 447 bp, Bos taurus
  Clone ID: 34-LIB3058-017-Q1-K1-A10
caactctgtattggctacttatcccttttggccaagttatcttgaagggtctaaagggtttattgagaaagaactcttattgtcttcatactgtgttctcttcagtgctttgtaacagcttttggatgcaaattttcctcagcatcctttcgcactcagctttttacaggtaggtagtgcttaagaaaagttagaggactaaagcccaagtccttttacttttcctccacctgaaaggtaggtgagattgtcccttttgtagtaataccaactgttttactgagacttcctatagcagatgggcctggaaagaaatttctgctcttgtgttcactgtaaagaggacaaggagatcagacagcttcagaaatctcttcatatccagtgtgggagtgttaattttttattggtgttatcagtatttgtgatggtgtagttaaaagggga

SEQ ID NO: 7921 - DNA, 454 bp, Bos taurus
  unsure (410): unsure at all n locations; Clone ID: 34-LIB3058-018-Q1-K1-A6
atgatccctgcgtgaaaaagcatggtgggaaaccggcccaccagcgtggaagcggggccagggctccgcatcctcggtgcactggctccaaaacgcatggactttgccccctacccaccctatcctccaaaaagcaaccaggagcactttcttagagtttcatttattttcttgaggggaggggatcccagaatggaaagaggaaacgccagcattccagagttaacttctttgaaggggaagctatttgcacacttgggaccatttccacagtctttttcgaccagtccccagactgccagaggccgcggcgcctgggcccctccaccttcgagctactgacgcggccgggcccagcggcccccgctcctccatcagccccggcctcttctggacaccaggagggcctncaccgagccctcaggtcagggctggagagaaacagccttcatct

SEQ ID NO: 7922 - DNA, 376 bp, Bos taurus
  Clone ID: 34-LIB3058-022-Q1-K1-A6
ggcaggaggaaaagggggcatcaggatgagactgtcggatggcgtcattgactaagtgtacatgagtgtgaacaaacgtgggagatggatacacacagggatgcctggcatgcaccagttcatggggtcacaaagagtctgacacaactgagaaactgataatcaacgaccaaaatctttaacacagcctgcagttgtcttgtaaagtagtctgtgcttacccaactctcactacaagccactttatatatcagaatcccatcaagatacagagaccaccactaaaatttgaaaagggtaatgttagtgctaacagtgataaacggttaacgcctataaggagtgcacaaattgcatgtgactgaggtacctgaag

SEQ ID NO: 7923 - DNA, 280 bp, Bos taurus
  Clone ID: 34-LIB3058-023-Q1-K1-A6
ctggaatcaagattgccgggagaaatatcaataacctcagatatgcagatgacaccacccttatggcagaaagtgaagaggaactaaaaagcctcttgatgagagtgaaagagaagagtgaaaaagttggattaaagctcaacagagctgaagtactgaagtactccagtacttcagaaaacgaagtgatgggaccagaaaacattcatggcatctggtcccatcacttcatgggaaatagatggggaaacagtggaaacagtggctgactttatttttg

SEQ ID NO: 7924 - DNA, 417 bp, Bos taurus
  Clone ID: 34-LIB3058-024-Q1-K1-A6
ctaaagcttttatacagcctcaaattgtgttattacaaaataagactaaaaacggtgatgcttaacagctgtttgtacaagctcttagtgttgattccatgggactgacagctttgctcattttgattttttcccccccttcttttcctaatggtttaaattccagaattacactggggctccttttgccttttttagcataacgtccgtccatccatccacatctctgtcccgtgactcaggggcacccactcagctttgattctactgctttggaagaaactgttttgagcaggacttattgatgtctgagagttattttgggtaccttttagggaggaatgccttctgcaataatgtgtcccttctgtgatcaagggcaggtggatggacccaggctccctgtgcacatcaagc

SEQ ID NO: 7925 - DNA, 425 bp, Bos taurus
  Clone ID: 34-LIB3058-026-Q1-K1-A10
cggactcgtgggctagatcgcgagcggtcgcccttttttttttttttttttttttaagggcacaaataatttattcttctgttagagttgatacagttttaaatagcaacaaagtacacagtggtggaaaattggcacagaacctaaaagcatttcagtcacaataaggctgtccatgctttatctgttcaaacttgatgtccattttctactgaccatgttgaaaaaagccttattcagaccttaaaacacgcgcacactctctttcatacacacagagacacattaaaatttttccttttggttacagtatgttgagaacagtacattttgctttttcaaatttatggcaccccttctgttttgtttccagttgtaagtgggaaaaaacaatccaattataaagaatataccttattccctgg

SEQ ID NO: 7926 - DNA, 418 bp, Bos taurus
  Clone ID: 34-LIB3058-027-Q1-K1-A6
cggacgcgtgggttcgtttcgacgtccgcgaagatgcagctcaaaccaatggagattgaccccgagatgctgaacaaagtgctgacccggctgggggtcgccggccagtggcgcttcgaggatgttctgggactggaggaggagtctctgggctcggtgccagcgccggcctgcgcgctgctgctgctctttccgctcacggcgcagcatgagaacttcaggaaaaaacatattgaagagctgaagggacaagaagtcagtcccaaggtgtacttcatgaagcagaccattggcaactcctgtggaaccatcggactcattcatgcagtggccaataatcaggacaaactggagttcgaggatgggtctgttctgaaacagtttctttctgaaacagagaagttgtcccctgaagaca

SEQ ID NO: 7927 - DNA, 285 bp, Bos taurus
  Clone ID: 34-LIB3058-028-Q1-K1-A6
ataccgcacattgagcatgtcaccattctggacttcttccgcaagaccaggggcaggtacccataaattgtgacgctaaagacgtacctgcagacctataataacgagatctatcctatcggtcctcttcactgcaagcatatcaactggtgtatatttttatattgacttatcatttattaattacgaaaccatttacattaaaaaaaacgataggatctcaatcctagaccaaatgtgacattttactacctgaatgactgcactgtgattaacttgtaatgc

SEQ ID NO: 7928 - DNA, 403 bp, Bos taurus
  Clone ID: 34-LIB3058-030-Q1-K1-A10
cggacgcgtgggctgcagaaggagcagcgacggcaggaggagaatgacaagctgcgccaggagttcgcccagcatgccaacgccttccaccagtggatccaggagaccagaacgtacctcctcgatgggtcctgcatggtggaagaatccgggaccctcgaatcacagcttgaagctaccaaacgcaaacaccaggagattcgagctatgagaagtcagctcaagaagattgaagacctgggggcggccatggaggaagcgctgatcctggacaacaagtacacggagcacagcaccgtgggcctggcccagcagtgcgaccagctcgaccagttgggcatgcgcatgcagcacaacctggagcagcagatccaggccaggaacacgaccggagtgaccgaag

SEQ ID NO: 7929 - DNA, 271 bp, Bos taurus
  Clone ID: 34-LIB3058-030-Q1-K1-A6
cccactcggagagcagcgaggggctgggccaggtcaaccacaccatggaggtgtcctgttgaagccccggtcccacgaagacgcccactcgccccctcacccgcattgatgtcccacggccaccctcttgcggctcatttcccctttagtttatttttgcgagggcgaaggggaggaaatggggttacttctcttttgtttaaaaagaacaggggatctgtctagatgctgcagcagaacagtctccagatggtttgaggggctcactcct

SEQ ID NO: 7930 - DNA, 130 bp, Bos taurus
  Clone ID: 34-LIB3058-035-Q1-K1-A6
cgacccacgcgtccgcgggcgcccttttttttttttttttttatatttttttttttttttttttttttggtttgttttttatttttttttttttttttttttttttttttttttttttttttttttaggg

SEQ ID NO: 7931 - DNA, 430 bp, Bos taurus
  Clone ID: 34-LIB3058-036-Q1-K1-A6
ttgtagttgttatacaaagctttgtaatggcaagacgcgtttctactaaaggtcagctgtcactacatttatacttttgtatgtcacagaccctttctttcattcctccctggggagccagggcagatcaggaggcagtgtgttattggggactagggaaacaccatacttggcaaatctcatctaaattgggggggaggggcatacctattttttaaggatctcagacattggtattttaacagccatacaaaatcttgggctgtgacaggacttccagatcatccagtccaatgtaacacttgtagacagggagactgaggctttccatgacttgcctatggtcttccagctagtttggggcagaactggattcccaccctggtatctttcttgttccatcaatttaccttctttataatgtcctgag

SEQ ID NO: 7932 - DNA, 427 bp, Bos taurus
  unsure (364),(373): unsure at all n locations; Clone ID: 34-LIB3058-038-Q1-K1-A10
cttgcaggcccccgccatctcttctttctttcctcccgccttccattcacaccttccaaggcctgatgcattcataagatgagccccccagtccccttcagggggcctctgccctcctcctccagcccgggtggctcttgtccgttttggtttgttcctgttcgtttgtcatcttgttttggggtgccggggtggccgccggcgctgtcctaggacctgatggggaggggccgaggccctcaggagggccaggcgcgagaggcacgccttttgctgttgcatgcaaccagcctgtgataccctgtgcccatcccagagcctgtcggggcaggagtgcccagtgcggcgttccagaaggactganggtggtggngagggcccggagctgcggtgttgcctggatgtggcccatgaggaggccaggggg

SEQ ID NO: 7933 - DNA, 298 bp, Bos taurus
  Clone ID: 34-LIB3058-038-Q1-K1-A6
gataaagtgtaacattgtgtagcctttttgtataaaatagacaaatagaaatggtccaattagtttcctttttaatatgcttaaaataagcaggtggatctatttcacgtttttgatcaaaaactttatttgggatatgtatgggtaggtaagtcagtaagaggtgttatttggaaccttgttttggacagtttaccagttgccttttatcccaaagttgttgtaacctgctgtgatacaatgcttcaagagaaaatgcggttataaaaatggttcagaattaaacttttaattcatt

SEQ ID NO: 7934 - DNA, 347 bp, Bos taurus
  Clone ID: 34-LIB3058-039-Q1-K1-A10
gacccacgcgaccgcgggcacacccccaccacatttccccataccccgcccacccaacaaacacggaaaagggcgaccaaagaacgcacgagagcaacccaccagacaccgaaaacaacccacacaccagcaacaacaccccggccaacacaagaccaaccagaccaacaccggcacaacagacaacaagcaaccagaagccacacacacaaccaccgcacacccagaaccacgaaaaccaggggcccaacaccacaagacgaccacacgccagaaacacgccgcagccacacgcacgcaaccagacagagacacaccgcgcccagcccagacccaggccccaccag

SEQ ID NO: 7935 - DNA, 212 bp, Bos taurus
  Clone ID: 34-LIB3058-039-Q1-K1-A6
cggacgcgtgggcgagcggccttcctttttttttttttttttttttttttttttttttgttttttttttttttttttttttttttttttgtttattgagagagaccttgaggttttgatgttaagttttactcctttttcatatttgagattggcccgaacctaaactgttgtttttttgggggggaaatgcttcttttattctgttttggt

SEQ ID NO: 7936 - DNA, 447 bp, Bos taurus
  Clone ID: 34-LIB3058-041-Q1-K1-A10
cgggccgacccactcgtccggttgccacccaatccagttgctcttctgtctgctccatctctatgccagcttgccaccgtaggctccagcagcattaagcctgtcagacagcacccaccctacacccagcaacactaacagggcactcaccccaaagggtggcctggaggggcatggccagcagcttgggctagaattgggagggaggagagaaagcagggagggcagagagacctcataaatcaccctgccctccatatcccgaacctctgttgtcatggcaactgttgccagagctggaggtgtctggggcctccagaatggggccttcgagttttcttgagctgctagaggaaaactgagagtctgagacaagcagaggaagtccccaaggcaaggtggccttggccagaggcttattcttctagactgactgtgaccagtctg

SEQ ID NO: 7937 - DNA, 439 bp, Bos taurus
  unsure (169),(178): unsure at all n locations; Clone ID: 34-LIB3058-041-Q1-K1-A6
ccggcccgacccactcgtgcgtcggctccctcggccgcttctttggctttgacaggcgtgcgcccaagcggggctcaggggaggatggacaccatgcggccagaaccacccactatggctccctgccccagaaggcgcagcacggccggccccaagacgaaaaccccgnagggcactncttcaagaacatcgtgacaccccgcacacctcctccatcgcaaggaaaggggcgaggactgtccctcagcagatttagctggggggctgagggccagaagccaggattcggctatggaggcagagcgtctgactacaaatcggctcacaagggactcaaggggcacgacgcccagggcacgctttccaaaatcttcaagctgggaggacgagacagccgttccgggtccccgatggcaagacgctgaagcccagctcccct

SEQ ID NO: 7938 - DNA, 377 bp, Bos taurus
  Clone ID: 34-LIB3058-042-Q1-K1-A10
cggacgcgtggggtagacaaaggtggctcttggccttatacctcgttagagaagaggggcagggtgtagtcagcatcttcttactcccttctccctgataacagctaccatgacaaccctgtggtttccaaggagctgaggatagagagaaactagttcatatgaaaaatagactggcctaaggagcagcagtcgctagtggctaacagtgtaaactgggccagccctctggtagacacaggatagataactttttggatagcatgtttttttctgttaattagttgtgtactttggcctttgtcatatcttcacaatggtgctccttttcatggggtattagccattcagtcatagcaggttatttgaagatcttg

SEQ ID NO: 7939 - DNA, 416 bp, Bos taurus
  Clone ID: 34-LIB3058-043-Q1-K1-A6
cgcgagcggccgcccttttttttttttttttttttacaaacccttgtgtcgagggctgactttcaatagatcgcagcgagggagctgctctgctacgtacgaaaccccgacccagaagcaggtcgtctacgaatggtttagcaccaggcgccccacgaacgtgcggtgcgtgacgggcgagggggcggccgcctttccggccgcgccccgtgtcccgggacgaagggctctccgcaccggaccccggtcccgacgcgcggcgggggcgcgccgcgccgcgccccgggggacgcgggcgacggcccgccggcggggacggcgggggaccggctatccgaggccaaccgaggctcccgcggcgctgccgtatcgttccgcctgggcgggattctgacttagaggcgttcagtcataat

SEQ ID NO: 7940 - DNA, 430 bp, Bos taurus
  Clone ID: 34-LIB3058-044-Q1-K1-A10
gggttgggttcgtttcgacgtccgcgaatatgcagctcaaaccaatggagattaaccccgagatgctgaacaaagtgctgacccggctgggggtcgccggccagtggcgcttcgaggatgttctgggactggaggaggagtctctgggctcggtgccagcgccggcctgcgcgctgctgctgctctttccgctcacggcgcagcatgagaacttcaggaaaaaacaaattgaagagctgaagggacaagaagtcagtcccaaggtgtacttcatgaagcagaccattggcaactcctgtggaaccatcggactcattcatgcagtggccaataatcaggacaaactggagttcgaggatgggtctgttctgaaacagtttctttctgaaacagagaagttgtcccctgaagacagagcaaagtgctttga

SEQ ID NO: 7941 - DNA, 433 bp, Bos taurus
  Clone ID: 34-LIB3058-045-Q1-K1-A6
ctgggactgggcaaagcactaagaatttgaaaaataccactggtcgaagttcaaaatggaaagaggaacctgtatttccatttaattaggatgaatttgttactgtggatgaggttatagaagaagtcaatgcttttcacgtgaagcagaatccactgaagggaaataggatagaagctctcaaaaatacccgttcatctgaactgaacttactgatgaagaagggaatgatctatgctcgtcgtgtggttgagggagagttatcttatgtaacattggatgagattggggaagaggaagatgctgatgcacagttagcacatgctgtactcactgaggatgaagtgattgatgaagatgacatacacgcggaagacatggtcaataatgcacactcacttcttacattagatgagttaactgatcaagatga

SEQ ID NO: 7942 - DNA, 429 bp, Bos taurus
  Clone ID: 34-LIB3058-048-Q1-K1-A6
agcaaatacagctcctatagggggatctgttcattgattcccactattctcaggttatgctctcaacgatacatgagccaaaatccacttcgcaattatattggcgggcgtcaatataaccttcttcccacaacactttctaggactatctggcatgcctcgacgatactccgactacccagatgcatacacaatatgaaatactatctcatcaataggctcattcatttccctaacagcagttatactaatagttttcatcatctgagaagcatttgcatctaaacgagaagtcttgactgtagacttaaccacgacaaatctagaatgattaaacggatgccctccaccatatcacacatttgaagaacccacctatgttaacctaaaataagaaaggaaggaatcgaaccccctactattgggttc

SEQ ID NO: 7943 - DNA, 354 bp, Bos taurus
  Clone ID: 34-LIB3058-049-Q1-K1-A10
aaacaggacagagtgtacaaacattgtttggtcccaacaagcatcagagtgctgtgacctgtttacagttcaacatgaactttgtaattaccagctcagatgatggaactgtaaaactatgggacttgaaaacgggtgaatttattcgcaacctagtcacattggagagtggggggagcgggggagttgtgtggcgaatcagagcctggaacacaaagctggtgtgtgctgtcgggagtcgcatcgggacggaggataccaagctgctggcgctggattttgatgtggacatgaagtgaggagcaagatacgtggcattgtccacatgcataggcgacagactccctgcccttt

SEQ ID NO: 7944 - DNA, 431 bp, Bos taurus
  unsure (369): unsure at all n locations; Clone ID: 34-LIB3058-052-Q1-K1-A6
gccgccgggacacaggtgtcgtgaaaaccaccgttaaacctaagccaaaatgggaaaggagaagacccacatcaacatcgttgtcattgggcacgtagattcagggaagtctaccacgactggccatctgatctataaatgtggcgggatcgacaagagaacaattgaaaagttcgagaaggaggctgccgagatgggaaagggctccttcaaatatgcctgggtcttggacaaacttaaagctgaacgtgagcgtggtatcaccattgatatctccctgtggaaatttgagaccagcaagtactatgttaccatcattgatgccccaggacacagagacttcatcaaaaacatgattacaggcacatnccaggctgactgtgctgtcctgatcgttgctgcttggtgttggtgaatttgaagccggtatc

SEQ ID NO: 7945 - DNA, 403 bp, Bos taurus
  Clone ID: 34-LIB3058-053-Q1-K1-A6
tagatcgcgagcggccgcccttttttttttttttttcttatcctctcatcattgaggctatgtattaatagacattatagtaaacccacgcgaaatattcagaattagaaggggattaaagagccacgtttgggcgttacgttgactattcctcattttcatcctaaggggggttgtgacgccagtgtggggacttcgtgggggtctggtggaagagatgctgaaatcaaaaggtgggaatcagtaggttatgggggaagcacgggagatgtcagctggggttagaaaagagtgggatagaggacccctccccgtcctcactggggccggcacccagtccggcagcgattcgggaaaagcgagtgtactggtcagtgggtttctgggaggaagcaggtggggt

SEQ ID NO: 7946 - DNA, 433 bp, Bos taurus
  Clone ID: 34-LIB3058-054-Q1-K1-A6
gttctagatcgcgagcggccgtcctttttttttttttttttttttagcatacatatattaaagtttttattccttagtaagaattttaaaatcacaaaatagcgtggcaatatttattttcggtaatagaatttatggagtgctgaaaatactagaatataaagatgatttctagtttatcttcacatactaaacttttctaaaccagctggtttcttgcagacagtatttatttttttttaataatttaagacagcataagcttgtaccaagcataagcattataacaaaagtgcaacttttcagcaagtcctcccccaaagatatttgaactcaaaatatcattagcacttattttctccctacaaaaatagcatgtcagacatcattaattggatgtattaacaactatgtacataagagccaccttgta

SEQ ID NO: 7947 - DNA, 449 bp, Bos taurus
  Clone ID: 34-LIB3058-056-Q1-K1-A10
tgcacatttttttaagacatagtactatagcatatttaaaagaccacaatgtaaatgtaacttctatatactgggaaaccaaagtttgtgtgactcactttatttcaatattcactttattgtggtggtctggaattgaacctgcaatctctcaaggtgtgtctgtaacaaattaatgcaatgtaaagtccttacaggatcctgatttgatcaaacccactgtaaaaagatatttttgagatagttgtgaaactttgcataaggataggtactagttgattttgaggaattactgttagttttcttagttgtgataatgacattattatataaaagttggaggtacatactgaagcatttgtaagtgaaattaaatgacttttgaggtttgctttctgataattattttcaaaattgtgattgatgttgaattgttaaataaacatggg

SEQ ID NO: 7948 - DNA, 302 bp, Bos taurus
  Clone ID: 34-LIB3058-056-Q1-K1-A6
ggcacgtacaacaaccagtggatgatcgtggactacaaggcattcgtccctggcgggcccagccctgggagaagggtgctcactgtcctggagcagatcccgggcatggtggtggtggccgacaggacctcggaactctaccagaagacctactgggccagctacaacatcccgtcctttgagtctgtgttcaacgccagtgggctgccggccctggtggcccgctacgggccctggttctcctacgacgggagcccccgggcccagatcttccgactgatccactcgctggtgcacgacct

SEQ ID NO: 7949 - DNA, 412 bp, Bos taurus
  Clone ID: 34-LIB3058-057-Q1-K1-A6
tcgccgaattgaaataagttctttatacagtggtctctctgaatcagttcagagatgggatgggggagaattgctttctaggtttcaaacttctatgcattagtgcagatgttgtgaatgtgtaaagatattagtaatttgattatttctatgtatgtttttaaaagaatcgtttgttctttttgagatattataccttttttttggcattctaccattgtagtctaaacctaaaacttttatgcctcaatttagactatattttttaaaggagcacctctctgtggtgcagagaactttttaaaaagtcccattaagatctgagtcttggtactaagtgttctgtataatttgtggatgcttgatgcttgtcctccctgcaggaggccttgcgtgggcaaatgcatattct

SEQ ID NO: 7950 - DNA, 448 bp, Bos taurus
  Clone ID: 34-LIB3058-058-Q1-K1-A6
gtccaagctggagttctccatttacccagccccccaggtttccacagctgtcgttgagccctacaactctatcctcaccacccacaccaccctggagcactctgattgtgccttcatggtagacaatgaggccatctatgacatctgtcgtagaaacctcgacattgagcgcccaacctacacaaatcttaaccgccttattagccagatagtgtcctccatcactgcttccctgaggtttgatggcgccctgaatgtggatctgacagagttccagaccaacctggtgccctatccccgcatccacttccctctggccacatacgcccctgtcatctctgctgagaaagcctaccatgaacagctttctgtagcagagatcaccaatgcttgctttgagccagccaaccagatggtgaaatgtgaccctcgccatgggaaatacatg

SEQ ID NO: 7951 - DNA, 437 bp, Bos taurus
  Clone ID: 34-LIB34-001-Q1-E1-A6
gtgactatccagacctgcctgatcactccagccgagggccccgtggtgacagtccagtatgagtgccttggctgtgtgcatcccatatctaccaagagccccgacttggagcctgttctgagatatgccatccaatattttaacaacaacaccagtcattcccacctctttgatctgaaagaagtaaaaagagcccaaagacaggtggtgtctggatggaactatgaagttaattactcaattgcacaaactaattgttccaaggaggaattttcattcttaactccagactgcaagtccctttcaagtggtgatactggtgaatgtacagataaagcacatgtagatgtcaagctaagaaattcttccttctcgcagaaatgtgacctttatccagggagggatttttacccccatgggttgtgtcggctgcccaa

SEQ ID NO: 7952 - DNA, 412 bp, Bos taurus
  Clone ID: 34-LIB34-002-Q1-E1-A6
acaagatacaatctccagtaaactgaaggaatgctgtgataagcctttgttggaaaaatcccactgcattgctgaggtagaaaaagatgccatacctgaaaacctgcccccattaactgctgactttgctgaagataaggatgtttgcaaaaactatcaggaagcaaaagatgccttcctgggctcgtttttgtatgaatattcaagaaggcatcctgaatatgctgtcttagtgctattgagacttgccaaggaatatgaagccacactggaggaatgctgtgccaaagatgatccacatgcatgctattccacagtgtttgacaaacttaagcatcttgtggatgagcctcagaatttaatcaaacaaaactgtgaccaattcgaaaaacttggagagtatggattccaa

SEQ ID NO: 7953 - DNA, 395 bp, Bos taurus
  Clone ID: 34-LIB34-003-Q1-E1-A6
catgtcactgaaggatttgaaaacatgccagctgcatttataggattgctaaaaggagagaatctgggaaaggcaatagtgaaagcatgaacaaaaatgacacatggaatccagaaatcacctagatgattagtttcttttaatcatttagtaaaatatatactaacttcataatgcatgaacaaaagtcactagtggaatctagaaatcatttggatgattagcttctttttaatcatttagtaaaatctgtgctgttttcataatctaaaaaacagtaattgtaatgtgattgatctacctaataaaatacattgaagtgaaaaaaaaaaaaaaaacaaaaaaaaaaaaaaagaaaaaaaaaaaaaaaaaaaaaaaaaaagggcggccgctct

SEQ ID NO: 7954 - DNA, 375 bp, Bos taurus
  Clone ID: 34-LIB34-004-Q1-E1-A10
atcgaagccgccaacacgtcttataccagcgcctgagcccttccaataacattaattgccacctctttcacagctatttacagcacccgtattatttttttcgcacttctaggacaaccccgattctctaccctaggtaatattaacgataacaacccccttctgatcaactctatcaaacgcttactaattggtagcctcttcgcaggatacatcatttccaacaattattcctccaacaaacaattccccagaataactaagccctactaactaaaaacaacagccctaattggtacaatcctatgcttcatctttagcctaaaaatcagtaatataactaaaaatcgaaaatatcactacccctcaaacgcc

SEQ ID NO: 7955 - DNA, 416 bp, Bos taurus
  unsure (409): unsure at all n locations; Clone ID: 34-LIB34-005-Q1-E1-A10
atctggttggtggatgaacaaatgtcacgctggccacctcaatggagtttattatcaaggtggcacttactcaaaaacatctactcctaatggttatgataatggcattatttgggccacatggaaatcccggtggtattccatgaagaaaaccaccatgaagataatcccacttaacagacttgccatcggagaaggacagcagcaccaactggggggagccaaacaggtcggagtagaacatcacgttgaaatagaatatgactaagtcattttgccctgagctgttcattctgttaacacacaaagtttcagaaactttcctgaaattttcttctcgttttctcttaccgtatttattaattttaagtctttctttaaggatatttagctctgaatggcaattaanactcact

SEQ ID NO: 7956 - DNA, 404 bp, Bos taurus
  Clone ID: 34-LIB34-005-Q1-E1-A6
ggcaatttgatttctggttcctctgccatttccgaatccagcctgtacatctggaagttctctgttcacgtactgctaaagcctagcttgaaggatttcagtaaaatcttgttatcatgtgaaatgactgcaattgtacagttatttgaacattctttggcattgcctttctttggaattggaagctgagaagtcccataatctgtccttcaagcaggagaaccaggacatctagtgatataacttattccaaatctaaacttctgaaaattaggggtggggagggcaatacatcctaatttgagtccaaaaacctgagagccaggagtcagatatctaatagaaggaaaaaaatgggtgtctcagttcaagagaagagagtaaaatgtgccctgactctgctt

SEQ ID NO: 7957 - DNA, 238 bp, Bos taurus
  Clone ID: 34-LIB34-006-Q1-E1-A6
ctgcctcgagcatggagctggtggctcttccatccccagaccagccaagcctgtgagtgacaccccagacagaagaaccagagccatgccgaatctcaaccgactgctgttgttactgactgcctgcctggcagttaacgccagctccgtgcccacattgcccgattacattcaagtgcaagagaacttcgaactgtccaagatctatgggaagtggttcaatgtggccgtgggctcc

SEQ ID NO: 7958 - DNA, 406 bp, Bos taurus
  Clone ID: 34-LIB34-007-Q1-E1-A10
ccagacacaaacagaacagcaagtgtatgatattgggtttgtattgagctacaagtgccattttggctataagccagagacagatggacctacaactgtgacttgtcagagcaatttggagtggagcccatacatagaatgtaaggaggtatgttgcccagaaccaaacctgaataattatggaagcatcactctacacagaagacctagcactagtactcactgtacctatatcagtggagataagatttcatatgaatgtcatagtaaatatatgtttgatgctttatgtacaaaacatggcacttggagtcctagaacaccagaatgcagaccagattgtaaatcgcctcctgtcattgcgcatgggcaacataaagtagtctctaaattctttacaattgat

SEQ ID NO: 7959 - DNA, 253 bp, Bos taurus
  Clone ID: 34-LIB34-007-Q1-E1-A6
gcccagcccgcgcctcttcccagccttaggcccggcccctttcgcctgtgtgcattagtccgtgcggaaacgctgccaatatgtcggacaagctgccttacaaagtcgctgacatcagcctgaccgcttggggacgcaagggcttggacctggcagagaatgagcatgccaggcctgatgcacatgcgataaatgtactcggcctccaagcctctgaacggcgctcgcattgctgactgcctgcacatgagcg

SEQ ID NO: 7960 - DNA, 401 bp, Bos taurus
  Clone ID: 34-LIB34-008-Q1-E1-A6
gcccgagcaacctggtggaagtgaccggagcagagcccctgcccgcaccctcgatctcaaccagtcccgtgtcctggatcacacccggcctgaacaccacactgctgtgcctctcgggacttcgaggtgtgactttcctgctgaggctggaaggagaggaccagtttctggaggtggctgaggccccagaggccacgcaagccaccttcccggtccaccgggctgggaactacagctgcagctaccggacccacgcggcaggcaccccctcggagcccagtgccacagtgaccatagaggagctagacccgccgccggcgcccacgctgacagtggacagggagtcggccaaggtcctgaggccgggctcgtctgcctcgctcacctgcgtggcgcccctg

SEQ ID NO: 7961 - DNA, 336 bp, Bos taurus
  Clone ID: 34-LIB34-009-Q1-E1-A6
caacaatgaatacttcaacttgtatcaaaacaaataatgagtatccacaattctaaaggacaaacatgaacattaatattaatatctctgatcctatttattggatcaacaaacctactaggcctattaccccattcattcacaccaacaacacaactatcaataaacctaggcatagccatccccctgtgagcaggagccgtaattacaggattccgcaataaaactaaagcatcacttgcccatttcttaccacaaggaacacccactccactaatcccaatactagtaattatttaaactatcagccttttttattcaaccctaaagccctcg

SEQ ID NO: 7962 - DNA, 377 bp, Bos taurus
  Clone ID: 34-LIB34-010-Q1-E1-A10
tcagtgacttgtacagtcacacggctacttaaccgagagcagggagagtctcagtctggctgttggatctcctggcccgggttcctccttaaacagtgcttgtgggtacaggatccttgtcccaagtttccctaattcctgcctcattctcaacctttcaagcccccctgagtccatgagggaacatgtggttgctgcctctaaggccatgaagatgggcgactggaaaacctgccacagttttatcatcaatgagaagatgaatggcaaagtgtgggaccttttctcggaggccgacaaagtcagaaccatgctggttaagtgagccgacagtgagatcctggtggggggaaaagaaaatgacggttggtcttctc

SEQ ID NO: 7963 - DNA, 429 bp, Bos taurus
  Clone ID: 34-LIB34-010-Q1-E2-A6
gcttatcatatagtaaacccaagcccttgacctcttacaggagctttgtctgccctcttaataacatccggcctaaccatgtgatttcactttaactcaatgaccctgctaataattggcctaacaacaaatatactaacaatataccaatgatgacgagatgttatccgagaaagcaccttccaagggcaccataccccagctgtccaaaaaggcctccgttatggaataattctttttattatctccgaagtactattctttaccggatttttctgagctttctaccactcaagcctcgcccccacccctgaactaagcggctgctgacccccaacaggcattcacccactaaaccccctagaagtcccactgctcaacacctctgtcctattggcttccggagtttctattacctgagcccatcat

SEQ ID NO: 7964 - DNA, 433 bp, Bos taurus
  unsure (372),(381),(385),(394): unsure at all n locations; Clone ID: 34-LIB34-011-Q1-E1-A6
acgaaaaactttggcacaatgaagtgggtgacttttatttctcttctccttctcttcagctctgcttattccaggggtgtgtttcgtcgagatacacacaagagtgagattgctcatcggtttaaagatttgggagaagaacattttaaaggcctggtactgattgccttttctcagtatctccagcagtgtccatttgatgagcatgtaaaattagtgaacgaactaactgagtttgcaaaaacatgtgttgctgatgagtcccatgccggctgtgaaaagtcacttcacactctctttggagatgaattgtgtaaagttgcatcacttcgtgaaacctatggtgacatggctgactgctgtgagaaacangagcctganaganatgaatgcntccctgagcacaaagatgatagcccagacctccctaaat

SEQ ID NO: 7965 - DNA, 384 bp, Bos taurus
  Clone ID: 34-LIB34-012-Q1-E1-A10
tcaagccacgcaacagaacgtatgggaagtgtttaatgctggaacagatacaacaagcctcactctgacatatggactcctgctcctgctgaagcacccaaaggtcacatccaaagttcacgaagaaattgatcgtgtggttggcagaaaccgaaacccctgcatgcacgacaagagctgcatgccctacacagatgctgtgctgcatgagatccagagatacattgaccttgtccccagcagtatgccacatgcagcagctcaagatgttaagttcagagaatacctcattcccaatggcacagtcatattaacatctctgacttctgttctgcatgacgataacgagttttccatcccagtgcagtttgatcctggtcactt

SEQ ID NO: 7966 - DNA, 351 bp, Bos taurus
  Clone ID: 34-LIB34-013-Q1-E1-A6
tcgacccacgcgaccgaggacgcgtgggcggcggtcgcggctgggggcggggaggggggcgcaggaccccaggctggggtcccggaaccggaaggccagttcccatccccccagcagcatgggatcctgtgctgacccctctgctgcagaccctgagcccactgctccgccacctgctggggtcccaccacgtgaggacttcgaagtgctggacggtgtggaagacgctgatggcgatgaggaggaagacgatgacctgagtgaactgccgccacttgaagatgtgcggcagcccccactggaggatgctgagcagcccggggccctgacccgaggattcctggccgccat

SEQ ID NO: 7967 - DNA, 435 bp, Bos taurus
  Clone ID: 34-LIB34-014-Q1-E1-A10
aagtcattaaaacaccaatgaccagccagaagacgtttgaatctctgctagacttcagcagagccctggggaagcatcctgttgcttgcaaggacacgcctgggtttatcgtgaaccgtcttctggtgccgtacctcatggaagcagtcaggctgtgtgagcgaggtgaagcatccaaggaggacatcgacatggcgatgaagctgggcgccggctaccccatgggtccgtttgagcttctcgattatgttgggctggatactacgaagttcatcctacacggttggcatgaaatggactcaaagaaccccctgtttcagccctgcccatccttgaataagctggtagcagagaaaaagtttggcaagaaatctggagaaggattttacatatacaagtgagcagcttctctggctcgaggacgaagccccgtaa

SEQ ID NO: 7968 - DNA, 416 bp, Bos taurus
  Clone ID: 34-LIB34-014-Q1-E1-A6
acacgactcagatgctgtgctgggtcactttccttatcccgacccttcccagtggacagatgaggaattgggtatccctccggatgatgaagactgaaaacagaggctcagctcttgccaaatgggtgcaccccatgtttcttgttatgtttatttgtctgtaaacatgttttgactttgcacctatggtgattctgaagaaacagtgcattttataacagtataaagaataattaacacatcatgtctaacttctgcttttcctgttttcacatttgctgtcattctgccccttcttccccctacacacttttagtctcatcttccttttcatgtttaaaaaaattattttttcttaagctttgttacagtttagggtcgcatttgtctgtctattgagcagagactttaagcac

SEQ ID NO: 7969 - DNA, 296 bp, Bos taurus
  Clone ID: 34-LIB34-015-Q1-E1-A6
accccacaaaactttggcacaatgaagtgggtgacttttatttctcttctccttctcttcagctctgcttattccaagggtgtgtttcgtcgagatacacacaagagtgagattgctcatcggtttaaagatttgggagaagaacattttaaagggctggtactgattgccttttctcagtatctccagcaatgtccatttgatgagcatgtaaaattagtgaacgaactaactgagtttgcaaaaacatgtgttgctgatgagtcccatacccggtgtgaaaagtcacatcacac

SEQ ID NO: 7970 - DNA, 402 bp, Bos taurus
  Clone ID: 34-LIB34-016-Q1-E1-A10
atacttttccttcgaggggtaacctagatgatttctttcatagagacaaggatgatttcttcacccgtagttcacacgagtttgatggtaggacaggcttagcacccgaatttgcagccttaggggaatcgggctcttccagtagtaaaacttcaactcacagcaaacagtttgtaagcagcagcacaactgtcaacagaggtggctccgcgattgaaagcaagcactttaaaatggaagatgaggccgaaagcctagaggatcttggctttaaaggagcacacggcactcagaaaggccatactaaagctcgtcctgccagaggtatccacacttctcctttgggggagccttccctgaccccctagactaagttcattactcctgcagcgtgtctcccat

SEQ ID NO: 7971 - DNA, 393 bp, Bos taurus
  Clone ID: 34-LIB34-016-Q1-E1-A6
gactggggaagcccatggacagggggagactggtgggttgcggtccacggggttgcaaagagtcagacacagtgaagcaacttaacagcatgcatgcaaggtcattcgacatttacctctttgaagaaccggcaaacctatttccagagcaactgcaccatttgacttcttcatcagcaatgtacaaggggcccaatttctccatattcttgaaacatgtgctgttgattttctattattattattattaatacagccttcttgatttgagttaatgtcttgctgcggctttgatttccctgagatggtgagcatgtgcttagtgcttagcagtcccttgtgtatgttttctgaaaaaatgtctagcaaagtcctttttccactttttcactg

SEQ ID NO: 7972 - DNA, 410 bp, Bos taurus
  Clone ID: 34-LIB34-017-Q1-E1-A10
gtttcctcaattttaggagccatcaacttcattacaacaattatcaacataaagccccccgcaatgtcacaataccaaacccctctgttcgtatgatccgtaataattaccgccgtactactactactctcgctccctgtattagcagccggcatcacaatgctattaacagaccggaacctaaatacaaccttcttcgacccggcaggaggaggagaccctattctatatcaacacttattctgattctttggacaccccgaagtctatattttaatcttacctgggtttggaataatctctcatatcgtgacctactactcaggaaaaaaagaaccattcggatatatgggaatagtttgggctataatgtcaatcggatttctaggtttcatcgtatgagcccacca

SEQ ID NO: 7973 - DNA, 417 bp, Bos taurus
  Clone ID: 34-LIB34-018-Q1-E1-A6
agcggacgcgtgggaaactttggcacaatgaagtgggtgacttttatttctcttctccttctcttcagctctgcttattccaggggtgtgtttcgtcgagatacacacaagagtgagattgctcatcggtttaaagatttgggagaagaacattttaaaggcctggtactgattgccttttctcagtatctccagcagtgtccatttgatgagcatgtaaaattagtgaacgaactaactgagtttgcaaaaacatgtgttgctgatgagtcccatgccggctgtgaaaagtcacttcacactctctttggagatgaattgtgtaaagttgcatcccttcgtgaaacctatggtgacatggctgactgctgtgagaaacaagagcctgaaagaaatgaatgcttcctgagccacaaa

SEQ ID NO: 7974 - DNA, 380 bp, Bos taurus
  Clone ID: 34-LIB34-019-Q1-E1-A10
gcttcagtagatctaaccattttctctttacacttagcaggagtttcctcaattttaggagccatcaacttcattacaacaattatcaacataaagcggcccgcaatgtcacaataccaaacccctctgttcgtatgatccgtaataattaccgccgtactactactactctcgctccctgtattagcagccggcatcacaatgctattaacagaccggaacctaaatacaaccttcttcgacccggcaggaggaggagaccctattctatatcaacacttattctgattctttggacaccccgaagtctatattttaatcttacctgggtttggaataatctctcatatcgtgacctactaatcagggaaaaaaagaac

SEQ ID NO: 7975 - DNA, 322 bp, Bos taurus
  Clone ID: 34-LIB34-019-Q1-E1-A6
aaaacatctattactgctacttttctgtgcttttttagttcaggcccaatttcctactgactatgacgagggacaagatgacagacctaaggtaggtttgggtgcccgcggtcatcggccctatgacaagaagaaggaagaggcccccagcctgagacctgtgccccctcccatcagcggaagtggctatcgggctcgtcccgccacagcaactgtgggccaaaagaaagtggagagaaaccccctgacgctgatggctgcctgcacgccggaccggatctgggtgtgttgtgtcccacaagatgtaagttgccagatactt

SEQ ID NO: 7976 - DNA, 98 bp, Bos taurus
  Clone ID: 34-LIB34-020-Q1-E2-A6
acttatcatatagtggacgcaaacccttgacctcttacaggagctttgtctgccctcttaataacatccggcctaaccatgtgatttcactttaactc

SEQ ID NO: 7977 - DNA, 410 bp, Bos taurus
  Clone ID: 34-LIB34-022-Q1-E1-A10
cacagtggtaagaaccgggtccagggccctggtcggggtggcctgtctgctcctggcattctctgctacagacactgggccgggggtcactcagcctgaagtggacacacccctgggccgtgtgcgaggccggcaggtgggcgtgaagggcacagaccatcttgtgaacgtcttcttgggcatcccattcgcccagccgcccctggggccccaccggttctcggccccgcgcccagcggagtcttgggagggcgtgcgagatgccagcagggcccacgccgtgtgcccacaggatccggagagaatgaacaacagcagatttacgctggacggaaagcaccagaccttccccatttcggaggactgcctgatcctcaacatatacagcccggctgaggccccctcggggg

SEQ ID NO: 7978 - DNA, 369 bp, Bos taurus
  Clone ID: 34-LIB34-022-Q1-E1-A6
accccacaaaactttggcacaatgaagtgggtgacttttatttctcttctccttctcttcagctctgcttattccaggggtgtgtttcgtcgagatacacacaagagtgagattgctcatcggtttaaagatttgggagaagaacattttaaaggcctggtactgattgccttttctcagtatctccagcagtgtccatttgatgagcatgtaaaattagtgaacgaactaactgagtttgcaaaaacatgtgttgctgatgagtcccatgccggctgtgaaaagtcacttcacactctctttggagatgaattgtgtaaagttgcatcccttcgtgaaacctaaggggacatggctgactgctggtga

SEQ ID NO: 7979 - DNA, 403 bp, Bos taurus
  Clone ID: 34-LIB34-023-Q1-E1-A6
gaatagaatgaccctgatcattacctgatggagttgctgaatcttgctgaaagcaacaaggggaaagttgtagccataggggaatgtggacttgattttgaccgactacagttttgttccaaagatactcagctcaagtattttgaaaaacagtttgaactgtcagaacaaacgaaattacccatgtttcttcattgtcggaactcacatgctgaatttctggacataatgagaagaaatagagatcggtgtgtaggtggagtggtgcattcatttgatggtaccaaggaagcagcagctgctttgatggacttgggtctctatatacggttcaatggttgctcactgaaaactgaggctaaattggaagttccaaagtcaatacctagtgaaaaattaatga

SEQ ID NO: 7980 - DNA, 307 bp, Bos taurus
  Clone ID: 34-LIB34-024-Q1-E1-A10
ggtcgacccacgcaaccgccgggcccgccgacaccatgagttggtcctcgcaccctccgagtgtaatcttctacattctttcattgctttcttcagcatgcctggcatatgttgctacccgagacgggtgctgcatcttagatgaaagatttggtagttattgcccaactacctgtggaattgcagatttcctgaataattaccaaaccagtgtagacaaagatctacgaactttggaaggcatcttatatcaggttgagaacaacacatcagaagccagagagctggtcaaagcaatccaaatcag

SEQ ID NO: 7981 - DNA, 290 bp, Bos taurus
  Clone ID: 34-LIB34-024-Q1-E1-A6
ctcacgggtcgacacaagcctctaaactgactcatattatcactgcattgacacttatgcctgagacctttatcagagtggactccgggagattaagtgtcgtctagatctatactggaagctacatggtgatgggagattctttcaacacatctcgctgcacacatacattcgaaagtattttcagttacgattttaatggccatttcagaatggccattgatgctactttggactgtaaaaccgcattggagctgaaagttgcgggagccactgaagcctgtgtgtct

SEQ ID NO: 7982 - DNA, 410 bp, Bos taurus
  Clone ID: 34-LIB34-025-Q1-E1-A6
gcagatcccccaagggcaccatggccgccctgggcatcacggtcgccctgctggtgtggatggccaccctgctgttcatctccatctggaagcacatctacagcagctgggaactgccccctggccctttcccactgcccatcatcgggaatcttttacagctggatattaagaacattcccaaatccttcaccaggctggcggagaggtacgggccggtgttcaccctgtacctgggctctcagcgtgccgtggtcgtgcatggctacaagcccgtgaaggaggtcctgcctgactacaagaacgagttttctggcagaggagaaaaccctgggttccagatgcacaagaacaatgggatcattttcaacaatggatcaacctggcgggacacccgacggttctcgttg

SEQ ID NO: 7983 - DNA, 368 bp, Bos taurus
  Clone ID: 34-LIB34-026-Q1-E1-A6
cagaaatcccattttcataaggagttgatgttagtttgggcccattccatctacagttttccaagactgtaaaattagagctcttgaacattgaacttgtagcataagtgtttcttaaagggttatatttaaaataagatgacaagacgaagtatgagaacataattctgagaaggcatttagcttaggaaaccagaaattgtataccagtagagaaaaagtgctcttgcctggaaaatcccatggacggaggagcctggttggctgcggtccgtggggtcgctaggagtcgggcgggactgggcggcttcactttcacgtttcactttcatacattggagaaggaaatggcaagccactcgagtgtt

SEQ ID NO: 7984 - DNA, 393 bp, Bos taurus
  Clone ID: 34-LIB34-027-Q1-E1-A6
caaaaagtgctgtgaattttttgacaacatccgtaaaaaagataaaagaaagtcgcctcaaagatactcaaaagccgcgtgtggactttcttcagctgatgattaactcgcagaattccaaagaaacagacaatcataaagctctctctgaccaagaactcatggcccagagtattatctttatttttggtggctatgagaccactagcacttctctttccttcattatatatgaattggccactcaccctgatgtccagcagaagctgcaggaggagattgatgcgactttccccaataaggcgcctccgacctatgatgtcctggcacagatggagtaacttgacatggtggtgaatgagactctcagaatgtttcctattgctgttagac

SEQ ID NO: 7985 - DNA, 417 bp, Bos taurus
  Clone ID: 34-LIB34-028-Q1-E1-A6
gacaaacaaagagacgaaactccaatatctgggcaggcggcggcttcggattcactgcccacatcccgctctcgcaggcagacatgagggcagagagaatgtcccccctcctggctctggggctcctggtgtctgggctctgctccagggtccactgcctcccagagaatgtgaccccagaagaacggcacaaagggacgtctgtggatggccactcattagcctcaagcaacactgacttcgccttcagcctctacaagcagttggctttgaagaaccccaataagaatgtcatcttctcccctctgagcatctccatagccttggccttcctgtccctgggggctcgtggccccactgtgacagagatccttgagggtctaaagtttaagctcacagagactcccgagagagaaa

SEQ ID NO: 7986 - DNA, 418 bp, Bos taurus
  Clone ID: 34-LIB34-029-Q1-E1-A6
tgatttcttgcaacttcgaaaaatttaaaaccatgaaacatctattactgctacttttctgtgcttttatagttcaggcccaatttcctactgactatgacgagggacaagatgacagacctaaggtaggtttgggtgcccgcggtcatcggccctatgacaagaagaaggaagaggcccccagcctgagacctgtgccccctcccatcagcggaggtggctatcgggctcgtcccgccacagcaactgtgggccagaagaaagtggagagaaagccccctgacgctgatggctgcctgcacgcggacccggatctgggtgtgttgtgtcctacaggatgtaagttgcaagatactttggtaagacaggagagaccaatccgaaagagtatagaagatttacgtaatactgtgggact

SEQ ID NO: 7987 - DNA, 397 bp, Bos taurus
  Clone ID: 34-LIB34-030-Q1-E1-A6
gtttctgcaagacaacatcgtcgccgagttctccgtggacgagaatggccacatgagcgccacggccaagggccgagtccgtctcttaaataactgggacgtgtgtgcagacatggtgggcaccttcacagacactgaggaccctgccaagttcaagatgaagtactggggcgtagcgtcctttctccagaaaggaaacgatgaccactggatcattgacacggactacgagacctttgccgtgcagtactcctgccgcctcctgaacctcgatggcacctgcgctgacagctactcgttcgtgtttgcccgagaccccagcggcttttccccggaagtgcagaaaatcgtgcggcaaacgcaggaggagctgtgcctggcaagcaatacgggctga

SEQ ID NO: 7988 - DNA, 404 bp, Bos taurus
  Clone ID: 34-LIB34-031-Q1-E1-A6
gaggagctgaagctgctggacaagttcatagaagatgcccaggtgctgtactcctctgaggccttcccgaccaacttcagggattctgaagctgccaggagtctaataaatgactatgtgaagaataaaacccaggggaaaattgaagagctgttcaagtacctttccccgagaacagagttggtgctagtgaattacatctactttaaagcccaatggaagaccccctttgaccccaaacacactgagcaggcagagttccacgtgagcgacaacaagacggtggaggtgcccatgatgacccttgacctggaaaccccttacttccgggacgaggagctgggctgcacgctggtggaactcacgtacaccagcaacgacagcgccctcgtcatcctccccga

SEQ ID NO: 7989 - DNA, 418 bp, Bos taurus
  Clone ID: 34-LIB34-032-Q1-E1-A10
ctagagtctatgtccggctcatccaagagtgcaagtacctgaggagagagggcgagttctccccctgcttcacggagctgcagcgagacttcctgaagaatcgtccaaccaagctgaagagcctcatccgcctggtgaagcactggtaccaactgtgtaaggagcagcttggaaagccattgcccccacaatatgctctggagcttctgacggtctatgcctgggagcaaggatgcaataaaacaggattcatcacagctcagggatttcagactgtcttgaaattagtcctaaagtatcagaagctttgcatctactgggaaaagaactataactctgaaaaccctattattgaagaatatctgacgaagcaacttgcaaaacccaggcctgtgattctggacccggcggaccctac

SEQ ID NO: 7990 - DNA, 407 bp, Bos taurus
  Clone ID: 34-LIB34-032-Q1-E1-A6
cccacgcgtccgcattctaaattaatagtttacccattctaaatatccattataaatgtaatctagatgtaatagtttacagctaccaacccccaaactcctagtccatccctctccctccctggctcccctttggcaaccacaagtctcttctctatatgtctaggagtctgctttcattttgtagattcctattaaaatagcctccaagaagttcccaaactttatcatcattagaatgcacattcatagcacttcttttccatacatgtgcaccacttgtcttaaaattgacttaatagggcttccctggtggctgagtggtaaagaatccacctgccaatgctggagacactgtttgaagatcccacatgctgcggagcaactgagcccatgtgccacaacta

SEQ ID NO: 7991 - DNA, 446 bp, Bos taurus
  Clone ID: 34-LIB34-034-Q1-E1-A10
aatggcattctaaggtagggaaatgtgtttgttttttcttctataagatctccaaactcagagaaatatattgaaaaatgacattacatttcatttgcaaagaaagtgattttgaaatctttttttgttcagaggtgattaccaattcttaaggttcattctttgagtttcctaactaagaatattactggaaaatactcttacattgaatagattaaaatgctatttttaaaaatgtgtaacctcgtggtaatttagagatgctattaagtttttatctggcatttgttcttcaccccttttatttataataagccagtctgagaaaccaagaattcagcatcagtttcaggcttctatacaaagttagagtactgttagcacccatggcaataatgccagctcaggacaaagtgaatgctgtggccttatagttttcttaaaaa

SEQ ID NO: 7992 - DNA, 215 bp, Bos taurus
  Clone ID: 34-LIB34-035-Q1-E1-A6
gattgatatagacagcaggacggtggccatggaagtcggaatccgctaaggagtgtgtaacaactcacctgccgaatcaactagccctgaaaatggatggcgctggagcgtcgggcccatacccggccgtcgccggcagtcggagaggcgcgagagggacgggagcccggggcgcggggggcctcaaggaggggaaggggggtcatcccgttccc

SEQ ID NO: 7993 - DNA, 411 bp, Bos taurus
  Clone ID: 34-LIB34-036-Q1-E1-A6
cggacgcgtgggactgacttcgccttcagcctctacaagcagttggctttgaaggaccccaataagaatgtcatcttctcccctctgagcatctccatagccttggccttcctgtccctgggggctcatgaccacactgtgacagagatcctggaaggtctcaagttcaacctcacagagacccccgagacagaaatccaccagggcttccagcacctcctgcagacgttcaatcagcccagcaaccagctgcagctgagcgtgggcaacgccatgtttgtgtcagaggagctgaagctgctggacaaattcaggaaagatgccgaggctttttacgcctctgaggttttatccactaacttcaaggattctgaagctgccgtaaagcttatcaatgaatatgtgaagaat

SEQ ID NO: 7994 - DNA, 373 bp, Bos taurus
  Clone ID: 34-LIB34-037-Q1-E1-A10
cgacgcacgcgtccaaaccgtcacataaaataatttggtacccaaaaaaaaaaaaaaaaaaaaaaaaaaaaaaaaaaaaaaaaaaaaaaaaaaaaaaaaaaaaaaaaaaaaaaaaaaaaaaaaaaaaagaagaaaaaaacaaaaaataacaaagaaaaaataaaaaatacaaaaagaagaagaaaaaaaaatatcaaaggggggggatgttcaaaaggtttaacagtgaataggatgtaatcgacatgaaagaggacctgaacgggtgaaccgattttcaaacgggggcgcatattataaaaagcacgtggggggaaaaacagtgggctcaactcattgatgccctagctggaaggcccctgtttggacgggg

SEQ ID NO: 7995 - DNA, 338 bp, Bos taurus
  Clone ID: 34-LIB34-037-Q1-E1-A6
aaggctacaagcccgtgaaggaggtcctgcttgactacaagaacgagttttctggcagaggagaaaaccctgggttccagatgcacaagaacaatgggatcagtttcaacaatggatcaacctgacgggacacccgacggttctcgttgaccaccctccgtgacttagggatgggaaaacagggcaatgagcagcggatccagagggaggcccagttcctgctggaggtgctcaagaagaaccagggccagcccttttgacccaagttttgtcgtccggctttgcaccttacaatgtcaaccctgacatcctcttccacaaacgctttgactataaag

SEQ ID NO: 7996 - DNA, 427 bp, Bos taurus
  Clone ID: 34-LIB34-038-Q1-E1-A6
tttgtcaaagaacttaggcaacttcctggtttggctgcttggaggctgcttctcctttactgggaagatgcaggatcacggcagcctcccctcagttctggatgtgcatgtcaacgttgctgggagaagctctgtgctgggaaaagtgaaaagcaggaaggccagatggtccgtgaggccctcggacatgtccaacaaaactttcaatcccatccgggccattgtggacaacatgaaggtgaagccaaatccaaacaagaccatgattgctttgtcgattggggaccctactgtatttggaaacctgccgacagatcctgaagttacccaagcaatgaaagatgccctcgactcagggaagtttaatggctatgtctcctccattggctacttatccagtcgggaggaagttgcttccttattacac

SEQ ID NO: 7997 - DNA, 432 bp, Bos taurus
  Clone ID: 34-LIB34-039-Q1-E1-A6
gtttttgaaaagtggagcatgcacaggtggagggcaatttagtgtttccttgtcaaatggaaaacaagattcagaaggaattgttgctgtaaaacttgcagacctagatacaaaaatgtttgtgtgtggagacagttggagcattactgaggccaacgtggcctgcattgaccgtggatttcaactgggtgctcttgatactcatagaagagatcctgatccaaattctgctgaatgtctgcatgtgcgttgtcgaggattagagaccagtttggctgaatgtactttcactaagggagtacacaattcggaggggttggctggtgtggtgtgttacacagagagtgcagctcctccaaaaaaggactcctttcaatgtgtgaatgggaaacgcattcctcagaagaaggcctgtgatggtgtcaatgactg

SEQ ID NO: 7998 - DNA, 424 bp, Bos taurus
  Clone ID: 34-LIB34-040-Q1-E1-A6
agcccagctacccggctgctcccacgtgttctccccaacccccaaagctggcaaatctcagacaggagtggagacccaacagggccagaattcccagcaacttttgcgtctgaggaaggccagttaccatgaatgcaagcgagttccgcaggcgggggaaggagatggtggattacgtggctgactacttggagggcattgaagggcgccaggtgttccctgacgtggatccaggctacctgcgccccctgatccccaccaccgccccgcaggagccagagacatttgaggccatcatcgaggacatcgagaagatcatcatgccgggggtgacccactggcacagtccctacttcttcgcctacttccccacggccagttcgtacccggccatgctcgcggacatgctgtgtggggccatcgg

SEQ ID NO: 7999 - DNA, 398 bp, Bos taurus
  Clone ID: 34-LIB34-041-Q1-E1-A6
cggacgcgtgggctggcgctcttcaggaggactgttgctttctttctgtctgcataaaccttgtttgtgttctgttgtccagcaggcaaaaacccccaagcagcagggagctggggatgcagaagaggaggaggagtaacaagcgtccatagagaactcgcgcgctggttccatcttctccgcacgacttgtcatggtgcagccctgcccctcgggctctgtgggcaggggcaacctttcagattttaacgttttctaggttatggccattttgtgtcttttgagattgtgctgtgggagtttaggggtttgagggagggttggcagggaggctgttgagaatgtttcagctttagctgctgcctttgacagcacagaagtgtacattagggcccctc

SEQ ID NO: 8000 - DNA, 343 bp, Bos taurus
  Clone ID: 34-LIB34-042-Q1-E1-A10
ggatgatctggcgaggctcctggtacacactgaataagatgtccatgaagattaggtcttacgtcacagagcaatagaaggcacaccacacagaagtattattcttccgagatgtagtagcatttttatatatcatgttatcagaaattttttttcagaccttatatctcgctagagctatcaaaatgtagttggtgtgagttttcagagaaagtttttaggacatatgacattatagacagcacatggttttcgttcatatttgtcatttccattgtgttccacgaagtaactaaaaggaggattgtggacagtcagtgtacagaagttccaatccagtgga

SEQ ID NO: 8001 - DNA, 422 bp, Bos taurus
  Clone ID: 34-LIB34-042-Q1-E1-A6
ataaaaatggactcaagatatgtgaaccttgtgggggtctgtgcccgaaagcctgtgaggggacaggctccgggagccgcttccagactgtggactcgagcaacattgatggattcgtgaactgcaccaagatcctgggcaacctggactttcttatcactggcctcaatgggttagagatcctgttttcatcctctgatcccccaccccagcagccccctcacagttcattgcactggttcaagccttcatatggggagctgatcaggaggttagattagaaaatcttagaggtcacaaaggacctggcagtgcttaatcgcccagggcttgaatcccctcagacaccccggagcaacccagccacctgcatggcaagggacacggacagagtgtcctccttcttaaaggcttctaaatat

SEQ ID NO: 8002 - DNA, 382 bp, Bos taurus
  Clone ID: 34-LIB34-043-Q1-E1-A6
ggcaatatccaccctcccaacacggaaggaaacattggcatcaggatcaagcccaccaggcccataagcctcttcatgtactatgagaataaccgatataaaacagctgaagtggcatgtggggacttttataacactggggacagagcaactattgacgaagacggctacctctggttccttgggaggagtgacgatgtcatcaatgcatccggataccgcgttgggccagcagaagtagagaatgccctggcacagcacccagcggtggctgactctgctgtggtgagcagcccggatccggttcgacgccacgtagtgaaggcatttattgtcctgaacccggaattctctagccgtgacccaggcgagctcaccaaag

SEQ ID NO: 8003 - DNA, 202 bp, Bos taurus
  Clone ID: 34-LIB34-044-Q1-E1-A6
aacttcatcaggtaagatttgaaatagctcaactggaattctaccacctccactagctttgttcgtagtgatgtttcttcacgcccacttgaagtcacattcgaggatgtctggctctacgtgagtgatcacaccatcgtgattatctgggtcatgaagatcttttgtgtacagttcttcagtgtattcttgccagtctctt

SEQ ID NO: 8004 - DNA, 323 bp, Bos taurus
  Clone ID: 34-LIB34-045-Q1-E1-A6
gacacatcgccgggacctgctgccctctcgccggcccggtcagtcgccgggccggctcaaccgcggacgctccgcccggctcccgcacgcgcccatggcggcccccggcggcgcccggctacggtcgctgctcctgctgctgttcgcaggcctcgtgcacggcgcatcagcaatgtttgtggtgaagaatggtaacaggatcgcctgcatcatggcctacttctctgccagcttcctgaccaactactacaccagtagtgggccccattataactccattgatctgctagctggtgatgtagtgtcaaacagcatctcttgtg

SEQ ID NO: 8005 - DNA, 385 bp, Bos taurus
  Clone ID: 34-LIB34-046-Q1-E1-A10
gacccacgcgtcaggtccttctgatcaagggggacaaattctgggtatatcctcctgagaagggggaggaatatccaaagttgctccaagagaagtttcctggaatcccattcccactggatgcagctgtggaatgtcaccgcggagaatgctctcatgagggtgtcttcttcttccaaggcaaccacacgtggttctgggacttctctacaaaaaccatagagaaacgttcctggccagccgttgggaactgctcctcgggcatacgatggctcaagcgctactactgcttccggggtaacagattcctgcgcttcgagcccgtcacgggagaagtgaattcgagttatcctcgggatgtccgagattactttaggtcctgccc

SEQ ID NO: 8006 - DNA, 401 bp, Bos taurus
  Clone ID: 34-LIB34-047-Q1-E1-A6
aagacgcgtgggcgctgccgtacttttgggatcactttgataaggatggctggtccctgtggtactctgagtatcgcttccctgaagagctcacccagaccttcatgagttgcaacctcatcactggaatgttccagcgattggacaaactgaggaagaatgcctttgccagtgtcattctctttggaaccaacaatagcagctccatttctggggtctgggtctttcgaggccaggagcttgcttttccgctgagtccagattggcaggtggactacgagtcatacacatggcggaaactggatcccggcagcgaggagacccagacgttggttcgagaatacttctgctgggaaggggccttccagcatgtgggcaaagccttcaatcagggcaagatc

SEQ ID NO: 8007 - DNA, 418 bp, Bos taurus
  Clone ID: 34-LIB34-048-Q1-E1-A10
gcggaggcatccgagttccggacacggtcggcgtgaggaccaggcgggcgcggggcgatgctgcgggtgcggtgtctgcgcggcgggagccgcggtgccgaagcgctgcactacatcgggtctcggcttggaagaactgtaacgggatgggtgcagcgaactttccagagcacccaggcagctacggcttcctcccggaattcctgtgcagctgatgacatggccactgatcctctgcccaaggactgccctgtctcctctttcaacgaatgggaccccttagaggaagtgatcgtgggcagagcagaaaatgcctgtgttccaccgttcactgtggaggtgaaggccaacacatatgacaagcactggcctttttaccaaaagtatgggggcagttattttcccaaagatcatttgc

SEQ ID NO: 8008 - DNA, 176 bp, Bos taurus
  Clone ID: 34-LIB34-048-Q1-E1-A6
agcgggagtagcggggaggctggcgccgacaggaggcccgaggccgcacaggccccagccagacccctcaggaggacatcccgacctttgtttacaacgctctgttaggaaaagtaaccaatgaataaaggacgttcggcgcgcaaaaaagaaacaaaaaaaaaatcaaaaaaata

SEQ ID NO: 8009 - DNA, 387 bp, Bos taurus
  Clone ID: 34-LIB34-049-Q1-E1-A10
atgagacagagctggccatgcaccagtctgtggagagtgacatacacgggctccgcaaggtcatcgatgacaccaatgtcacccggctgcagctggagactgagatcgaggctctcaaggaggagctgctcttcatgaagaagaaccatgaggaggaagtaagggtctacaaaaccagattgccaactctgggctgaccgtggagttggatgcccccaaacctcaggaccttagcaagatcatggcagacatccgggcccagtatgacgagctggctcagaagaaccgagaggagctggacaagtactggtcccagcagattgaggagagcaccacagtggtcacctcgcagaccgctgagataggagctgctgagatgaccctcac

SEQ ID NO: 8010 - DNA, 438 bp, Bos taurus
  Clone ID: 34-LIB34-049-Q1-E1-A6
aactgcctcgagcatggagctggtggctcttccatccccagaccagccaagcctgtgagtgacaccccagacagaggaaccagagccatgcggagtctcagcggactgctgttgttactgactgcctgcctggcggtaaacgccagctccgtgcccacattgcccgatgacattcaagtgcaggagaacttcgacctgtctaagatctatgggaagtggttcaatgtggccgtgggctccacctgcccatggctgaagaggttcaaggagaagatgaccatgagcacagtggtgttgagagcggggccgacgagcaaggagatcagcgtcaccaacactcacaggcggaaaggtgtctgtgaatcgatctctggtacttatgagaaaacaagcactgaagggaaatttctctatcacaaagccaaggtgggatatcac

SEQ ID NO: 8011 - DNA, 434 bp, Bos taurus
  Clone ID: 34-LIB34-050-Q1-E1-A6
gacctcgcctaagctgtgtctctgactcatttctgactttaggcaagttcttccaatgggaaaaatggcgaagatgtttagtttcatccttgtcaccactgctctggtaatgggcaggggaagctcggctctggagaactgcctccaggagcaggcgcggctcagagcccaagtgtacctgctggagacccgggtcaagcagcaacaagtcaagatctcgcagcttttgcatgagaaacaagtccagctccttgataaaggagaggagaatagtgtcattgaccttggaggaaagaggcaatacgcagattgttcagagattttcaatgacgggtacaagcagagtggattttataaaatcaaacctctccagagcccagcagaattctctgtttattgtgacatgtctgatggaggaggatggactgtaattc

SEQ ID NO: 8012 - DNA, 236 bp, Bos taurus
  Clone ID: 34-LIB34-052-Q1-E1-A6
gcaaagggtcatgcagtagagctttagaacataaggtagatctggaggactataaaaatcagcagaagcaacttgaacaggttattgccataaacctacttccctctagagacattcaatacttaccattgataaaaatgagtacaattacaggccctgttcccagagagttcaagagccagctccaagaggcccctctagaatggaaggcactgctggaaatgcagcagacgaaa

SEQ ID NO: 8013 - DNA, 237 bp, Bos taurus
  Clone ID: 34-LIB34-054-Q1-E1-A6
caaggatgggcgtcctctgacggatgatgaagtagcaggcatgcttattggactgctcttggcagggcagcatacttcttcaactaccagtgcctggatgggcttctttttggccagagacaaaacacttcaagaaaaatgtttcttagaacagaaaacagtctgtggtgagaatctgcctcctctgacttatgaccagctcaaggatctcaatttacttgatcgctgtataaaaga

SEQ ID NO: 8014 - DNA, 352 bp, Bos taurus
  Clone ID: 34-LIB34-055-Q1-E1-A6
cattacctcactcctgcaatcagtatatccttcaggaatgattgttgagtaccggtgtcaggcctacgatgaacttcggggaaacagaaacgtagtatgtcggaatggagagtggtcacaactaccaaaatgcttagaggcatgtacagtttcagaagaaacaatgagaaaacatcacatacagttaagatggaaacaagataaaaaaatttactctaaaacagaggatactattgaatttatgtgtcgatatggttatcgtgaactgacaccaaaacatacatttcgagcaacttgtcgggaaggaaaggtggtgtatcctcgatgtggataaaacattgactaaatgcag

SEQ ID NO: 8015 - DNA, 345 bp, Bos taurus
  Clone ID: 34-LIB34-056-Q1-E1-A10
gtcaggttggacttggaaacaatgtcaacaagagatttgctcaacgcattgaaggaagtcattaataatccttcctacaaagagaatgtgatgagattatcagccattcaacatgatcagcctatgaagcccttggacagagcagtcttctggatcgagtttgtcatgcgccacaaaggagccaagcacttgcggccagctatccatgacctcacctggttccagtaccactctctggatgtcattgggttcctactggcctgtgtggcaactgccatatttgtcatcacaaagtgttgtctattttgttgcttgaagtttgctaaattaggaaagaaggagaaa

SEQ ID NO: 8016 - DNA, 367 bp, Bos taurus
  Clone ID: 34-LIB34-056-Q1-E1-A6
cagtccttctgctgatctggggtctgtcactgagcccagtgacggagcatgctacgttctttgactccacgccatccctgtgggccgaggccggctcactgctggcaccctgtgccgatgttactctgacctgccagagcccgctgccgtcccatgagtttcagctcctcaaggatggcttgcgttaagaacctgtgcacctggagtcgcctgctcatgagcacatgttctcactgggaccagtgatcagcaccacccggggcctctaccgctgcagctacaaaggcatcaacgattggatcagcccgagcaatctgatggaagtgatcggaacagagcccctgctcgcagcctcgatctcatccag

SEQ ID NO: 8017 - DNA, 230 bp, Bos taurus
  Clone ID: 34-LIB34-058-Q1-E1-A6
acctccagattgagtcatgggagtttgtgtggaagggccatgcctgggcccggcagttgatgtcagagaggtggaaggatgcccccagtcccgtggatgctgcattccgcaatgatcgtaacagtgtccttctgatcaagggggataacgtcggggtatatcctcctgagaagggggaggaatatccaaagttgctccagtagaagtttcatgcaagtctcattcccact

SEQ ID NO: 8018 - DNA, 207 bp, Bos taurus
  Clone ID: 34-LIB34-059-Q1-E1-A10
aacggaacggtctcccagaagcaatttagaatgactggtaaaacgaaatatacccaaagctcgcagcaacaaaaaaggatacagttctttctggccagcttcctgcttctgccctttctgctcgtctgcatcgtagagtctctcctgaagctttttattcctaagaagagaaaatcagtcaccggagagattgtccttattaccgga

SEQ ID NO: 8019 - DNA, 192 bp, Bos taurus
  Clone ID: 34-LIB34-059-Q1-E1-A6
tgaacttcctggaggtcatgtccctggagaacaacggacgtgtccagagaatcgacgaggatcatgatgctacccagcagctgcagggtttctatgagcaggtagccaaccccctcctgagggatgtggagttgctgtacccccgggaagccgtctcagacctgacccagcagggccattatacagtactac

SEQ ID NO: 8020 - DNA, 238 bp, Bos taurus
  Clone ID: 34-LIB34-060-Q1-E1-A6
cggacgcgtgggcggctgagaaggcagcggtggcggcagcgacgacggcggctctggaggccgcagtcccggtcctggcttcggccccagccccaccatggtgacgcttgctgagctgctggtgctcctggccgccctcctggccacggcctcgggctacttcgtcagcattgacgcgcatgcagaggagtgcttcttcgagcgggtcacctcgggcaccaagatgggcctcatcttt

SEQ ID NO: 8021 - DNA, 189 bp, Bos taurus
  Clone ID: 34-LIB34-062-Q1-E1-A6
ggaggaaccactccagggaaaggaggaaagacgcacctgggcttaccagtctttaacactgtgaaggaggccaaagaacagactggggcgacagcatctgtcatttatgtccctcctccctttgctgctgctgccattgatgaagctatcgaggcggaagtgtccctggtcgtgtgcatcaccgaaggc

SEQ ID NO: 8022 - DNA, 273 bp, Bos taurus
  Clone ID: 34-LIB34-063-Q1-E1-A10
tcggcatgttgcgcgccgttgcgcttgccgccgcccgcctcggaccccgccagggacgccgcctgctgtccgccgccacccacgccgtgccgacccccaaccagcagcctgaagtcgtgtacaagcagatccatataaacaatgagtggcatgatgccgtcagcaagaaaaccttccccacggtcaatccatccactggggatgtcatctgtcacgtggctgaaggggacaaggcacacgtggacacagcagtgaaagctgcccgggccgcat

SEQ ID NO: 8023 - DNA, 392 bp, Bos taurus
  Clone ID: 34-LIB34-063-Q1-E1-A6
tcccggctccacccacgcgtcagcaacggacccaggctggggaaactggaagaatcggaggccaagctcaggcccaggccaggctgggcgggaaaatggctggagagggcatatagctcagcaccaggatgtccttagaagatcagaacatagacaacaggctctttgagactgtattcaggcacttcaaaagacacaaggtgcagatttcaaatgcgataaaaaagacatttcctttctttgaatgcctccatgacaacgaactcatcaccagtaaaatgtatgaagactgtcaagattcttgtacaaacctggtccctgtatcaagagtggtgtacaatgttctcagtgagctggagaagacgtttaacccatcgcttctggaagctgtg

SEQ ID NO: 8024 - DNA, 210 bp, Bos taurus
  Clone ID: 34-LIB34-065-Q1-E1-A6
gattgatgctggcagccgttacgagagtgagaagaacaacggggctggctactttgtggagcatctggctttcaagggaacaaagaatcggcctggcaatgccttggagaaggaggtggagagcatgggggcccatcttaatgcctacagcacccgggagcacacggcttactacattaaggcgttatcaaaggacctgccaaaagctgt

SEQ ID NO: 8025 - DNA, 228 bp, Bos taurus
  unsure (192): unsure at all n locations; Clone ID: 34-LIB34-069-Q1-E1-A10
acgcctcaacatagaccccagctggatgggtagcacacgccccaaccccgcccacttcatcatgactgacgacgtggatgacatggatgaggagattgtgtcgcccttgtccatgcagtatgctgcctggctgatggggcgtaggttcagtgaccgctctctctgctcagcatccgccggctcggacgatcnagtccctctggaaatacccgggctcccaagccctgc

SEQ ID NO: 8026 - DNA, 403 bp, Bos taurus
  Clone ID: 34-LIB34-072-Q1-E1-A6
acgcgcgctcggacccgcggccaggcttgcgcgcagctcccgacaggcggactcccgagcgagatggagtgggtgtgggcgctggtgctactggcggcgctgggcagcgcccgggcggagcgcgactgccgggtgagcagcttccgagtcaaggagaacttcgacaaggctcgcttcgccggcacctggtacgccatggccaagaaggaccccgagggcctgtttctgcaagacaacatcgtcgccgagttctccgtggacgagaatggccacatgagcgccacggccaagggccgagtccgtctcttaaataactgggacgtgtgtgcagacatggtgggcaccttcacagacactgaggaccctgccaagttcaagatgaagtactggggcgtagcgtcct

SEQ ID NO: 8027 - DNA, 375 bp, Bos taurus
  Clone ID: 34-LIB34-073-Q1-E1-A6
agatgaatctggggatcatgatgaggccacaccctcggaattctgcattgaggccctgggagcctccgtagtacagcggaatgagtcgtgctgagatgttagcaactacccgggacactactgcccgttcttctcacatagcgcctgcatggacggtcagaacctcgatgttcaccatgctgctgggggtctcgctgcatcgagagcagcccgtgaacggtgaggtgtggagtgatgacatccgcatacgggccgtggttcatgaatcacacggaatgctgggacagatctacagtgaccttcttcagctgtcagggaaactaaaacactgatgccacatcatcatccgatgaggtcggttaaaggatgacgggg

SEQ ID NO: 8028 - DNA, 425 bp, Bos taurus
  Clone ID: 34-LIB34-074-Q1-E1-A6
aaggaaggcagagcaactggacctcgcctaagctgtgtctctgactcatttctgactttaggcaagttcttccaatgggaaaaatggcgaagatgtttagtttcatccttgtcaccactgctctggtaatgggcaggggaagctcggctctggagaactgcctccaggagcaggcgcggctcagagcccaagtgtacctgctggagacccgggtcaagcagcaacaagtcaagatctcgcagcttttgcatgagaaacaagtccagctccttgataaaggagaggagaatagtgtcattgaccttggaggaaagaggcaatacgcagattgttcagagattttcaatgacgggtacaagcagagtggattttataaaatcaaacctctccagagcccagcagaattctctgtttaatgtgacatg

SEQ ID NO: 8029 - DNA, 386 bp, Bos taurus
  Clone ID: 34-LIB34-076-Q1-E1-A10
gtgagtcgtattagtgcagctgctggagaaagccaaccaggaggagctgctgcctgaagggagcatcaccctcatcatcctcctcactgatggcgaccccactgtacgggagaccaacccttcgaacatccagaagaacgtgcggaaagctataaatggccagcatagtctcttctgcctgggctttggcttcgatgtcagctacgccttcctggagaagatggcactagagaacggcggcctggcccggcgcatctatgaggactcagactccgccctgcagctgcaggacttctaccaggaggtggccaacccactgatgacgtcagtggcctttgagtacccgagcaatgctgtggagtcggtcacgcaggacaccttccggg

SEQ ID NO: 8030 - DNA, 433 bp, Bos taurus
  Clone ID: 34-LIB34-076-Q1-E1-A6
gcaatgcgcgtggctgtggccggagccaggctcagtgttgtagtgagaagtctccggggcgcggggcgcagcttgtgcacccagcctgtatcggttaacgaacgcatcgagaacaagcggcaagctgcactgctgggaagagggcagcgccgcattgacgcgcaacataagcgaggaaagctgacagccagagagcggatcagtctcttgctggaccctggcagttttgttgaaagcgacatgtttgtggaacacagatgtgcacattttggaatggctgctgataagaataagttccctggagacagtgtggtcactggacgaagacgaatcaatggaagactggtttatgtcctcagtcaagattttacagtttttggacgtagcctgtctgggacacatgcccaaaagatctgcaaaatcatggaccaag

SEQ ID NO: 8031 - DNA, 307 bp, Bos taurus
  Clone ID: 34-LIB34-077-Q1-E1-A6
ccgggtgactcacacgtccgcacagacctacttcacatcagccactataattattgctattccaaccggggtaaaagtcttcagctgattggcaacacttcatggaggtaatatcaaatggtctcctgctataatgtgagccctaggctttatttccttatttacagtagggggttaaactggaattgtcttagcaacctcttccctcaaaatggtccttaacaacaaatacaactttgcccaaaatttcaataaggtttaaccataaggactggtatttgcaataaaaggggaattggtcaattga

SEQ ID NO: 8032 - DNA, 421 bp, Bos taurus
  Clone ID: 34-LIB34-078-Q1-E1-A10
tatagtaagtcgtattagctcatctatattatgaattttttcaagaatgctgcgaagctgaagataatggtgcctgcctgcttgcaaagattgaaactgtcagagaatgagtactgccttcagctgctagatcgacacacaggtgtgccagtgttcagaaatttggcgaacgcgctttataagcatggccagtagcacgccagagtcagtgatttcccaacgctgagtttgtagacgttaccatactagtgacagatctcacaacagtccattcgggatgctgctatggcgacctacttgaatgcgcatatgacaaggcagatcatgccacgtacatatgtgatcatcgtgatacaatctccagtacactgaacgaatgctgtgatggacctttgttggatttatcccattggattactga

SEQ ID NO: 8033 - DNA, 379 bp, Bos taurus
  unsure (252): unsure at all n locations; Clone ID: 34-LIB34-078-Q1-E1-A6
gtactacgggcccgccgacaccatgagttggtcctcgcaccctccgagtgtaatcttctacattctttcattgctttcttcagcatgcctggcatatgttgctacccgagacaactgctgcatcttagatgaaagatttggtagttattgcccaactacctgtggaattgcagatttcctgaataattaccaaaccagtgtagacaaagatctacgaactttggaaggcatcttatatcaggttgagaacanaacatcagaagccagagagctggtcaaagcaatccagatcagctttaaacctgatcaaccatcaaagccagataacatagagagtgctaccaggaaatccaagagtatgatggaagaaattatgaaa

SEQ ID NO: 8034 - DNA, 382 bp, Bos taurus
  Clone ID: 34-LIB34-079-Q1-E1-A10
cacgaatcgaagtgccacatccgatctgtacctcattcaccctgaagattctagcatactatactatagtagactgtaatatgaaaacggataaatgaggatggacagtaattcaaaaccgtcaaaagggtaatgttgactttggcacgaggatgcgatcgatagatccagggacttggtcatattgctactaacgcacaatgcaagacatactgtggtgtaacacctgaataatggatctgaaatgacagacatagccagcttaccaatatgggacccatacagcttttgactaaaatggatagactgcgaaaggcgataacgtgacagcactctattaatgatttacagtacagaatgatgccaacacatatcaactgtc

SEQ ID NO: 8035 - DNA, 420 bp, Bos taurus
  Clone ID: 34-LIB34-080-Q1-E1-A6
gccctcctgctgctctggggtctgtccctgagcccagtgactgagcaggcgacgttctttgaccccaggccatccctgtgggccgaggccggctcaccgctggcaccctgggccgatgtgacgctgacctgccagagcccgctgccgacccaggagtttcagctcctcaaggatggcgtgggccaggaaccggtgcacctgtagtcccctgcccatgagcacatgttcccgctgggaccagtgaccagcaccacccggggcctctaccgctgcagctacaagggcaacaacgattggatcagcccgagcaagctggtggaagtgaccggagcagagcccctgcccgcagcctcgatctcaaccagtcccgtgtcctggatcacacccgggctgaacaccacactgctgtgcctctcggga

SEQ ID NO: 8036 - DNA, 431 bp, Bos taurus
  Clone ID: 34-LIB34-082-Q1-E1-A10
aggaattttgatgaaatagtgaataatgaaaataaagatgtgctgattgagttttatgctccttggtgtggtcactgtaagaatctggagcctaagtataaagaactgggagagaagctcagaaaagatccaaatattgtcatagccaagatggatgctacagccaacgatgtgccttctccatatgaagtcagaggttttcctaccatctacttctctccagccaacaagaagcaaaatccaaagaaatatgaaggtggccgtgaattaagtgattttattagctatctaaagcgagaggctacaaacccccctgtaattcaagaagaaaaacccaagaagaagaagaaggcacaggaggatctctaaagcagcagccaaacatcatatcactttgtcaaaggacttttccaccagagatgggaaaacaa

SEQ ID NO: 8037 - DNA, 434 bp, Bos taurus
  Clone ID: 34-LIB34-082-Q1-E1-A6
aacagaaggaggttaagcagcttgccgttcttggtgcagggctgatgggagccggcattgctcaagtctccgtggataagggcctacagaccatacttaaggacactacactgcccgcgctgggtcgaggacagcagcaggtgttcaaaggattgaatgataaagtgaagaagaaaacactaacatcatttgaaagggatgccatgttcagcaacttgattgggcagcttgattaccggggttttgaaaaggctgacatggtgattgaagccgtttttgaggacctcaaccttaagcacagagtgctgaaggaggcagaagcggtgattccagatcactgtgtctttgccagcaacacgtctgctcttccgatcggtgagattgctactgtcagtaaaagacctgagaacgtgatcggcatgcactacttctct

SEQ ID NO: 8038 - DNA, 360 bp, Bos taurus
  Clone ID: 34-LIB34-083-Q1-E1-A10
aggaaactttggcacaatgaagtgggtgacttttatttctcttctccttctcgtcaactctgcttattccaggggtgtgtttcgtcgagatacacacaagagtgagattgctcatcggtttaaagatttgggagaagaacattttaaaggcctggtactgattgccttttctcagtatctccagcagtgtccatttgatgagcatgtaaaattactgaacgaactaactgagtttgcaaaaacatgtgttgctgatgagtcccatgccggctgtgaaaagtcacttcacactctctttggagatgaattgtgtaaagttgcatctcttcgtgaaacctatggtgacatggctgactgctg

SEQ ID NO: 8039 - DNA, 391 bp, Bos taurus
  Clone ID: 34-LIB34-083-Q1-E1-A6
acagccactccaggaaccaaggcgccatgcagccccggctgctccttcttgctgccttcctggcgctcctggtcttgcctgaagctaccaaggccgaggagggatcccttctggacaagatgcagggctatgtgaaggaggccaccaagaccgccaaggatgccctgagcagcgttcaggagtcccaggtggcccagcaggccagagactggatgactgagagcttcagctccctgaaagactactggagctcgttcaagggcaagttcactgacttctgggaatctgccaccagtcccacacagtctccaccctgaggccatctgagatctcagtaccccaagtccacctgcctatccatcctactagctccttgggtccagcagcctcc

SEQ ID NO: 8040 - DNA, 430 bp, Bos taurus
  Clone ID: 34-LIB34-084-Q1-E1-A6
aacgccatccagcgtcctccaaagattcaagtgtactcaagacacccaccagaagatggaaagccaaattacctgaactgctatgtgtatgggttccatccaccccagattgaaatcgatttgctgaagaatggggagaagattaaatcggagcagtcagacctgtctttcagcaaggactggtctttctacctgctgtcccacgctgagttcactcccaacagcaaggatcagtacagctgccgagtgaaacacgttactttggaacaaccccggatagttaagtgggatcgagacctgtaagcagcaccatcgaggtttgaagatgcctcatttgggttggactaattccaaattctgttttcttgctttttaacactgatagactttgatgctttgtgcacataaataagaaactgtattgatgtta

SEQ ID NO: 8041 - DNA, 402 bp, Bos taurus
  Clone ID: 34-LIB34-085-Q1-E1-A10
agatgaaacactgataacaacacatgaatcaacaattcgatttttgcaagaaatatataactcaaatagtcaaaaaatcgttaacctaagagataaagtggtccagcttgaagcaaactgtcaagagccttgtcaagatacagtgaaaatacatgatgtaactgggagagattgccaagatgttgccaataagggggccaaagagagtggactttactttatcagacctctgaaagctaagcagcagttcttagtctactgtgaaattgatgggtctggaaatggatggactgtgtttcagaagaggcttgatggcagtctggatttcaagaaaaactggattcaatataaagaagggtttggacatctgtctcctactggaaacacagaattttggctggg

SEQ ID NO: 8042 - DNA, 413 bp, Bos taurus
  unsure (285): unsure at all n locations; Clone ID: 34-LIB34-085-Q1-E1-A6
agggcgaaggacgcggtttctggaggcgaagaacgcggttggccaatcgcaagccagaagatgaaggttctgtgggttgccgtggtggtcgcgcttctggcaggatgccaggcggatatggagggagagctggggcccgaggagcccctgactacccagcagccccgggggaaggacagccagccttgggagcaggcgctgggccgcttctgggattacctgcgctgggtgcagaccctgtctgaccaggtgcaggaggagctgctcaacacccaggtcattcangaactgacggcgctgatggaggagaccatgaatgatgtgaaggcctacaaggaggatctggagggacagctaggccccatggcccaggagacacaggcccgcgtgtcaaaggagctgcaagcagccca

SEQ ID NO: 8043 - DNA, 455 bp, Bos taurus
  Clone ID: 34-LIB34-086-Q1-E1-A6
cggaagcgtgggcggcgactatccccttattccagttggtaaattggtcttaaaccggaacccagttaattactttgctgaggttgaacagttggcttttgacccaagcaacatgccgcccggcatcgagcccagccctgacaaaatgctccagggccgcctttttgcctatcctgacactcaccgccaccgcctgggacccaactatctccagatacctgtgaactgtccctaccgtgctcgagtggccaactaccagcgtgacggccccatgtgcatgatggacaatcagggtggggctccaaattactaccccaatagctttagtgctcccgagcatcagccttctgccctggaacacaggacccacttctctggggatgtacagcgcttcaacagtgccaacgatgacaatgtcactcaagtgcggactttctatttgaaagtgctgaatg

SEQ ID NO: 8044 - DNA, 316 bp, Bos taurus
  Clone ID: 35-BOVMS1-001-Q1-E1-A4
acgcgtccgacagaggattctcctctggatccaagatcagctgcgacttgatctaaggttgaatcacctgatacatatacagcaaactgcacttcactgttttttatctgcttatatatgcacgtaggacgacgcttatattaccggtctaatacctttctagaaacatgacctatctggatatgccgtctgctcacagtagtaggcacagctcttacatgatacgtcctaccatgactgaaaatatcattctaaggaccatgaatcagcaccatcctcttagcagcagtcgcagatatccgcacagatttagtcg

SEQ ID NO: 8045 - DNA, 434 bp, Bos taurus
  Clone ID: 35-BOVMS1-003-Q1-E1-A4
tttcaacattggcggggcccggttacttcaactatcatgacttgggcatctgcaaagctgtggctatgctgtggaagctctgaccttttagacttaataccttgagaattgattgtacacctccttgcctctgctctgtcatgccatttcaactcacaataagaaggaaaaacattggtgagacaaacctcttctcctaatcacctgattgtttttagaatttaatctttgaagaaagatttgagagaagttgtatcttaagaaattataagactgaattttgtattctggggagctaatggagtgtctcagcttttcataagtctcatagtataactgaacattatatatgagctttttgccttttaattgatcaaactcttaaagggaattcagctttattactctcgatatctgatcaaacgtctgtgttt

SEQ ID NO: 8046 - DNA, 280 bp, Bos taurus
  Clone ID: 35-BOVMS1-004-Q1-E1-A4
agacttccccaactaaatgtatactctgagaaaacaagcccatacgaatgtggatttgaccccataggatcagcccgccttcccttctctataaaattctttctggtagccatcacattcctcttatttgacctagaaattgcactcctcctaccactgccatgagcctcacaaacagcaaatctaaacacaatgcttaccatagccctcttcctaattatcctcctagctgtaagcctagcctatgagtgaactcaaaaaggactagaatgaaccgaat

SEQ ID NO: 8047 - DNA, 353 bp, Bos taurus
  Clone ID: 35-BOVMS1-005-Q1-E1-A12
gcagaaaacaggtcactgacatactcatgcaggatggcgagtcattaatcatcccaggtgagactgatagtgcagagtatcagattaacctctgggagctctccacttcaggctccatatcaacggccatggtgtaatacatggacacggttatgcctgcatcagacagcacaactggcgttagctcattatggatgtcacctggtataagatatcgttgctaaaggcatttcacactatgagtccacatcatctccggaaattgacaatggcagtcatagcattcaaaggtgttcaattctgcgggaagtgggtaacaattttggaaaccttatgcaacaaggattctacac

SEQ ID NO: 8048 - DNA, 403 bp, Bos taurus
  Clone ID: 35-BOVMS1-005-Q1-E1-A4
tttcatttgagcaatttactataggatttatatttattattaattgttatttaatttttttccaattttacctgtattaccaaactgggttctccaataatgtccaaattgtaatgttgcctgcttcaacataaagtgtatttggcaataatattataaacccttacaaattttatgcatgtatctactacatccttcaattctcactagaaaaatctcttgaaaccaaatggattaatttatggctatttataatttgctttgacatctcactgctgcaaatttttttaaatgatgaaatttgcctttataatgtaaattgtgatttttgttttacatgtgggtttctatagttttaatttttcagcttttaagatacaacaggttttgtgtaatttggtat

SEQ ID NO: 8049 - DNA, 460 bp, Bos taurus
  Clone ID: 35-BOVMS1-006-Q1-E1-A4
ggtcggcatcatgggtcggccacgcgtccgggaagaatagaatggcactttttcaacatctgacttgtgtgcttccaattctggatagtctcctaactgccagggtgattagtgaacaagaacatgatgttattaaacagaaaacacaaacatctttacaagcaagagaactgattgatactattttagtgaaaggaaattttgcagccaccatattcaaaaactctctacaagaaattgatcccatgttatacaagcgtttatttgtgcaacaagacataaaatacattcctacagaaaatgtttcagatttaccaatggaagaacagttgaggagactacaagaagaaagaacatgtaaagtgtgtatggacaaagaagtgtccatagtgtttattccttgtggtcatccagtagtttgcaaagactgtgccccttctctaagaaaatgccctatttg

SEQ ID NO: 8050 - DNA, 328 bp, Bos taurus
  Clone ID: 35-BOVMS1-007-Q1-E1-A4
caccacgtcacacctgccccctatccatcatcgttcctgcaggtgcagcatgctatactgtctaactgtgtgtacacagaatgggtacctcattttgatatacagatcacaattacctgacgaatgttgtggaaaacttgtagcattgaactgcagccgtgcagtttcgctgcgtcttcacttgtgttccctaaatgttcatattgctgcccaaaaagtatgactgtcgctcaaaaggatccactttaacattccccaccttttgacatcaaggcaccacttaacattcacatatttgagttcagtggacacctgacaatatagccct

SEQ ID NO: 8051 - DNA, 229 bp, Bos taurus
  Clone ID: 35-BOVMS1-008-Q1-E1-A4
gtccggtgaagcaaccgttagccggatcacatcccttactgaacatcatagacttcagggtggccgatctacaggatgaatgtttattttgtcgtacatgcgtcatcaaaacgcttcaacattgtcagcatgattcaattcactggcggtagatttattacgtctgtactgggagtgccctggcgttcagcaactttgtagacttgaatcacaatacgcttttccaaac

SEQ ID NO: 8052 - DNA, 370 bp, Bos taurus
  Clone ID: 35-BOVMS1-009-Q1-E1-A12
gggtcgaactacgcgtccgccgaagcgtgggaaaaaaaaaaaaaaaaaaaaaaaaaaaaaaaaaaaaaaaaaaaaaaaaaaaaaaaaagaaaaaaaaacaaaaaagataaaaatatttaataaacctgaaaaaaatataaaaagatcttcaaaagggtcatcaaaaattcaattcattggatagtaagtttattagatttaaaaggggggggcccctcatgggtttcaacttttacatccttgtctcgggtcctcctttcctcttctagggttcccccaattttgtttccaggggctctctttttaaacttttttaacgggtaaacccggggttttgcccctttatttcccttggaaaaaatccccgttt

SEQ ID NO: 8053 - DNA, 212 bp, Bos taurus
  unsure (119): unsure at all n locations; Clone ID: 35-BOVMS1-009-Q1-E1-A4
atgcgacgtcatagctcttctatagtgtcacctaaattcaattcactggccgtcgttttacaacgtcgtgactgggaaaaacctggcgttacccaacttaatcgccttgcagcacatcnccctttcgccagctggcgtaatagcgaagaggcccgcaccgatcgcccttcccaacagttgcgcagcctgaatggcgaatgggacgcgccctg

SEQ ID NO: 8054 - DNA, 465 bp, Bos taurus
  unsure (452): unsure at all n locations; Clone ID: 35-BOVMS1-010-Q1-E1-A4
ggtcacacaaaaggtgggaaagaagacaaaggcaggtgaagcacaatctgaaaatcctgctccagctcccgagcagagcagtgcagagtaacagccagctcccccaggcaccttcaccatccgcaggtgacttaatgaccattcaaaaaataaagcaaaaagcagaccacgaccttacgaacaccaaagaaacgtccaagcaataaagtggaagattaataaccaagatgtggacattagaatgtttactacacttccttacaaaacagacaactgcacgaggaaaacgtcagccgttttttccagcagctgagatcctgggaatgcctgcacattaacgagagagcgacctccccagtttcagcaaccactaggtttatatttttttcctggtttttactgttttggtaatatgaattgaaagaagaattattaataccacatggggaganccctcccaaccaa

SEQ ID NO: 8055 - DNA, 450 bp, Bos taurus
  Clone ID: 35-BOVMS1-012-Q1-E1-A4
attttatattctatttgaagcaacactagtcccaacactcattattattacccgatgaggaaaccaaacagaacgcctaaacgccggactctatttcctattctatacactagctggctccctacccctattagtcgcactaatttatatccaaaacacagtaggatccctaaatttcctaatattacagtactgagtacaacctgttcataactcttgatctaatgtcttcatatgactagcatgtataatagctttcatagtaaaaataccactatatggcctccacctttgactacctaaagctcacgtagaagcccccatcgcaggctccatagtccttgcagcagttctactaaaactaagggggtacggtatgctacgaatcacactaatttctaaacctatgaccgactttatagcattaccattcattatactctccctatg

SEQ ID NO: 8056 - DNA, 218 bp, Bos taurus
  Clone ID: 35-BOVMS1-016-Q1-E1-A4
tcggtttacaaccatttagaaaaccaaaacaatttgtactattctagactgaaggactcactgaaattttatacattttaagtttctctctgaattatattcataacacacatactaagtgtctgctgatccagacaagaatggtgaaatactgacaatctcagattcaagcctggctctttattgtataccatgggtcaaagaacatccttaaaata

SEQ ID NO: 8057 - DNA, 225 bp, Bos taurus
  Clone ID: 35-BOVMS1-018-Q1-E1-A4
aaaacaaaacaaaaaaaaaaaaaaaaaaaaaaaaaaaaaaaaaaaaaaaaaaaaaaaaagggggggcgccccaaaaggttcaaacctaagtaacccgtgaagccaagtcaaaacccctccaaaagggccactaaaatcaattcactgggcctcgttttaaaaactcgtgaacgggaaaaaccctggcgttaccaaattaaaccccttgcaacaaatccccctttc

SEQ ID NO: 8058 - DNA, 309 bp, Bos taurus
  Clone ID: 35-BOVMS1-019-Q1-E1-A12
atgcgacgtcatagctcttctatagtgtcacctaaattcaattcactggccgtcgttttacaacgtcgtgactgggaaaaccctggcgttacccaacttaatcgccttgcagcacatccccctttcgccagctggcgtaatagcgaagaggcccgcaccgattcgcccttcccaacatttgcccaccctaaatggcaaatgggacccgccctgtaccggcgcataaaccccggcggttttgttggtaacccccaccttgacggcaaaacttgcaagcgcctaaccgccggttccttccgcttccttccc

SEQ ID NO: 8059 - DNA, 398 bp, Bos taurus
  Clone ID: 35-BOVMS1-019-Q1-E1-A4
tagagacagacatcacgcaaatccagggagagatggaggacattctccaggaagctcgcaacgcagaagagaaagccaagaaggccatcactgatgcagccatgatggctgaggagctgaagaaggagcaggacaccagcgcccacctggagcggatgaagaagaacatggagcagacggtgaaggacctgcagaaccgtctggatgaggctgagcagctggccctgaagggcgggaagaagcagatccagaaactggaggccaaggtgcgtgagctggaaggagaggtatagagtgagcagaagcgcaatgtggaagctgtcaaaggtctgcgcaaacacgagaggagagtgaaggaactcacttaccagacggcagacgatcggaaaaatattctc

SEQ ID NO: 8060 - DNA, 425 bp, Bos taurus
  Clone ID: 35-BOVMS1-020-Q1-E1-A4
tataaatattcgatccatttaagagggcctgtgctctcacactcagactcattcttaacctttcccaaatgattcacatggactaatctttcgatctttctgatctgtaaatacttaaaataaagagtagttttgtatcaacctaaatgagtcgaagttcaaaaataatacatttcagtcttttcataattgttgacctaagaagattacacattttctagtgacatgtacatactgtatatagccggattaacggttataaagttttgtaccatttagtttatgacattttacactgtaactattgaaactaacggttggtaggagaaagtttcttatggaacgaataccctgctcaacacttaatcaatctttgtgcctcaacatactgttgatgtctaagtatgcctcagtgggtcgaggaa

SEQ ID NO: 8061 - DNA, 377 bp, Bos taurus
  Clone ID: 35-BOVMS1-021-Q1-E1-A12
ggagaagccacctttactgtgcagctggacgtcctggcaaaagaacacagaagagcaccaatgttcatctacaaaccacagagtaaaaaagtgtttgagggagaatcagtgaagctagaatgccagatctcggctgtacctccaccaaagcttttctggaaaagaaataatgaaatggtacaattcaacactgatcgaataagtttatatcatgataactctggaagagttactttattgataaaagatgtaaacaagaaagatgctggatggtatactgtgtctgcagttaatgaagctggagtgaccacatgtaacacaagattagatgttacagcccgtccaaaccaaactcttccagctcctaaacagttacg

SEQ ID NO: 8062 - DNA, 312 bp, Bos taurus
  Clone ID: 35-BOVMS1-022-Q1-E1-A4
caaccaagccttcgggttgcaaaaagttctggaaaagcagccattgctgagccagacggaggctcgagaactagtggaacgctgcatgcgagtgctgtactatcgagatgcccgttcttataaccggtttcaaatcgccactgtaactgaaaaaggtgttgaaatagagggacccctgtctgcggagaccaactgggatattgcccacatgatcagtggctttgaatgaaatacagatgcattatccagaactgaagttgtacccttcttctaactttgaacttggttggttcaaaggtactattcttttgt

SEQ ID NO: 8063 - DNA, 452 bp, Bos taurus
  Clone ID: 35-BOVMS1-023-Q1-E1-A4
acgcgtccgctaggaccctgtgaaggcctgctgggaacgggacttctaaaacgacaaatatgtctggaaggctgtggtccaaggccatttttgctggctataaacggggtctacggaaccaaagggaacacactgctctcctgaaaattgaaggtgtatatgctcgagatgaaactgaattctatttaggcaagagatgtgcttatgtgtacaaagcaaagaacaacacagtaactcctggtggaaaacctaacaaaaccagagtaatctggggaaagataactcgagctcatggaaacagtggcatggttcgtgccaaattccgaagcaaccttcctgctaaagccattggacacagaattcgtgtgatgctgtacccttcgagaatttaaacttcttgaaaataaataaaagtgtggatttgaaaaaaaaaaaaaaaaaaggcggccgct

SEQ ID NO: 8064 - DNA, 431 bp, Bos taurus
  Clone ID: 35-LIB188-002-Q1-E1-A4
acaggcgaggcctggggttaccatattgggcttcagcaaggtgccttccaggtagatgtggtggtcactcagagccttgtagacagcagccagcaccttctcggttacatactgacagcgtttcaagtcatggtccccatcagggaggatctcgggctccacgatgggcacaatgccattctgctggcagatgctggcgtaacgcgccaggacgttggcgttttccatgatggcaagggaagaaggggtgtgctccccgatcttcagcacgcaacgccacttggcaaagtcagctccgtccttcttatactgggcacagcgctccgacagcccatccagcccttgggtggtcgtctcgccatttgttcctgccagggggcacacacctttgtctaccttgatgcccacgacgccgcccttggctttgataa

SEQ ID NO: 8065 - DNA, 271 bp, Bos taurus
  Clone ID: 35-LIB188-003-Q1-E1-A12
gatactgggggtatctctagaggtcgtcagtggcaccatccacacccatgatcaaagattctttccaggatgcaactgaaggcgggaataggctcagaccaagagttttctggtcagatcagcggtagcactggcatccatgatgacatgcatgacttgggtgatactggtctcatacaggctgaatggagccctgctgtcttctctgagaaccttaaccagtgagccgtactctactcggagagagtagtacgcgaatttcatccggtaa

SEQ ID NO: 8066 - DNA, 420 bp, Bos taurus
  unsure (22): unsure at all n locations; Clone ID: 35-LIB188-003-Q1-E1-A4
ggacacttgtcctatgacacangctgccaatttctctgcaactccaacgggaatttatccggggtaaaacctggggacaatccaggtaaggctgaccttgcttttgctgacccctccctggggtggggcaaggacatacacctgcggctcccgggccggccctttggtcctggaaatggtcctcacaatgggggccgggaggccttcgttgtggaccttgcactttgaactcctttcctccagtccattcctggtgctggatgctcagggcgctgaccacgcggtaggtgctgttgaactgctcctctctcggcttcgtcgtggctgtgtttacctccacgtcgtccacgaaccaggagaacttcacctcggggtcatcgtggcccacgtccacaccacacacgtgacctcgggcgttcc

SEQ ID NO: 8067 - DNA, 382 bp, Bos taurus
  unsure (293): unsure at all n locations; Clone ID: 35-LIB188-004-Q1-E1-A4
tggcggccggataccttgaccaatgtaccaattctagacagaaggtcaattccttacaataggaaacctgaggggtagcaggaaaccaattgggacccattccaaaaatggaaacttgcaaggttcccctttatcctgcccaagttctttcaaccggcaggacttgaaagggcaagccaaccttggtttaattgccgggcaactgagacgctgctctggggaaggggaagatgtcagaggaagccctgcatatggctgaggatgttgggcccatctctgagcattcagagtangaggaaagaatgtatgtgcctgatggagaaagggatcggcatgctgggaagtgacggacttatctggggtgctccttcctcctccgttt

SEQ ID NO: 8068 - DNA, 406 bp, Bos taurus
  Clone ID: 35-LIB188-005-Q1-E1-A12
gatacatattgaacgtcacccccaacttgccgaatctctttgagaatgcaggagagttcaaatacaagcagatccccatctcggatcactggagccaaaacctgtcccagtttttccctgaggccatttctttcatagatgaagcccggggcaaaaactgtggcgtcctggtgcattgcttagctggcatcagccgctcggtcactgtgactgtggcttaccttatgcagaagctcaatctgtcgatgaacgatgcttatgacattgtgaagatgaagaaatccaacatctcccccaacttcaacttcatgggccagctgctggacttcgagaggacgctgggactgagcagcccctgtgacaaccgcgtccccacacagcagctctatttcaacagccccctcca

SEQ ID NO: 8069 - DNA, 375 bp, Bos taurus
  Clone ID: 35-LIB188-006-Q1-E1-A4
accatgacacctcttgcaagtgggtctaacccatatgcacgtagccgtcctccctttggtcagggctatacccaacctggaccaggttatcgataaagaggctcagttacactgatgaatgtagctgctagctgtttgcctcccaaaagactccaatactactattttaatttgtattgaagttcaggaatttaaaaagcagagcatttttttatgataccattattgctgttaattgaaagtataatttactggaagaaaaaagaccaaaatggaagtttttttcctcccctgcttagaagtatagcagcttcctacttattttggaacactactcttacatgtgtgcaaagtgattgattttctagcttgcct

SEQ ID NO: 8070 - DNA, 413 bp, Bos taurus
  unsure (12): unsure at all n locations; Clone ID: 35-LIB188-007-Q1-E1-A12
gggctacagtanacacccaagtgcgctcagcccaccttggtggccagctctttggccttcgccttttccagcttggcgatgcgcgccaccgacttcggccccaggacgttgcctccccagtgacgacggatctcatcgtatctgtcgttgtaattggtcctgatggcttccaccagcttagccagggcactcttgtcctccgagttgacttgtgtgaaggctacggtggtgcacgtcttcctgtgcaccaggcgccccagccgggccttgcccttgatgatgcagtagggaacccccatcttgcggcacagggcaggcaggaagaccacgagctcaatgggatccacgtcgtgagcgatcaccaccagctgagccttcttgttctccacaagggtggtgaccgtgttgacccc

SEQ ID NO: 8071 - DNA, 296 bp, Bos taurus
  Clone ID: 35-LIB188-007-Q1-E1-A4
gccatggggcgggataccctgtaacccatcctcatccagcccgggtggcgtcacggtgcagaggcagaccttcggggaagccatcaagcagcccggtgtggtcttcatcgcggccaagttcgacggcattctgggcatggcctacccccgcatctccgtcaacaacgtgctgcctgtcttcgacaacctgatgcagcagaagttggtggacaagaacgtcttctccttcttcctgaacagggacccgaaagcccagcccgggggcgagctgatgctgggcgggaccgactccaagt

SEQ ID NO: 8072 - DNA, 369 bp, Bos taurus
  Clone ID: 35-LIB188-008-Q1-E1-A4
gccgcgggatacagccactgccacaggaagggcacgaccgcccgcagcagaatggaatgattccttttaaattaaaggtaccaaataacaaggacaaattatggccggaaaaccttaaccttggcaagtttaatggcaaccttccaaccattgcaaaacccttccggaaaatcccggatggacaaaaccacgggaaacaggatggtgccacagcagatgaaatccaccaggaaaaggatccccttcaaaataccgtattccctggaaccctcctcgcgggactccatgacaatgtaggccacgttggccaggacctgcagtgggatcactatcccaaagatcttcctctccttgtctgacagcacatac

SEQ ID NO: 8073 - DNA, 426 bp, Bos taurus
  Clone ID: 35-LIB188-009-Q1-E1-A12
ctccgtacgaatggcggcgggatacagcgccgaatctaccttcgaggggatcctcaaaaacccaagagcagagtctttgaacagcaggtccctctggccgggtggagagccaaagagctggaagctccgagacttgttttttccaaatttctcctgcgccttgctgagaagcttccagatcaagtcttccttgccatccacacttcgggccacgagagcatgagaagggacctgggccaggtggcactccttgaacgcatccactggagcccgactgttgttcaggcagagaagctcatactggtccctgtcagccttctctggcaagttctcaaacactgtcgtctctttaacaaaggccacgtctccagccccgtcctgcagacacttgaaggcaccagattaaccgaagtatggttcccggga

SEQ ID NO: 8074 - DNA, 400 bp, Bos taurus
  Clone ID: 35-LIB188-009-Q1-E1-A4
ggacacaagtgaaaaaatacactgtgggtaacattaaaaagctgcgatcacacttatatgtcatatatacttctttacaaatggccagtagtttacgataatagagaaatgtaacctactgacattcatatggttccacttcaaatataggaactgtttgactataaatatattttgaaatacatttgtctactaaaggaacgtttaaaaaaattgtgcatgaaaatatatatatatgccttgcaaaaagttacaaataccaccaggcccatctgtggatcccatttatgcatgggaatttcatcttgccaacatttctgattggaacccgaaactgtgctgtggcttcaggaggaggggttagtggtcagagtctcgtttattcatctatttttttcac

SEQ ID NO: 8075 - DNA, 364 bp, Bos taurus
  unsure (264),(352): unsure at all n locations; Clone ID: 35-LIB188-010-Q1-E1-A4
actggagtggggtgccattgccttctcccatatctattcacaagcctgcctaaatcattgacttctagccacctttgggatgccaatgcccacccacccttaccaggccgcagaggagagaaaacacttaccacaggaggtccgggtaaggaacaaggaactaacaagctcccaccaaccaggattctgcagaggtcaacaagaggtcagcaagagatgggagactgcagtccagaggtcctagcaacttccagcgagcagcanagacccagcatagtcaaaacgaattcaatgttaccaaaaccaaataaataaacggacagaagttcttggaacacatgactgagggtangggtgaggcagt

SEQ ID NO: 8076 - DNA, 408 bp, Bos taurus
  Clone ID: 35-LIB188-013-Q1-E1-A12
aagtctccaatatgcgtgagtgcatctccatccacgttggccaggctggtgtccagatcggcaatgcctgctgggagctctactgcctggaacacggcattcagcccgatggccagatgccaagtgacaagactattgggggaggagacgactccttcaacaccttcttcagtgagacaggggctggcaagcatgtgcccagggcagtgtttgtagacctggaacccacagtcattgatgaggtgcgcactggcacctaccgccagctcttccaccctgagcaacttatctcaggcaaagaagatgctgccaataactatgcccggggtcactacaccattgggaaggagatcattgacctcgtcttggacccaattcggaaactggctgaccaatgcacaggtcttc

SEQ ID NO: 8077 - DNA, 292 bp, Bos taurus
  Clone ID: 35-LIB188-014-Q1-E1-A4
ggcggcgggatactcttaccaggaaattcggatggatgcaggaacctagtaggctgtagtccacgaggtccctgagtactcggaaacaactgaacgacttcactttcacgtgtcaggttcctgaattggagaaggagatggcaaccgactccagtgttcttgccgggagatccccaaggatcggggagcctgttgggctgccgtcaatggggtcgcacagattcggactcaaccgatatgtgttaacagcagtagcatcgatcatgacacagacgtgtaccaccactgccgt

SEQ ID NO: 8078 - DNA, 291 bp, Bos taurus
  Clone ID: 35-LIB188-015-Q1-E1-A4
gatacacgtcctggctgaccaatccccccccgttaagggcaacaagccgtaaggcccgaaagttaccggttaagaacggacaatccccaactggccctcaaaaatggcagacactaaccgctttccatcacgaaaccaagaacaagagatctgtttggggctgaagtccgtggcctggcagatgaggctggacttgctattgccgtcaccagagaggctgttgcgaggcgggacaaagacactcacgactggggacagcacttccgcctttgtagcgaccaacctcacggt

SEQ ID NO: 8079 - DNA, 392 bp, Bos taurus
  Clone ID: 35-LIB188-016-Q1-E1-A4
cgcactgcccatccagcaccaggacgggactggaggaaaggatttcaattgcaaggtcaacaacaaaggcctctcggcccccatcgtgaggatcatctccaggagcatagggccggcccgggagccgcatgtgtatgtcctggacccacccaatgaagagctcagcaaaagcacgctcagcgtcacctgcatggtcaccggcttctacccagaagatgtagccgtggagtggcacagaaaccggcagactgagtcggaggacaagtaccgcgtggtcagcgccctgctcatccagcaccaggactggactggaggaaaggagttcaagtgcaaggtcaacatcaaaggcctctcggactccatcgtgaggatcatctccaggagcaaagggc

SEQ ID NO: 8080 - DNA, 291 bp, Bos taurus
  Clone ID: 35-LIB188-018-Q1-E1-A4
acatcgtcctgtgcgactacgccgggtgcttcgggatcagggagaacgacatcgacatggacctcgtgatcgatgagccaggcctccacgtgcataatcagattctctctgctttgaggttctccctcctgtgttccccaatgtttaaaatgtttgtctggtttgttgtgctgactgcggtcattagtgctactataaacttgtgcgaatacattcacggtgcgcttcagacgaattttacgtcaagtcacaagattctcagctgtaagtcaggtctcaatgcctcttgct

SEQ ID NO: 8081 - DNA, 435 bp, Bos taurus
  Clone ID: 35-LIB188-019-Q1-E1-A12
gcgggacacttatgatcggccagcccaccgggcactttgacaagcttgttgttgttcaaatgaagttccctcaaatgaggagtgttggccaaagagccattgtcaaccgcagagatgctgttgaaactcagtcccaacttagccaaattattcagtcctttcaggctagctgcatcaactttggtgattttgttgccatcgagatgtaattcagtaagggaaggaggaagaccttgagggatggtagttatatttgtgtcagcaatgcggatgtaggagagcttcttcattccctgaaaggctccattttcaatgcctgagctcttcagcgggttggtgccaagttctacgacgatcatctggttcaatccattgaacacagactttcgcactttggtgatctcgttctcatggacacgcagctcctgaagagtt

SEQ ID NO: 8082 - DNA, 347 bp, Bos taurus
  Clone ID: 35-LIB188-019-Q1-E1-A4
actgggggacccccttgaggtcgcaagtggccccatccatacccatgatctgatgttctttcccagattccaactgaatgcggcaagacgctctgaacagtaagtttctggtcagatcagcggtggccctggcatccttggtgaaatgcaagacttgagtgataccggtcgcaaatacgcagaaatcacccctgctgtcttctctgaaaatcttaaactggaaaccgtactccactcggggagagtatcacgcgaatttcacccggtaaccctccaagtcctgctgctcacgctccacagcccggctctgtctagggcacttctcctcagcacactggcagacatcc

SEQ ID NO: 8083 - DNA, 399 bp, Bos taurus
  unsure (361): unsure at all n locations; Clone ID: 35-LIB188-021-Q1-E1-A4
ggcggcgggaaccgtgccttatttttgacactctcctggtcgtcatacgccacccactggttgcccttggtggcataggggacctgctggtcacggaatctgtgggtggtggctccgtggaggaagtcacagatctcataataggcaaggatccctttctccttggtgaactggcctggaattcctggccctgagatgggggctcccacatctgtcttggaagaggccagagtgtagctcctcccaaaagtggggatacccatcaccagcttattggctggagcccccaacctcagcatgtagctcacagcgtagtcagcgttactgaatctgtcagaacttgcatcttcctggcctcganacaaggggctgtggtgtccgactgtctggcgccaggct

SEQ ID NO: 8084 - DNA, 280 bp, Bos taurus
  unsure (37): unsure at all n locations; Clone ID: 35-LIB188-022-Q1-E1-A4
ccatgagcgccggataccctgccgtaggagttatcangaaagcaaatgaaggggtcaaaatggaatccccgaaagacaagaagtcctggcaaaacgcccttggcaaggctgcaagctgggaaaatcccaatgggcctaattgtcaacaaaaaagctccctcgcatttatgaatcttagtcaagctgtgccctggggctgacccgaaatccagactctgtgccttgtgtgctggcgatgaccaaggcctggacaagtgtgtgcccaactctaaggagaagt

SEQ ID NO: 8085 - DNA, 287 bp, Bos taurus
  Clone ID: 35-LIB188-024-Q1-E1-A4
actcttgcctggaaaatctcatggacggaagagcctggtaggctgcagtccatggggtcgctcagagtcgggcacgactgagcgacttcactttcacatttcactttcatgcattggaggaggacatggcaacccactccagtgttcttgcctggagaaccccatggactgcggggcctggtgggctgccgtccatggggtcacacagactcggacacgactgacacgacttcgcataagcagcagcagcagcatcagcagcagcagcagtgcatagatatcaaaag

SEQ ID NO: 8086 - DNA, 408 bp, Bos taurus
  Clone ID: 35-LIB188-025-Q1-E1-A12
ttgagcaggacagagtcactcgagcccctccagggagctgtggctaaattcttctctgccagctgtgttccctgcattgatagacaagcataccccaacctgtgtcaactgtgcaagggggagggggagaaccagtgtgcctgctcctcccgggaaccatacttcggttattctggtgccttcaagtgtctgcaggacggggctggagacgtggcttttgttaaagagacgacagtgtttgagaacttgccagagaaggctgacagggaccagtatgggcttctctgcctgaacaacagtcgggcgccagtagatgcgttcaatgagtgccacctggcccaggtcccttctcatgctgtcgtggcccgaagtgtggatggcaaggaagacttgatctggaagcttctc

SEQ ID NO: 8087 - DNA, 346 bp, Bos taurus
  Clone ID: 35-LIB188-025-Q1-E1-A4
ggaaaccccaggccagaacacgggcaacctggacaaaggggtccttggcccccagaaaaagattagggccaagaagaaggccggaaaccaaggttagaatgggcaggaaagccaccaggaccagaaaaggtttaaagaaagaagttgcctaacgggaaaggccaagtggcgggacaaattgggcccccccgaaggaccaagggcgggtccctggaaacagaactcccgtgaactcccaagccggtcccggggctcccaaacctccttcaaaaaaacttcggtaaatggggaaaaatatctgtgaaccgttggctggcagaagaaataagtccttgaccctgccgtg

SEQ ID NO: 8088 - DNA, 256 bp, Bos taurus
  Clone ID: 35-LIB188-026-Q1-E1-A4
ccggtttcccggcaatccaacggtaaaatctccgggttaaaacccgttaacaatcaaggtaaccctaaccttgcttttgcgaacccctcccttggttggttcaagaacatcaacttgcggtcccggggccggccctttgccccgggagatgatcctcacgatgggggccgagagcctttgttgttgaccttgcacttgaactcctttcctccagtccagtcctggtgctggatgggcaaggcgctgaccacgcggt

SEQ ID NO: 8089 - DNA, 414 bp, Bos taurus
  Clone ID: 35-LIB188-027-Q1-E1-A4
gccatggcggcgggatacaagaatagttaagtattttgcacaaaggaaatttgttgatgatccagtaaaactgatgctcatagaacgcagtttcttaaagattttgttttgcttctttgagggatgcggccatcgtcattgtcagttcagctgggggttccttccttcatgctgaagacctgtgtctttgaagttgctgacgtcctcggaatcccaggcaggctggtgaatgctcatgggctcccatggaggcatctggtggcctcgggccccctttgcttgtaagaggcttagcaagttccttgtcgcttcttcccactgggcatactccctcagctgctccttcaggctctcctcctcatgaagttttggagactctgccacactctttttttcccattaagtgtccgacag

SEQ ID NO: 8090 - DNA, 379 bp, Bos taurus
  Clone ID: 35-LIB188-028-Q1-E1-A12
gggatactttccatacacagcatgagtttccttctgtcagtcacaacccctgactataacattcgttatctgcagttcaggctggtggattctgcaggtctctctcaccactgatcctcgagccctagacacatccttgccatgatcacgtgcctgttacttccctttgtccatcatcaggccacttatggatgaccccatggcatccaataccctgatataaaattaacacaaactctgacttggtgaatattacttttgaacacaaaagtagaaaatctgaatatgcactgtgtgttgaaggcacactcgagcacatcaagtgtgccacccatgtgacatcatcacaatgggtggaggtgcacaccgcaagatgaaa

SEQ ID NO: 8091 - DNA, 262 bp, Bos taurus
  Clone ID: 35-LIB188-028-Q1-E1-A4
catgcgcctaccgccatggagccgggataccactcaggcctgtccacgagggacaacgtccccatcgtgcgggaggacatgctgtgtgctggggacagcgggaggaacttctgccagggcgactctggagggcccctggtctgcaaggtgaatggcacctggctgcaggcgggggtggtcagctggggcgatggttgcgcgaagcccaaccggcccggcatctacacccgcgccacctcctacctggactggatccaccagt

SEQ ID NO: 8092 - DNA, 144 bp, Bos taurus
  Clone ID: 35-LIB2809-002-Q1-E1-A4
accccttgaagctaactcatctctgagccctgggccctgtagtgacaatggacatgtaaggactaatctccaggggtgcatgaatggcgctctggacttttgacccttgctcgatgtccctgatggcgcttttaatgcaacagt

SEQ ID NO: 8093 - DNA, 475 bp, Bos taurus
  unsure (386): unsure at all n locations; Clone ID: 35-LIB2809-003-Q1-E1-A12
gacgtctatgctcgccgaagccatggccagggcatacagcacaaaggactgaatgggcatatctctctggggatagggcactgctttctggggaacaggcaggactttggactgagaaagggacagcacggactgaggaggaaacatgacagttggaggaagaggctggtgaggctggtgcatccaagactggagcagaggcagaggaaggtgcagattttcaacatcagtgagagtcaggctctggctttcagtaaagggctcaactggatatttagggaagggcatttctttgtgcttaggagccatagcctccttcactttggagactcccattacttcaggctgaaggaaaggcggcaccaccacaggggtttgagtaagangagggattttttgtgggaggctgttaggaatggcccaaggaaaggaataacctaaaaacgttttcgggccaaagggttgattttaaccc

SEQ ID NO: 8094 - DNA, 298 bp, Bos taurus
  Clone ID: 35-LIB2809-003-Q1-E1-A4
gagccaattctgaccagccgtcgccggaacctcagcaggccgctgggcctcatggctgtcagagaagaagcctgcgaccacggactggactacctgccctttaacagcaagaagccgagcccctgtgagttcaccaacaccaacggccagcgtgacctgtttcctggcgggagattttcgagcctcaaagcagattcggctggccactgaccagatgcaccttctccgggagcacatccggctggccagaaaaccaaggaaactcaaccctcactggaatgggtagaagctctaccag

SEQ ID NO: 8095 - DNA, 430 bp, Bos taurus
  unsure (93): unsure at all n locations; Clone ID: 35-LIB2809-004-Q1-E1-A4
atagaccagaagaacctgaaagggcatatctctctggggatagggcactgctttctggggaacacgcaggactttggactgagaaacggacancaccgactgaggaggaaacatgacagttggaggaagaggctggtaaggctggtgcatccaatactggagcagaggcacaggaaggtgcagattttcaacatcagtgagagtcaggctctggctttcagtaaagggctcaactggatatttagggaagggcatttctttgtgcttaggagccatagcctccttcactttggagactcccattacttcaggctcaaggaaatgcggcaccaccacaggggtttgagtaagaggagggatgttttgtgggaggctgttatggatgggcccagggaagggatagactagacactgtgtctgggcaaagggg

SEQ ID NO: 8096 - DNA, 182 bp, Bos taurus
  Clone ID: 35-LIB2809-005-Q1-E1-A12
ccgacgcctatgctcgccgtagccatggccagccgatactgtcgcattaaaagcgccatcagggacatcgagcaagggtcaaaagtccagagcgccattcatgcacccctggagattagtccttacatgtccattgtcactacagggcccagggctcagagatgagttagcttcaagggggt

SEQ ID NO: 8097 - DNA, 260 bp, Bos taurus
  Clone ID: 35-LIB2809-005-Q1-E1-A4
catggtagccggatacgtcttgtaatcggtgtcaagcacagggactttgttcccggtcaaggcatcgatcgtgaccaccgcaaggattctggctttttccgcaatgatcttcttctgagcacactcaccgttctcccaattctgcaacaagatctccatgtcgccctcaggggtgggcttcagctcctccacatacactctcatgggggcactctgggcgtccagcatggagatgtcgctggccgccatgggcaaggact

SEQ ID NO: 8098 - DNA, 407 bp, Bos taurus
  Clone ID: 35-LIB2809-006-Q1-E1-A4
gccatgggagcgggatacgacagtagagagggcaattcattaagtatatttagaatccaagctactactactgagaaattacagtatttattcagttcagttcagtttagtagctcagtcgggtccgactctttgcgaccccatgaatcgcagcacaccaggcctccctgtcgatcaccaagtcccggagtttacccaaactcatgtccatcgaatcggtgatgccatccagccatctcatcctctgtcgtccccttctcctccagcccccagtccctcccagcagcagggtctttcccaatgagtcaagtcttcgcatgaggtggccaaaatattggcgttacagtgtttattagagattcaataagttgaaaattcagagtcctcagtttcaaggaaataacatg

SEQ ID NO: 8099 - DNA, 365 bp, Bos taurus
  Clone ID: 35-LIB2809-007-Q1-E1-A12
agcaaactcatctctgagccctgggccctgtagtgacaatggacatgtaaggactaatctccaggggtgcatgaatggcgctctggacttttgacccttgctcgatgtccctgatggcgcttttaatgcaacagtggactacttgtcttccttttaggaaacgaggacaaagcaaacatgaagttcttcatctttacctgccttttggctgttgcccttgcaaagaatacgatggaacatgtctcctccagtgaggaatctatcatctcccaggaaacatataagcaggaaaagaatatggccattaatcccagcaaggagaacctttgctccacattctgcaaggaagttgtaaggaacgcaaa

SEQ ID NO: 8100 - DNA, 470 bp, Bos taurus
  Clone ID: 35-LIB2809-007-Q1-E1-A4
atggccgcgggataccatactggtcattgcttttagtaataaaacatcaaattaggtttggagggaactttgatcttcctaagaattaaagttgccaaattattctgattggtctttaatctcctttaagtctttgatttatattacttgttataaacgaaccgcattagttgtctgccttttcctttccgtcctttgcccctggtcctaccctcaacccgtgtcttccactccttcccaccgatctccattgaatcaatggtgcaggacagaaagccagtcagactaatttccttctctccttgcacttccccccacttgtcatcttttaactagtctttcacaaaggatcctctgaaaccccctctgtgccccaagcacaggacccactgcttctgcttttgcatctcatgcaaaaacggagggtgccttttggaccctcctcataggttttctcttcagacatgaac

SEQ ID NO: 8101 - DNA, 413 bp, Bos taurus
  Clone ID: 35-LIB2809-008-Q1-E1-A12
tgggcccggcatacttgctgattgatctgtttggaggcccgggtggtctccacgttgcgggtgatggtgctgccgtctgccttccagaccacggtcacgctacccgggtagaagtcgctgatgagacacaccagggtggccttgttgccgttgagctcctccgtggagggcgggaacagggtgaccgagggtggggacttgggctgacccaggacggtcagtgtggtcccgctgccaaaaacagcattactgctactatcctcagcagatgcacagaaataatctgcctcgtcctcagcctggagcgagttgatggtcagggtggctgtgttcccagacctggagccggagaatcggtcggggacccccgaggctcgactggtgtcaccatagatgagggttctgggggccga

SEQ ID NO: 8102 - DNA, 348 bp, Bos taurus
  Clone ID: 35-LIB2809-008-Q1-E1-A4
atgggcgcgggatactttgtaatttttcagtctgagaagctgttccagagaacccaggtaacgctcagagggcacatcttccttttgaatgtgcgtctgctcaacactattgggaacaatttcctcacttgacgaaatgctttcagcttccatttgcttaatatcttccatggcttgatcctcagttgattcactcgcaatatccttgctcagttcattgaccttctcctttccaaacacttctggaaaaagtgccacacattacctgagtgaattttcattgaggacttcttgaaggagtccttggtgcttgataggatgtttatgcctgtcaagagcaacagccac

SEQ ID NO: 8103 - DNA, 333 bp, Bos taurus
  Clone ID: 35-LIB2809-009-Q1-E1-A4
cagcagaaaggcatgaatgggcatatctctctggggatagggcactgctttctggggaacaggcaggactttggactgagaaagggacagcacggactgaggaggaaacatgacagttggaggaagaggctggtgaggctggtgcatccaagactggagcagaggcagaggaaggtgcagattttcaacatcagtgagagtcaggctctggctttcagtaaagggctcaactggatatttagggaagggcatttctttgtgcttaggagccatagcctccttcactttggagactcgcattacttcaggctgaaggaaaggcggcaccaccac

SEQ ID NO: 8104 - DNA, 450 bp, Bos taurus
  unsure (83),(103): unsure at all n locations; Clone ID: 35-LIB2809-011-Q1-E1-A12
ccatagcggcgggagacttgtgtaagtgggggttgtctactgagtaaggaatactgtttttaaggttctaaagctaaattcanatgatgcattaatgtaccanaaactcagatctgatggtgtctgaatttctaacagtccttgctttgtgggtatgctgacaacttatctggatgccttacatcttttctaaacagtgttgcctctgaacgtgctctgctccctccctgctccctctttggagcccctttgcaccccagagcctgcagaagtggctggtataaaagggggcctggctagagaatgatcagtgtagctgtttgcaggattcctttctgggcttcattttggaaactttgcttagggctatttttcttaattgcccacatttgatggagggtagaacgaattttgaatgtatttgatttattaatattatttttttttttt

SEQ ID NO: 8105 - DNA, 159 bp, Bos taurus
  Clone ID: 35-LIB2809-011-Q1-E1-A4
cacaccataacggtaactcatctctgaaccatgtgccatatcttgacactcgttatgtacagaccattcgccatcggtgcattcatggagctctggacgtttgacccttgcccgatctctctcatgtctcatttaatgcaccactcacactactacaga

SEQ ID NO: 8106 - DNA, 412 bp, Bos taurus
  Clone ID: 35-LIB2809-013-Q1-E1-A12
gtcaatcctccaagttatggattaagaaatgggcaaccaatcatgggccaacctccagaaataaacactgataatactttacaagaatggctggctgaaattattaaaaccaataaaggcataaaactggattttaagaatttggcaactgtataaccatccatgatgcccttggaaaatgtcaacaggcatctgaatcgtccactgtggattaatgctgatgttcttcctggtccaaatggaaacagcataatagtggatgcaaaaccttttatagacactgtgacatccttctctccagatgtgacgttttccttgggttggacaacaggatggcatcctgagaaagtcaatgaacgttacagttggccaatggtgaaagagatggcatatatatgtaacgaactaaatc

SEQ ID NO: 8107 - DNA, 246 bp, Bos taurus
  unsure (27),(38): unsure at all n locations; Clone ID: 35-LIB2809-013-Q1-E1-A4
tgggacaaagtcatcataaagacacanagcaccttcangagcacagagatcagcttcaagctggagtcgagttcgatgagaccacagcatatgacaggaaagtcaagtccatcgtgacgctggatggcggcaaacttgtccacgtgcagaagtggaatggacaagagacatcacttgtgcgggaaatggttgacgggaaactcattctgacactcacccatggcactgcagtttgcactcgtatca

SEQ ID NO: 8108 - DNA, 400 bp, Bos taurus
  unsure (51): unsure at all n locations; Clone ID: 35-LIB2809-014-Q1-E1-A4
cctgaatgggcatatctctctggggatagggcactgctttctggggaacangcaggactttggactgagaaacggacagcaccgactgatgaggaaacatgacacttggacgaatatgctggtgaggctggtgcatccatcactggagcatacgcacaggaaggtgcagattttcaacatcagtgacagtcaggctctggctttcactaaagggctcaactggatatttacggaacggcatttctttgtgcttaggagccatagcctccttcactttggagactcccattacttcaagctgaatgaaatgctgcaccatcacaggggtttgagtacaatgacgcatgttttgtgggaggctgttatcgatgggcccagggaacggatacactagagactg

SEQ ID NO: 8109 - DNA, 209 bp, Bos taurus
  Clone ID: 35-LIB2809-016-Q1-E1-A12
tcagtgtcactgttgagcagtttcagcgtgaggtacaacagcacacactggttgacctctagggtaaaacgactcctttgcccacgcacagtggccatggggtcgcttcctcgggtgccatcataacaacctcgcataaatcatcgctcctcttgaccaaacccctgtggaggtgccgtctttccttcaacctgaattcatgggagtct

SEQ ID NO: 8110 - DNA, 409 bp, Bos taurus
  unsure (27): unsure at all n locations; Clone ID: 35-LIB2809-017-Q1-E1-A12
atgggacgggatcggacgcacgggcangtacaccagctggaaattgttcccagtactgctgacgaacgacttcacagtatgatagacggaatccatgcccaacagaaaggacctatgataggagtgaatcaggaactggcctacttctaccctgagcttttcagacaattctaccagctggatgcctatccatctggtgcctggtattacgttccactaggcacacaatacactgatgccccatcattctctgacatccctaatcccattggctctgagaacagtgaaaagactactatgccactgtggtgaagagtcaagtgaattctgagggactccacagttatggtctttgatggatctgaaaattccatgctctacatgtcgtttcatccatcatgtcaaacca

SEQ ID NO: 8111 - DNA, 447 bp, Bos taurus
  Clone ID: 35-LIB2809-019-Q1-E1-A4
tccagccgaaatgggcccgggatacttgtgaaggtaggggttgtctactgagtaaggaatactgtttttaaggttctaaagctaaattcaaatgatgcattaatgacccaaaaactcagatctgatggtgtctgaatttctaacagtccttgctttgtgggtatgctgacaacttatctggatgccttacatcttttctaaacagtgttgcctctgaacgtgctctgctccctccctgctccctctttggagcccctttgcaccccagagcctgcagaagtggctggtataaaagggggcctggctagagaatgatcagtgtagctgtttgcaggattcctttctgggcttcattttggaaactttgcttagggctatttttcttaattgcccacatttgatggagggttaaaaggaattttgaatgtatttgatttattattatta

SEQ ID NO: 8112 - DNA, 177 bp, Bos taurus
  Clone ID: 35-LIB2809-020-Q1-E1-A4
gggacacctggaaacatcatgtctctctccatcggagaccgcgtccctgctgacatccgtctcacagaggtcacagacctcctggtggacgagtccagtttcacgggagaagccgagccaatcagtaagacacataccccactgacaggcgagggtgacctcacgaccccgagcaac

SEQ ID NO: 8113 - DNA, 389 bp, Bos taurus
  Clone ID: 35-LIB2809-021-Q1-E1-A4
gccatgtaaccgggatggcatcatctgccacaagggctgcaccctccgctttgaactccttggctgtgagttgaatggatgcactgaacccctaggcctgaaggataataccatccccaacaagcagatcacagcctccagctactacaaaacctggggcctgagtgcctttagctggtttccctactacgcacgactggataatcagggcaagttcaacgcctggaccgcccagaccaacagtgcctctgagtggctgcagattgacctgggctcccagaagcgagtcacgggcatcatcacccagggtgcccgagactttggccacattcaatatgtggctgcctacagggtggcctatggtgatgatggtgtgacctggactgagt

SEQ ID NO: 8114 - DNA, 243 bp, Bos taurus
  Clone ID: 35-LIB2809-024-Q1-E1-A12
tgttttgtccctgtctccttcctttctcgttctcctcattggcccccaggcctgccggtggtctgtcgttggtgggtttccagcgtccatggtctcggctcccctgctgtggtctcggggctgtggtctttgcgccggttggtcctttcctggagctgtctgagctttaaggtggatggctcaagctagagatatgacagaatcttctgggaagggccttgatgatcttcagcccagactttt

SEQ ID NO: 8115 - DNA, 355 bp, Bos taurus
  Clone ID: 35-LIB2809-025-Q1-E1-A12
cgtatgtgtatgatacataaggttatgtattaattgtagccgcgttctaacgacaatatgtacaagcctaattgtgtagcatctggcttactgaagcagaccctatcatctctctcgtaaactgccgtcagagtcggtttggttggacgaaccttctgagtttctggtaacgccgtcccgcacccggaaatggtcagcgaaccaatcagcagggtcatcgctagccagatcctctacgccggacgcatcgtggccggcatcaccggcgccacaggtgcggttgctggcgcctatatcgccgacatcaccgatggggaagatcgggctcgccacttcgggctcatgagcgcttgtt

SEQ ID NO: 8116 - DNA, 383 bp, Bos taurus
  Clone ID: 35-LIB2809-025-Q1-E1-A4
gccatgggcgcgggatacttggcccgggtcacgcgtgggtcctctccgggctcgggagtcgcatcctcaggagtagtgtagcgagcaaattctggaaagtagtcctcaatcttcgattttccagcaaggactttctcagccagcagatcttgcttgttgaggaacagaatcacagagatggtgcgcagccatctgttattccagatgctcttgaagaggttcagagcctcctgcaggcggttggtctggttgtcctcccgaatgaccatgttgtagctgctgctggcaaccacgaagatgatggcagtcacatcattgaagcattggatccatttgcggcgttcatcgcgctggccgcccacgtcaaacatgtggaagttgac

SEQ ID NO: 8117 - DNA, 423 bp, Bos taurus
  unsure (415): unsure at all n locations; Clone ID: 35-LIB2809-027-Q1-E1-A12
tttgtaatttttaagtctgagaagctgttcctaatcaaaaagaaaaaattatggccaattcgttggaaacaaccaacaaaataacccctttccaagaattaattatggagaaccaattaacctaacttaatggtggtttcaacaacaaaaaatttggataaccctaatcctcctcttttttttttaatattaggaaaactactttgttacattatttttaacttaaaatatattataatgcagtcagatataaataagtattcagtcaatcctaaaagaaatcagtcctgaatattcactggaaagacttttgctgaaactccaatactttggccacctgatttgaagaactgatgcattggaaaagatctgattctgggaaagattgaaggcaggagacgagaagacgacagangatgagat

SEQ ID NO: 8118 - DNA, 192 bp, Bos taurus
  Clone ID: 35-LIB2809-027-Q1-E1-A4
actacccatcgaagacacagtggaacgcatcactggcaatccctttgaggtttaccttaagccatacttcctggaagcttatcgacccatccggaaaggagacattttccttgtccggggtgggatacctgctgtagagttcaaagtagtggagacagattccagtccttactgcattgttgcgccagacac

SEQ ID NO: 8119 - DNA, 387 bp, Bos taurus
  Clone ID: 35-LIB2809-028-Q1-E1-A4
gggcccgggctaccggctagggcaaggcaggcggctctggcttcccacccttctgttcagagatgggggtggtgggcagtatttcatctttgggttccacaatgctcacgtgatcaggcagaggcttcttagggccaatcttaccaatcgggtcccaaggcagcatgatctttaccttgatgcaagccacaccctgtctgagcagcacatggcgcacggcggtgtccacatagtagttaacagggtccccactgtggatcatgaagccatccacaaacttcatggatttagccctctgtcctcgaagtttcccagacaccacgacctcgcagcctttggccccactctccatgatgaaccgcagcacaccatagcatgccctccgca

SEQ ID NO: 8120 - DNA, 374 bp, Bos taurus
  Clone ID: 35-LIB2809-029-Q1-E1-A4
atgctcccgtatggcacgggggcccgatacaatggaaaattcctccaacccaatggaatccgaatttattttcatggcaactttccacattggtaggtcgatgatggatgacaaggggtaagacgtccaaccaccgagtgcaggcatcaagggtttggctctggtttttacaactagtcaagaccacgaagtacggcgttgggatgggaacactggtgttgactgcagaatctgcaagttcatctggagcatcaaaatggccatcatagatcatcatcaaataccgagtccactaaccacattgacgccagttctttccagagcagattttacacggacaccactatggcagtaactccacatagatttggatg

SEQ ID NO: 8121 - DNA, 404 bp, Bos taurus
  unsure (378): unsure at all n locations; Clone ID: 35-LIB2809-030-Q1-E1-A12
acagcaaaaaggcctgaatgggcatatctctctggggatagggcactgctttctggggaacaggcaggactttggactgagaaagggacagcacggactgaggaggaaacatgacagttggaggaagaggctggtgaggctggtgcatccaagactggagcagaggcagaggaaggtgcagattttcaacatcagtgagagtcaggctctggctttcagtaaagggctcaactggatatttagggaagggcatttctttgtgcttaggagccatagcctccttcactttggagactcccattacttcaggctgaaggaaaggcggcaccaccacaggggtttgagtaagaggagggatgttttgtgggaagctgttanggatgggcccagggaagggatagact

SEQ ID NO: 8122 - DNA, 251 bp, Bos taurus
  Clone ID: 35-LIB2809-030-Q1-E1-A4
gggatacccaactctctgtgatcctatggatatagccctccaggctcctctgttcatggaattctcaaggtaagaatactagagtgggttgccatgccctcctccaggggactttcccaacccagtgattaagcctgaatctcctgcattggtaaaagggttccttaacaataacaacaactgggaaaccccaattggtttccgaattttgcaaattaaatcagaataatggattaaaggaaaaatgaagt

SEQ ID NO: 8123 - DNA, 421 bp, Bos taurus
  Clone ID: 35-LIB2809-031-Q1-E1-A4
ccgccaatgggccgggatacaccaaactggtgggacaggatgtggccaagtttatgaactggatggcggatgaatttaactatcccctgggcaatgtgcatctcttgggatacggccttggggcccatgctgcaggtattgcaggaagtctgaccaataagaaggtcaacaggataaccggcttagatccagctggacctaacttcgagtatgcagaagctccaagtcgcctttctcctgatgatgcggattttgtagacgttttacacacattcaccagggggtcaccaggtcgaagtatcggaatccagaaaccagtatggcatgtggacatttaccctaacggaggcactttccaaccaggatgtaacattggggaagctctccgtgtgattgcagagagacgccttggagatgtgga

SEQ ID NO: 8124 - DNA, 439 bp, Bos taurus
  Clone ID: 35-LIB2809-032-Q1-E1-A12
gccatgagggcgggatactctcacaccggccctggcccgggcccggggagcaacttgacttcgggcccagtgccctccaccacaacacgctcgctgaccgcatgccctgaggagtccccgccgctcggctggagagtccatgttcaaccgcgcaaagctcctcaatgttggctttaaagaggccttgaaggactatgactacaactgctttgtgtttagcgatgtggacctcatcccaatgaacgaccataacacctacaggtgcttttcacagccacagcacatttctgtagcaatggataagtttggatttagcctaccttacgtgcagtattttggaggtgtctctgctctaagtttacaacagtttctcagcatcaatggatttcctaataactactggggctggggaggtgaagatgatgacatttattacaga

SEQ ID NO: 8125 - DNA, 389 bp, Bos taurus
  Clone ID: 35-LIB3057-004-Q1-K1-A12
gtttcttgaaatcatcaccaccatggacagcaaaggttcgtcgcagaaagggtcccggctgctcctgctgctggtggtgtcaaatctactcttgtgccagggtgtggtctccacccccgtctgtcccaatgggcctggcaactgccaggtatcccttcgagacctgtttgaccgggcagtcatggtgtcccactacatccatgacctctcctcggaaatgttcaacgaatttgataaacggtatgcccagggcaaagggttcattaccatggccctcaacagctgccatacctcctcccttcctacccctgaagataaagaacaagcccaacagacccaccatgaagtccttatgagcttgattcttgggttgctgcgctcctggaatg

SEQ ID NO: 8126 - DNA, 411 bp, Bos taurus
  unsure (13): unsure at all n locations; Clone ID: 35-LIB3057-004-Q1-K1-A4
cgacccacgcgtncgctagagctaactggtgaagtgcgcctattgaaatcattaccaccatgtacagcacagggtcggtgcataaagggtcccgactgctactgctgctgaaggagtcaaatctactcttgcgccatcgtgtggtctacacccccgattgtaccaatgggcctgataactgacacgtatgcctttaagacctgattgaccactcaataatggagtaccactacattcatgagctctactcggaaatgttcaacgaatttgataaaccggatgcccaaggcaaagggttcattaccatggccctcaacaactgccatacctacttccttcctacccctgaagataaagaacaagcccaacagacccaccatgaaatccttatgaacttgattctttggttgc

SEQ ID NO: 8127 - DNA, 387 bp, Bos taurus
  unsure (50),(68): unsure at all n locations; Clone ID: 35-LIB3057-005-Q1-K1-A4
ctcgcctcttggtacctgctccgggtggccgtgagggagcgcgggccggngacgacccctaagagcangagaagcgagaggagcaggtctgcgagtcgaagtgttgcagcggcgcacttgcagcaagaatcggaaggagcaggagacagcaaggataggcccaggagcaatggcttccaaagaggaacgagcaatagaaagtttcaacatggaagatgcccaacaggaaaacgaacgaggagaccaggcctctttgaagactggagaggaatcacgcgacttgggagggggcaaagtccagaagtctggaggaaatatcagactgggatgggttagacgacttgtccctaattttcgatgggctatacccaaccagcgtattgatca

SEQ ID NO: 8128 - DNA, 384 bp, Bos taurus
  unsure (9): unsure at all n locations; Clone ID: 35-LIB3057-006-Q1-K1-A12
gcgagcggncgcccttttttttttttttttttttttttttcgggaaacttgaaaggttggatttcttaactacagacagttttaaaagtcgggatacctggcgccataactgcctgggcgaatcctgacccaggctgcgaggcggtaggagggcagaagagaggccttcagggtcaactttccgcggagagaggcccctgcccgctgcgccctcactggcccttcttgtgggcgttcttgatgatggcgtttttgaacagcgtgacaaggggcgtttggctcttctcggaggtcatgaacccgccgtagcgcttgtccttgggcgggctgccccagcggaagtgttccatcttatagggccccgagtccttttttctggtcgcc

SEQ ID NO: 8129 - DNA, 422 bp, Bos taurus
  Clone ID: 35-LIB3057-008-Q1-K1-A4
cttgcctggaaaatcccatggacagaggagcctggtgggctacagcctgtggggtcacacagagttggacacgactgagtgactgagcacacacacaatactatcaaatatctagtcaatgtttgtatttctgataatttcatagtagttaacatttcttgcttttatagtttgaattaggatctaagtaaaattcacacattgtaatcagttcatatgtttcccatcgtaattttttactttgttttttaacgttttgttttgaaataatttttaaaatctatagaaaaattataatagtaccaagagctcctgtatattttacccagatcccataattaacattatgtttatttgccttttcattctcactttctttgaaagttgcagacacaatgtctcattaccccttagttatttcc

SEQ ID NO: 8130 - DNA, 101 bp, Bos taurus
  Clone ID: 35-LIB3057-009-Q1-K1-A4
gtccatcagtgcatgacatttactgccacatatagtcctagctgatgccaataataaaagaaaagaaaccacgtgggctgatattttctctatgcaaaatg

SEQ ID NO: 8131 - DNA, 326 bp, Bos taurus
  Clone ID: 35-LIB3057-010-Q1-K1-A12
tctagatcgcgagcggccgccctttttttttttttttcttatcctctcatcattgaggggatgtattaatagacattatagtaaacccacgcgaaatattcagaattagaaggggattaaagagccacgtttgggcgttacgttgactattcctcattttcatcctaaggggggttgtgacgccagtgtggggacttcgtgggggtctggtggaagagatgctgaaatcaaaaggtgggaatcagtaggttatgggggaagcacgggagatgtcagctggggttagaaaagagtgggatagaggaccccttcccgtccttaattgg

SEQ ID NO: 8132 - DNA, 362 bp, Bos taurus
  Clone ID: 35-LIB3057-010-Q1-K1-A4
atcgcaagacggccagcctttttttttttttttttttttttttttttttttttttttttggggttggtaataaaaagtgtattactttgattaatttggggatattgaaaaaaacttcaggccatttttactgatgaacatagatgcaaaaatccttaacaaaattttagcaatcaaaatccaacatcccattaaaaagttcatatcccatggccaattggcttttatcccaaaaatgcaagtatttttaaatatccacaattcaatcattgtattacacccctttatcaaattgaaaattcaaacccatttgagtatctaaaatatatcagataaagccttttacatatttcaacattcat

SEQ ID NO: 8133 - DNA, 314 bp, Bos taurus
  Clone ID: 35-LIB3057-012-Q1-K1-A4
caccctcaaaggccacaacggctgggtgacccagatcgctaccactccccagttcccggacatgatattgtccgcctctcgagataagaccatcattatgtggaagctgaccagagatgagaccaactatggtatcccacagcgtgctcttcggggtcactcccactttgttagtgatgtggtcatttcctcaaatggccaatttgccctctcaagctcctgggatggtacccttcgcctttgggatctcacaacgggcaccaccactcgccgatttgtaagccataccaaagatgtgctgagtgtggccttct

SEQ ID NO: 8134 - DNA, 440 bp, Bos taurus
  unsure (394): unsure at all n locations; Clone ID: 35-LIB3057-013-Q1-K1-A4
cttggacagttcaaccttctgcagctggatcctgactgtagagggtgctgtcaagaagaagcacaatttgaaactaaaaagctgtatgcaggagctattcttgaagtctgtggatgaaaattggggaggttccctcaagtccaagctttcgtcaggagtgataaacccaagctattcaaaggactacaaatcaagtatgttcgcggttcagaccctgtgctaaagcttttggacgacagtgggaacattgctgaagaactaagcatcctcaaatggaacacagacagtgtagaagaattcctgagtgaaaagttggaacgcatataaatcttaaattttgtcctatctttctgttaccttgttcaatgaaacactatagcacctagaaaataanttaggtttgctttctttcattgatcagtcttttactgtgaggcatt

SEQ ID NO: 8135 - DNA, 419 bp, Bos taurus
  unsure (11),(327),(330): unsure at all n locations; Clone ID: 35-LIB3057-014-Q1-K1-A12
cgccgcgccgncccgccgcgctgtagtggccttgttctccgcttttcagtgttgttgtgtgacgacgttgccctgctcacttcagcctccggcccgccatctccttgagccctaccaccatgccttcaattaagttgcagagctctgatggagagatattcgaagttgatgttgaaattgcaaaacaatctgtgaccatcaagactatgttggaagatttgggaatggatgatgaaggagatgatgatccagtccccttgccaaatgttaatgcagcaatattgaaaaaggtcattcagtggtgcactcaccacaaggatgatcctnctnctcctgaggatgatgagaacaaagaaaaacgaacagatgatatacctgtttgggatcaagaattcctgaaagttgaccaagggacactc

SEQ ID NO: 8136 - DNA, 152 bp, Bos taurus
  Clone ID: 35-LIB3057-014-Q1-K1-A4
cccggcccgatctttcggtccctcagtgatcatgaatcggttcagctccgcacactgggtgttctgggtggggcccatcgtgggggctgccgtggctgccatcatctacttctacctgctcttcccccacttcctgagcctgagtgatcgtg

SEQ ID NO: 8137 - DNA, 424 bp, Bos taurus
  Clone ID: 35-LIB3057-015-Q1-K1-A12
gttcaggtctgcaactatcaataaacagttacaccccaccgtgtgccaagaagcatcgggagttacagggcttgaactcaactctggaagacttggaagagaggttgtttggagttcgtgtctgattgaatgtgtatgtgtagaaactaacccagcacctagtgcagtgcctcgcaaccagtaatccctcaataaactttccctaaatgaatgaggacaccgggttccctaggagccgccccaggcttaatgattgtccagaaggaggctataaagggagcctgggaggctgggtggaggagggagcagaaaaagcctaactcagcagacctggcactgagagcccgccagccccagacgtggtcagagactttgtgtcccagccagtatggcctgctccttgccaccatggcagcccgaggct

SEQ ID NO: 8138 - DNA, 435 bp, Bos taurus
  Clone ID: 35-LIB3057-016-Q1-K1-A4
atcgcgagcggccgccctttttttttttttttctcccattcagttcacatttcaggctgctcagcagatgcctgtgattctggtgattcaaatcgctggtgaaagtttgttctctgtttcctcagtttttcaggagcttttctccacaaaatgatctcctgctgcttgaagtaccttctgtcttcttcatcaacaaggactagattcaaaaagtaccttactgaaaattttttgttcacatctctcattgttggagttgggtcatatcctgctaaaaatagtcttattggaattgattcacctttaactggtgcgccatccattatttcatatttagcgattgtttctgtttctgttgtggtactgggtccaattcctgtgatctcttttttaatcagttgtaactccatatgttggatttttattcttactaat

SEQ ID NO: 8139 - DNA, 195 bp, Bos taurus
  Clone ID: 35-LIB3057-017-Q1-K1-A12
ctaccacttattctgatcttgacaaatcttccatagatgtcttcaccaatgactatacatttaccttaataaaacttaatctgaaaacaaaatctgacaatgtactgtaatttactatctcaagttcatccaacaccgataccaccaatattacttacaacctgtaaaccaaatacagattgactgaatataatc

SEQ ID NO: 8140 - DNA, 244 bp, Bos taurus
  Clone ID: 35-LIB3057-017-Q1-K1-A4
ccgccggaatggcggctgtggcggcgttcgcgggctggctgctgcggctccgtgcagccgtgtccgactgaccctggcgtcggctgtgtggcgcggggctgtcgaggggcttcctgcagtccgcctcggcctactgggcttcggcccataggcggcaggtggctcacttcactttctagcctgacccggagcccgtggagtacgggcagactcagaaaatgaatctcttccaggcagtaacaag

SEQ ID NO: 8141 - DNA, 420 bp, Bos taurus
  Clone ID: 35-LIB3057-018-Q1-K1-A4
ataggatccaaaatatccagttaatattcaagcacatccacctattttacactcacaagtggaaaaagaagctcctgaagctattgtagacaatttctggtagtccgtttaacacattcaacccatacaatcacttttacagtatccttatttattatactcatagattttttgtgaatgtaggtaaagttctctccatccttaaaattgtggaattccaaaattgatttcatgtgattttgtagagtttaggactagtgctgagtatatgtggaggatttctattcctgtgtgatatattattattaatgcatgtggtatcatgcttgtctttgaatatctatagttgctaaattgtgaagtcatatggagcttttgaattatttttgaccttctactggtaccttgtatgctatattc

SEQ ID NO: 8142 - DNA, 270 bp, Bos taurus
  unsure (3),(12)...(13),(20),(36): unsure at all n locations; Clone ID: 35-LIB3057-019-Q1-K1-A4
cgncgaatgggnnagcaccnggcgccccacgaacgnacggagcgagacgggcgagggggggggcgactttccggccgcgccccgtgtgccgggactaagggctctccgcaccggaccccggtcccgacgcgcggcgggggcgcgccgcgccgcgccccgggatacgcgggcgacggcccgccggcggggacggcgggggaccggctatccgaaggccaaccgatgctgccgcggagctgccgtatcgttccgcctgggcgggattctgac

SEQ ID NO: 8143 - DNA, 440 bp, Bos taurus
  unsure (366): unsure at all n locations; Clone ID: 35-LIB3057-021-Q1-K1-A12
attggagaagccatcttgtttgattgttctgctgactcttatcctcccaacacctactcctggatccagaggacaaacaatgccacatatgtcattaagcatgggcctcgcttggaagttgcatccgagaaaatagcccagaagacaactgactatatgtgctgtgcttacaacaacataactggaaggcgagatgaaactcacttcaccgtcatcatcacttctgtaggaatagagaagcttgcacagaaagggaaatcattgtcccctttagcaagtataactggaatatcactctttttgattatatccatgtgtcttcttttcttatggaaaaaatttcaaccctacaaagttataaaacanaagctagaaggcaggccagatacagaatacaggatagcacgaacattttaggccacgaggatgcgctggatgac

SEQ ID NO: 8144 - DNA, 306 bp, Bos taurus
  Clone ID: 35-LIB3057-022-Q1-K1-A12
ccacgcgtccgcttgctatctgtcagagtcggtgtgttactccgcggtcctgatgaatcagaaaatcgagttcgatccgggtcttctgactgtcaagggcttaccccgtgcaaggtgcgagtgcagagagtgaaccgtcgcgagatgagcacgatgttcgcagacacgctgctcatcgattacatctccatgtgcaccgctctgcttgccgagggtataacttgggtcctggtttacaggacagacaagtacaagagactgaaagcacacgtggaaaaacacagtaaaaaattgcgaaagaagaag

SEQ ID NO: 8145 - DNA, 259 bp, Bos taurus
  Clone ID: 35-LIB3057-022-Q1-K1-A4
gaggaaacaaacgacttctggaaggcattgagattatatttggccaggtaattccatggtccagggagactgatccctaccctgtgtggtcaggactcccgtccctgcaaactaaggatgaatatgcacgttattccactttttataacctgctccactgtctgcgcatggattcaagctagattgacaacttaccttaatctcctgaattgcataatcatctacaacaactacttcttagcccacatttaatcttttc

SEQ ID NO: 8146 - DNA, 374 bp, Bos taurus
  Clone ID: 35-LIB3057-023-Q1-K1-A4
tcgccgagaggccagcggacctcggaaccggcagcactcgctctcaaccacccacccaccagtctcggaaccatggcggcagtggcggcagcgtcggctgaattgctcatcatcggctggtacattttccgcgtgctgctgcaggtgttcaggtactccctgcagaagctggcatacacggtgtcgagaaccggacggcacgtgctgggagagcgccgtcagcgggcccccctactgaggccccagccccctcccctgggcggccgtgtcaccaggtgctcctgggccattccaccagcatgggagccagcgccgctcatgaatggtgcgtcccctgttccctcttgccagaggagcacttgccaaggtcagtg

SEQ ID NO: 8147 - DNA, 418 bp, Bos taurus
  unsure (26): unsure at all n locations; Clone ID: 35-LIB3057-024-Q1-K1-A12
cggacgcgtgggtggagaatgatatngggtcaggttattcctggagccaaagagactgagcccgatcctgtgtggtcaggactcccgtccctgcaaactaatgatgaagatgcacgttattccgctttttataacctgctccactgcctgctcagggattcaagcaagattgacacttaccttaagctcctgaattgcagaatcatctacaacaacaactgctaagcccacattcatcctatccatttctgagatggttcttaatgatccattccctggcaaacttctcttatctttatagctttgtaattcatgctttgctctaatgggtttcatcttaaataaaaacatactctgtaactattttcaaatctaattttttatatttttttttattttatttttttttattttactt

SEQ ID NO: 8148 - DNA, 297 bp, Bos taurus
  Clone ID: 35-LIB3057-024-Q1-K1-A4
gcagaacaaggcaacctgtcctacggaaaagtttaaccttctacagttaatcaagtccccaggaggaagtctgtccagttctggtttccttttctgttgctggagagcaatctgctgcaaaagctgcgagctgaccaacatcaccatcacggtggagaaagaggaatgtggcttctgcataagcatcaacaccacgtggtgtgcaggctactgctacacccgggacttggtgtacagggacccagcaaggcccaatatccagaaaacgtgtacctttcaggagctggtctacgagac

SEQ ID NO: 8149 - DNA, 388 bp, Bos taurus
  Clone ID: 35-LIB3057-025-Q1-K1-A4
ccaaggtccagcacagaccttcgggcctcatcatggccagaaagctgatccacctggagatcaagccggccatccggaaccagatcatccgagagctacaggtgctgcatgagtgcaactccccgtacattgtgggcttctacggggccttctacagcgacggcgagatcagcatctgcatggagcacatggatggcggctccctggaccaggtgttgaaagaagccaagagaatccctgaagagatcctgggcaaggtcagcattgcggttctgcggggcctggcatacctccgggagaaacaccagatcatgcaccgagacgtgaagccgtccaacatcctggtcaactcccggggggagatcaagctgtgtgacttcggggtgag

SEQ ID NO: 8150 - DNA, 398 bp, Bos taurus
  Clone ID: 35-LIB3058-001-Q1-K1-A4
gggaattggtttggggaggtacagagcccaaagatgtgacctgggtggatggtgaaatagtcctggtctcttcctcttgtcttatctctgacttctgtgctggaaaactcttttctttcctttgggcaatgtcacagtctctaattatggatctctcctttgttagcacctgttacttttgctttcacggtaagacatcccctgcttggagatctgaggaagcttctcacttacgaatctgtaaaacaaaagtacctatactacagacgagtacccaacagcaaccctcctgagtatgagttcctctggggcctccgatcctaccatgagactagcaagatgaaagtgctacgattcattgcaaaggttcacaagagagacccttgtgactggactgc

SEQ ID NO: 8151 - DNA, 428 bp, Bos taurus
  Clone ID: 35-LIB3058-002-Q1-K1-A12
ggattcagcacgccgcccgttgggaagggagcttcgaggcggcccgccgcggcgcgtcggccgggcgggctgagccaatggcacgggcccttggggcgcgaacgccctaacgtgggtcggggcgggcggcgagcagaggcgccggttgctagcttggattctgacttagaggcgttcagtcataatccggcacacggtagcttcgcgccactggcttttcaaccaagcgcgatgaccaattgtgtgaatcaacggttcctctcgtactaggttgaattactatcgcggcgcggtcatcagtagggtaaaactaacctgtctcacgacggtctaaacccagctcacgttccctattggtgggtgaacaatccaacacttggtgaattctgcttcacaatgataggaagagccgacatcgaaggatcaaa

SEQ ID NO: 8152 - DNA, 423 bp, Bos taurus
  Clone ID: 35-LIB3058-002-Q1-K1-A4
cccacgcgtccgggcggcccgccgcggcgcgtcggccgggcgggctgagccaatggcacgggcccttggggcgcgaacgccctaacgtgggtcggggcgggcggcgagcagaggcgccggttgctagcttggattctgacttagaggcgttcagtcataatccggcacacggtagcttcgcgccactggcttttcaaccaagcgcgatgaccaattgtgtgaatcaacggttcctctcgtactaggttgaattactatcgcggcgcggtcatcagtagggtaaaactaacctgtctcacgacggtctaaacccagctcacgttccctattggtgggtgaacaatccaacacttggtgaattctgcttcacaatgataggaagagccgacatcgaaggatcaaaaagcaacgtcgctatgaacg

SEQ ID NO: 8153 - DNA, 449 bp, Bos taurus
  Clone ID: 35-LIB3058-004-Q1-K1-A4
gcccgaataaacaatataagcttgtgactcctccctccctcattcctactactgctcgcatgctctatagttgaagctggggcaggaacaggctgaaccgtgtaccctcccttagcaggcaacctagcccatgcaggagcttcagtagatctaaccatgctctctttacacttagcaggagtttcctcaattttaggagccatcaacttcattacaacaattatcaacataaagccccccgcaatgtcacaataccaaacccctctgttcgtatgatccgtaataattaccgccgtactactactactctcgctccctgtattagcagccggcatcacaatgctattaacagaccggaacctaaatacaaccttcttcgacccggcaggaggaggagaccctattctatatcaacacttattctgattctttggacaccccgaagtcta

SEQ ID NO: 8154 - DNA, 428 bp, Bos taurus
  unsure (383): unsure at all n locations; Clone ID: 35-LIB3058-006-Q1-K1-A12
agagacattaccctgccaacaaaggtccgtctagtaaaggctatgttttttccagtggtcatgtatggatgtgagaattggactataaagaatgctgagcaccaaagaattgatgcttttgaactgtggtgttggagaagactcttgagagtgccttggactgcaaggagatccaaccagtccatcctaaaggagatcagtcctgaatattcattggaaggactgatgttgaagctgaagctccagtactttggccacctgatgtgaagagctgactcatttgaaaagcccatgatcctgggaaagattaagtgaatgaggagaaagggatgacagaagatgagatggttggatggcatcaccgactcaatggacatgggttngggtcgactccagaagttggtgatggatagcgaagcctggcgtgc

SEQ ID NO: 8155 - DNA, 433 bp, Bos taurus
  Clone ID: 35-LIB3058-010-Q1-K1-A4
agagaacgcgcgccatcccgggacctgggtgcagctagcgacccttgtccccagcgcgcagcccgaggtgagcagtgagcggcgagcgggacggcagcgaggcgttcgcggggcccctcctgctgcccgggcccggcccgctcatggcggccatccgcaagaagctggtggtggtgggcgacggcgcgtgcggcaagacgtgcctgctgatcgtgttcagtaaggacgagttccccgaggtgtacgtgcccaccgtcttcgagaactatgtggccgacatcgaggtggacggcaagcaggtggagctggcgctgtgggacacggtgggccaagatgactacgaccgtctgcggtcgctctcctacccggacaccgacgtgatcctcatgtgcttttcggtggacagcccgggatttgctggagaacattccct

SEQ ID NO: 8156 - DNA, 370 bp, Bos taurus
  Clone ID: 35-LIB3058-011-Q1-K1-A4
tcgcggacgcgtggttcaccttcatgattgctgccacttacaactttgccgtcctgaaactcatgggccgaggcaccaagttctgatctcctgtagaaatttccctttctctaatagcgaggctctaaccacacagactacagtgctgcgtctcccatgttaactctttgcctatgccactgactggccctcttcttacttgacgagtgtaacacgaaaggagagtctcacggtgattaatgtctatgcggactcttccctcttacgtacctcttttagtcattctgcttcataactggttcctgctagaaatgggaaatgcttaaagatggtgactccgcaactgcaagtcacaaagaagtggaggctc

SEQ ID NO: 8157 - DNA, 444 bp, Bos taurus
  Clone ID: 35-LIB3058-013-Q1-K1-A12
ggattccggtcgaccacgcctccgggaggctatgatgattatgatggctataatgatggctatggatttgggtcagatagagtcggaagagacctcaactactgattttcaggaatgtgagatcacagataccgggatgctggctctactttgcatagcacaacaggacactgtgttcacatgcggcgattaccttacagagctactgagaatgacatttataagtctttttcaccactcaaccctgtgagagtacatattgaaattggtcctgatggcagagtaactggtgaagcacatgtcgagtttgcaactcatgaagatactgtggcagctatgtcaaaagacagagcaaatatgctacacagatatggagaactctccgtgaactctacagctggagcaagcggcggtgcttacgaacacagatatgtagaactcttc

SEQ ID NO: 8158 - DNA, 256 bp, Bos taurus
  Clone ID: 35-LIB3058-015-Q1-K1-A4
cttaaaggccatatacaagtgctagtatacgctttcatgcctggctctctggtgttctcatgtacaaagtccacagcatagtgcatggttggcgtttatgtttacatctcattgtctacatggccatttctatgggtagtcctctatcctttgagcagtatatgctgtattgctcctgcagtttcagaccacatggagctcgattgagatactgcaccacagaaccgctttgcagttttatggggcccctgaggca

SEQ ID NO: 8159 - DNA, 432 bp, Bos taurus
  Clone ID: 35-LIB3058-016-Q1-K1-A4
cggacgcgtggggtttgttttttatggtgcctatcacatggatttatttttgtctttgttgagagctctttatcgggaacaagggactctgtttctatctctagtacagtttttatctctgacaacagtgcctaataacagttgctatacaattaaacggagaaggcaatggcaccccactccagtactcttgcctggaaggtcccatggacggatgagcctggtgggctgcagtctgtggggtcgctaagagtcagacatgactgagcgacttcactttcacttttcactttcatgcattggagaatacagtggcaacccactccagtgttcttgcctggaaaatcccatggacatgggagcctggtgggctgacgtctatgggggcgcacggagtctggcacgactgaagcgacttagcgtcagcataca

SEQ ID NO: 8160 - DNA, 349 bp, Bos taurus
  Clone ID: 35-LIB3058-018-Q1-K1-A4
atcgcgagcggccgccctttgttttttttttgccaacgagcttacatgccctgtattcgtagacactctacattactcacacatgcgacgactactcctctgaatcaagtgaccgcatcctatgacccaggctctcaaaacatcactgctgacgatgttaagatcatccatgtcttgatcgatactacttataccatagaagcgtacgagaactgcatcaattacaacatcatatcaattaagggataactagattcactgaggctactatgagtaaaaccttttacgacagaggctgaatagcaaattatgcacagccttgctaatattacaatctatgaattcttta

SEQ ID NO: 8161 - DNA, 286 bp, Bos taurus
  Clone ID: 35-LIB3058-019-Q1-K1-A4
atcgcgagcggccgcccttttttttttttttttttttttttttttttttttttttttttttttggtttttctgtcttcattttaggaatttgtttttaattgggggacatatgcagggggatccaattgttttccattgtttggttgccctgacctaggaatgttggtcatatcaaacattaaatttaaaaatgaccattcttttaattaaaattaacttttaaatgttgataggagtttttgctgtgaagattactaaaatttgttatatttttgacatgaattg

SEQ ID NO: 8162 - DNA, 325 bp, Bos taurus
  unsure (317): unsure at all n locations; Clone ID: 35-LIB3058-020-Q1-K1-A4
gccgccactaaagtgaaccagaagggttgttatgatctggtgaccagtttcatggagaccaacatgggaatcatcgctggagtggcttttgggattgcattctcccagctgattggcatgctgctggcctgctgtttgtcccggttcatcacggccaaccagtatgagatggtgtaaggagtctttcaagaatgatggaataagagacctgttttcaaaaggaactgcagcaatctttgaaagacttccaaagaatgttagagcacagtacataatacacctgtcctaacccccaccccaccccgcgtgcaactgcnaactgacg

SEQ ID NO: 8163 - DNA, 219 bp, Bos taurus
  Clone ID: 35-LIB3058-021-Q1-K1-A12
gttatagatcgcgagcggccgacctttttttttttcgttttgcgcgcccgcaggcacttcgggtgaagaataaactatgtatgggacgtagatcttgaaaggactacatgtaccaatatacaggtaaactaaaactagatgcactttaaataaacaaactgcacatactgtggtaaaatactgtctagattcatgtaaactttagctcatgcatgaaca

SEQ ID NO: 8164 - DNA, 410 bp, Bos taurus
  Clone ID: 35-LIB3058-023-Q1-K1-A12
cggacgcgtgggttcccaggcaagaatactggagtgagtagccattcccttctccaggcagtgtttccaacccaagtcttctgcattgcaggcagattctttaccactgagccacgagggaagccccaataagtagcatgtgtatggaaaacataacacatctttaagaagaatgctatatatcttcaatttcggcttcacatagttgagatgctgaaaagtcttcacagcctttcttaacagtgttctcttgacttatttgaccatagaaatacccctttcagtaaccattattaacatggaactaggattttgtgggagatagcaagattcatatgggaactgctagttatggaatgtacatctagttctctgaccaggtccattctggtacaaaatgtctatttccc

SEQ ID NO: 8165 - DNA, 269 bp, Bos taurus
  Clone ID: 35-LIB3058-027-Q1-K1-A12
ggcagccgtgggcctggggctcacgttgttcacctgtggcccccacactttgcattctctggtcaccatccttgggacctgggcgctcattcaggcccagccctgctcctgccacgccctggccctcgcctggaccttctcctacctgcttttcttccgcgcgctcagcctgctgggcctgcccactcccacgcccttcaccaacgccgtccaactgctgctgacactgaagcttgtgagtctggccagtgaagttcaagacctgcacg

SEQ ID NO: 8166 - DNA, 423 bp, Bos taurus
  Clone ID: 35-LIB3058-029-Q1-K1-A12
ggagaggccttttaaagatattttacctcaaaggggggaaagcagagagggaaagtgtgtattttatgaggaggaacagagtgggtgattcctcctctctaaaacatttacacacacacccctcccttaccctctaatccttagttttcctgccaacccccagggtaggctggggaccaggccaggactgtaattatggggtgcacaccagggagggtccccctccagcaggacctggtgaaggggtcgggcaacctggggagccccgaccctctggctgctcctgcttctctctcctctctccccgacctcactccaggcggcacagacctggagctgaggcagccgccgccccctccatcgcatccagcggagttagagtggtggtggtgcaggcacatctgctttcacggtgctcctcgc

SEQ ID NO: 8167 - DNA, 474 bp, Bos taurus
  Clone ID: 35-LIB3058-029-Q1-K1-A4
cccggttcgacgccacgcgtccggcccggggcaggacttccgcatggccacgctctacagccgctcccataacccccgtgcgcgagtcaaggaacacttcagcacctttgccaatagcctgggctttacagaggaaggcattgtgttcctgccgaagactgacaagtgcatggaggagcactcataggtgagtctgcctcttaggacctggcccttctgccctgctcagccgattgctgctacaccagagacctcagactgagaccccagtcccggcccctctccatccatgccaccctcagcctttattccggctctgaaaataaactctgaagcaagtcaaagtataaaggcattcttcataatgggagaaaattgtagctcatgaataaactgacaaacaactaatctcatgaatgtacatgcaactcctacagttcaactccagaaaaattaagtgtccctttctaaaat

SEQ ID NO: 8168 - DNA, 423 bp, Bos taurus
  Clone ID: 35-LIB3058-031-Q1-K1-A4
taattttctggtggtgtctttagggttttctatgcagagggtcatgtcatatgcaaacggtgagaattttacttgttcttttccaatctggattctttatatttctttttcttctctgattgctgtggctaaaacttccaaaactatgttgaatagtggtggtgagagtgggcacccttgtcttgttcctgacttttggggtaatgctttcattttttttacctatgttttttgtggtgtttattatatttgttttttatttgcgttttttcctttcttgttttcttttttttttgttattttttgtttttttttttttttatttttttttatttttttttgttttttttttattttttttttgttatttttcttttttttttattttttatttttatttttgtttattattttttttttttt

SEQ ID NO: 8169 - DNA, 327 bp, Bos taurus
  Clone ID: 35-LIB3058-033-Q1-K1-A12
gttctagatcgcgagctgccgcccttgttttctgtttgcgtaattctaagaaaaatttagtgaatatctgaataacagttggtttaagatgaacttttgcatataactgccgctacacaatgtatttcgtatatcatgttaaaacgtagcattatacacaaatacaaaaaccatgatacatgtcacccatcttcaacaatctataacaaattactcatatgtatacagtaaaactgaaataaaacaaaatttatttttacaattaataaaaatatcaaatgaatattctataccataacataataaatcatattttttatatactta

SEQ ID NO: 8170 - DNA, 401 bp, Bos taurus
  Clone ID: 35-LIB3058-034-Q1-K1-A12
tcggtgggcggagctacagccaaggaccactgtcatgtctgagttagagaaggccgtggtggcgctcattgacgtcttccatcaatattccgggagggaaggtgacaagcacaagctgaagaagtcagaactcaaggagctcatcaacaatgaactttctcattttttagaggaaatcaaagagcaggaggttgtggacaaagtcatggagacactggacagtgatggggacggcgaatgtgacttccaggaatttatggctttcgttgccatgattaccactgcctgccacgagttcttcgaacacgaataaggaaaagaaagcagcggagctgtttctgcagcagagacggagtttgaccaggggaacacaggcagggcttgcagggctgtaggagctg

SEQ ID NO: 8171 - DNA, 407 bp, Bos taurus
  Clone ID: 35-LIB3058-034-Q1-K1-A4
gcgggccctatggccagtgcaagctgctgcttacgcacaactacctgtacgcggcctgcgagtgcaaggccggatggcggggctggggctgcacggacagtgcggacgcgctcacctacgggttccagctgctgtccacactactgctctgcctgagcaacctcatgtttttgccacccgtggtcctggccattcggagccgatatgtgctggaagcggctgtctataccttcaccatgttcttctccacgttctaccatgcctgtgaccagcctggcattgtggttttctgcatcatggactatgatgtgctgcagttctgtgacttcctgggctccttaatgtccgtgtgggtcactgtcattgccatggctcgcttacagcctgtggtcaaacaggtgctatac

SEQ ID NO: 8172 - DNA, 434 bp, Bos taurus
  unsure (62),(284),(301): unsure at all n locations; Clone ID: 35-LIB3058-035-Q1-K1-A4
cggacgcgtggggtgccacggctccccgttggttgtcatcagccagggcaagatcgtgtgcnaggatggcaacatcaacgtcaacaagggcatgggccgcttcatccccaggaagcccttccccgagtacctctaccagcgtataaggatccggaacaaggtttctgggttgcaaggggttcccaggggcatgtatgacgggcctgtgtacgaggtgccagccacacccaaatatgcaactcccgctccttctgtcaaatcctcgccttccaaacaccagcctncacccatcagaaacctncaccagtccaacttcagcttatcaggcgcccagatagacgacaacaacccccggcgcactggccaccgcatcgtggcgccccctggcggccgctccaacatcaccagcctcgggtgaaagcgctgcatggatg

SEQ ID NO: 8173 - DNA, 429 bp, Bos taurus
  unsure (188),(323): unsure at all n locations; Clone ID: 35-LIB3058-036-Q1-K1-A4
gacccacgcgtccgttgagagcattgcgggcctggaggaatttttgcatatggaaatgagtaagctcaaccagaacctgaacgatgtgctcatcagtctggagaagcagcacgggagcaacacgttcacagtcaaggcccagcctagtgacaacgtgcctgcgaaagggaacaagagcccctcaccgncgcctgatggctcccctgctgccacccccgagatcagagtcaaccatgagcccgagccggctggtgcggccacccccggggccaccctccccaagtccccgtctcagcttcggaaaggcccaccagtccctccgncttccaaacacaccccgtccaaggaggtcaagcaagagcagatcctcagcttgtttgacgacacgtttgtccctgagatcagcgtgaccacccctttccagtttga

SEQ ID NO: 8174 - DNA, 325 bp, Bos taurus
  Clone ID: 35-LIB3058-037-Q1-K1-A12
ccacgcgttcgcgggctcgtggggggaggaggactacctgggtggcagaggctgtggacgtactgaactgcggagaggatggtgcagacccgtgaggaatggagttcatgaggggaggaataaggctcccggatgtggtagtgggactgtaggtggaccctgaagctgctgatgactgcattcatgtgctcacactgctctgacgccgctcatacacacacatacactcacagcctgtctggctgcctcctcggttgaagagccacctgtagtatttgccttggattggcgtggtacagcggatgtgaatacttgaaatagctgt

SEQ ID NO: 8175 - DNA, 426 bp, Bos taurus
  unsure (61): unsure at all n locations; Clone ID: 35-LIB3058-037-Q1-K1-A4
ctgaattgtacattttacttccactcttggctttctcaatggtattataggtataactcanagggtggaatatcaaggtcttttttttttttttaattcctcacacccagttaatatctcttgctttctttggtcaggattgaaggggtcaagttcttaatcacttcacaaccacctacctacccctgcccttttctttttcctatcactgaagctttctagtgcattagttgggaggggggcgggggaacataaccactgcttccatttaatcaggtgtgtttgtccaataggcatagctctccggacagagagcccagtcattgtgaagggatggggaggactttttctgagtggttactgagtcggggacaggggtgttggattctgtggttaggttaggatttcccttcttggtgggaagtt

SEQ ID NO: 8176 - DNA, 440 bp, Bos taurus
  unsure (40),(51),(53)...(55): unsure at all n locations; Clone ID: 35-LIB3058-038-Q1-K1-A4
gacccacgcgttcgtctagatcgcgagcggccgccctttnttttttttttncnnntttttttaagattaacatggggtatttcattatcagtcttacaagttgctgaggttgggcaaagccaggagagtaacttcaggcgtttctatcaagtgacagcctgattagcagggccgttactgagcggagggcaatggagggcaccccaggaaccccagcttctacagcagtgttaaaaccccttcttcagaggcactggatagggcgtggcccgtgacagccaggggccactccactggcttttggtgcccactgacccctttcagcatagacacaaaggccttcagaggcaccaaggaggcaggatgggctgggcaagtggaaagactggtactttctcaccgaggctctgtctctggcctcgatcttcccaccgacacag

SEQ ID NO: 8177 - DNA, 439 bp, Bos taurus
  Clone ID: 35-LIB3058-040-Q1-K1-A12
ccggccgacccacgcgttcggcgacccgcgacgagatggaggctacctttatagcagcacttggaggacacaatgaagaggccatccattgttggagtcctgtgcacagattcacaaggactcaatctaggttgccgcggaaccctgtcagatgagcatgctggggtgatatctgttctagcccagcaagcagctaagctaacctcggaccccactgatattcctgtggtgtgtttagaatcagataatgggaacattatgatccagaaacacgatggcatcacagtggcagtgcacaaaatggcctcttgacatctcgtatcacttctcctgcatatcagttcttccgcagcctgtcacagggacttagttgtaccttatgttaattatctcatagaactattaaaccattcatgtaatatgcattgggcacttttct

SEQ ID NO: 8178 - DNA, 218 bp, Bos taurus
  Clone ID: 35-LIB3058-040-Q1-K1-A4
ccacgcattcgatgtaagaaaaaaataaaaaacaaaaataaataaccaccaaaaaaaaaacaacggaaagaaaaaaacaaaaacacacaccccaaccaaccaaaaaacaaaacaaaagagacaccaaaaaaaaaaaaacaggccaaaaacaaacaacaacaagcacagaaaaaacccagacgaaacccaaaaaaaacaaccaacacaaaaaacccaaa

SEQ ID NO: 8179 - DNA, 389 bp, Bos taurus
  unsure (229),(355): unsure at all n locations; Clone ID: 35-LIB3058-043-Q1-K1-A12
gtgcagcaacgacaacaagaccttcgactcttcctgccacttctttgccaccaagtgcacactggagggcaccaagaagggccacaaactccacctggactacatcgggccttgcaaatacatccccccctgcctggactccgagctgactgaattccccttgcgcatgcgggactggcttaagaacgtcctggtcacgctgtacgagagggacgaggacaacaacctnctgaccgagaagcagaagctgcgagtgaaaaagatccacgagaatgagaagcgcctggaggctggcgaccatcctgtggaactgctggcccgggacttcgagaagaactacaacatgtacatcttncctgtgcactggcagttcgggcagcttgatcagc

SEQ ID NO: 8180 - DNA, 446 bp, Bos taurus
  unsure (57): unsure at all n locations; Clone ID: 35-LIB3058-043-Q1-K1-A4
tggacaccgtctcagagttcccaaacagtgtttcagtttagtgatgcatgtagattntcccccatctctctgcctaagccctgagtggtcagatttagatttagggtgacttttctttccttctgcctgtattgtataattttaggggggttatgttttgatcaaatttgaactccattttggtgggggattctttggtactgtgatgcagtttatccaaatgttaatagacgaacaacaacccagactttaaagaagaaaaaaaattctggtaaaaagaccaggtctgcagtattagaacagaacttcaaagagtctttaagggaggttgaaaacaaaaaagagattgactgtctccgcctttgtgaccctgagcacagaattgtgtgtgaaggtacctactggcatgtgttttcacggctctgtctcaccaagactaccagggg

SEQ ID NO: 8181 - DNA, 439 bp, Bos taurus
  unsure (322): unsure at all n locations; Clone ID: 35-LIB3058-044-Q1-K1-A4
tttgaaatagaaaaaggcctgaaagattaattagctgaactgcagagtaaattggactgagaattgagtgctcttgaaaaacaaaaagatgagaaaatctcccagcaagaggatatgtacaaagctattatccagaagctagagaaagacaaagaggaatttgtcatgagacaggaacaggaccgagaacagctagttcagaggcttaattgtgaaaaagaagctgctattgagactgccagaaaagaaatgcacttggaaagagaagctgttgagaaagagttgttagagaaagttaaacatcttgagagtcaattagcanaaagtcatgccatggaatctgccagagaagattcttcaagcctagttgctgaacttcaagaaaagctccaggaagaaaaagctaaatttctagaacaacttgaagagcaggagaaaa

SEQ ID NO: 8182 - DNA, 267 bp, Bos taurus
  Clone ID: 35-LIB3058-047-Q1-K1-A4
gtagatttgtacttagcaaatgtaaacttacccaaatggaaaactgtgtagataccatgtcccctgaaatagcatttatcttactgggttgactggaaaggaatggaaaatacagtcacacaagcaccaatggtacccggatctgagtaatggttctaaaaactggcaccattgcttaagccccttgaggcaaccaaacagttttcaattgaccaaaatctttcttgaaaccgaagaatgcttcaaagttcacacacttacaaccac

SEQ ID NO: 8183 - DNA, 436 bp, Bos taurus
  Clone ID: 35-LIB3058-048-Q1-K1-A4
ctttgaggttatcctcattgatccattctataaagctatcagaagaaaccctgacaccgaatggatcaccaaaccagtgcataagcacagggagatgcgggggctgacgtctgcaggcagaaagagccgcggcctgggcaagggtcacaagttccaccacactattggtggctctcgccgcgcagcgtggagaaggcgcaatactctccagctccaccgctaccgctaacacgtgatgtttgtaaagtccttacctaataaacaatttaggacgttcctgtctgcttaaaagtgtttttaatttgtctgttaaagctagtctgcagattgcttcattgaatgcattgtcaaattatgaaagttaaagtgcaataatgtttgaagatttattgaagttacttacacatataagtgtatatgaagtgatggtgtatct

SEQ ID NO: 8184 - DNA, 415 bp, Bos taurus
  unsure (404): unsure at all n locations; Clone ID: 35-LIB3058-049-Q1-K1-A4
ggcggcacaaaatggcggctgcggccgttgccggggctccagggtcgacgggcccccgcggtaccggctggcacgccgggctccggaggcacagcccccgcgtcacagggggtgttgatcggggaccggctgtactccggggtgctcatcacgttggagaactgccttctgcccgacgacaagctccgcttcacgccgtccatgtcgagtggcctcgacaccgacacggaaaccgacctccgcgtggtgggctgcgagctcatccaggcggccggcatcctgctccgcctgccgcaggtggccatggctaccgggcaggtgttgttccagcggttcttctacactaagtcctttgtgaagcattccatggagcacgtgtcaatggcctgtgttcacctggcctncaagatagaag

SEQ ID NO: 8185 - DNA, 389 bp, Bos taurus
  Clone ID: 35-LIB3058-051-Q1-K1-A4
catgatattacatttgaaaagagtgcctatgggtttagccgttaagtgtgctaaaagatcgccagtttaagcttgtgttgatttaataagctaccaggattacatgtgctgacaaacacatagtgttttcttaaaattatgtacattttagtgaattccatcacacgacaaaaatgagcaactttctttgcagctcttataaagttattttaggacatttttataaaatagtctgtttataattctaccttttcaggtttttgattcctttttacatcaaacagtatacatatcacagattatgacccaaaaatcaattgagttttagctttagcatttgtttaaaaaaccgtagtgaaaaatgacatgtgtttagattatttgggcgc

SEQ ID NO: 8186 - DNA, 418 bp, Bos taurus
  Clone ID: 35-LIB3058-052-Q1-K1-A12
gccggagtcccacctggggtcagcggacatggagcatgtcccagaccacagagaggtgggccgagaggctggcactttgacctagaaaccagcaggtattagctcagattcaggttctggattcagacctgtggtgagggcatttccagtgtctgtcaaaccatgttcagtttcagttgggacagataaggggttgtttggtctgttgaaaatgtttgtagtagtaggtttttttctctggtttttctctcattccatttctgccttaactttagctccttgaggggaggcaggctcagatggaaactttgtcatcactctcatggcaggttggccaggagcagtcatgtcgccaaggctcgccacgtgccatggtggcgggctcaatgcttcaggctccatgcctctgagccaggcg

SEQ ID NO: 8187 - DNA, 350 bp, Bos taurus
  Clone ID: 35-LIB3058-052-Q1-K1-A4
gggctacccaactgagctgcactttcataaacgcgagttttgagaaaggctaagaaagagcaaggagagagagaacagcaaagtggtaagtccatcacgagtgaaagtcttaggttttaatctgccacagttttgcacacctcagctgggcatagctaggttcccccgaggaagaacctccttcctcacccaggcccacgaaagatgctgaaaaagactctctcggccgtggcgtggctctgcattttcctcgtggcctttgtcagccacccagtttggccacagaagccccctaagcgcaagaccccagcagagctcaccgcagccacctgctgtgaagaggcaaaagc

SEQ ID NO: 8188 - DNA, 338 bp, Bos taurus
  Clone ID: 35-LIB3058-053-Q1-K1-A12
acgctctggttccgcctcgaatcctgttgttcgggaagagcggtgaagatgctgccctaggacatcgtggagctggcgggaccaggagaggtggaagtgctggagcccgatgaggactacgagcagacactgctgtcggtaatcaacgagatgcgcgaggacatcgcagcactattccgtgagcacggtcgggactacctgcggaaccgatacaagctgtgggagatggacaatatgctcatccacataaagacgcaagtggaggcctctgatgagagcgcgctcaaccatatggagaattcagacgacagatccgagggccaagggaccaaacagtg

SEQ ID NO: 8189 - DNA, 407 bp, Bos taurus
  unsure (339): unsure at all n locations; Clone ID: 35-LIB34-001-Q1-E1-A12
aggcctgtaagtctgtaattcacatctcctgccagcagagaaaagaagaaacatgagcacggcaggaaaagtaataaaatgcaaagcagctgtgctgtgggagctcaataaaccattttccattgaggaggtggaggttgcaccccctaaggcccatgaagttcgtattaagatggtggccacaggaatctgtcgctcagatgaccatgtggttaatggatctctggtcacacgtcttcctgtggtcttaggtcatgagggagccggcattgtggagagcattggagaaggggtgactacagtaagaccaggtgataaagtcatcccactctttattcnccagtgtggaaagtgcaatgtttgtaaacacccagaagccaacctttgcctgaaattccagctgaagg

SEQ ID NO: 8190 - DNA, 438 bp, Bos taurus
  Clone ID: 35-LIB34-001-Q1-E1-A4
ggtcggagtaacgggtcgacgacgcgtccgctcatctaccacctttcaatatataactctgctaaaaaacatgtggaaaggaaggcagaatcaagtacaagataatgaaaatgtagtaaacgagtactcctcacatctggaaaagcaccagttatatatagatgagactgtgaagaataatatcccaactaagcttcgtgtgctccgttcaattctggagaatttgagaagcaaaatacaaaaattagaatcggatgtctcaactcagatggaatactgccgcaccccgtgtactgttacttgcaatattcctgtggtgtctggcaaagaatgtgaggaaatcatcaggaatggaggtgaaacatctgaaatgtacctcattcagcctgaggattctagcaaaccatatagagtatactgtgatatgaaaacggaaaa

SEQ ID NO: 8191 - DNA, 383 bp, Bos taurus
  Clone ID: 35-LIB34-002-Q1-E1-A4
gacacgtcaacatgactgacaatgatcttatcgatattcttgaccctttttatcatctttcaactaaaagtttcaaaacacaacttttatcacaatccagaactgacaccaacaaaaatattaaaacaaaacaccccttgagaaacaaaatgaacgaaaatttatttacctcttttattacccctgtaattttaggtctccctctcgtaacccttatcgtactattcccaagcctactattcccaacatcaaaccgactagtaagcaatcgctttgtaaccctccaacaatgaatacttcaacttgtatcaaaacagataatgagtatccacaattctaagggacacacatgaacattaatattaatatctctgatcctattt

SEQ ID NO: 8192 - DNA, 389 bp, Bos taurus
  Clone ID: 35-LIB34-004-Q1-E1-A4
ggctctggatccactgcccacatcccgctctcgcaggcagacatgagggcagagagaacttccttcctcctggccctggggctcctggtggctgggatccgcagtgtccactgcctcccagagaatgtggtggtgaaggaccagcacagaacggtggatggccacacgttagcctccagcaacaccgacttcgccttcagcctctacaagcagttggctttgaagaaccccaataagaatgtcatcttatccccgctgagtgtctccatagccttggccttcctgtctctgggggcccgtggctccaccctgacagagatcctggaaggtctcaagttcaacctcacagagatccaggagaaagaaatacaccatagctttcagcacct

SEQ ID NO: 8193 - DNA, 405 bp, Bos taurus
  Clone ID: 35-LIB34-006-Q1-E1-A12
aattgttacaatcctaggcttcatcttagccctagaaatcagtaatataactaaaaatctaaaatatcactacccctcaaacgccttcaagttctcaaccttgctagggtatttccccacaattatacatcgcctagctccatacataaatttatcaataagccaaaaatcagcatcctcccttctagacctaatctgactagaagccatcctaccaaaaaccatctcactcgcccaaataaaagcatctaccctggtcacaaaccaaaaaggcctgatcaaactatatttcctctccttcttaatcacaatccttatcagcataatcttatttaatttccacgagtaatttctataataaccacaacaccaattaataaagaccacccagttacaataactaat

SEQ ID NO: 8194 - DNA, 409 bp, Bos taurus
  Clone ID: 35-LIB34-006-Q1-E1-A4
ctcagtggtcacctcacaattgtcaaatgctcatatgctcactgcagagagagtgtttatccatccaggatgggaggtcctggatccttcgataacacgaaagaattttgacaatgacattgcgctggtgcggctgagagacccagtgaaaatgggacccaaggtcacccctatctgcctaccaggcacctcctcagaatatgaccctccggataacgtcctgagcctgatctcatgttggggtctaacaaatgtcaaaagtcatgttattaaactcagaggggcaaagctacccgttgctcccttaaccaaatgccgggagatgaagggggtcaatcctggaatagatatcagttcttttgttttcactgagaacatgatctgtgccggtaatgacaagggtgttgac

SEQ ID NO: 8195 - DNA, 388 bp, Bos taurus
  Clone ID: 35-LIB34-007-Q1-E1-A4
cagccctggaggtcaaagacaggcagggcagagcctcagatgtggtgctcggctttgacgagttggaagggtacctccaaaagcagccctactttggagctgtggttggcagggtggccaaccgaattgccaaaggaacgttcacgttggatgggaaggagtataaactagccattaacaacgggcccatcagcctgcatggaggagtcaaagggtttgacaaggtcctctggacccctcgggtgctgtcaaatggtgtcgagttctcacgggtcagtccagacggtgaggaaggctaccctggagagttaaaagtctgggtgacgtacacactggatggcggtgagcttgtggtcaactatcgagcacaagccagtcagaccacccc

SEQ ID NO: 8196 - DNA, 354 bp, Bos taurus
  Clone ID: 35-LIB34-008-Q1-E1-A12
ctcgtaatccaaacggtgtgtacagacctgaattaagcaaatacagaggtcaagataaaatcacttatgagtgtaaaaagggtttttttcctgagatccgtggaactgatgcaacgtgtaccagagatggctgggtacctgttccgagatgtgcctggaaaccttgtagttatccagtaataaaacatggacggctatattattcatacagaggatactttccagcacgtgtaaatcaacagtttgtctatagctgtgatcatcattttgtgcctccttcacaacgttcctgagaccacctgacttgcacagcataaggatggtctccagaagaaccatgcctcagacaatgta

SEQ ID NO: 8197 - DNA, 410 bp, Bos taurus
  Clone ID: 35-LIB34-008-Q1-E1-A4
agcatgcccgctgtgagcacatgcaggcacggctgcgcttccccatcaagtgaagaagttgctggcgttctgaggcagagggaagggaagggtggggggtcactgaggaaccttgtttcttttcctttctttctttttaattaacagctatatataccatacaattgtaggccaactatacttcaaaaaataaacaacctcatagaaacagagattagatttgtggttacagtgggggagggaaaatttgaatgaaggtggtcaaaaggcacaaatttccagttataaggtaaataagtactagaaatgtgatatataatgtgattgatataattaacactactgtacattatatatgaaagttgttatgagtaaatcctaaaagttctcatcacaagaaataatttttt

SEQ ID NO: 8198 - DNA, 354 bp, Bos taurus
  Clone ID: 35-LIB34-009-Q1-E1-A12
caatttgctccctaccccacgtaacaggggggcagtgaccacagacgaggaacacagagagtcaccaccgtcacccgcggctccgccgccatcctgccctccgccatttatcgccctgtttttaattttctttttatctgtccctgtcgcttgggttgcgtggagagtggagcctctgtgggggtgtccaggactgtgcaccccagagaattcaagggaatgtagacagccgctgcctgtcctgacccccgggggacattggctggtctccggggggtcctgacgggcagaagatgtggctgcgaggcgtctctgcacatgtcaagaacgtgctctgtggccaccaaggtgggg

SEQ ID NO: 8199 - DNA, 278 bp, Bos taurus
  Clone ID: 35-LIB34-009-Q1-E1-A4
acaaaagtccacaaggaatgctgccatggtgacctacttgaatgcgcagatgacagggcagatcttgccaagtacatatgtgataatcaagatacaatctccagtaaactgaaggaatgctgtgataagcctttgttggaaaaatcccactgcattgctgaggtagaaaaagatgccatacctgaaaacctgcccccaataactgctgactttgctgaagataaggatgtttgcaaaaactatcaagaagcaaaagatgccctcctgggctccttttt

SEQ ID NO: 8200 - DNA, 418 bp, Bos taurus
  Clone ID: 35-LIB34-010-Q1-E2-A12
gctgcctcgagcagggagctggtggctcttccatccccagaccagccaagcctgtgagtgacaccccagacagaggaaccagagccatgcggagtctcagcggactgctgttgttactgactgcctgcctggcagtaaacgccagctccgtgcccacattgcccgatgacattcaagtgcaggagaacttcgacctgtctaggatctatgggaagtggttcaatgtggtcgtgggctccacctgcccatggctgaagaggttcaaggagaagatgaccatgagcacagtggtgttgaaagcggggccgacgagcaaggagatcagcgtcaccaacactcacaggcggaaaggtgtctgtgaatcgatctctggtacttatgagaaaacaagcactgatgggaaattttcccatcacaa

SEQ ID NO: 8201 - DNA, 392 bp, Bos taurus
  Clone ID: 35-LIB34-011-Q1-E1-A12
agcccagcccggcccgtccgcccgaccatggcgccggcggcggggcgcggggcgcggggcctgtggcgcgcctgcaactggcttatgggcgccttcttcgcgctggcggcctttgtgcaggtgaacgatccggatgcacaactgtgggtggttatgtatacgattcctgccactctgaccctgcttgttggacttaaccctcttgtcacaggtaactttatttggaagagtgtgtctgcaatacacatattcctttgtgtcctgtgggctatcagcttggcatacaacctcttgcttcataagaaacagaacctcttgcatgaagaggaaggcatggagctgtttggtctcgtgatcatcacagcatggctgggcctgtgccacagctcttc

SEQ ID NO: 8202 - DNA, 355 bp, Bos taurus
  Clone ID: 35-LIB34-012-Q1-E1-A4
gaagagaagcacccagcctaggacgccaaggagaggctcctctccgggtccctccctccaccatggaatacctctctaacctggaccccagcagcctgctcaggtcagtatccaacatgagcgccgatttgggccgaaaggtctggacctcggctccaccacgccagcgacctttccgagtctgtgataacaagcggaccacccggaaaggcctgacagccgctacccgtcaggaactgctagacaaggctctggaggccctggtgctgagtggagcgctcacactggtgctggaggaagacgggaccaccgtggagagcgaggagttcttccagctgttggaggatgacacgtg

SEQ ID NO: 8203 - DNA, 421 bp, Bos taurus
  Clone ID: 35-LIB34-013-Q1-E1-A12
cataaacagagaggatgatataatgtcacgtacatatcagcagcttcagtcattatcaacatggggccaatataattattccctacgtcctaacccctttcctcttttgggtttgttttgtagcaaatcttacacatcctgttattttaactctaagaatttttaaaaatacttaaaatggcatatcacacttaaaataaacataattctttaatattatccaatatcaattattactcccctgctactgctgctgctgggtcacttcagtcgtgtccgactctgtgtgaccccgtggacggcagccaccaggctcccccatccctgggattctccaggcaggaacgctggagtgggttgccatttccttctccagtgcatgaaagtgaaaagtgaaagtaaagtcactcagtcgtgtcaa

SEQ ID NO: 8204 - DNA, 382 bp, Bos taurus
  Clone ID: 35-LIB34-014-Q1-E1-A4
gggtccaggcacgcgtccgaagttcattttgcgaaagatcaagccagcctgggtgcaggctgatcatgcggctgagttgaccttcatgttcggcggtcctttcctcacggatgagagctccatgttggcctttccagaagccacagaggaggagaagcaactgagcctcaccatgatggcccagtggaccaactttgcctggacaggggaccccaatggcaaggggctgcctctttggccaccgttcaaccatgcggaggaatacctggaaatcagcctggtgccacgggtcaaccagaagccaagggaggccagaatgcagctctgggcagagatacttcccaccaagtttgggcagtggcagcagaagcagaagggcaag

SEQ ID NO: 8205 - DNA, 378 bp, Bos taurus
  Clone ID: 35-LIB34-015-Q1-E1-A4
ataaaatatatatgcttttgcaagtttaagaattcaaattcacttttgactaaatatgtctttctaaaaactctttaaggcaaacttggtgttagcgttctcctgcatgttgatgggcatgggaccctcctgtctgtatgctcccagagccttctctctgaccgccgggaaatacagtggaatgaagatgaactttgtgccatcaacccttctgtgtccactgcaggaagctcagtttttacaaatcatcttgtctgtatttccaatcactgtttaatctgtacttcctacgccagacttgattttatctgacttactacgattatttcactttgatcaaacaagtgtttgtcaggatgccctacaactcactcatta

SEQ ID NO: 8206 - DNA, 404 bp, Bos taurus
  Clone ID: 35-LIB34-017-Q1-E1-A4
tgctgatgagtcccatgccggctgtgaaaagtcacttcacactctctttggagatgaattgtgtaaagttgcatcccttcgtgaaacctatggtgacatggctgactgctgtgagaaacaagagcctgaaagaaatgaatgcttcctgagccacaaagatgatagcccagacctccctaaattgaaaccagaccccaatactttgtgtgatgagtttaaggcagatgaaaagaagttttggggaaaatacctatacgaaattgctagaagacatccctacttttatgcaccagaactcctttactatgctaataaatataatggagtttttcaagaatgctgccaagctgaagataaacgtgcctgcctgctaccaaagattgaaactataagagaaaaagtac

SEQ ID NO: 8207 - DNA, 395 bp, Bos taurus
  Clone ID: 35-LIB34-018-Q1-E1-A12
ttcacgggcagacccacgcgtccatttttctatatcgttactgtcgaatgctagaagaaggctctttccgaggtcggacagcagactttgtatttatgttcctttttggtggattcttaatgaccctttttggtttgtttgtgagcttagttttcttgggccaggccttcacaataatgcttgtctacgtgtggagccgaaggaacccgtatgtccgcatgaacttcttcggccttctgaatttccaggctccctttctaccctgggtgctcatggggttttccttgttgttggggaactcaatcattgtggacctcttgggtattgcagttggcgacatatattttttcttggaagatgtattcgccaatcaacctggcggaataacaattttg

SEQ ID NO: 8208 - DNA, 397 bp, Bos taurus
  Clone ID: 35-LIB34-018-Q1-E1-A4
aggacgccatgcggggtgacagaggccgaggtcgtggcgggcgctttggttccagaggaggcccaggaggagggttcaggccctttgtgccacatattccgtttgacttctatttgtgtgaaatggcttttccccgggtcaagccagcacctgatgaaacttccttcagtgaggccttgctgaagaggaatcaggaccttgctcctaattctgctgaacaggcctctatcctttccctggttacaaaaataaacaatgtgattgacaatttgattgtggctccagggacatttgaagtgcaaattgaagaagtccgacaagtcggatcgtataaaaagggaacgatgactacaggacacaatgtggctgacctggtggtgatcctaaagattttgcc

SEQ ID NO: 8209 - DNA, 367 bp, Bos taurus
  Clone ID: 35-LIB34-020-Q1-E1-A12
attcaaaaatttggagaaagagctttaaaagcatggtcagtagctcgcctgagccagaaatttcccaaggctgagtttgtagaagttaccaagctagtgacagatctcacaaaagtccacaaggaatgctgccatggtgacctacttgaatgcgcagatgacagggcagatcttgccaagtacatatgtgataatcaagatacaatctccagtaaactgaaggaatgctgtgataagcctttgttggaaaaatcccactgcaatgctgacgtagataaagatgccatacctgaaaacctgccaccattaactgctgactttgctgaagataatgatgtttgcaagcactatcaggaagcagtagatg

SEQ ID NO: 8210 - DNA, 320 bp, Bos taurus
  Clone ID: 35-LIB34-020-Q1-E2-A12
actcacacatttggagaaagagctttaaaagcatggtcagtagctcgcctgagccagatatttcccaaggctgagtttgtagaacttaccaagctagtgacagatcgcagaagagtccacaatgaatgctgccatggtgacctacttgaatgcgcagatgacacggcagatcttgccaagtacataagtgataatcaagatacgatctccagtaaactgaaagaatgctctgataaccctttgttggaaaaatcccagtggattgctgaggtagatacagatgccatacctgaattcctggcaccattaactgctgacgt

SEQ ID NO: 8211 - DNA, 419 bp, Bos taurus
  unsure (386): unsure at all n locations; Clone ID: 35-LIB34-020-Q1-E2-A4
gagaacatcatggcaagcgtggctgcatttctgacctgggctctggccctcctctcactgctttcacccacggaggcacggagaggcttctgggactacttcagccagagcagcggggacaaaggcagggtggagcagcagcagaagctggcaagggagcccacgagcctgaaagaaagacttgagccagacctcagcgatatggacaagttcctggaaaagctgggccctctgaacgggcacgggacggagattcccaggctcccacgcgacccggtgggcatgtggcagcagctgcaggaggagctggatgaggtgcgggcgcgtctggagccctacatggcggatgtgcacgagcgcgtgggctggaacctggaggggctgcngcagcagctgcagccctacacggtggagctgat

SEQ ID NO: 8212 - DNA, 362 bp, Bos taurus
  Clone ID: 35-LIB34-021-Q1-E1-A12
gacaagatgaatgtcatcggggcgccccgagaggaagcccggcctgtggcccaaggctcctgccacagtgagctgcaccgggcactggagcggctggccgcctcacagagccggggccacgaagacctttacatcattcccatccccaactgcgaccgcaacggtaacttccacccgaagcattggcacccggccctggatgggcagcgcggcaagtgctggtgtgtggaccggaagaccggagtgaagcttccggggggcctggagccgaagggggatctggactgccaccagttggctgacagcttccgagagtgagcctgtcaacatgcagggggctcactgccccctgctgccccctt

SEQ ID NO: 8213 - DNA, 409 bp, Bos taurus
  Clone ID: 35-LIB34-024-Q1-E1-A4
aaatatatcgccttggagtgtatgaaaacatttctatttttctcacaagagatccaaaaggcactcagttacctccagtctaccatgatgacagagatgctaagtgatcttcaaaggtctctacaagacattttccaagagatagaaagtgaacttaaacgcttcaaggagaagaaattgactgatttcattaatcaaaccctacagaatatcaatacaatctctgacatatacatttcatttgtttttagattcctgaaagaaaacctaaactataactttgttgagtttaataaactaatccaaaacaaacttcaggtagcttctcaagaattacaacagctccttcagtatgtgcaggctcttcaccaagaatattttgatccaactacggttggctggacagtga

SEQ ID NO: 8214 - DNA, 409 bp, Bos taurus
  Clone ID: 35-LIB34-025-Q1-E1-A12
ttcaacggcagggagcgggtctacttcttcaagggcaaccactactgggaatatgtgttccagcagcagcccagtcaagaggattgtgaaggcagctccctgccggccgcatttaaacactttgccctgatgcagcgggacagctgggtggacatcttccgacttctcttctggggcggttcctatggtggtgctggacagccccagctcatcagccgcaactggtttggtctgccgggacgactggatgcgggcatggccggccacatctatgtctcaggctcagctcccagcttcccccggggcaagatgactaagtctggacgccggcaatcgcaaacgctaccgctcgctccgaacccgtgggcgaggccgccgccgaaaccagaacccctaccggggatctcga

SEQ ID NO: 8215 - DNA, 413 bp, Bos taurus
  Clone ID: 35-LIB34-025-Q1-E1-A4
tcgggaaccaaccccagttggaaaaggcaattatccacaaccagaattcaagataccagagtggtgagagagcacgttacgaatgcattgggaattatgacctttttggagagagagaagtcatatgtttgaatggaatttggacagaaccacctcagtgtaaagactctcaaggaaaatgtgggcctcctccaccaatagacaatggagacattacctcactcctgcaatcagtatatcctccaggatcgattgttgagtaccggtgtcaggcctactatgaacttcggggaaacagaaatgtagtatgtcagaatggagagtggtcacaactaccaaaatgcttagaggcatgtctaatttcagaagaaacaatgagaaaacatcacatacagttaagatggaaacacgat

SEQ ID NO: 8216 - DNA, 400 bp, Bos taurus
  Clone ID: 35-LIB34-029-Q1-E1-A4
ttcctactactcctcgcatcctctatagttgaagctggggcaggaacaggctgaaccgtgtaccctcccttagcaggcaacctagcccatgcaggagcttcagtagatctaaccattttctctttacacttagcaggagtttcctcaattttaggagccatcaacttcattacaacaattatcaacataaagccccccgcaatgtcacaataccaaacccctctgttcgtatgatccgtaataattaccgccgtactactactactctcgctccctgtattagcagccggcatcacaatgctattaacagaccggaacctaaatacaaccttcttcgacccggcaggaggaggagaccctattctatatcaacacttagtctgattctttggacaccccg

SEQ ID NO: 8217 - DNA, 221 bp, Bos taurus
  Clone ID: 35-LIB34-031-Q1-E1-A12
cagacgcgtggggatggtccctctgcatcgctcctcccaacccttctgatgaacaaagactgaccacttctgggacaatgactttcctccctgtgttggccaggggtttggggacagtgtgatttctcagtgatttgctacggtgttgattcctccctcgtggtccggaggcgataaccaccaccccaggaattctcaataaatttttattactgaagctg

SEQ ID NO: 8218 - DNA, 410 bp, Bos taurus
  Clone ID: 35-LIB34-032-Q1-E1-A4
cttctgtgctcggtggctgtctccaccctactgggccaggcgagttccaagatgctggagcagaactctgagggttgggtccagactggttccactccttggagaagaaaaaaatcccagtctgcttactcagaggagcaacagacaatggatcccaaaggccagaaggtgaagcttaatgatggccacttcattcctgtcctgggatttggaacctatgcacctcaagaggttgctaagagggatgctctggaattcaccccatttgctatagaggttgggttccgccatattgactgtgctcatgcttaccaaaatgaagagcagataagtcaggccattcgaagcaagatggcagatggcactgtgaagagagaagacataatctgcacttcagagctttggtgcac

SEQ ID NO: 8219 - DNA, 462 bp, Bos taurus
  Clone ID: 35-LIB34-037-Q1-E1-A5
gtccgtacatccgggtctaccacgcgtccgcatgaagagagcatataatgccggcatcagaaatatcgaaatggaatctacagtgtttgcagccatgtgtagactttgtggtctaaaagctgccgtggtctgtgtgacacttctcaacagacttgaatgtgaccagatcaactctccccacaatgttcttgtggagtaccagaaacggcctcagctcctaatctccaaattcattaaacagcggcttggattatgtgaccagacatcataggtgggcagctcaatccttctctgcaaattcacagttccagtcataatgttgaagtcatatattatttgtggcatttttatatagttctcatccacatggtaaaatcataattgaatgattttataaaaccctttctcttaaaaatgaatttgttgaaaagaatttaataacttacattaaattaagttcag

SEQ ID NO: 8220 - DNA, 409 bp, Bos taurus
  Clone ID: 35-LIB34-038-Q1-E1-A4
gcccttgacctcttacaggagctttgtctgccctcttaataacatccggcctaaccatgtgatttcactttaactcaatgaccctgctaataattggcctaacaacaaatatactaacaatataccaatgatgacgagatgttatccgagaaagcaccttccaagggcaccataccccagctgtccaaaaaggcctccgttatggaataattctttttattatctccgaagtactattctttaccggatttttctgagctttctaccactcaagcctcgcccccacccctgaactaggcggctgctgacccccaacaggcattcacccactaaaccccctagaagtcccactgctcaacacctctgtcctattggcttccggagtttctattacctgagcccatcatag

SEQ ID NO: 8221 - DNA, 433 bp, Bos taurus
  Clone ID: 35-LIB34-040-Q1-E1-A4
gcctcagaccacactatctccactcgctcagacctgtggaagattagcgaccatgatttccaatgggataggaaccgtcaccgctggaaaaaggagtatatgtcttctccctttgctgcttattggcctctggggctgtgtgacctgtcatcggagccctgtggaagacgtctgcacagccaaacctcgggacattcctgtgaatcccatgtgtatttaccgttcctcagagaagaaggcaactgagggccaaggctccgagcagaagatccctggggccaccaaccggcgggtctgggaactgtccaaggccaattcccactttgccactgccttctatcagcatttggcagactccaagaataacaatgacaacattttcctgtcacccctgagtatctccacagcttttgctatgaccaagctgggtgcg

SEQ ID NO: 8222 - DNA, 403 bp, Bos taurus
  unsure (320): unsure at all n locations; Clone ID: 35-LIB34-041-Q1-E1-A12
ggatcagcgcccctcatgtgcccaggaggtgcccagaaacatggtgcaccccaacgtgatctgtgatggctgtaacgggcccgtggtggggacgcgctacaagtgcagcgtctgccctgactacgacctatgctccgcctgcgagggcaagggcctgcaccaggaacacggcaagctggctttccccagccccattgggcacttctctgagggcttctctcatagccgctggctccggaagctgaaacatgggcactttgggtggcctgcctgggagatgggcacaccggggaactggagcccacgtcctcctcaggcangggatgcccaccctgggccctgccacggaatcagcctctggtccatcgggagatcccagtgtgaatttcctcaagaacgtagg

SEQ ID NO: 8223 - DNA, 447 bp, Bos taurus
  unsure (23): unsure at all n locations; Clone ID: 35-LIB34-041-Q1-E1-A4
acggtcgagaaatccgggtcacnccacgcgtccggaacactctcgccgcccgcgcggaaggtctctctctccccgactcctggcaccgcatccccgcaccggcgtggatcgggacccgcgctctccagtgcagccagggctcccgagcgtgcgtgcggctggagacgccgagctgctcacgatgaggaggggagcgaggctccggcagagcggcctcgtcccgcgggtctgagcgcccacccccgccgccgggactccggcctctctgggcttcggcaatgagcgccctgtgaccggcggcgccgcgagtcgtagacccgggactccgggaggcaatgctggctcggcttggagtggctcggggacagtgaagaaaccctaaaatggaggacttttccactaggacgtacggcacaagtggcctggacaacagacctctgtttggag

SEQ ID NO: 8224 - DNA, 344 bp, Bos taurus
  Clone ID: 35-LIB34-042-Q1-E1-A4
atgcagtataagtgtaatcctaaccgctgaactaagatcctgcatgctgcaggagtggacaaaacaatttttataataaaaaaatttttaaatgaaaatgaaaacaacctggatacattttaatatttcttctcctttcgtaactgctagaacttccagtaaatgtaaatcaaagtgggaaaagtgggcatcctggtcttgtttctgatcttaagggaaaagatttaaatcttttacccctgagtatgatgacagctgtgggttttttacacatgacctttatcacactaaggaagctcactttcattcctggtttactgagagttgttttttttttttaaatc

SEQ ID NO: 8225 - DNA, 388 bp, Bos taurus
  Clone ID: 35-LIB34-043-Q1-E1-A12
acaaaatgcccttctggctgcaggatgaaagggttgattgatgaagtcgatcaagattttacaagcagaataaataaactaagagattcactatttaattatcagaagaacagtaaggactctaatacattgaccaagaacatagtggaactaatgagaggggattttgccaaagctaacaacaatgataatacatttaaacaaatatcagaagatctgagaagcagaattgagatcctgaggcgcaaagtcatagaacaagtacaacgtatcaacgttctgcagaaaaatgtcagggatcaactggtagatatgaaacgattggaggtggacattgatattaagatccgatcttgcaaaaggtcatgcagtagagctttagaacata

SEQ ID NO: 8226 - DNA, 384 bp, Bos taurus
  Clone ID: 35-LIB34-043-Q1-E1-A4
aggcggctctggatccactgcccacaccccgctctcgcaggcagacatgaggacagagagaacttccttcctcctggctctggggctcctggtgtctgggttctgctccagggtccactgcctcccacagaatgtgaccccataagaacagcacaaagggacgtctgtggatggccactcattagcctccagcaacactgacttcgccttcagcctctacaagcagttggctttgaaggaccccaataagaatgtcatcttctcccctctgagcatctccatagccttggccttcctgtcgctgtgggctcatgaccacactgtgacagagatcctggaacgtctcaagttcaacctcacagagacccccgagacagaaatcca

SEQ ID NO: 8227 - DNA, 378 bp, Bos taurus
  Clone ID: 35-LIB34-044-Q1-E1-A4
agatattttgatggtcagtactggctctggtgggtgttcctggttctaggctttctcctgtttctcagaggatttatcaattaggcaaaagttcggaagatgccagaaaatttctcaaatctccccaggaccagagttctctttagttattaaagatgttttctggcgaaagccttcctgcatttatgaattctctcccaagaagcaagagaacacctgcaggaagtgaatcaagatgcgggacacagaggaatcatcacctgctttaagaaaataaagtactgttgacaaagatcgtttctctctatttgttcctaagtgtaaaattttaatagttaatgcaaaattctgtaggcattgaatcacgagtgggtaatg

SEQ ID NO: 8228 - DNA, 379 bp, Bos taurus
  unsure (9): unsure at all n locations; Clone ID: 35-LIB34-045-Q1-E1-A12
tgctcctgnagagcaagattcattgccaactccagtctcaagggctcagcgggctgtgctgacccagaaagaggaaggctctggggctggacaaccagtaacaaagttcagcaagaaagcagattcctgccagctggactactcacaatggccttgcctggggctgttcaagacgtatttctataacggtacatccatggtctgtgagaccttcttatatggcggctgcatggggaatggcaacaacttcctctcggagaatgagtgtctgcagacctgccggactgtggaagcctgtaacctccccatagtcgaggggccatgccgaagctacatccagctctgggcatttgatgccgtcaatgggaagtgcgtccgc

SEQ ID NO: 8229 - DNA, 389 bp, Bos taurus
  Clone ID: 35-LIB34-047-Q1-E1-A12
aagacacgtgggctgtcatcagaaggcaagaagtaacaagggttggcgagaatgtagaattttaaaagggaaccctggtgcactagttactggaatgtcaattggtgcagccacaatggaaaacattatggaggttcctcaaaaaatgaaaaatagaattatcacatgatacaacaattccacttttatgggtatttccaaagaaaatgaaaacattaactcaaaaagacatgcacctctgtgttcattgcagcatcatttacaatagctgaaggtacagaagcaacttaagtgtccaccaatggaagaatggataaagaaactcctctaactctggaagagacccaagtttgacccctggttcagaaagatcctgtgaagaaagaaat

SEQ ID NO: 8230 - DNA, 285 bp, Bos taurus
  Clone ID: 35-LIB34-047-Q1-E1-A4
gagaaaaagtactgacttcatctgccagacagagactcacgtgtgccagtattcaaaaatttggagaatgagctttaaaagcatgggcagtagctcgcctgagccagaaatttcgcaaggctgaatttgtataagttaccaagctagtgacagatctcacaaaagtccacaaggaatgctgccatggtgacctacttgaatgcgcagatgacacggcagatcttgccaggtacatatgtgataggcaggatacaatctccagtgagacggaatgaaggctgtgat

SEQ ID NO: 8231 - DNA, 412 bp, Bos taurus
  Clone ID: 35-LIB34-048-Q1-E1-A4
agcggaggcgtggggcttttaggttctgtagctggtcgcaatggcaagcaaaggagggtacatcgtgcttgggctcctgttcctggctgtcctctgccaactcggtcacagcctgcagtgctacagctgtattaaccaagttaactgcacttcaatcgtcaattgttcacataatcaagatgcttgtctcttcgttaaggctgtgccgctaaaattttaccaccagtgttggaagtacgaagaatgcagttttgagttcattgcaaaagccttaggggagaaggagctccactatgactgctgccagaagaacctgtgtaacaaaagtggcgggaggagcgtatccgagaagatactgctgctgctcaacctgctgctggaggcagtctgccacttttatcgctaaatctat

SEQ ID NO: 8232 - DNA, 430 bp, Bos taurus
  unsure (398): unsure at all n locations; Clone ID: 35-LIB34-049-Q1-E1-A4
gaagcttcacactgagaggcaggcagagaacatcacacacagctgaaaggaaactcagaggagggaatcgccaagaaaagtggccatggagctaatcccaaacttttccgtggaaacctgggttctcctggctatcagcctggtgctcctctatctatatggaacttattcacatggactgtttaagaagctgggggttcctggcccaagacctctgcctctttttggaaacgttctatcctaccgaaagggtgtttgtgagtttgatgaagaatgttttaaaaagtatgggaaaatgtgggggatttttgaaggtaaacatcctctgttggttatcacggatccagacatgatcaaaacagtactagtgaaagaatgttattctgtcttcacaaacncggaggtttttggtcaaatgggagttatgaaa

SEQ ID NO: 8233 - DNA, 367 bp, Bos taurus
  Clone ID: 35-LIB34-050-Q1-E1-A12
ctccggatgctgcctcatccacagcttctgatagatccaagaggactctcctctctcagactacctgtcaccatggcccaccagtttccagccctcacttcagaacagaagaaggcactctctagaaactgcccgacgcattgttgccaatgggaaggggatcctggctgcagatgagtccgtaggcacgatggggaaccgcctgcaaaggatcaaggtggagaacacggaagagaaccgccggcagttccgcgaactcctcttcactgtggacagctccgtcagccagagcatcgggggtgtgatcctcttccatgagaccctctaccagaaggacggccaaggaaaactgttcagagacatcctc

SEQ ID NO: 8234 - DNA, 443 bp, Bos taurus
  Clone ID: 35-LIB34-050-Q1-E1-A4
cagacgcgtgggtaaaaattgtaaacaatgcattcatcgaccttccagccccatcaaacatttcatcatgatgaaatttcggttccctcctgggaatctgcctaatcctacaaatcctcacaggcctattcctagcaatacactacacatccgacacaacaacagcattctcctctgttacccatatctgccgagacgtgaactacggctgaatcatccgatacatacacgcaaacggagcttcaatgttttttatctgcttatatatgcacgtaggacgaggcttatattacgggtcttacacttttctagaaacatgaaatattggagtaatccttctgctcacagtaatagccacagcatttataggatacgtcctaccatgaggacaaatatcattctgaggagcaacagtcatcaccaacctcttatcagcaatccca

SEQ ID NO: 8235 - DNA, 242 bp, Bos taurus
  Clone ID: 35-LIB34-052-Q1-E1-A4
ggcagcggcagcagcagcaggagtgggaaagaccagaggtcagaagcatggaagaccagcgtgacctcatctccaaccatgagcagctgcccatgctgggccagcgccccggagcccaggagagcaagtgcagtcgtggagccctgtacacgggcttttccgtcttggtggctctgctcctggctggccaggccaccactgcctacttcctgtaccagcagcagggccggctggacaagctg

SEQ ID NO: 8236 - DNA, 242 bp, Bos taurus
  Clone ID: 35-LIB34-054-Q1-E1-A4
caatcacgcccaggaacattttggcaaagataaaccagacaatttccagcttttccaatcccctcatgggaaggacctgctgtttaaggactctgctgatgggtttttaaagattccttctaagatggattttgagctgtacttgggatatgaatatgtcactgctcttcagaatctaagagaaagtaaacccccggactcctcaaaggatgagtgcatggtgaagtggtgtgcaattggtc

SEQ ID NO: 8237 - DNA, 350 bp, Bos taurus
  Clone ID: 35-LIB34-055-Q1-E1-A12
gttgccataaacacgacacccctggggaagtgcagtggggaaaagctcctccttccaggccgcagcccactgcacgaacagtcctcacgccgatctctttcctggttcccacccgcgccaggtgacacggagagctgacaccatggttcatcaggtgctctaccgggcgctggtctccaccaagtggctggcggagtccgtccgggctggtaaggtgggccctggccttcgggtgctggatgcgtcctggtactcgccgggcacccgcgaggcccgcaaggaatacctggagcgccatgtgcccggcgcctccttttttgacatagaggagtgtcgggacaaggcctcgc

SEQ ID NO: 8238 - DNA, 224 bp, Bos taurus
  Clone ID: 35-LIB34-057-Q1-E1-A12
cccactaataaaaattgtaaacaatgcattcatcgaccttccagccccatcaaacatttcatcatgatgaaatttcggttccctcctgggaatctgcctaatcctacaaatcctcacaggcctattcctagcaatacactacacatccgacacaacaacagcattctcctctgttacccatatctgccgagacgtgaactacggctgaatcatccgatacatac

SEQ ID NO: 8239 - DNA, 227 bp, Bos taurus
  Clone ID: 35-LIB34-057-Q1-E1-A4
acgggctcttccatccccagaccagccaagcctgtgagtgacaccccatacagaggaaccagagccatgcggagtctcagcggactgctgttgttactgactgcctgcctggcggtaaacgccagctccgtgcccacattgcccgatgacattcaagtgcaggagaacttcgacctgtctaggatctatgggaagtggttcaatgtggccgtgggctccacctgccc

SEQ ID NO: 8240 - DNA, 228 bp, Bos taurus
  Clone ID: 35-LIB34-058-Q1-E1-A4
gtatatatcttcctgacaagggcaggctacactctcgtaaaagattatccaaagcagctggagaaggaatttgggagccctgatggggtctgccttcattctgtggatgcagcctttacctgtcctggatcttctcagctctacatcatggcaggccagaagctgtggaggctggacctgaacttaggagctcaagccacgtggacagagcttccttggctccatacc

SEQ ID NO: 8241 - DNA, 139 bp, Bos taurus
  Clone ID: 35-LIB34-059-Q1-E1-A4
ctctgatcaggcctgatggagagaagaaggcatatgttcgactggctcctgactatgatgctttggatgttgccaacaaaattggcatcatctaaactgagtccagctggctaattccaaatataaaagttttcactat

SEQ ID NO: 8242 - DNA, 318 bp, Bos taurus
  Clone ID: 35-LIB34-060-Q1-E1-A12
cttctcccgactcgacgtcgtcgttacagggaagaagaagcgggtgagaaaaacttctgtttccaccgttttgcccatttctgcagatttgttccgaggccgaggcatctccaaggcagtgatggctctccagaggacccaggcctttcttctgctcttgctgctgaccctgctggggctagggctggtacagccctcctatggccaggatcgcatgtaccaacgattcctgaggcaacatgtggaccctgatgagacaggaggcaatgacagctactgcaatttgatgatgcaaagacggaagatgacttcacatca

SEQ ID NO: 8243 - DNA, 403 bp, Bos taurus
  Clone ID: 35-LIB34-061-Q1-E1-A12
ggcccggctgagagtcaaacacgctatccgcttccatccgtcgcgcaaaccctgccggagccgctgccgctatggatgatcgggaggatctggtgtaccacgcgaagctggccgaacaggctgagcgatacgacgagatggtggagtcaatgaagaaagtagcaaggatcgatgtggcattgacagttgaagaaagaaacctcctaactgtagcaaatcaacatgtgattggcgctacaagaccttcctggagaataatcaggagcattgaccagaaagaacataacaatggacgagaacacaaactaaaaatgattcgggaatatcggcacatggttgagactgagctaaagttaatctgttgtgacattctggatgtactggacaaacacctcattccagc

SEQ ID NO: 8244 - DNA, 380 bp, Bos taurus
  Clone ID: 35-LIB34-061-Q1-E1-A4
actttggcacaatgaagtgggtgacttttatttctcttctccttctcttcagctctgcttattccaggggtgtgtttcgtcgagatacacacaagagtgagattgctcatcggtttaaagatttgggagaagaacattttaaaggcctggtactgattgccttttctcagtatctccagcagtgtccatttgatgagcatgtaaaattagtgaacgaactaactgagtttgcaaaaacatgtgttgctgatgagtcccatgccggctgtgaaaagtcacttcacactctctttggagatgaattgtgtaaagttgcatcccttcgtgaaacctatgggtgacatggctgactgctgtgagaaacaagagcctgaaagaaa

SEQ ID NO: 8245 - DNA, 209 bp, Bos taurus
  Clone ID: 35-LIB34-062-Q1-E1-A12
tggaagtgtatatagaactattagttcttacttacatgatttaattatatcaagataaatgaatttaacttgctttaatgtaggcagactttccatttttgttcattctcatgtttatgttgaaataacatccctctcctacatttcattttcttgactcaaatatcaacctacggtcaagatgggagagaaacaactaagatgattgt

SEQ ID NO: 8246 - DNA, 220 bp, Bos taurus
  unsure (41),(57),(66),(70),(74),(84),(86),(95): unsure at all n locations; Clone ID: 35-LIB34-062-Q1-E1-A4
cccgggttcgacccacgacgtccgatttggggagatccttngaagaaaaaagctgcntgaagcccnacgntgangcccaattcnangaacagaangagcagccaacaggaacttgtgctgcgtgcatcaccggtggcaacagatcacttgtagctaatcttgctgctgccaactgttacaaaaaagaaaaacatcttgatatggagaaaaactggatgtc

SEQ ID NO: 8247 - DNA, 430 bp, Bos taurus
  unsure (387): unsure at all n locations; Clone ID: 35-LIB34-063-Q1-E1-A4
cccacgcctctggagaaaaccgacagatgtctttaagaaaggagacctctatttcaacactggagatctcttaatgattgaccacgaaaattttatctacttccacgacagagttggagacacattccggtggaaaggggagaacgtggccaccactgaagtcgctgacacagtaggactggttgattttgtcgaagaagtgaacgtttatggtgtgtctgtgccaggtcatgagggtcgaattggcatggcctcgatcaagatgaaggcagaccatgaatttgatggacggaagctctttaagcacgtggtcgattacctgcctagttacgcaaggccccgctttctaagaatacaggacagcattgagatcactggaacttttanacaccgaaaagtgaccctcgtagaagaaggctttaaccctgca

SEQ ID NO: 8248 - DNA, 227 bp, Bos taurus
  Clone ID: 35-LIB34-064-Q1-E1-A12
acccacgcgtcgaaacccacatatctttggcacaatgaagtgggtgacttttatttcccttctccttctcttcagctcggcttattccaggggtgtgttccgccgagatacacacaggagtgagattgctcaccggttaaaagatttgggagaagaccattttaagggcctggtacggatggcctttcccaattaccccaagcattgtcaatttgatgagcatgtaa

SEQ ID NO: 8249 - DNA, 216 bp, Bos taurus
  Clone ID: 35-LIB34-065-Q1-E1-A4
cagacactttccccaattcgagctccacaggagtcaagactgtggagtcggcaaccgacatcaaggccgacatcaataagacgtaccggtgtgtgagcgagactcaggtcaacatggacaatgtgacggtcacgctccgagacgcggccatccaggcctacctgtccagcagcaacttcagcagagaggagacgcgctgtgaacaggacctgccca

SEQ ID NO: 8250 - DNA, 204 bp, Bos taurus
  Clone ID: 35-LIB34-066-Q1-E1-A12
agctgtaattggtccagaggccagtcccaattggagcttaggaagggtagagacactgaaattgtgcaacggattacctgttgctattggcaacagatttgcctcatgaattgaaaatgtggcagtttctttctgaagtgttgggtttgctgtttcaagcatttgtacacattagtagtctgaggagtagcaagttctgaggac

SEQ ID NO: 8251 - DNA, 243 bp, Bos taurus
  Clone ID: 35-LIB34-067-Q1-E1-A4
acgtccgggcttgatggcctttctgaacgctgtgctcagtataagaaagatggtgctgactttgggaagtggcgtgctgtgctgaagattgacaaccagtgtccatcccatcttgctatccaggaaaacgccaacaccctcgcccgctatgccagcatctgtcagcagaatggtctggtacccattgttgagccagaggtaattcctgatggcagccatgacatggaacactgccagtatgtt

SEQ ID NO: 8252 - DNA, 197 bp, Bos taurus
  Clone ID: 35-LIB34-068-Q1-E1-A12
ctcggacaagaagttgcagctgatcaaggactaccgggagaaagtggagtccgagctgaggtccatctgcaccacggtcctggaattgttggataagtatttaatagccaatgcaactaatccagagagtaaggtcttctatctgaaaatgaagggagattacttccggtaccttgctgaagttgcttgtggtgatg

SEQ ID NO: 8253 - DNA, 210 bp, Bos taurus
  unsure (47): unsure at all n locations; Clone ID: 35-LIB34-068-Q1-E1-A4
gtcgaccaacgtccgctcaattttgggagcaatcaacttcattacancatttatcacaataaagccccccgcatggtcacattaccaaacccctctgttcgtatgatcggtaataattaccgccgtactactactactctcgctccctgtattagcagccggcatcacaatgctattaacagaccggaactaaatacaacttccttcgac

SEQ ID NO: 8254 - DNA, 217 bp, Bos taurus
  Clone ID: 35-LIB34-069-Q1-E1-A4
atcgagctcctccacctgcagccgcgggcgagctgggtagccgagccgagccgggcctggccgggccgggtcagagctgcgggaggggcgggccgggggtccggaggagtcacgtgccccctcccgccccaggtctcccactcaggatgcggcttccccggcctcagccctgggggctcggtctgctgctcgtcctccctgcctggggcgctgagcg

SEQ ID NO: 8255 - DNA, 223 bp, Bos taurus
  unsure (196): unsure at all n locations; Clone ID: 35-LIB34-070-Q1-E1-A12
gtggaagcacagcccgagagcaccaccctggcccctgttctgcaggctcagaccctagagactcctgtccaggcaccagttctcaaccctgagaaagaggtcccaccatctgggcggggagactcagagcctgggatggggaccagtgacctagggacctctgagtccccagcagaggaggagacgtgcagtgggnaaaccctttgatgccttcactgacctc

SEQ ID NO: 8256 - DNA, 393 bp, Bos taurus
  unsure (322): unsure at all n locations; Clone ID: 35-LIB34-071-Q1-E1-A4
agtggttgccggcccggtctccgcagtccccaccgagccccgaccctcctggccgccccctcgccttacctcgtcgccatgcgcctccgccgcctagcgctgttcccaggcctggcgctgctcctcgccgcggcccgcctcgctgctgcctccgatgtgctggaactcacggacgacaacttcgagagtcgcatcaccgacacgggctcttctggcctcatgctcgtcgagttcttcgccccctggtgtggacactgcaaaaagcttgccccagagtatgaagctgcagctaccagattaaaaggaatagtcccgttagcanaggtggattgtactgccaacacgaacacctgtaataagtatggagtgagtggatatccaaccttgaagata

SEQ ID NO: 8257 - DNA, 399 bp, Bos taurus
  Clone ID: 35-LIB34-072-Q1-E1-A12
aagaagcttcacactgagaggcaggcagagaacatcacacacagctgaaaggaaactcagaggagggaatcgccaagaaaagtggccatggagctaatcccaaacttttccgtggaaacctgggttctcctggctatcagcctggtgctcctttatctatatggaacttattcacatggactgtttaagaagctgggggttcctggcccaagacctctgcctctttttggaaacgttctatcctaccgaaagggtgtttgtgagtttgatgaagaatgttttaaaaagtatgggaaaatgtgggggatttttgaaggtaaacatcctctgttggttatcacggattcagacatgatcaaaacagtactagtgaaagaatgttattctgtcttcacaaac

SEQ ID NO: 8258 - DNA, 404 bp, Bos taurus
  Clone ID: 35-LIB34-072-Q1-E1-A4
agaagtcagtgcgaaagatcgtcaccttggtctcgggctccgctgccgaggtagacagactcctgtcccagagagccccgctcacagagcacgcatgctaccagacggccgtgtcgcacttccgctcacactgcttcaactggcacaaccccacgtacgagtatgctttgagacatttgtacgtgcttgtcaacctttgtgaaaacccttatccaattgacagaataaaattgtccatgaacaaggtgtgccatggctactactgaaacactgcctccttgaagctttaccgaatgtgatcaccatcccttacaatgtgtgctaatcagagactggagagctgcagcctgcgggaggctccgctcccccagccccagcggctgtgtccttcttgggatggcgtc

SEQ ID NO: 8259 - DNA, 393 bp, Bos taurus
  Clone ID: 35-LIB34-074-Q1-E1-A4
aggagattcttgcctctggatccgtgtggctgttcagaggagactttgtgatggactacccgcggcccatcatgcccaacatggtgttcattgggggcatcaactgtgccaacaggaaacctttatctcaggaatttgaagcctatgtaaatgcttctggagaacacggaattgtggttttctctttgggctcaatggtctcggagattccggagcagaaagctatggaaattgctgatgctttgggcaaaatacctcaaacagtcctgtggcgatacactgggactccacaccaaaccttgcgaagaacacaaagctcgtcaagtggctgccccagaacgatctgctccgtcacccaaagactcgggcctttatcacacattccggctccca

SEQ ID NO: 8260 - DNA, 278 bp, Bos taurus
  Clone ID: 35-LIB34-075-Q1-E1-A4
ccaactccaactcaaggtcccaatgcctgggaaatgacaactacaattaattatcaaggatgggaaaaaatatccaatccaagttaagaaaaccaatttatttcagaagccagagaaaatttgttgcaaggttggaaaatggaattcaaccccacaatttattgaaaaaattggatgttcccaacaaccccaactaaacaatggaaccattaactcacctagctctgcaaaagaaagggaagaattacatgaacaaaggctgtttgcacaatggacta

SEQ ID NO: 8261 - DNA, 455 bp, Bos taurus
  Clone ID: 35-LIB34-077-Q1-E1-A12
agaccctagataaagtcgtattaaagaactttgccaaatactttcttcaccaatctcatgaggagagggaacatgctgagagactgatgaagctgcagaaccagcgaggcggccgaatcttccttcaggatatcaagaaaccagaccgtgatgactgggagaatgggctgactgcaatggaatgtgcgctgtgcttggagagaagtgtgaatcagtcactactggaactgcacaaactggccactgaaaaaaatgatccccatctgtgtgatttcattgagactcattacctgaatgagcaggtggaagccatcaaagaattgggtgaccacataaccaacctgcgcaagatgggggctcctggatctggcatggcagagtacctctttgacaagcacaccctgggacacagtgagaactaagcctcaagctggtttcccacaccacaggggtga

SEQ ID NO: 8262 - DNA, 442 bp, Bos taurus
  unsure (23),(26),(40)...(41),(49)...(50),(55)...(56): unsure at all n locations; Clone ID: 35-LIB34-078-Q1-E1-A4
tatagaaagtcgaattacctctnctngcagttggctttgnngggccccnntccgnntgtcatcttctcccctctgagcatctccatagccttggccttcctgtccctgggggctcatgaccacactgtgacagagatcctggaaggtctcaagttcaacctcacagagacccccgagacagaaatccaccagggcttccagcacctcctgcagacgttcaatcagcccagcaaccagctgcagctgagcgtgggcaacgccatgtttgtgtcagaggagctgaagctgctggacaaattcaggaaagatgccgaagctttttacgcctctgaggttttatccactaacttcaaggattctgaagctgccgtaaagcttatcaatgaatatgtgaagaataaaaactcatgggaaaatttggaagctcttcaatgatcttgac

SEQ ID NO: 8263 - DNA, 289 bp, Bos taurus
  Clone ID: 35-LIB34-079-Q1-E1-A4
acccatgctgatggtgcacgggtggcctgcccccgtctacaagttttataagatcatcccgttcctgactgaccctaataaccacggcctgattgatgaacacgtttttgaagtcatctgtccaaccattcctggctacagcttctccgatgcatcctccatcaacggcttcacctcagtggtcagtgccaggatcatttatcaactgatgctgcagctgggcttccagaaattctatattcatagcggcgactggggggccctgatctgcaacaacatggcccacctg

SEQ ID NO: 8264 - DNA, 407 bp, Bos taurus
  Clone ID: 35-LIB34-080-Q1-E1-A12
aggcagataaagggatagacctgtggttgttgctgtgggatcctaagtccaggtgatcactttgaactaaacatcaacaactggaaacattcacatgatatatgcagttcaatgatggaccaaaatcatcattcggataagacagcagaggcacaaccttccgagaaaaagacaactagaaactgctgcaatggattcaagatgtttttggcagccctgtcactcagctttatttctaaggcactgggtgcagtcattatgaaaagttccatcactcaaatagaaaggagatttgacatatcatcttctactgttggcttaattgacggaagctttgaaattggaaatttgcttgtgattgtatttgtgagttactttggagccaaattacacagaccaaagctaat

SEQ ID NO: 8265 - DNA, 424 bp, Bos taurus
  Clone ID: 35-LIB34-080-Q1-E1-A4
actgatatagactacactagacacacacttgatggtgctgcatgtcttctgaatagcaataaatattttcccagcagagttagcataaaggaatcatctgtagcaaaactaggatcagtatgccgtaggatttacagaatattttcacatgcttattttcatcaccggcagatatttgatgaatatgaaaatgaaacatttttgtgtcatcggtttactaaatttgtgatgaaatataatttgatgtccaaggataacctgattgtaccaattttagaagaagaagttcagaattcagtttctggggaaagtgaagcatgaagggaatcatatagaaaaaaacgtactgatcacataattaacattaattatgtactgtatatatatcattttagacacatcaatcatgtatccatattatagc

SEQ ID NO: 8266 - DNA, 362 bp, Bos taurus
  Clone ID: 35-LIB34-081-Q1-E1-A12
aattgataaggaaaaagttaacctccctgactcagaaaggaaaacggacccagctgaaaaggacacaaacgtatatactgagaagcactcagacaatctgtttaaacgaacagaagtcctggcagctgtcattgctggcggagttattggctttctctttgcaattttcctcatcctgctgttggtgtatcgcatgagaaagaaggatgaaggaagttatgaccttggagaacgcaaaccatccagtgctgcttatcagaaggcacctactaaggagttttatgcgtgaaaactcccatttagtgtctctatttatgagatcactgaacttttaaaaataaagcttttgcatagaataatga

SEQ ID NO: 8267 - DNA, 407 bp, Bos taurus
  Clone ID: 35-LIB34-082-Q1-E1-A4
agattccaaaatgcgctcatagttcgttacaccaggaaagtaccccaagtgtcaactccaactctcgtggaggtttcaagaagcctaggaaaagtgggtactaagtgttgtacaaagccggaatcagaaagaatgccctgtactgaagactatctgagcttgatcctgaaccggttgtgcgtgctgcatgagaagacaccagtgagtgaaaaagtcaccaagtgctgcacagagtcattggtgaacagacggccatgtttctctgctctgacacctgatgaaacatatgtacccaaagcctttgatgagaaattgttcaccttccatgcagatatatgcacacttcccgatactgagaaacaaatcaagaaacaaactgcacttgttgagctgttgaaacacaagcc

SEQ ID NO: 8268 - DNA, 382 bp, Bos taurus
  unsure (200): unsure at all n locations; Clone ID: 35-LIB34-084-Q1-E1-A4
atggaaatttgagaccagcaagtactatgttaccatcattgatgccccaggacacagagacttcatcaaaaacatgattacaggcacatcccaggctgactgtgctgtcctgatcgttgctgctggtgttggtgaatttgaagccggtatctccaagaacgggcagacccgtgagcatgcccttttggcttacaccctgngtgtgaaacaactaattgttggcgttaacaaaatggattccactgagccaccctatagccagaagagatacgaagaaattgttaaggaagtcagcacctatattaagagaattggctacaaccccgacacagtagcattttgtgcaatttctgggctggatggtgacaacatgctagaaacc

SEQ ID NO: 8269 - DNA, 378 bp, Bos taurus
  Clone ID: 35-LIB34-086-Q1-E1-A12
atgactatcattccagagctgggtatctcagatctgctttcaaccagcaactgcctgaagccatcttcctgcctgctggatgcttacagtgactgtagctatgagggttccccttctcccttgagtgacatgtcctccctgcttgatgcagaccattcttgggaggacccttttgccagtgaactctttccccagctgattagtgtctaaggagtgatccagtactgatgctcttgactgtgacactgcctggaggacagcacaaaggcctgtgcttcatccaaaaagccaaagtagagggggtgtggtcctagagaattcctttaaagtatttgttcaagcctcctaggtcaccccaaatattgtcttttgaccttt

SEQ ID NO: 8270 - DNA, 359 bp, Bos taurus
  Clone ID: 35-LIB34-086-Q1-E1-A4
aaaaaaactgcacatgttgagctgttgaaacacaagcccaaggcaacagaggaacaactgaaaaccgtcatggagaattttgtggcttttgtagacaagtgctgtgcagctgatgacaaagaagcctgctttgctgtggagggtccaaaacttgttgtttcaactcaaacagccttagcctaaacacgacacaaccacaggcatctcagcctaccctgagagtaagaggaaaaaagagaaatgaaaactcagagcttattcatctgttttccttttctgttggtgttaaaccaacactctcactaaagaacgtaaatttctttaaatattttgcttcttttgtttgtgctacaattaat

SEQ ID NO: 8271 - DNA, 365 bp, Bos taurus
  Clone ID: 36-BOVMS1-002-Q1-E1-A8
aaaaaaaaaaaaaaaaaaaaaaaaaaaaaaaaaaaaaaaaaaaaaaaaaaaaaaaaaaaaaaaaaaaaaaaaaaaaaaaaaaaaaaaaaaaaaaaaaaaaaaaaaaaaaaaaaaaaaaaaaaaaaaaaaaaaagggggggccccccaaaaggttcaaacctaacttccccttgaatgcaacttcaaacccctccaaaagggcccccaaatttaatttcacgggccttcttttaaaaactccataacgggaaaaaccctggcttaccccaattaaacccctttgaaaaaaaaccccttttcccaagcgggcttataaccaaaaaggccccaaccttttccctttccaaaaatttcccaaccttaaa

SEQ ID NO: 8272 - DNA, 430 bp, Bos taurus
  unsure (379): unsure at all n locations; Clone ID: 36-BOVMS1-003-Q1-E1-A8
catcaagtcccttggacagaaaggggcagaagagagaggactcaagtgtgagagccgatttctttgttcttgtccctgtttcctgaagacacttttcatgcttgacatacctaccagtattaccattcccgacaacacgtacacatatgagaatatactttgttttatttatttttgtgtaggcggttcaccttcacaaatgtcagtgtctactcctagaagaaccaaatacctcaatttttgtgtttgagtactgtaatgtcctgtaaatatatcctaagcaggtttgttttcagcactggaaagcaccagtgttgattttgttttgtttttttaagttgccaacagttgtatgtttgctaattatttatgacctganataatatatatcttcctctaagaagacattttgtacataagggatactttt

SEQ ID NO: 8273 - DNA, 388 bp, Bos taurus
  unsure (307): unsure at all n locations; Clone ID: 36-BOVMS1-004-Q1-E1-A12
atgcgacgtcatagctcttctatagtgtcacctaaattcaattcactggccgtcgttttacaacgtcgtgactgggaaaaccctggcgttacccaacttaatcgccttgcagcacatccccctttcgccagctggcgtaatagcgaagaggcccgcaccgatcgcccttcccaacagttgcgcagcctgaatggcgaatgggacgcgccctgtagcggcgcattaagcgcggcgggtgtggtggttacgcgcagcgtgaccgctacacttgccagcgccctagcgcccgctcctttcgctttcttcncttcctttctcgccacgttcgccggctttccccgtcaagctctaaatcgggggctccctttaaggttccgatttagtgctt

SEQ ID NO: 8274 - DNA, 294 bp, Bos taurus
  unsure (290),(292)...(293): unsure at all n locations; Clone ID: 36-BOVMS1-004-Q1-E1-A8
gacaatctccttatcccaagaatggctaagtttttggtggcatcttctcagcatataacgcctggctccttggattattgtgtcatttgataacaaggaagttgaactcacccttaaagtctcacaacaaatgaaatgttacttacggttgtttttctggatgctttctcatcacacaggtgttatacaaagaaaacatgggcaagggaacccctttacctgtcactccagagatggagagaatcaaacacaatcaagaaaatattagctcggtacttgcggcaagacananna

SEQ ID NO: 8275 - DNA, 405 bp, Bos taurus
  Clone ID: 36-BOVMS1-006-Q1-E1-A12
catagacatccccctgtgagcaggagccgtaattacaggattccgcaataaaactaaagcatcacttgcccatttcttaccacaaggaacacccaccccactaatcccaatactagtaattattgaaactatcagcctttttattcaacctatagccctcgccgtgcggttaacagctaacatcactgcaggacacctattaattcacctaatcggaggagctacacttgcactaataagcattagcactacaacagctctaattacattcaccattctaatcctactaacaattctagagtttgcaattactattatccaagcctaagttttcaatcccctaatcagcccaaatctgcatgacaacacattaaaaaaataaaaaaaaaaaaaagggcgggcgct

SEQ ID NO: 8276 - DNA, 449 bp, Bos taurus
  Clone ID: 36-BOVMS1-007-Q1-E1-A8
gataaaaagcatcaattcttcggtgctcagttgtaaaaattacaactgtacaattaagtgtgtagtagcactgtgctttaaaaaaccaatgtatgtaccttagctaaaagattcttgctaaaaaatcctaaccatcatctaagccttcagcaagttataagatcgaaatcactgatcaccataacaaatataataagtttgaaatgtttcaagaattgtcagaatgtcacaaagacgtgttccaaatgctgttgggaattggcgccaataaatgtgctggacacagggttgccacaaacctcccatttgtaaagaaaatcaatacatgtgaagcctaatggaggtatgcctgtagttaaaatttctgaaacaatcagaagtgggtgtgtacatttgacatatatttttatcacagagtgagagaaaattatgacaatcatgtttcactt

SEQ ID NO: 8277 - DNA, 431 bp, Bos taurus
  Clone ID: 36-BOVMS1-008-Q1-E1-A12
agataaacaaacctactaggcctattaccccattcattcacaccaacaacacaactatcaataaacctaggcatagccatccccctgtgagcaggagccgtaattacaggattccgcaataaaactaaagcatcacttgcccatttcttaccacaaggaacacccaccccactaatcccaatactagtaattattgaaactatcagcctttttattcaacctatagccctcgccgtgcggttaacagctaacatcactgcaggacacctattaattcacctaatcggaggagctacacttgcactaataagcattagcactacaacagctctaattacattcaccattctaatcctactaacaattctagagtttgcagtagctataatccaagcctatgtattcactctcctagtcagcctatatctgca

SEQ ID NO: 8278 - DNA, 270 bp, Bos taurus
  Clone ID: 36-BOVMS1-008-Q1-E1-A8
acgaacaagtatcatttgctgcaggcttcgcgtttatggactggccactctgaccagacattgtatcaggatgagacttcggttccgtcgtgtgaacatgcgtaaccttacgaatcctgacacgcctactccaaacagtggacaacatagcagacgcatgtttagtattcacccctgtggattatatcagacgcgacttttgctattgctgaaacaccagatttaaatacgcgggatgcgattcactgttggtaaaccgctgatatatgt

SEQ ID NO: 8279 - DNA, 446 bp, Bos taurus
  Clone ID: 36-BOVMS1-010-Q1-E1-A12
atcaaagaagaactacttcactttcatgaccacacgctaataattgtcttcttaattagctcattagtactttacattatttcactaatactaacgacaaagctgacccatacaagcacgatagatgcacaagaagtagagacaatctgaaccattctgcccgccatcatcttaattctaattgctcttccttctttacgaattctatacataatagatgaaatcaataacccatctcttacagtaaaaaccataggacatcagtgatactgaagctatgagtatacagattatgaggacttaagcttcgactcctacataattccaacatcagaattaaagccaggggagctacgactattagaagtcgataatcgagttgtactaccaatagaaataacaatccgaatgttagtctcctctgaagacgtattacactcatgagc

SEQ ID NO: 8280 - DNA, 458 bp, Bos taurus
  Clone ID: 36-BOVMS1-010-Q1-E1-A8
attaataacttgtttaccttttctgagaatagctaaatcactttttaaaatttaaaattcttagatttacatctgagggcgaattgaattgggtaacctgaattccctaggtaaagaaaattagcaaaataaaataaaataaaattaaaaaaaaaattagttacagcatatgatgaaagtataagactccaacagctgccttacaactcattcattccagatagaagacgcatttattgaatgtctgttatgagctatttttctgttaatcatagttatcaatatgccgttcaaactttcttttggtacctagtcagttggacaacatttatgtctgggaaagagaaaaaaatattgttttataagaggaaaaaagtgaatctggttatccaagtaggaataagcaaatgaaaagcaattattactgacagagaatcattgatgtaattttaagaatg

SEQ ID NO: 8281 - DNA, 426 bp, Bos taurus
  unsure (364),(419): unsure at all n locations; Clone ID: 36-BOVMS1-012-Q1-E1-A12
gtaaatcctgctgaacattagggatattcagagctttcatacctcatcatgttgtttaaaccaccaacttacgtgatctgatttaaactttaataagaaatccacttcattcaaaatagaaagatacaaagacaacatttatcagccaagtgtgtgacgcattcttcgcatctagtctgtagttgtgtctgtgctctggaatggataccgtctgctgatgtctgttactgatggagcagccactgcaaaactagtcaactccatctataactgttactttttctagtgctgctttgtgctgaaagaacattttagtttactgcacttgacctgtaaaagactttctttgtaattttaaggacanattaggtggttaatttaaagaaaaactttcaatgttgcctttacatcacattaanatataac

SEQ ID NO: 8282 - DNA, 366 bp, Bos taurus
  Clone ID: 36-BOVMS1-012-Q1-E1-A6
gctggttctgcagctctgtggcaagccgcggagtctgggttctgatccgcaggatggggtttgttaaagttgtcaagaacaaggcctacttcaagagataccaagtgaaattcagaagaaggcgagagggcaaaactgactactatgctcggaaacgattggtaatccaagataaaaataagtacaacacacctaaatacagaatgattgttcgtgtaacgaacagagatatcatttgtcagattgcttatgcccgtatagaaggagatatgatagtttgtgcagcttatgctcacgaactcccaaaatatggtgtgaaggttggcctgacaaattatgctgcggcatattgtactggcctgctgc

SEQ ID NO: 8283 - DNA, 426 bp, Bos taurus
  Clone ID: 36-BOVMS1-013-Q1-E1-A8
cggtcggaaatccggtcgaccaagcgtcggcagaaaatcatcaggattattttaaggagttattatggagttattaatgggtttactggggtttttaagaactaatacaatgtcctgggttctttcgagtgcaacggtatgtgggcaaatggtatcacttgtgaagtgctttgttgtagcttattaatccacacgggaaacttacgctgtaaacataagtacagacccagtgcagttcttgtattctgtatgttgttgggggaataaagttttagatcgcaatcacatggcctccctgagttcaatatgcctttattaggatgcgtattaccccattatttcgttaaaatcctttttcctcttcctcttgagtagtaagttccaaaatatagtttattgtaacatccatccttaaaaagtttgttc

SEQ ID NO: 8284 - DNA, 450 bp, Bos taurus
  Clone ID: 36-BOVMS1-016-Q1-E1-A8
gcaggctcctcttgcaaggtgtgcctcctaacataagtgactcatatttgcgagacttgcactcaagcaaccctgaggaataaagggcctgggcactgcctctctgcacgccactgctttgaaatcgggttgcaatgagaaagcatttgtttttccaccaggctcccaagtgtggtcgttttttttcctcctgatgctgaagaatgacaaaaaaatgtttgcacggattgcttaattaaaaattgcaaacaaaatctcaaaataataataatggaaagggcggacgctcgcgatctagatcaagctcgacatggataacgccttggatcgaccggagcaggcggaggccgataagaaggcagcggcggacatgagcaagcagctggaagatgagctggtgtcgctgcaaaagaaactcaaggccaccgaagatgaactggacaaatactc

SEQ ID NO: 8285 - DNA, 405 bp, Bos taurus
  unsure (392): unsure at all n locations; Clone ID: 36-BOVMS1-017-Q1-E1-A12
ctgcgtatccagctggagctgaaccaggtcaagtctgaaattgacaggaaaattgctgaaaaggatgaggaaattgaccagctgaagaggaaccacattagaatcgtggagtccatgcagagcacgttggatgctgaaatcaggagcaggaatgatgccatcaggctcaagaagaagatggaaggagacctcaatgaaatggagattcagttgaaccatgccaaccgcatggctgctgaggccctgaagaactacaggagcactcaagccatcctcaaggatacccagatccacctggatgatgctctgcggggccaggaggacttgaaggagcagctggccatggtggagcgcagagccaacctgctgcaggctgagatcgaggagctganggccaccctggag

SEQ ID NO: 8286 - DNA, 423 bp, Bos taurus
  Clone ID: 36-BOVMS1-019-Q1-E1-A8
cttgaccctttttatcatctttcaactaaaagtttcaaaacacaacttttatcacaatccagaactgacaccaacaaaaatattaaaacaaaacaccccttgagaaacaaaatgaacgaaaatttatttacctcttttattacccctgtaattttaggtctccctctcgtaacccttatcgtactattcccaagcctactattcccaacatcaaaccgactagtaagcaatcgctttgtaaccctccaacaatgaatacttcaacttgtatcaaaacaaataatgagtatccacaattctaaaggacaaacatgaacattaatattaatatctctgatcctatttattggattaacaaacctactaggcctattaccccattcattcacaccagcaacacaactatcaataaacctaagcata

SEQ ID NO: 8287 - DNA, 225 bp, Bos taurus
  Clone ID: 36-BOVMS1-020-Q1-E1-A12
cagagttccaaccaatgggctccagactctgggttctggccaatgaaaaacctcccttacagtctcctcttctttttccccaagctccgcccaccatcgggagctctggctaatggagctcacctggagctgttgctttttctctactcaaagcaacaaataaaagcaatggtggccttaacacaaaaaaaaaaaaaaagaagtcataaaaaaaaaatcaataaa

SEQ ID NO: 8288 - DNA, 449 bp, Bos taurus
  Clone ID: 36-BOVMS1-021-Q1-E1-A8
agttaatggaatcagagcaaaaaagggtgaacaaagaagagtctctacaaatgcaagttcaggatattttggagcagaatgaggcgttgaaagctcaaattcaacagttccattcccagatagcagcccagacctccgcttcagctctagcagaggaattacataaagtgattgcagaaaaggataagcagataaaacagactgaagattctttagcaaatgagcatgatcatttagcaagtaaagaggaggaacttaaggacatacagaatatgaatttcttattaaaagctgaagtgcaaaaattacaggccctagcaaatgaacaggctgctgctgcacatgaactggagaagatgcagaaaagtattcatgttaaggatgataaaatacgattgcttgaagagcagctacagtgtgaaatttcaaacaaaatggaagaatttaag

SEQ ID NO: 8289 - DNA, 368 bp, Bos taurus
  Clone ID: 36-BOVMS1-022-Q1-E1-A12
atgcgacgtcatagctcttctatagtgtcaccgtagagttcaattcactggccgtcgttttacaacgtcgtgactgggaaaaccctggcgtcacccaacttaatcgccttgcagcacatccccctttcgccagctggcgtaatagcgaaaaggcccgcaccgatcgcccttcccaacagttgcgcagcctgaatggcgaatgggacgcgccctgtagcggcgcattaagcgcagcgggtgtggtggttacgcgcagcgtgaccgctacacttgcaagcgccctatcgcccgctcctttcgctttcttcccttcctttcacgccaagttcgacggctttccccgtcaagctctaaatcgggggctccct

SEQ ID NO: 8290 - DNA, 440 bp, Bos taurus
  Clone ID: 36-BOVMS1-022-Q1-E1-A8
gcgacttagcagcagtagcagcagcaggtcagcaacagatatctccgctgtcaggcactctgtgctccatcagaagagtacaactttattaactcagactctgctcttacatttaagattgtttttgcaagagctggactgaagcagcgtattcataacttgacaagatttctttttcctttttgcgggggaaaaagggtcacctgagaaaataaattattttcagggactttgggatcctaatggtatatattacatgtaacagatgaacagattaatccttcatatattcattaaatagtctggaattcctcagctcaccatcactcctggccatactttccttgcttgtttgtttgctacgtgtatttgaaagtaatacctgcattcctttgaagatgttctataggtcatatttgtcagtttcacagactagtctt

SEQ ID NO: 8291 - DNA, 424 bp, Bos taurus
  Clone ID: 36-BOVMS1-023-Q1-E1-A12
aaccgaaccataattctagctcgaggcctacaaacgctccttccactaatagccacctgatgactactagcaagtctaaccaacttagctctacccccaacaatcaacttaattggagaactatttgtagtaatgtcaaccttttcatgatctaacattacaattattctaataggagtaaatatagtaatcaccgccctatattctctatacatgctaattataacccaacgaggaaaatatacctaccacattaataatatctcgccttcctttacacgggaaaatgcactcatatcattacacatcctacccctactactcctaaccctaaacccaaaaattattctaggacctctatactaaaaaaaaaaaaaaagggcggccgctcgcttttttttttttttttttttgtgagaaatcc

SEQ ID NO: 8292 - DNA, 202 bp, Bos taurus
  Clone ID: 36-BOVMS1-023-Q1-E1-A8
atgcgacgtcaaagctcttcaaaagtgtcacctaaattcaattcactggccgtcgttttacaacgtcgtgactgggaaaaccctggcgttacccaacttaatcgccttgcagaaaatccccctttcgccagctggcgtaataccgaaaaggcccgcaccgattgcccttcccaacatttgcgcaccctgaatggcaaatggg

SEQ ID NO: 8293 - DNA, 356 bp, Bos taurus
  Clone ID: 36-LIB188-001-Q1-E1-A12
accggaacgccatgtcgtcatacactttggtcgaggactcaacgtatgtggacttgtcctggaaggtcgggcggggcaagagccctgccaccttgtgctcccggtccagccggacatccatgaccttggtgatcttccagaggtcgatgaggaccccaatgaagacgctgacctggaccacgaagttggtctcgttgtccaggatgtagagcaggaccacgaaggactggaagacgccgaagaagacggagcgcacggacaggccctccagggactgccggctgttccagaactggatatcattcttgaaggccaggaactcaaagacactgtggacgatggacacgatgatggtg

SEQ ID NO: 8294 - DNA, 442 bp, Bos taurus
  Clone ID: 36-LIB188-001-Q1-E1-A8
actttggcactccactgtttcgaatcccttggatcatggaggcatggttcccagcgtcagagtaaatctcacagcctggcatcatcttagccagagtgaagagggtcgagtcattggccacaaagcacgaggagaacaagagtgcagcatctattccatggaggtcagccagctcctgctccaggtccacgtggaatttactagttccagaaatatttctagtaccaccgaacacagcgacacagagacctgcacactcttcaccacggggacatttaatggcatctcccaacactccgttgtcttgggaagacagctccaccgaaaaacgtaaaaagtgcagcacagcaagaaggcaattagcctcaaagaagcaacaagtgtaagtttatcagatggcacgagcaagggagacatgtcgcgggtcctctctctccatgac

SEQ ID NO: 8295 - DNA, 407 bp, Bos taurus
  Clone ID: 36-LIB188-002-Q1-E1-A12
actttgcagaggccctggggccactggagagctttgaagcctggcctgatgacttgctcatcagcacctaccccaagtcgggcaccacctgggtaagcgagatcctggacctgatctaccaggagggtgacctggagaagtgtcagagagcccctgtcttcttgcgggtgcccttccttgagttcagcgcccctggggttcccacaggtgttgagcttctgaaagatacaccagccccacggctcctcaagacacacttgcctctggccctgcttccgaagaccctgctggatcagaaagtcaaggtgatctacatcgcccgcaacgccaaggatgtggccgtctcctattaccacttctatcgcatggccaaggtgcaccctgaccctggcacctgggacagcttc

SEQ ID NO: 8296 - DNA, 421 bp, Bos taurus
  Clone ID: 36-LIB188-002-Q1-E1-A8
acctggtccctggtcatacccttaaacagagggtctgtgattccctgaatagtctctctggcgttacttatcactttagcagcccaggcgccccccggtcccctttgggcagcgtcatagtttccgcgggcatggaagtatttgtctgcacccttgtagttggcttctttcatgtcttggtaagctctccacatgtctttagccccttgaccagcttccttgaggaatgtcccccatccctggctgctgatgcccaggatcaggaagcagaaaatgatgcccgtggaaaggttcatcctgtggccgtgccctcctgctgaagctcctggtgaagctgagctgcctgtaccgctcctctggatgaggtaagccatctcccgagtgccatcacctacacgccacaccagcactcttttattaa

SEQ ID NO: 8297 - DNA, 421 bp, Bos taurus
  Clone ID: 36-LIB188-003-Q1-E1-A8
catgctaacgtacgccatggcggccggatacttcctggacaagattgatgtcatcaagcaggatgactacgtgcccagcgaccaggatctgctccgctgccgtgtcctgacttctggaatctttgagaccaagttccaggtggacaaagtcaacttccacatgtttgacgtgggcggccagcgcgatgaacgccgcaaatggatccaatgcttcaatgatgtgactgccatcatcttcgtggttgccagcagcagctacaacatggtcattcgggaggacaaccagaccaaccgcctgcaggaggctctgaacctcttcaagagcatctggaataacagatggctgcgcaccatctctgtgattctgttcctcaacaagcaagatctgctggctgagaaagtccttgctggaaaatcgaag

SEQ ID NO: 8298 - DNA, 267 bp, Bos taurus
  Clone ID: 36-LIB188-004-Q1-E1-A12
actcttgcaaggaaaatcccatggatggaggagcctggtgggctgcaatccatggggtcctgaagagtcggacacgactgagcgacttcactttcacttttcactttcctgcattggagaaggaaatggcaacccactccagtgttcttgcctggagaaccccagggatgggggagcctggtgggctgccgtctatggggtcgcacagagtcggacacgactgaagtgacttagcagcagtagcagcgatcttggaatcatacaagt

SEQ ID NO: 8299 - DNA, 448 bp, Bos taurus
  Clone ID: 36-LIB188-004-Q1-E1-A8
ccatggcggcgggatacaggaaagacctgactgcctccgcacctcaacccgctcccaaggggaccaaaagccttcatacatctcaagttgagggacaaaaaaaggggtccatgatggctgtccattcaaaataaaacaaacaaaaaaaacaagtattaaggcgaagattaaaaacaaaatttgttttggagtacaaattttcactggatacagttatcaaccccgacgacagggtgtttgaaaagggtggggcaagagtggtggttgactctgatagcttagccttcgtcaaaggggcccatgtggacttcagccaagaactgatccgaagctcatttcaagtgttgaacaatcctcaagcgcagcaaggttgctcctgtggatcatccttctctgtcaaactttgatgtgatgacaagtgacccggagattgctatcatctggctga

SEQ ID NO: 8300 - DNA, 391 bp, Bos taurus
  Clone ID: 36-LIB188-005-Q1-E1-A8
acttgtcctccgactcagtctgccggtttctctgccactccacggctacatcttctgggtagaagccggtgaccatgcaggtgacgctgagcgtgcttttgctgagctcttccttgggtgggtccaggacatacacctgcggctcccgggccggccctttgctcctggagatgatcctcacgatgggggccgagaggcctttgttgttgaccttgcacttgaactcctttcctccagtccagtcctggtgctggatgggcagggcgctgaccacgcggtactcggtgtggatcggaggctccatcctggcctccctgtccaccttccagcagatgtggatcagcaagcaggagtatgacgagtctggcccctccattgtccaccgcaaatg

SEQ ID NO: 8301 - DNA, 425 bp, Bos taurus
  Clone ID: 36-LIB188-006-Q1-E1-A8
acgtccgaacaggcggcgggttcgagcccaactttatgctcttcgaaaagtgcgaggtgaatggcgagaaggcgcatccgctcttcgccttccttcgggaggttctgcccacgccaagtgacgacgccactgctctcatgaccgaccctaagttcatcacctggtccccggtgtgccgcaacgacgtctcctggaacttcgagaagttcctggtgggcccaggcggtgtgcccgtgcgcaggtacaagagtgggcttccctggtggctctgacgataaagaatctgcctgccattcaggagacctgggtttgatccctgggttgggaagatcccctggaggagagcatgacagcccactccagtattcccgcctggaaaaacccaatgacaaaaggaccctgcaattgcaagagtaggataaggt

SEQ ID NO: 8302 - DNA, 443 bp, Bos taurus
  Clone ID: 36-LIB188-007-Q1-E1-A8
ctgggcccgggatacacgcgaagcaaccactgggctgtcggacacttaatgggaaaaaagagtgtggcagagtccccacaacttcatgaggaggagagcctgaaggagcagctgagggagtatgcccagtgggaagaagcgacaaggaacttgctaagcctcctacaagcaaagggggcccgaggccaccagatgcctccatgggagcccctgagcattcaccagcctgcctgggattccgaggacgtcagcaacttcaaagacacaggtcctcagcatgaaggaaggaacccccagctgaactgacaatgacgatggccgcctccctcaaagaagcaatacaaaatccttaagaaactgcgttctatgggcatcagttctactggattatcaacaaatttccctttgtgcaaaatacttaactattcttgtacatatatatg

SEQ ID NO: 8303 - DNA, 394 bp, Bos taurus
  Clone ID: 36-LIB188-008-Q1-E1-A12
gcccgggatacaattccagctcatgtggagacagtggttttatttttcccggatgtttggcattgccttcccacccgctcagagtgggaaaccctctcccgaggatacaagcagcagctggtcgagaagcttcagggtgaacgcaaggaggctgatggagaacaggatgaagaagagaaggatgatggtgaagctaaagaaatttccactcctacccattggtctaaacttgacccaaagacaatgaaggtaaatgatctccgaaaagaattagaaagtcgagctcttagttccaaaggcttaaaatcccagttaatagcccgactgacaaaacagcttaaagtagaagagcagaaagaagaacaaaaggaattagagaaatctgagaaagaag

SEQ ID NO: 8304 - DNA, 366 bp, Bos taurus
  Clone ID: 36-LIB188-008-Q1-E1-A8
acgattactccaagcccatccaggggcagcagaagaagccctttgagcagcactggaggaagcacacgctctcctacgttgacatcaagactgcctgcgcctcggtgcatggtgccaaccgtctgggtgcaaactcgctcctggacctggttgtcttcggccgggcgtgcgccctgagcatcgcagagtcctgcagacccggagataaagttccctcgattaaaccaaatgctggggaagaatctgtcatgaatcttgacaaattgagatttgccaatggaagcataagaacatcggaactgcgactcatcatgcagaagtcgatgcagagccatgccgcggtgttccgtgtggggagtgtgctgc

SEQ ID NO: 8305 - DNA, 393 bp, Bos taurus
  unsure (284): unsure at all n locations; Clone ID: 36-LIB188-009-Q1-E1-A8
acagggaggtggtgactggagctgggtgggtcatttagaggcttgaggtccatggttcatgcttgtgctgcagcagacatttgattgaggtctcaggcctctgagagagtgacattaccagggaatgaaagggtgctgaagtctgtgactgaggggataacgtccaagattgtatctctgggtgagccgccagagttcaaggtgtttctatggcccaaggaaatggtatccagtgtaatcctgtggctgcatggtctgtgcctgtgactgaggaatcagtgtcnccatcagatgcagtggtgtttgggggacgacagtgcatccagttgtgggcgatatctctgggaaagcctttctctgctcgaagctgctgattgaggcgccaatactgtt

SEQ ID NO: 8306 - DNA, 279 bp, Bos taurus
  Clone ID: 36-LIB188-010-Q1-E1-A12
acttgacctccgactcagtctgccggtctctctgccactccacgtctacatcttctgggtagaagccgatgaccatgcaggtgacgctgaccgtgcttttgctgagctcttccttgggtgggtccaggacatacacctgcggctcccgggccggccctttgctcctggagatgatcctcacgatggaggccgagaggcctttgatgttgaccttgcacttgaactcctttcctccagtccagtcctggtgctggatgggcagggcgctgaccacgcggt

SEQ ID NO: 8307 - DNA, 439 bp, Bos taurus
  Clone ID: 36-LIB188-010-Q1-E1-A8
accggctggggcatggcaggcggctctggcttcccacccttctgttcagagatgggggtggtgggcagtatttcatctttgggttccacaatgctcacgtgatcaggcagaggcttcttagggccaatcttaccagtcgggtcccaaggcagcatgatctttaccttgatgcccagcacaccctgtctgagcagcacatggcgcacggcggtgtccacatagtagttaacagggtccccactgtggatcatgaggccatccacaaacttcatggatttagccctctgtcctcgaagtttcccagacaccacgacctcgcagcctttggccccactctccatgatgaaccgcagcacaccataacaggccctccgcacagcaaggcctcctaagagtttgtaacgcagagactctgcctgggcaatggcacacagtcctc

SEQ ID NO: 8308 - DNA, 279 bp, Bos taurus
  Clone ID: 36-LIB188-011-Q1-E1-A8
actggtcccagcagattgaggagagcaccacagtggtcacctcgcagaccgctgagataggagctgctgagatgaccctcacggagctgaggcgcactgtccagtccctggagatcgacctggactccatgagaaatctgaaggccagcttggagaacagcctgagggaagtggaggcccgatatgccatgcagatggagcagctcaacggagtcctcctgcacctggagtcagagccggcccagacccgggcagaggggcaacgccagacccaggagt

SEQ ID NO: 8309 - DNA, 242 bp, Bos taurus
  Clone ID: 36-LIB188-012-Q1-E1-A8
ggccgcgggatacaaccttatttttttttttttttttttttttttttttttttttttgtttcatggtctagtttcttttctacttctagcaacggccatcttcaacttggcgcgcagtccgacagcgttgaggacgacggggccggcctcctcaagcaggttgtcccccaaccccctgatcgtcaggttggtcaccttggacacccagtcagtaaacagccccaagctgccaggagcaacac

SEQ ID NO: 8310 - DNA, 400 bp, Bos taurus
  Clone ID: 36-LIB188-013-Q1-E1-A8
acaaatgcactagccggctttccagaaaccaacaggaagaataccaggtgcttggcttcacaggcatttgtgaaacggaagatgcttcctcaaattacagcggttcagaagcgctgaccagttcctccttcagcatcaacatatatgacagaaagatgaccaggcaaatcaaaaagagccatatctctacagatatgccaagtttgactgttcttccaagctccttggatactgtgtgcctgactatgaattccttctgttacttaatgaacggtaaccaagatagttcacagcgtccaagagttgttaacatgcagacagtaaaatatagttttctaaagatatattttatcaagtattagtccttaagccattcaaattggtgtataaacaactattt

SEQ ID NO: 8311 - DNA, 423 bp, Bos taurus
  Clone ID: 36-LIB188-014-Q1-E1-A12
acacacttttatcagttcagttcagtcacttagttgtgtccaactctttgcaaccccatggactgcagtatgctatgcttccctgtccatcaccaactcctggggcttattcaaactcaagttcatagagtaggtgatgctatccaaccatcttatcctctgtcgtccccttctcctcctgccttcaatctttcccagcatcagggtcttttcagatcagtcagtttttcccatcaggtgaccaaagtgttggagtttcagcttcagcatcattccttccaatgaacacccagggctgatctccttcagaatggactggttggatctccttgcagtccaggggactctcaagagtcttctccaacaccacagttcaaaagcatcaattctttggcgctcagccttcttcacagtccaactctc

SEQ ID NO: 8312 - DNA, 370 bp, Bos taurus
  Clone ID: 36-LIB188-015-Q1-E1-A8
acattcaaagggggagccggctcccctgacgtgcaaatgatggggcccagggccctgccaagtcagcagcagtggggtatggggtccaagccccaagcactctccttgtaagtggagaaaggggggtggggctaggcccactcagttcctggtaaggggaagctgtgcctctccctggaagttgggacaagcacagttctggggagagaacatgttggggaaaaggatggtcacgtgatcacaaaagcatcaggggtcagaggtcacgttcccagcaggctccagtgaatcaaaccagtaaaagcaaaagcccagggagggaagagaagggcggccggggagtctggctgtggggggtgagctggtccac

SEQ ID NO: 8313 - DNA, 237 bp, Bos taurus
  Clone ID: 36-LIB188-016-Q1-E1-A12
acaagagctacagcccttacgacatgctggagagcatcaagaaggaggtcaaaggagacctggaaaatgcctttctgaatctggttcagtgcattcagaataagcccctgtattttgctgacagactgtatgactccatgaagggcaagggcactcgcgacaaggtcctgattagaatcatggtctcgcgcagtgaagtggacatgttgaaaattagatctgagttcaagaaaaagt

SEQ ID NO: 8314 - DNA, 400 bp, Bos taurus
  Clone ID: 36-LIB188-016-Q1-E1-A8
actgtggcaatccgtgaaattagacgttatcagaagtccactgaacttctgattcgcaaacttcccttccagcgtctggtgcgggaaattgctcaggacttcaaaacagatctgcgcttccagagtgcagctattggtgctttgcaggaggcaagtgaggcctatctggttggcctttttgaagacaccaacctgtgtgctatccatgccaaacgtgtaacaattatgccaaaagacatccagctagcacgccgcatacgtggagaacgtgcttaagaatccactatgatgggaaacatttcattctttaaaaaaaaaaaaaaaaaaaattctcttcttcctgttattggtagttctgaacgttagatattttttttccatggggtcaaaaggtatcact

SEQ ID NO: 8315 - DNA, 369 bp, Bos taurus
  Clone ID: 36-LIB188-018-Q1-E1-A12
acacggacgacggtttcatggtgacatctttgggcttggtgacggtgttcttttctgggaatggcaggtccgagtcggccactgtgcacgtaaaatcctctcgggactcccattcctccgagcataccgtggctgcatcctcgggcgctaaacgtgtcgttgatgtgtctctcagcatacgtgtgggtctccatggccttgcagttctaactggatcagccgatgttcaagtcatcatacggggttatgtttgtgacgagacatgacagcttggctgacttcttgacgaacatgtcggcaactgattgcgggatcgtgaagacctcgattggagatcgtgttgcatcatcacatgacgatgacacgttc

SEQ ID NO: 8316 - DNA, 437 bp, Bos taurus
  unsure (428): unsure at all n locations; Clone ID: 36-LIB188-018-Q1-E1-A8
acatcgccctggacgagtgggccggctgcttcggcatcaaggagaaggacatcgacaaggacctcgtgatctaaagccatgcctcctcctgcagaaccagattctctctctttgaccttccccctcctgttttccccaatgtttaaaatgtttggatggtttgttgttctgcctggggtcaaggtgctaatatagacttaaacgaatacattaacggtgctaaacacagacattttaacccaagtcacgacattcttagctgtaactcagctctcacggcctcttgctcacccatgaatggtcccgttttcctcttgccgcgtgcacctccacccattgtcttggtggcacatgggtggaacacttgatctgctcgagtctgccttcaacacacattgcatcttcagattttctacttttctgttcanaactaatat

SEQ ID NO: 8317 - DNA, 410 bp, Bos taurus
  Clone ID: 36-LIB188-019-Q1-E1-A8
accgtgccttgtttttgacactctcctggtcgtcatacgccacccactggttgcccttggtggcataggggacctgctggtcacggaatctgtgggtggtggctccgtggaggaagtcacagatctcataataggcaaggatccctttctccttggtgaactggcctggaattcctggccctgagatgggggctcccacatctgtcttggaagaggccagagtgtagctcctcccaaaagtggggatacccatcaccagcttattggctggagcccccaacctcagcatgtagctcacagcgtagtcagcgttactgaatctgtcagaacttgcatcttcctggcctcgaaacagggggctgtggtgtccgactgtctggcgccaggctccgtgaaagtcataagtcaaa

SEQ ID NO: 8318 - DNA, 195 bp, Bos taurus
  Clone ID: 36-LIB188-020-Q1-E1-A8
acacatagaccacgcccggctcgcaagccttgtccagccggtcctccagagtgacctccttctccgtgtggtgcatgaagcaattctcctctgcacaacggcaggtatctttgtggcagagtttgctcaacattccgtcctctttatccgggtgatagaagcggatacaagtttcatccaggttgtaataggggt

SEQ ID NO: 8319 - DNA, 286 bp, Bos taurus
  Clone ID: 36-LIB188-021-Q1-E1-A8
gccacgggggcgggatactactccaaagagttgggcacacacttgtccaggccctggtcatcgccagcacacaaggcacagagtctggatttcgagtcagccccaggggcacagctctgactaaagaattcatcaaatgcgcaggagcctgtctggttgacgatcaggcccatggggatgttccagcctgcagtcctgtccacggcggtgtggcacgacttcttgtctttcagagaattccatgtgagcccctcatttgctttcttgacaactgccacggcaaggt

SEQ ID NO: 8320 - DNA, 363 bp, Bos taurus
  Clone ID: 36-LIB188-022-Q1-E1-A12
acatttccatgtagactctgttgatttcctgcagctcctggttggtccttgagcagatgatctcaatgagagagtcctcatcagtccccagccccttcatggacgctttcagctcagaagcatcatactgagcaggtgttttcaataggcccaaaatcactgtctccaggtggccagacaaggctgacttcagtgctgatgcaagttccttcttggtccttctctggtaggcgaaggcaatatcctgtctctgttcattgctgcggttggtcaggatgttgacgatggtgacctcatccacacctttggtcttgatggctgtttcaatgttcagagcatcccgctcagcatcaaagttagtgt

SEQ ID NO: 8321 - DNA, 436 bp, Bos taurus
  Clone ID: 36-LIB188-022-Q1-E1-A8
acttgtgggacctgcccttcaggctacagactaggcatagactctgcacgtgggcactgcccttacagttacacttttttttttttttttacagttacactcttaagaacaggttggcacagcccccctgctggtgcagctctgcggagtgacgtcccaggatgagagaggatgcagtgtctgactacagacctccctgtggcagctccacagaggcaagtcctgggggagatgctgggtcaacccaagcaagcatgctgcttctgtccctggctcccaagcaggaaactgtcctcttgctcttccttcagagccatcctggctctccatgggaggggcatctttgccaagctcagtgtccatcttgtgacccccaagccccttccagttcggctcccacggtgcccttaggaggccatgtccgtccagcttgttt

SEQ ID NO: 8322 - DNA, 412 bp, Bos taurus
  Clone ID: 36-LIB188-023-Q1-E1-A12
gcgatggcggccggataccaaagtcactgtccatccagttgagccaaaaaatgcccaggggtagggaaatataggggaggaaaatccagggaaggagacatggggaggaaggcagagccacagacagtgaaccactgaaggatggcgccatcctgtgacttcctgtctgtgaccacaaacggaggaggaaggagcaccccagataagtccctcacctcccagcatgccgatccctttctccatcaggcacatacattctttcctcctactctgattgctcagagatgggccccacctccccagccctctgcagggcttcctctgacctcatcccttccccagagcagggtctcagttgccaggcaatcaagtcaaggtgggcttgcccttgcaagtcctcccgctggaaaga

SEQ ID NO: 8323 - DNA, 437 bp, Bos taurus
  Clone ID: 36-LIB188-023-Q1-E1-A8
ggccgcccggatacaaaaagactttcctcctgatactgcgctgctggacctgcaaaacaacaaaataactgagatcaaagatggagactttaagaacctgaagaaccttcatacactgattctcatcaacaacaaaattagcaaaatcagccctggggcatttgctcctttggtgaaattggaacgactttatctttccaagaatcaactgaaggaattgccagagaaaatgcccaaaactcttcaggagctgcgtgtccatgagaacgagatcaccaaagtgcgaaagtctgtgttcaatggattgaaccagatgatcgtcctagaacttggcaccaacccgctgaagagctcaggcattgaaaatggagcctttcacggaatgaagaagctctcctacatccgcattgctgacacaaatataactaccatccctc

SEQ ID NO: 8324 - DNA, 379 bp, Bos taurus
  Clone ID: 36-LIB188-024-Q1-E1-A8
actcactgatttttcccacggggaaactgttgaagggacaggagggcagggctgggcagggggagccatggcttggttttcctccatccagtgaaggaagtgacagaggagggacataactaaagagagtgaccaaggggaccatcactacgtggactgagatgcatcgtgcagtgacttcagacaacctgagtccttccgtccggaaatgcaatgtcatagtggaaaagtaaaaaaacaaaaagatccaaagaaaagaacaaagtgcatacaaagcaaactgctaatgtagggatagttctaaggcagccagcagggagaaggccaaatgtctgggggtgtcacctgacggtgccccactcccactgccccatgccag

SEQ ID NO: 8325 - DNA, 421 bp, Bos taurus
  Clone ID: 36-LIB188-025-Q1-E1-A8
actgtgtcacacagctgttggaagatttaatagtgaagtatctgcctgatgagctgtctgagagaaaaaaaatatatgatgaagaaactgctgaactctcacacttgaccaagaatgttccaatatttgtttgcactatggcctatcccactgtgccttgccctcttcatgtatttgagccaagatacagattgatgattcgaagaagtatacagactggaactaaacagtttgggatgtgcgtcagtgatacacagaatagttttgcagactatggttgtatgttacaaattacaaatgtacatttcttgcctgatggaaggtctgtggttgataccgttggaggaaagccgtttagggttttaaaaagaggaatgaaagatggatattgcaccgcagacattgaatacctggaagatat

SEQ ID NO: 8326 - DNA, 393 bp, Bos taurus
  Clone ID: 36-LIB188-026-Q1-E1-A12
cgccatgggcccgggataccatctaccaacctgagtggttcaaatgccgccgatggcagtggaggatgaagaagctgggtgctccctctatcacctgtgtgaggagggcctttgccttggaatgtatccgggccatcgcggagaaaaaggcggatgctgtgaccctggatggtggcatggtgtttgaggcgggccgggacccctacaaactgcggccagtagcagcagagatctatgggacgaaagagtctccccaaacccactattatgctgtggccgtcgtgaagaagggcagcaactttcagctggaccagctgcaaggccggaagtcctgccatacgggccttggcaggtccgctgggtggatcatccctatgggaatccttcgcccgt

SEQ ID NO: 8327 - DNA, 410 bp, Bos taurus
  Clone ID: 36-LIB188-026-Q1-E1-A8
aaacgcacggcaacacgccgagcgccacaaatccccattgctttgccctcccatctcttcacttgtgtattcactggtgagaaaagcaaaggaaacaagatgtgattctgtcggtctgtgctctacttgcagtcgcactgtgtgaacactgtctgcccaccgggggaagtcctatctgctgctgccacaatatagtcatgctgcttgtgaagtgcagggagttgttttgacactggcacccactgtaatgtacttgtcctccgactcagtctgccggtctctctgccagtccacgtctacatcttctgggtagaagccgatgaccatgcaggtgacgctgaccgtgcttttgctgagctcttccttgggtgggtccaggacatacacctgcggctcccgggctggccctt

SEQ ID NO: 8328 - DNA, 223 bp, Bos taurus
  Clone ID: 36-LIB188-027-Q1-E1-A8
actttggcactccactgtttcgaatcccttggatcatggaggcatggttcccaacgtcagagtaaatctcacagcctggcatcatcttagccagagtgaagagggtcgagtcattggccacaaagcacgaggagaacaagagtgcagcatctattccatggaggtcagccagctcctgctccaggtccacgtggaatttactagttccagaaatatttctagt

SEQ ID NO: 8329 - DNA, 270 bp, Bos taurus
  Clone ID: 36-LIB188-028-Q1-E1-A8
accttgacgtggcagttgtcaagaaagcaaatgaggggctcacatggaattctctgaaagacaagaagtcgtgccacaccgccgtggacaggactgcaggctggaacatccccatgggcctgatcgtcaaccagacaggctcctgcgcatttgatgaattctttagtcagagctgtgcccctggggctgactcgaaatccagactctgtgccttgtgtgctggcgatgaccagggcctggacaagtgtgtgcccaactctaaggagaagt

SEQ ID NO: 8330 - DNA, 405 bp, Bos taurus
  Clone ID: 36-LIB2809-001-Q1-E1-A8
accagagacagagcccgaccagcccggagcgtgactacagcccctacttcaagaccatcgatgagctccgggacaagatcctggcggctgccatcaaaaattcccaggtcattctggagattgacaatgccaggctggctgcagacgacttcagactcaagcatgagaacgaaatggccctgcgccaaagcgtggaggccgacatcaacggcctgcgcatggtgctggatgagctgaccctgaccaagactgacctggagatgcagatcgagagcctgaatgatgagctggcctacctgaagaagaaccacgaggaggagatgaaggagttcagcaaccagctggctggccaggtcaatgtggagatggatgcagcaccagccgtggacctgacccgcatgctgt

SEQ ID NO: 8331 - DNA, 339 bp, Bos taurus
  unsure (262),(312): unsure at all n locations; Clone ID: 36-LIB2809-002-Q1-E1-A8
acaggacaattgagtatgcaaatgtgtgaccataccacatagttattaaatagcagaacttgcttaaaaacaaggatttgcggacaatgtaaaattctttcattatattactcttgtggtaacatatttatctaattatgatatttaagctttcgtgttttataattgaagtttgattgtttggcacttaggccaaattctaaatcaaaatgaatttacaacttgatgcctttgaagactcaagattaccaccttctaccangagaagtagtgctagaagttggccattgttaaggaactccttgaattaanaaaacacatattaagacttagttttca

SEQ ID NO: 8332 - DNA, 435 bp, Bos taurus
  Clone ID: 36-LIB2809-003-Q1-E1-A8
atgcactcggaaaccatggccggggcgataagcagaaaggactgaatgggcatatctctctggggatagggcactgctttctggggaacaggcatgactttggactgagaaagggacagcacggactgatgaggaaacatgacagttggacgaataggctggtgaggctggtgcatccaacactggagcagaggcagaggaaggtgcagattttcaacatcagtgagagtcaggctctggctttcagtaaagggctcaactggatatttagggaagggcatttctttgtgcttaggagccatagcctccttcactttggagactcccattacttcaagctgaaggaaatgcggcaccaccacaggggtttgagtacgaggacggatgttttgtgggatgctgttatggatgggcccagggaagggatagactaga

SEQ ID NO: 8333 - DNA, 474 bp, Bos taurus
  unsure (417): unsure at all n locations; Clone ID: 36-LIB2809-006-Q1-E1-A12
gctcccggaggccatggccgcgcggataaccagttttgcagatgcacatgaaggaccccggggtgttgacacacatcgtgttctcacgacagtaatggcgcccttcggcacactcatcaatgtcttcacagtaggcattgtcttctcgaagagccctaaaaccgtctcgacagctacaaacagctctgtcattcagatttctgcagacagaattctccatgcagttatgcctttcagagcaaaagtcataacctttacagactttgtaacagctatgagacaaagtaatctgatgcgactctgcacagtccagagcgggacagcctgaactctcaaccagcttcatgctctggtccttgcactcatagagaacacatactccagaagaggaatagactgtatttctttgtccttcanagtatgtccgtccttgacattggcatatggatttgcattccttacagcacttgccat

SEQ ID NO: 8334 - DNA, 392 bp, Bos taurus
  Clone ID: 36-LIB2809-006-Q1-E1-A8
acatcttactgctactgctactgctaagtcgcttcagtcgtgtccgactctgtgtgaccccatagacggcagcccactaggctcttctgtccctggattctccaggcaagaatactggaatgtgccggggtccagccccggctgatccagggtattcgaaggagagacagcgtaggcgaagattaggaaacaactgcttaattaaacgttaattaaggatataaggagtaatagaataaggatagttaggaaattcagtgaagaaaagaggctgaaataaggatagctcagtgaggaaattcagtggagaaaagaggctgaataattcagccagaaggtgagagaaagaacgacatggggagaccaagtttcggtgagcaaggcccgcactt

SEQ ID NO: 8335 - DNA, 315 bp, Bos taurus
  Clone ID: 36-LIB2809-009-Q1-E1-A8
acttgtacatgtgtaggtgggggttgtctactgagtaaggaatactgtttttaaggttctaaagctaaattcaaatgatgcattaatgacccaaaaactcagatctgatggtgtctgaatttctaacagtccttgctttgtgggtatgctgacaacttatctggatgccttacatcttttctaaacagtgttgcctctgaacgtgctctgctccctccctgctccctctttggagcccctttgcaccccagagcctgcagaagtggctggtataaaagggggcctggctagagaatgatcagtgtagctgtttgc

SEQ ID NO: 8336 - DNA, 357 bp, Bos taurus
  unsure (83),(181),(259),(325): unsure at all n locations; Clone ID: 36-LIB2809-010-Q1-E1-A12
cgctatgggcccgggaacagcagaaaggcctgaatgggcatatctctctggggatagggcactgctttctggggaacaggcangactttggactgagaaagggacagcacggactgaggaggaaacatgacagttggaggaagaggctggtgaggctggtgcatccaagactggagcagangcagaggaaggtgcagattttcaacatcagtgagagtcaggctctggctttcagtaaagggctcaactggatatttanggaagggcatttctttgtgcttaagagccatagcctccttcactttggagactcccattacttcangctggaagaaaggcggcaccaccacaggggtt

SEQ ID NO: 8337 - DNA, 414 bp, Bos taurus
  Clone ID: 36-LIB2809-010-Q1-E1-A8
acgagtgcaaactgcagtgccatgggtgagtgtcagaatgagtttcccgtcaaccatttcccgcacaagtgatgtctcttgtccattcgacttctgcacgtggacaagtttgccgccatccagcgtcacgatggacttgactttcctgtcatctgctgtggtctcatcgaactcgactcccagcttgaagctgatctctgtgttcttgaatgtgctttgtgtttttatgatgactgtgtccccattcacttcgatgattgtggtaggcttggtcatattgcccacctgcctggtagcaaaaccgacaccgagtgacgtcatgtagtcatcgagattcttgctgtccactaacttccaggtgcccacgaaggcgtccaccatggtgaagctgggctaggttgggaaagacgacag

SEQ ID NO: 8338 - DNA, 264 bp, Bos taurus
  Clone ID: 36-LIB2809-011-Q1-E1-A8
gccatgggcgcgggatactttttgaagtcggtgtccagcacaaggactttgttctcgttcaaggcatccatcttgaacaccgcagggatcttggttttttctgcaatgatcttcttctgagcacactcatcattctcccatttctgcagcaggatctccaggtcgccctcaggggtgggcttcagctcctcgacatacactctcaggggggcactctgggcgtccagcatggagatgtcgctggccgccatggccaaggagtag

SEQ ID NO: 8339 - DNA, 330 bp, Bos taurus
  Clone ID: 36-LIB2809-012-Q1-E1-A12
acaaaacaatgacagcacagaatatggactcttccagataaataataaaatttggtgcaaagacgaccagaaccctcactcaagcaacatctgtaacatctcctgtgacaagttcctggatgatgatcttactgatgacattatgtgtgtcaagaagattctggataaagtaggaattaactactggttggcccataaagcactctgttctgagaagctggatcagtggctctgtgagaagttgtgaacacctgctgtctttgctgcttctgtcctctttctgttcctggaactcctctgccccgtggctacctcgttttgcttctttgt

SEQ ID NO: 8340 - DNA, 416 bp, Bos taurus
  Clone ID: 36-LIB2809-012-Q1-E1-A8
acaagctttttttttttttttttttttttttttttcttgccttaaaatgtaatttattgaaaagaagaaagacaaaatctcagttaatgcacacaattatttgatatgatggcacttacaggagaactgattcaaaggcttttaaaacattttccatagagaaatttaatgaagactttaattccctttgactcagtggcctttagaccggcatgagactactggaatttaggtaacaagctgttaggacaatttcacttaaggatgttacactatctaaaatacagtagagagctcaagaagaaagagtgccttaagttttgagattgccctattctaaaacagaagttaaagcctttggataaaatggtttggcatgatagatgaaaagacatgtaaagcatggaatttcagaa

SEQ ID NO: 8341 - DNA, 400 bp, Bos taurus
  Clone ID: 36-LIB2809-013-Q1-E1-A8
gcatgatcccgaccgcgaccgcggcgggataccacaaaaacgcctgactgggcgtctctcactggggatagggcactgctttctggggaccaagcttgactttgctatgatatcaggacagcaccgtctcatgatcatgcacaacactttgacgagtatgctgttgatgccggctcatccatcactgcaacatacgcaccggaaggtgcaaattttcaacactcagttgcactcatgctctggctttcactataaggctgcaattgcacacattagggaactgtgcaattctttgatgcctagtgagtgataagcctcacttacacattgcgagactcccatctacgtaaaggctatttgacctgctgcaccctcatacgcgtctgcgtacaatgacgca

SEQ ID NO: 8342 - DNA, 418 bp, Bos taurus
  Clone ID: 36-LIB2809-014-Q1-E1-A12
actcggtcatgtccggggacccttccctattattgtcgaagaggatttcaaagtgaatgccccctcctcacttttgaattgactgcgactggaaatatggcaacttttcaatccttgcatcatgttactaagataatttttaaatgagtatacatggaacaaaaaatgaaactttattcctttatttattttatgctttttcatcttaatttgaatttgagtcataaactatatatttcaaaattttaattcaacattagcataaaagttcaattttaacttggcaatatcatgaacatatcaccatatgtataaaaataattttctggaattgtgattattatttctttaagaatctatttccctaacagtcatttcaataaattaatccttacgcataaaagatgcaccagcctca

SEQ ID NO: 8343 - DNA, 403 bp, Bos taurus
  unsure (261): unsure at all n locations; Clone ID: 36-LIB2809-014-Q1-E1-A8
acccggtcatgtccggggaccctgcccaataattgtcaaagcggatatcacattgaatgcaccccccgcatattcgaaatgaccgcgactggaactagggcaacttattcaacccatgcatcacgtgactaagatagtttttagctgagtattcctggcaccatacgagccgcattaatcctttatatatcttaggctttctcatcagaaatcgaatttgagtcatatgcgatacactcacagatttcaattcaatctgtnacataagtcgttcacattttacacttgggaatctcatgaacatatcagaatatgtagtttgcataatttccggaactgtgattactagctcattaagactctacttccgaaccattcagttcaacaaactagtccatacgca

SEQ ID NO: 8344 - DNA, 427 bp, Bos taurus
  Clone ID: 36-LIB2809-016-Q1-E1-A8
cgcatgtatccagccgcgacgggcccgggatacatggtaagattgtggaaagcctttcaagcagtgaggaatctattacacgcatcaataagaaaattgagaagtttcagagtgaggaacagcagcaaacagaggatgaactccaggataaaatccacccctttgcccagacacagtctctagtctatcccttccctgggcccatccctaacagcctcccacaaaacatccctcctcttactcaaacccctgtggtggtgccgcctttccttcagcctgaagtaatgggagtctccaaagtgaaggaggctatggctcctaagcacaaagaaatgcccttccctaaatatccagttgagccctttactgaaagccagagcctgactctcactgatgttgaaaatctgcaccttcctctgcctctgct

SEQ ID NO: 8345 - DNA, 394 bp, Bos taurus
  Clone ID: 36-LIB2809-018-Q1-E1-A12
acgcgtgtcccaatacaactcccaatagtgagtcgtattatatctctctggggatagggcactgctttctggggaacaggcaggactttggacggagaaagggacagcacggactgaggaggaaacatgacagttggaggaagaggctggtgaggctggtgcatccaatactggagcagaggcagaggaaggtgcagattttcaagctttttttttttttttttttttttttttaatagtgccttaaaatgtaatttattgaaaagaagaaagacaaaatctcagttaatgcacacaattatttgatatgatggcacttacaggagaagtgattcaaaggcttttaaaacattttccatacagaactttactgaagaccttaattccctttgac

SEQ ID NO: 8346 - DNA, 383 bp, Bos taurus
  Clone ID: 36-LIB2809-020-Q1-E1-A8
acctggagagattgtggaaagcctttcaagcagtgaggaatctattacacgcatcaagaagaaaattgagaagtttcagagtgaggaacagcagcaaacagaggatgaactccaggataaaatccacccctttgcccagacacagtctctagtctatcccttccctgggcccatccataacagcctcccacaaaagatccctcctcttactcaaacccctgtggtggtgccgcctttccttcagcctgaagtaatgggagtctccaaagtgaaggaggctatggctcctaagcacaaggaaatgcccttccctaaagatccagttgagccctttactgagagccagagcctgactctcactgatgttgaaaatctgcaccttc

SEQ ID NO: 8347 - DNA, 288 bp, Bos taurus
  Clone ID: 36-LIB2809-021-Q1-E1-A12
actcacaagctgagtagtcataaggaaaggtgtggtggtagttgtggaagccctcacccgcagctcccagggaaaccagaatattctctcgggggttgatggtcttgtcataagggcggtatccatacatatgggcatcactattcaccagccaggtgacgttgagcccaatggcataacagaataaggtggcaaaaaacatgctgttttgaaacgtttcatcccacagataccatggcacgagtgtgggcaggatgaagcacagcaacaggacaccagatttgtagt

SEQ ID NO: 8348 - DNA, 323 bp, Bos taurus
  Clone ID: 36-LIB2809-023-Q1-E1-A12
ggatacctagcgagcttgggcaacatctttccttcagtgaggtcattgtaaagttccactctacggaacaccattagactcaggatgtactctagttttgatcccaagtcgttgcccaggcatcgtctcaactctatcccttccctgagcccatacgcatttccctcccagtaggtatctctccacatgatcaaatccatgttgatcttccagccataccttcattttgtcctactgggagtcactaatctgaaggccgcgatggctccaattcagcctgacctccgtatccccaaacatccacgttgagccctttactgaat

SEQ ID NO: 8349 - DNA, 393 bp, Bos taurus
  Clone ID: 36-LIB2809-023-Q1-E1-A8
ggataccaggtaagattgtggaaagcctttcaagcagtgaggaatctaatagacgcatcaataagaagattgagaagtttcagagtgaggaacagcagcaaacagaggatgaactccaggataaaatcgacccctttgcccagacacagtctctagtctatcccttccctgggcccatccctaacagcctcccacaaaacatccctcctcgtactcaaatccctgtggtggtgccgcctttccttcagcctgaagtaatgggagtctccaaagtgaaggaggctatggctcctaagcacaaagaaatgcccttcgctaaatatccagttgaaccctttactgaaaaccagagcctgaatctcaacttggaaaatgtggggttttttttggggg

SEQ ID NO: 8350 - DNA, 407 bp, Bos taurus
  Clone ID: 36-LIB2809-024-Q1-E1-A8
accggggacgccgtgtccacctggccccaccccagacctgggatggttatgatcctagctggaattagcagcacctgcgtgtccatcgtgggccccctccttgccatctcatggcctaagatgggaccgcagtctctgggcttcatcgtcctctctgtgtttctctcttgggtccatttatctttttttttttttttttttctttttccgagtggcattcaggtgcacagatgataaggtgagggggtcaaatcaggggactctttctgggatatgttgggggagttattgaacaagaaaccactgtgtggtaggagggacttgagcttatcatggccacacacatccacattccaggttttctcctaggacatcggtggagaggttgacaactttagttctcttga

SEQ ID NO: 8351 - DNA, 228 bp, Bos taurus
  unsure (24),(50),(207): unsure at all n locations; Clone ID: 36-LIB2809-025-Q1-E1-A8
atgggcatatctctctggggatanggcactgctttctggggaacaagcangactttggactgagaaagggacagcacggactgaggaggaaacatgacagttggaggaagaggctggtgaagctggtgcatccaagactggagcagaggcagacgaaggtgcagattttcaacatcagtgagagtcacgctctggctttcagtaaanggctcaactggatatttatgg

SEQ ID NO: 8352 - DNA, 288 bp, Bos taurus
  Clone ID: 36-LIB2809-026-Q1-E1-A12
actacaaacctggtgtcctgttgttgtgcttcatcctgcccacactcgtgccatggtatctgtgggatgaaacgtttcaaaacagcctgttttttgccaccttattccgttatgcccttgggctcaacgtcacctggctggtgaatagtgctgcccatatgtatggataccgcccttatgacaagaccatcaacccccgagagaatattctggtttccctgggagctgcgggtgagggcttccacaactaccaccacacctttccttatgactactcagccagtgagt

SEQ ID NO: 8353 - DNA, 396 bp, Bos taurus
  Clone ID: 36-LIB2809-027-Q1-E1-A8
gggatacctcaaatagggaataacctttgtcttaggttgaatccatggcttcatagctttctgatgctgataaacagtcttgagatactggggcaaggcgaatttctggtaacgccggctgatttttttcagaaaatttaggcgattcttttcttcttcagtcagtttagttttcttagtgaatacttctgttgattccatgtcaacggtcttctttgaattttcctcactggtggagagctgctctctgttcagagtgggagtaatgggaacagcatttctcttaacctgatcccatgggttcaaaacaattggaccttgatacagatactggagatactgggggaacttctgataaaactgattgatttcattcagtgctttctggtaatgcct

SEQ ID NO: 8354 - DNA, 437 bp, Bos taurus
  Clone ID: 36-LIB2809-028-Q1-E1-A12
gccatgggcccgggatacaatgaggaaagctgtctgggaaagggagaaccatagccttggctcagagccttgaggcacagcctgaagacttcctacttaacatctaggaaggctgctttagtgtttttctaggccacgggtctgtctggaatggagagccaatggcctcctatagataccaatgtgtcatctagaaaggatatgctggattcagtttgccacatctcactaggccgactttgtaaccttgtttgtcacctgtctacactgcttaagcatttgatattgaatgaataatgtacagttgatgaaaactttaaaattaaacatgttttcagtcacatgttatttctttgaaactgaggactctgaattttcaacttattgaatctctaataaacactgtaactccaatattttggccacctcatgcgaag

SEQ ID NO: 8355 - DNA, 397 bp, Bos taurus
  Clone ID: 36-LIB2809-029-Q1-E1-A12
actattaacgacatgtgggaccgggactatgataaaaaggttacaagaacagcaagtcgcccaatagctgctggagacatttcaacttttcggtcctttgtttttcttgggggacagctgaccttggccctgggcgttcttctgtgtctgaattactacagtatagctcttggagcagcatccctacttcttgtcaccacctacccgctaatgaaacgaattacatactggcctcagttagccttggggttgacatttaattggggagcgttgcttggatggtctgctgtcaagggctcctgtgatccatctgtttgccttcctctctatttttctggaattatgtggactctaatatacgatactatctatgcccatcaggataagaaagatgatg

SEQ ID NO: 8356 - DNA, 329 bp, Bos taurus
  Clone ID: 36-LIB2809-030-Q1-E1-A8
accacaaaaacgcctgcctggacatctctcactggggatagggcactgctttctggggaacaagcatgactttgctctgatatcaggacagcaccgtctgatgatcatacatatcactttgtcgaatatgctggtgatgctggtgcatccatcactggagcatacgcaccggaaggtgcagattttcaacactcagttgcagtcatgctctggctttcactatatggctcaattgcgcacattagggaacgtcaattctttgtgcttagtagccatagcctccttcactttgcagactcccattacttcaagctgatttgcatgctgca

SEQ ID NO: 8357 - DNA, 400 bp, Bos taurus
  Clone ID: 36-LIB2809-031-Q1-E1-A8
acctggtgagattgtggaaagcctttcaagcagtgaggaatctattacacgcatcaataagaaaattgagaagtttcagagtgaggaacagcagcaaacagaggatgaactccaggataaaatccacccctttgcccagacacagtctctagtctatcccttccctgggcccatccataacagcctcccacaaaacatccctcctcttactcaaacccctgtggtggtgccgcctttccttcagcctgaagtaatgggagtctccaaagtgaaggaggctatggctcctaagcacaaagaaatgcccttccctaaatatccagttgagccctttactgaaagccagagcctgactctcactgatgttgaaaatctgcaccttcctctgcctctgctccag

SEQ ID NO: 8358 - DNA, 311 bp, Bos taurus
  Clone ID: 36-LIB3057-001-Q1-K1-A8
ctagatcgcgagcggccgcccttttttttttttttttttgcaaacacacttatcgtttagaatttgtaatatttattcataaataggcacaaaataatttaaaaagccaaactgcattggataaatttacaagcctttgccttcttcaactcatgccacccacgtaacatttagttttactatatattacagctttctttacagcagaaaactttgaaatcttttaaagggcaatacttgtgggtcctcttacaacgtgtgtgtgtgtgtgtgtgtacgtatgtgtataaatatatatatatatatatatg

SEQ ID NO: 8359 - DNA, 431 bp, Bos taurus
  Clone ID: 36-LIB3057-002-Q1-K1-A8
cggacgcgtgggcggacgcgtgggtgtttcttgaaatcatcaccaccatggacagcaagggttcgtcgcagaaagggtcccgcctgctcctgctgctggtggtgtcaaatctactcttgtgccagggtgtggtctccacccccgtctgtcccaatgggcctggcaactgccaggtatcccttcgagacctgtttgaccgggcagtcatggtgtcccactacatccatgacctctcctcggaaatgttcaacgaatttgataaacggtatgcccagggcaaagggttcattaccatggccctcaacagctgccataccttctcccttcctacccctgaagataaagaacaagcccaacatacccaccatgaagtccttatgagcttgattcttgggttgctgcgctcctggaatgaccctctgtatcaccta

SEQ ID NO: 8360 - DNA, 266 bp, Bos taurus
  unsure (121): unsure at all n locations; Clone ID: 36-LIB3057-003-Q1-K1-A12
cggacgcgtgggctgagatggttcttaatgatccattccctggcaaacttctctgagctttatagctttgtaatgcatgcttggctctaatgggtaggatgaatgtgggcttagcagttgntgttgtagatgattctgcaattcaggagcttaaggtaagtgtcaatcttgcttgaatccctgcgcaggcagtggagcaggttataaaaagcagaataacgtgcatcttcatccttagtttgcaaggacgggagtcctgaccacac

SEQ ID NO: 8361 - DNA, 334 bp, Bos taurus
  Clone ID: 36-LIB3057-003-Q1-K1-A8
tgaaggacctggaggaaggcatcctggccctgatgcgggaggtggaagatggcaccgcctggtctgggcagatcctcaagcagacctatgacaaatttgacacaaacatgcgcagtgacgacgcgctgctcaagaactacggtctgctctcctgcttccggaaggacctgcataagacggatacgtacctgagggtcatgaagtgccgtcgcttcggggaggccagctgtgccttctagttgccagccatctgatgtttgcccctacaccgtgccttccttgaccctggaaggtgccactcccactgtcctttcctaataaaatgaggaaattg

SEQ ID NO: 8362 - DNA, 256 bp, Bos taurus
  Clone ID: 36-LIB3057-004-Q1-K1-A8
acccactcatcctcagcaacttgcctgaaatagaccactcttatctttactaacccttttacatcttcgatgcgttcttatatagtatgactgatacactcattaccactctcttttcatcttctctctataaactctcaccatttaccataatcactatctcttcatccataaactattttattttattttcatctttatttactctatctattattacataatatacaattttactcctttaaactaattctta

SEQ ID NO: 8363 - DNA, 393 bp, Bos taurus
  unsure (297),(363): unsure at all n locations; Clone ID: 36-LIB3057-005-Q1-K1-A12
gtttcttgaaatcatcaccaccatggacagcaaaggttcgtcgcagaaagcagggtcccgcctgctcctgctgctggtggtgtcaaatctactcttgtgccagggtgtggtctccacccccgtctgtcccaatgggcctggcaactgccaggtatcccttcgagacctgtttgaccgggcagtcatggtgtcccactacatccatgacctctcctcggaaatgttcaacgaatttgataaacggtatgcccagggcaaagggttcattaccatggccctcaacagctgccatacctnctcccttcctacccctgaagataaagaacaagcccaacagacccaccatgaagtccttatgagctngattctttgggtgctgcgctcctggaatga

SEQ ID NO: 8364 - DNA, 459 bp, Bos taurus
  Clone ID: 36-LIB3057-005-Q1-K1-A8
caacagtccccgcgccgccgcgcctctcgaacgtcagcgccgcctctatctcgctcgagcggcaggcgaaagagaagggggggaagtaacgaggtctctataccatggctcgtacaaagcagactgcccacacatcgaccggtaggtaaagcaccgaggaagcaactcgctacagaagccgatcgcaagagtgcgccctatactggaggggtgaagaaacctaatcgttacaggcctggtactgaggcactcacagaaattagacgttatcagaagtccactgaacttatgattcacaaacttgcctttcaacgtctggtgcgggaaattgctcaggacttcaaaacagatctgcgcttacagagtgcagctattggagctttgcatgaggcaagtgatgcctatctggttggcctttttgaagacaccaacctgtgagctatccatgccaaacgtgta

SEQ ID NO: 8365 - DNA, 394 bp, Bos taurus
  Clone ID: 36-LIB3057-007-Q1-K1-A12
cccacgcgtccgcccacgcgtccgcccacgcgtccgaaagcactgaggtgtatgttagcagtgcttgatataacaaccttcatcgttatttatgatctttggaattgggaagaggaacaagtgctcaagttgcaaatgtttctgttatctttgatgcttctattgaatatgtctgttgggctattcttgtacatatatttcttcaggttaaaaaactgaacctgattatcaatttgtactggttttcactcattgttattccatttgaatgttttatctgaaatccttaatgatatggatgcgctagttatatttctaaaaaaaaaaaaaaaaaataaaaaaaaataaaaaaaataaaaaaaaaaaaaaaaaaaaaaaaaaaaaggggcggccg

SEQ ID NO: 8366 - DNA, 424 bp, Bos taurus
  Clone ID: 36-LIB3057-007-Q1-K1-A8
aatgaagatctttgttttttgttttttgtttttttttcattaaagagccattctggcactttaatgataaaaatcccattgtatttaaatcttttcatgtatttctttagaacaacgtaaaattcaaacttaacatctgcagtgttctgtgaatagcagtggcaaaatattatgttataaaaacgctcaatgtatatggaatcggtttaaatttctatgcgcaaatatgaaaagagtgtttttatccgatggttcgaagatgaaagctatttcatttgtgtcagcatgtctcagagtgaccttatcaagttggtcttactttgttaatttatcttgtgttcccctcttctctgctcgcccttggaaacaaaacaaaactctatgccctttgtagctgttacggtgcaatttgtctttgggtaat

SEQ ID NO: 8367 - DNA, 422 bp, Bos taurus
  Clone ID: 36-LIB3057-008-Q1-K1-A8
gcagaagataggattagtgaattagaagacagaatggtagaaataaatgaatcagagagaaaaaaagaaaaacgaattaaaagaaatgaggacaatctcagagacctccaggacaatattaaatgccccaacatgcaattcataagcattccagaagaaaaagacaaaaagaaagaccatgagaaaatacttgaggggataatagttgaaaacttcactaaaatgtggaaggaaataatcacccaagtccaagaaacccagagagtctcaaaaggataaacccaaggtgaaccaccacaagacacatattaatcaaattaacaagggtcaaacacatagaacaaatattaaaagcagcaatgaaaaacaacaaataacacaaaggggattcctataaggataacagctgatctttcaatata

SEQ ID NO: 8368 - DNA, 403 bp, Bos taurus
  Clone ID: 36-LIB3057-009-Q1-K1-A12
taagctcggggttaggctcgatcaagcacttttctacaatcaaaaccaacatctactatggcgagttatcttaagcactacgatgatcagggtcgcaaggttgacgagtatggcaacgttgagaagcaaaccgacgaatacggcaaccctgttcatgctgatagtgtcacctatgtagccaccagaactgctgctggtggttacagtgatgacattaataagcatcatgataccaccaatgcctacggcgtatacactggtagacagcattctagtggtggctacgatggtgacactaataaacaacatggaactactggtggctataatgatgacaccaatagacatcatggaactaccggtgtctatgggatagacaccgataggctacatctggggacta

SEQ ID NO: 8369 - DNA, 432 bp, Bos taurus
  unsure (24),(32),(65): unsure at all n locations; Clone ID: 36-LIB3057-009-Q1-K1-A8
gacccacgcgtccgggggatcggngcctttcntttactggcttgtatggtcctagctggggccanttgttgggggaaagaaaccacgtgggctgatattttctctatgcaaaatgtctgttttagttgggaagacttcgaatagccgcttctgtgttctgcgttttatatacactcacaggagcaggcagtccctgcccttcagcttctgctagaggagggcgggcgggagtcggggtgacaggaggggttggtgccccccagggcttcctgcgagccaggccccaagcctgtgtcttttctatatccatttccctttcaagtggtgttcctgagcatgctgtttttcatagtgccttctgccttatttcgagggttgcttctgagtggtgttttttttcttgtttgttttattttaaaaataagttaaaga

SEQ ID NO: 8370 - DNA, 445 bp, Bos taurus
  Clone ID: 36-LIB3057-011-Q1-K1-A12
acgttttgagtaaagaaagctaaaaccttgtctgcttttttggtactacatgcattagtaaaaggttaagttttgttctccactgcagtaatatttaacatctcagaaaaaaatcttgcatgttctgtagttctgtattaagtcagtcttttcatatgcactatttcaagtgaaaacaggtggtttgcttgtctacattagtatcctaacaggttccccctggcagcttcagactggcgtctgtagacttacagttcagctaacggcaccggaatcgacccagtagttctctgcacagctaaccttctaaacccagtggggcctgaaagagaaataggtggatgccatgggtggaagctgccagcaagcaagcccttcattcattgatttccttcccccaaataatggatttcaaatctatatgtacctatttggatctttttcc

SEQ ID NO: 8371 - DNA, 427 bp, Bos taurus
  Clone ID: 36-LIB3057-012-Q1-K1-A12
gtggaacgtttaggcaacgtggtttgcttctttgcgggaaggctggtctttggccggccacggccttacgggcctttggggaccatagatttggtcttttttcactggtaggagagctcgcggcgagccgcgcagcgccctgacccgtcctcaccatgctggtgctgttcgaaacgtccgtcggctacgccatctttaaggttttaaatgaaaagaagcttcaagaagttgatagtttatggaaagaatttgaaactccagagaaagcaaataaaatagtaaagctgaaacattttgagaaatttcaggatacagcataggcattggcagcattcacagctctaatggaaggcaaaatcaataagcaattgaagaaagttctgaagaaatagttaaagaagcccatgaactcttggctgtggctgat

SEQ ID NO: 8372 - DNA, 437 bp, Bos taurus
  Clone ID: 36-LIB3057-012-Q1-K1-A8
tgaacccgtatgacagatgatctgctttcgcaattgggtcagatggtcgttgttgtcagagcagagaagtaaaggaatggcatggatgcagagccaccaaaggcctaacgaaagggaagcactactatgaggtatcctgtcatgaccaagggttgtgcagagttgggtggtcttccatgcaagcatccctagatcttggtactgacaagtttggatttggctttggtggaacagggaagaaatcccacaacaagcagtttgacaattatggagaggaattcactatgcatgataccattggatgttacctagatatagataaagggcatgtcaaattctccaaaaacggcaaagatcttggtctggcatttgaaataccaccacatatgaagaaccaagccctgttccctgcctgtgttttgaaaaacgcggaactc

SEQ ID NO: 8373 - DNA, 407 bp, Bos taurus
  unsure (359): unsure at all n locations; Clone ID: 36-LIB3057-013-Q1-K1-A12
ctctgtgtagggcccggtggactcagcggcagcggcggtggcggcgggacgtggcagctgaaggcgcaggttgtctccggaacgcactgtgccggccaccctcgcagccctggctgacggtcgtgcggccggcgccatgtctgtgagcgagatcttcgtggagctgcagggctttttggctgccgagcaggacatccgagaggaaatccgaaaagttgtacagagtttagaacaaacagctcgagagattttaactctacttcaaggggtccatcagggtgctgggtttcaggacattccaaaaaggtgtttgaaagctcgagaacattttggtacagtaaaaacacatctaacgtctntgaagaccaagtttcctgctgaacagtattacaggtttcacgagcact

SEQ ID NO: 8374 - DNA, 461 bp, Bos taurus
  Clone ID: 36-LIB3057-015-Q1-K1-A8
gggatggagagtccgtgggatctctttacggcctctggactggaggccgagcggccgggctcggccgagccctgcgcccggcgtctccgcccggggtgctctccgcagtttcctggcttggaagcctcgggaacatggcgaggcagcggtggtttaacggtaaggacggttactgttatcctgttaactaatgctagagtttgccttctcacgcttttgtctaagtttgtttttgaactttttgtctcttcttatattgttgtcttttttttttttttattctttatttttttttttttttgtggtgggttgtttattttattttctttttttatttttcttttttttttatttttattttttttttttttttattttttttttttttttttttttttatttttttttttttttttttttatttttttttatttttttatttttttttttttatttatttt

SEQ ID NO: 8375 - DNA, 435 bp, Bos taurus
  Clone ID: 36-LIB3057-016-Q1-K1-A8
ccgctttccggcccagccagcgcccgcgatgactgccactctccgcccctacgtgagggccgtgcgggccacactgcaggctgccctctgcctggagaatttctcctcccaggtcgtggaacgacacaacaagccggaagtagaagtcaggagtagcaaagagctcctgctacaacccgtgaccatcagcaggaatgaaaaggaaaaggttctgattgaaggctccatcaactctgtcagggtcagcattgctgtgaaacaggctgatgaaatcgagaagattctatgtcacaagttcatgcgcttcatgatgatgcgagcagagaacttctttatcctccgaaggaaaccagtggaggggtatgacatcagctttctgatcaccaacttccacacagaacagatgtataagcacaagttggtggactttgtgat

SEQ ID NO: 8376 - DNA, 311 bp, Bos taurus
  Clone ID: 36-LIB3057-017-Q1-K1-A8
cactaataaaaattgtaaacaatgcattcatcgaccttccaggcccatcaaacatttcatcatgatgaaatttcggttccctcctgggaatctgcctaatcctacaaatcctcacaggcctattcctagcaatacactacacatccgacacaacaacagcattctcctctgttacccatatctgccgagacgtgaactacggctgaatcatccgatacatacacgcaaacggagcttcaatgtttgttatctgcttatatatgcacgtaggacgaggcttatattatcggtcttacacttttctagaaaca

SEQ ID NO: 8377 - DNA, 144 bp, Bos taurus
  Clone ID: 36-LIB3057-018-Q1-K1-A8
ctgatgcaagtagctggaagatggctaccccccgtggctgggcatgatcctcaagctagacctattacaaatttgacacaaacatgcacagtgactactcgcttgtcaagaactactgtctgctcttctgctttcggaaggacc

SEQ ID NO: 8378 - DNA, 451 bp, Bos taurus
  Clone ID: 36-LIB3057-019-Q1-K1-A12
ggcggcgtggggacggttcctgtctcgggcatggctctgcagaacggcctggcagggctgcggccgaaactaccgcgccgcgctgtgcgccgagttgaagcggcccctggtcattgaggaggtgacccctcgccctgtccagccgcacgaggtcagagttaatgttcatttctgtgggattaactttgctgatattttggcgtgtcagggtcagtatcaggagaggcatcaacttcccttcacacccggaatggagttttctgggatggtactggagacaggcacagatgtcagcacggtgaaagagggagatcgagtcattggcctgcctggctttagtggtatggctgaagaatgcatcactgaccacaagaacctgtggcagattccagaaaaagtgtccctccgagaagctggtgctctgcccctgtcgtatggcactgctattttc

SEQ ID NO: 8379 - DNA, 359 bp, Bos taurus
  Clone ID: 36-LIB3057-019-Q1-K1-A8
cggacgcgtgggcgacggaagagaacgaagggaagaaaagtgaccgagaggccgctgagcatcctcgccccggcgcagcgggagccgcccgaggcagcttccccgtgacagagcctcagcctgcctggaagatgccgagactgtgcagcagtcgttcgggcgccctgctgctggccttgctgcttcaggcctccatggaagtgcgtggttggtgcctggagagcagccagtgtcaggacctcaccacggaaagtaacctgctggcgtgcatccgggcctgcaagcccgacctttccggcgagacgccggtgttccccgggcacggcgatgagcagctcggtgacctggagaaacccccc

SEQ ID NO: 8380 - DNA, 398 bp, Bos taurus
  Clone ID: 36-LIB3057-020-Q1-K1-A12
cggacgcgtgggcgctccgttcctcacgctgcagcctccgccgtagccgccgcggagcccggtgccaacgcttctgagcagaagatggctgtgcctcccacgtatgctgatcttggcaaatctgccagggatgtcttcaccaagggctatggatttggcttaataaaacttgatctgaaaacaaaatctgagaatggactggaatttacgagctcaggttcagccaacaccgagaccaccaaagtgacgggcagcctggaaaccaagtacagatggactgaatatggtctgacgtttacagagaaatggaacactgacaacacgctgggcacggagattactgtggaagatcagcttgcacgtggcctgaagctgaccttcgattcatccttctcacc

SEQ ID NO: 8381 - DNA, 372 bp, Bos taurus
  Clone ID: 36-LIB3057-022-Q1-K1-A8
aagccacccctctgatctccgtccccattcctagtccccccgtcctctgccggatgatgcctgtgactggatccagtggcctgttaccagctgttctgaagccgcctccccaggtgtctgcagggcttgtcaagcccgtcttgccccacgcagctcctgcactcccgcctgtgttcgagggaacgtctgtgcctcagggaaccgtgatgctgcttctgccccagggggccctaccccagcccaccacatgctcagccggcaacatgcctgtcgggaacaccagattcctgcctcttgcccctgctccagtgttcattgcatccagtcagagctgggcccctcaggtaggactttcccgaaagagaaactatg

SEQ ID NO: 8382 - DNA, 260 bp, Bos taurus
  Clone ID: 36-LIB3057-023-Q1-K1-A12
acagaggcaatgcaaacagctaacccccaaccagaagagcaccatgttcccagacacgctgctcatcgtatttatctccgagtgcaccgctctgcttgccgagggtataactagggtcctggtttacaggacagacaagtacaacaaactgaaagcagaactggaaaaacacagtaaaaaattgcaaaagaagaaagaaacaataacagaatcaactggtcgacaacaaaaaaagaaaaatgaacggccaggaagagaaa

SEQ ID NO: 8383 - DNA, 318 bp, Bos taurus
  Clone ID: 36-LIB3057-025-Q1-K1-A12
attcttacttctaacaggtaaatttatttagcagtgcacgggtcatctctgcttcctagaccctttatcatgcagaacgctctcctaatactccacattcaaactgaacaggaaaatgcaaatctctaatgaagctgctgtatcgtatttatgaatattaatgaataaaaactgcttggatggtttaccttaactactgcatgaggtattatgcagcgtgcatgaattttagtgaccttgttatttaagaaatctaaatacaacgagtaaaacttaaaacatacataaaaacccaaatctttcccaaacattattcaa

SEQ ID NO: 8384 - DNA, 374 bp, Bos taurus
  Clone ID: 36-LIB3057-025-Q1-K1-A8
agattcccactgtccctacctactatccagcgaaaccacagccaagggaacgggctgggcggaatcagcggggaaagaagaccctgttgagcttgactctagtctggcacggtgaagagacatgagaggtgtagaataagtgggaggcccccggcgcccccccgtttcccgcgagggggcggggcggggtccgccggccttgcgggccgccggtgaaataccactactctgatcgttttttcactgacccggtgaggcgggggggcgagccccgaggggctctcgcttctggcgccaagcgcccggccgcgcgccggccgggcgcgacccgctccggggacagtgccaggtggggagtttgactggggcggtac

SEQ ID NO: 8385 - DNA, 417 bp, Bos taurus
  Clone ID: 36-LIB3058-001-Q1-K1-A12
gatcgcgagcggccgtcctttttttttttttttgagaggaacgaagccactgcctttattgcatagaccttttcaattgctttgaagattggggctgggggaacgcacagaagacaggacacgaacttccccacccgggggtagaggaacattagtgcaaatcggagcgccggcccggggaacctgccccttccgggctgattggccagcttggtggaggcaccggagtagacggggccaattagctaaggcctccccggcctgtacattccaggtcgagtcactggacgacgcgttaagacgcgttaagacaggctccgacctcagccgacctggctttctacgagcagggcacgaggacctggagtgtaccccgccctcattgatcaggcactacccttggggcgagcccatttt

SEQ ID NO: 8386 - DNA, 329 bp, Bos taurus
  Clone ID: 36-LIB3058-001-Q1-K1-A8
gtggtggtgctggtgttcacaggcttcgtgtgggcagcccacaataaagacatcctccgtcggatgaagaagcagtaccccacagcgtttgtcatggtggtcatgctagccagctacttcctcatctccctcttcgggggagtcatggtctttgtgtttggtatcacatttcctttgctgttgatgttcatccatgcgtcgctgaggctccggaacctcaagaacaaactggagaataaaatggaggaaattggtctgaagaggacacccatggggattgtcctagatgccctggagcagcaggaggaaaccatcaccaagttttctga

SEQ ID NO: 8387 - DNA, 439 bp, Bos taurus
  Clone ID: 36-LIB3058-003-Q1-K1-A12
ttgtgaggggacacaaagaaaaattgaataaactgtatgatttaaaagattatcgggagagttacctcccgatataaaaggaaggatttacagaatgtgacctaaggtctggcgtaaatgtgcaccggaaccgagaaggcccggattgtcatggacgatgagatacaccggaatatcatggacatattctttaaagcgccctttatcttcaaatgcggcacggaaaccggaggctttgaagaactcaaggaagcgcggcacgataccgcccgcaataaacacgccgccaaatgtcccgagattgagcgccagattgccgccaaaacggcccataatgacgcaaaacagcgacaatgcgcggcggcaatcggtgcagctgtcagccagcgcgcgttcggtaatatcttttggcttgagattttctggcaggcggttgtca

SEQ ID NO: 8388 - DNA, 443 bp, Bos taurus
  Clone ID: 36-LIB3058-004-Q1-K1-A8
tgaacaacatgggtggtgatgaggatgtagatttaccagaagtagatggagcagatgatgattcacaagacagtgatgatgaaaaaatgccagatctggagtaaggaatgttgtcatcgctggattttgagaaagaaaaataacttctctgcaagatttcgtaattgagagaattcctgagttgatagctctaaaggcagatgctgtatttgcctcctttaacccatttttcaacctgtttgttttttttaaggcttcactaagggttgatatgtaccattgtatggggcagttttaagtcagctaaggcaataaccttgtgcatgaacatttcccagatttccatgatgctgatgaggtcctaagcaattgacacagcagttgtgataaataaaaatctcacctaagtctcctttactcataacttagatactgacatgata

SEQ ID NO: 8389 - DNA, 357 bp, Bos taurus
  Clone ID: 36-LIB3058-008-Q1-K1-A12
gttctagatcgcgagcggccgcccttttttttttttattttttttttttttttttttgttatttattatttttatttttttttttttttttttttttttttttattttttttttttatatttttttttattatttttaattgttataattttatttttattttaaggataaaaatcatttatttaactaaaaattaaaatatcactacccctgaaacgcattaaagctctcaaacttgctattgtataaaaccacaattatacatcgtctatctacatacataaatttatttttttggcaaaaatcagcattctcccttctagacctaatatgactagaatttatactatcaaaaac

SEQ ID NO: 8390 - DNA, 433 bp, Bos taurus
  Clone ID: 36-LIB3058-011-Q1-K1-A8
ggcaagtgatcatgaccattgagctcctggacaccgaggaagcccagacggaggaccctgtggaggtccagcacctggctcggtacgtggagcagtacgtgggagcggagggcgcctccagctcgcccaccgagggcttcctcctgaagcccgtgttcctgcagaggaacctcaagaagttccgccgctggcagtgtgagcaggtgcgtgcgctccgcggcgaggccaagagctcctggaggcggctggtcggggtggaaagcgcctgcaatgtggactgccgcttcaagctcagcacccacaagatgctgttcatcgtgaactccgaggactacatgtaccgtcgagggacgctgtgccgggccaagcaggtgcagcccctggtccttctgcgccaccaccaacactttgcggagtggcacagccgctggct

SEQ ID NO: 8391 - DNA, 331 bp, Bos taurus
  Clone ID: 36-LIB3058-013-Q1-K1-A8
gctaaacatcacccggacttgatcttttgccgcaagcaggctggtgttgccattggaagactgtgtgaaaagtgtgatggcaagtgtgtgatctgagactcctatgtgcgtacttgcaccctggtgcgcatatgcgacgagtgtaactatggctcttaccagggccgctgtgtgatctgtggaggccctggagtttcagatgcctattattgtaaggaatgcaccatccaggagaaagatagagatggttgcccaaagattgtcaattagggaagctctaagacagatctctactatgaacgcaaaatatatggctacagggagaggtgat

SEQ ID NO: 8392 - DNA, 396 bp, Bos taurus
  Clone ID: 36-LIB3058-014-Q1-K1-A8
ggaaatccatccgcgtcgccgctgccgtctccgccgcggaggaagacaggacctgccgcgctcctctagcgacccttcgcagactcccaccgccacaggcctcgggccagcggctaggagctgcctccctcagcccgcgtcccgcggcccccagccgctcgcaaccccgccccacggtcccggcgccatgagtgagctggagcatctgatacaggaggccgagcagctcctgaaccagatccgggatgccccaaaagcatgtggggattcaacactgacccagatcacagctgggctggacccagtggggagaatccagatgaggacacggaggaccctccgtgggcacctgtccaaaatctatgccatgcactggtggacagactcatggctggt

SEQ ID NO: 8393 - DNA, 402 bp, Bos taurus
  Clone ID: 36-LIB3058-015-Q1-K1-A8
gtagaaagaagacatacagatggccaatttgcacatgataagatgctcaacatagctgattattagagaaatgcatattacaactacaaggaggataccatactcacaccatgccagaatgggcatcattgaaatctacaaatgacatgctggagagggtgtggagaaaagggaactatccttctttactgatgagaatgtgaactggtgcagccactgcggaaaacatcactaaagttctcagggaactgagaacacatgccatacgatctaacattatcacttatggtgctgtatatatccagctgctatgtagaatgagcacatgcacccgtatgttcaggtgcatacgtgctacaatagctgacacgtgagaacaatgagctcactgagagatgaaca

SEQ ID NO: 8394 - DNA, 398 bp, Bos taurus
  Clone ID: 36-LIB3058-016-Q1-K1-A12
gcctgggccgacatcatacggggcccgagatgctgcgcccgcgctccattgtggatcccggcctgagcgcccgagacggctgcaaatgctaggacttcgctcaccgactgggtcttgtgctctcttttcagcaaatggcggatgactccgatgctgcgccaggacccggaggccccgggggccccggaatgggacgccgcggaggcttccgcagaggctttggtagtgtcgtacgtggccggcgtcgcggtcggagtcagcgccgatgcagaggccgctgatgctagagatgcaatgccgatgacaatgagcggcttcgcgttaccaagctggaccgtctggtcaaggacatgaagatcaagtctcttgaagagatctaccttaactctctggctatc

SEQ ID NO: 8395 - DNA, 328 bp, Bos taurus
  Clone ID: 36-LIB3058-016-Q1-K1-A8
tttgccaaatactttcttcaccaatctcatgaggagagggaacatgctgagagactgatgaagctgcagaaccagcgaggcggccgaatcttccttcaggatatcaagaaaccagaccgtgatgactgggagaatgggctgactgcaatggaatgtgcgctgtgcttggagagaagtgtgaatcaggcactactggaactgcacaaactggccactgaaaaaaatgatccccatctgggtgatttcattgagactcattacctgaatgagcaggtggaagccatcaaagaattgggtgaccacataaccaacctgggcaagatggggg

SEQ ID NO: 8396 - DNA, 438 bp, Bos taurus
  Clone ID: 36-LIB3058-017-Q1-K1-A12
gttaacttggctgactcagtccctctcttctgactccccaaggcccaggcacagtaaaggcactgttccagggagggaagggaattagctcaggaaagactcagagtcctcctctgaccaggatccaggataacatcctgggtcaaagcatgggttgacccctgggccaggcaggtttgaagatggggaggaggttttgaggtggtgggttctgggccagcaggaacacggggtccagctcgagcgctggagtgagaaccaggagccagcccctttcccccagcagcccaacaccgagcacgtctgtgtctggtcttagcacctatgacaatcgtctgaacagcagccacaagggggcgctactaccaggcagcagttttgcgggtgctctcctggcaagcctggtgttgtagggccaggcaggggctgaacggggct

SEQ ID NO: 8397 - DNA, 451 bp, Bos taurus
  unsure (411): unsure at all n locations; Clone ID: 36-LIB3058-018-Q1-K1-A8
tttttcattaaaagtgtattactttatttcaatactcaagaacagtgcatactttccttgagacccgtggtcacagctctcattgttgggtgtggccacgaatggaggtcactcagtcacaaccagctcaatgacgcagtgtgtgtgtcgagcaatttggagattttgtttctgaaattttctttttttttcttatcctctcatcattggaggctatgtattaatagacattatagtaaacccacgcgaaatattcagaattagaaggggattaaagagccacgtttgggcgttacgttgactattcctcattttcatcctaaggggggttgtgacgccagtgtggggacttcgtgggggtctggtagaagagatgctgaaatcaaaaggtgggaatcagtaggttatggnggaagcacgggagatgtcagctggggttagaaaagagtgg

SEQ ID NO: 8398 - DNA, 466 bp, Bos taurus
  Clone ID: 36-LIB3058-019-Q1-K1-A8
tttgatgattgttggcaagaaatgtgctgctcatctgggcctgaagaagggctatcaaatggtggtgaatgaaggttcagattggggccagtctgtctatcatgttcatctccatgttcttgaaggtcgacagatgaactggcctggttaagcatgctgtagggataattttgcctcctctctgcagtgatcaggtttgcaagttccaatatgctaaacaattttttttttttttgcctgtgtatggagatactacaaaaataatttttaaaacccatatataataaaagacattgttgcatgctctgaaaaaaaaataaagtacttaaatatatatttctccaaagaagatatataattggaaaaaaaacatgaaaaaatgttcagtatcactaatcattaggaaaatgcaaataaaaagtgtaatgagataccacctcattttattgatagaatggctactatc

SEQ ID NO: 8399 - DNA, 433 bp, Bos taurus
  Clone ID: 36-LIB3058-020-Q1-K1-A12
ggcgcttccaagatgaccaagaaaagaaggaacaacggtcgtgccaaaaagggccgcggccatgtgcagcctattcgctgcaccaactgtgcccgatgtgtgcccaaggataaggccattaagaagtttgtcattcggaacatcgtagaggccgcagccgtcagggacatttctgaagcgagtgttttcgatgcctatgtacttcccaagctgtatgtgaaactacattactgcgtgagttgtgccattcacagcaaggtagtcaggaatcgctctcgggaagcccgtaaggaccgaacacctccaccccgatttagacctgcgggtgctgccccacgtcctccaccaaagcccatgtaaggatccaagtccttaaagactgaagaatattggtttctctgaaaagacaataaaatggaaattatactttaaa

SEQ ID NO: 8400 - DNA, 324 bp, Bos taurus
  Clone ID: 36-LIB3058-020-Q1-K1-A8
cggacgcgtgggcagaggtggccggagctacagccaaggaccactgacatgtctgagttagagaaggccgtggtggccctcattgacgtcttccatcaatattccgggagggaaggtgacaagcacaagctgaagaagtcagaactcaaggagctcatcaacaatgaactttctcattttttagaggaaatcaaagagcaggaggttgtggacaaagtcatggagacactggacagtgatggggacggcgaatgtgacttccaggaatttatggctttcgttgccatgattaccactgcctgccacgagttcttcgaacacgaa

SEQ ID NO: 8401 - DNA, 430 bp, Bos taurus
  Clone ID: 36-LIB3058-022-Q1-K1-A8
gcggctggagctctctgtcctatacaaagagtatgctgaggacgacaacatctatcaacagaagatcaaggacctccacaaaaagtactcatacatccgcaagaccaggcctgatggaaactgtttctatcgcgctttcggattctaccacttggaggcgttgctggacgacagcaaggaattgcagcggttcaaggctgtgtctgccaagagcaaagaggacctggtgtcccagggcttcactgagttcacaattgaggatttccacaacacgttcatggacctgatcgagcaggtggagaagcggacccacgtggctgacctgctggcctcctttaacgaccagagcacctcggactacctggtggtctacctgcgggtgctcacctcaagctatctgcagcgcgagagcaagttctttgagcacttc

SEQ ID NO: 8402 - DNA, 414 bp, Bos taurus
  Clone ID: 36-LIB3058-024-Q1-K1-A12
cttgctgcggacagaactgtcaccatgccccactcgtacccagccctttctgctgagcagaaaaaggagttgtccgacattgccctgcggattgtggccccaggcaaaggcattctggccgcagatgagtctgtaggcagcatggccaagcgactgagccaaatcggggtggagaacaccgaggagaaccgccggttgtatcgccaggttctgtttagtgccgatgaccgtgtgaagaagtgcatcggcggtgtcatcttcttccatgagacactctaccagaaagacgataatggtgtccccttcgtccgcaccatccaggataaggggattgtcgtgggcatcaaggttgacaagggtgtggtgcctctagccggaactgatggagaaaccaccactcaagggctggatggg

SEQ ID NO: 8403 - DNA, 439 bp, Bos taurus
  Clone ID: 36-LIB3058-029-Q1-K1-A8
gatgttgagcatcttttcatgtgtttgttagccatccgtatgtcttctctgggcaaccacttgtaaaagaatgaaagtagaacactatttaacaccatacacaaaaataaactcaaaatggattaaagatctaaacctaagaccagaaactataaaactcccagaggagaacataggcaaaatactctctgacacacatcacagaaggatcctctatgacccacctcccagaatattggaaataaaagcataaataaacaaatgggacctaagtaaacttaaaagcttcttcacatcaaaggaaaatattagcaaggtgaaaaggcagccttcataatgggagaaaataatagcaaatgaagcaactgacaaacaactaatctcaaaaatatacaagcaacttctacagctcaacttccgaaaaataaattgcccaatc

SEQ ID NO: 8404 - DNA, 418 bp, Bos taurus
  Clone ID: 36-LIB3058-030-Q1-K1-A8
ggcgactgtgtgggacgaagcggagcaagatggaatcggggaggaagttctcaagatgtccacagaagagatcatccagcgcacacggctgctggacagtgaaatcaagatcatgaagagcgaagtgttgcgagtcacccacgaactccaggccatgaaggacaagatcaaagagaacagcgagaaaatcaaagtgaacaagacgctgccgtatctggtctccaacgtcatcgagcttctagatgttgatcctaacgaccaataggaagatggtgcatacattgatctagactcccaaaggaagggcaagtgcgcagtgatcaaaacctgtacgcggcagacctacttactgcctgtgattggcttggtggatgccgaatagctgaagccgggagacttggtggttgtgaacaaagga

SEQ ID NO: 8405 - DNA, 385 bp, Bos taurus
  Clone ID: 36-LIB3058-031-Q1-K1-A8
gatgcatgctgcataaaccacctttgctggctcatgctgacattcactcagctgaaagtacatatcaaatggaacgttttggggggagggaccctattaccacacgacacacacttgcctatactgacacttacctacttacacccatgtgtccgtatatacgtgacaggttgatcagtcatgtgacctaatttgtggtatctatctgtatgttttgcaatttttattcattttattcctctatattgttttttttatttctttcttatcctcgtttatttaatatgttttttttattcttttttttttaattcttttttttttttttttttatcttattttttgttttttttattgtttctttttttttaatttttttagtttt

SEQ ID NO: 8406 - DNA, 426 bp, Bos taurus
  Clone ID: 36-LIB3058-032-Q1-K1-A12
gtgaaattttccaggcaagaatactggtattgggttgccatttcctactccaggggatggtaccgacccagggattgaatccgtgtcttctgtttcttctgcacttgcatgcatattctttaccacttcattatctaagtaatttcttttattatttaatttacattattttatattttgtaattctaatactttatgtttttttatttctttttttttttttttatttttttatttcttatttttattttttatttttattttttatttattattttttttatctatataatttttattatctttttatttttatttttttttttttttttattttttatttatttatatatttattttatttttttttttttattttttttattttttatttttatttttgtttattttttatatcatttttta

SEQ ID NO: 8407 - DNA, 366 bp, Bos taurus
  Clone ID: 36-LIB3058-032-Q1-K1-A8
ctatgattggtgatgttgcatcttggaatcatagaagaactacttcactttcatgacgacacgctaataattgtcttcttaattagctcattagtactttacattatttcactaatactaacgacaaagctgacccatacaagcacgatagatgcacaagaagtagagacaatctgaaccattctgcccgccatcatcttaattctaattgctcttccttctttacgaattctatacataatagatgaaatcaataacccatctcttacagtaaaaaccataggacatcagtgatactgaagctatgagtatacagattatgaggacttaagcttcgactcctacataattccaacatcagaatta

SEQ ID NO: 8408 - DNA, 433 bp, Bos taurus
  Clone ID: 36-LIB3058-035-Q1-K1-A8
cctgtttcccttggaattgaaactgcttgtggagtcatgactgtcctcatcaagcgcggtactaccattcctaccaagcagacgcagactttcaccacctactctgacaaccagcctggtgtgctcattcaggtttatgaaggtgagcgtgccatgaccaaggataacaacctgcttggcaagtttgaactcacgggcatacctcctgccccccgtggtgttcctcagattgaagtcacttttgatattgatgccaatggcatcctcaatgtttctgctgtggataagagcacaggaaaagagaacaagattaccatcactaatgacaagggccgcttgagcaaggaagacattgaacgcatggttcaagaagcagagaagtacaaagctgaagatgagaagcagcgggacaaggtgtcttcaaagaattcgc

SEQ ID NO: 8409 - DNA, 437 bp, Bos taurus
  Clone ID: 36-LIB3058-036-Q1-K1-A8
agcaggtccccttttgctcctttttcataggcctagggtgggtgtgagccagggacctgaagagagagatcactggatcctttcccggcccccaagttcaaaccccatgagaacccagcactagattccagccccatcccccacctctggagagacaatgctgggaacagaccgacccccaccactgagcctgaggggatgaaggcagagaggagtcctcttttctactcctttattcctactcagactgttgcacatactagccttgggagttcctagaatagaaatccttaggttttaattccagtcctgtttccacctacagagtcccaacgtggttattgcaggcaacgttccctctctccgtggtctagaagcccctcccccaaggtagaaagaagggaagaagctaactccagtgtttccgttgcactgat

SEQ ID NO: 8410 - DNA, 428 bp, Bos taurus
  Clone ID: 36-LIB3058-038-Q1-K1-A12
ctggggtggatcaggatcgccggcttagttgaggcgggggagcgcttcttccggaagctggcctgcactctcaacctggtggccacacccagtgcccagctcatccagatgagctgggcaagcctgctgaccgcgttccccgccctgagccccgcgcagctgcaccggctgctgactcagtaccagctggcctcggccatgggccccatgagcgcctgggagccgggtgcccaggacggccctgccgtcttgaagtcagaggaggtcctggagtcctacgaataccccccgaccattgtcttgccgagcgagggcttgcaagtggatctggacacagagtgcccggacgaccgtgtataccagcacctactctacatacgccacttcctgtgcggcctgcggagccagcccggacccagtggagcgcc

SEQ ID NO: 8411 - DNA, 434 bp, Bos taurus
  Clone ID: 36-LIB3058-038-Q1-K1-A8
gccgtgtctgtcctccatggctgccacgctgctcgcccgggcctgtggccttgtccgcggagccccctggccttggggctggcgtcgcctacataccgtctaccagtctgttgaactgcccgagactcaccagatgctgcggcagacatgccgcgactttgccgagaaggagctctttcccatcgcagcccaggtggacaaggagcatcgcttcccagcagctcaggtgaagaagatgggcgagctggggcttatggccatgaatgtgcccgaggagctcagcggagccggccttgattacctggcctactccatcgccatggaggagatcagccggggctgtgcctccacgggagtcatcatgagtgtcaacaattccctctacttagggcccatcctgaagttcggcaccaaggagcagaagcagcggtggg

SEQ ID NO: 8412 - DNA, 179 bp, Bos taurus
  Clone ID: 36-LIB3058-047-Q1-K1-A12
tctagatcgcgagcggccgccctttttttttttttttttttttttttttttttggctcgtcagaaacttgaatacttaagcttgtacatgattttgtgttttgctatcctttttactgtaaaatgtaaatattttaagggatattttgattctaaatatgataaaagaatttctcacct

SEQ ID NO: 8413 - DNA, 356 bp, Bos taurus
  Clone ID: 36-LIB3058-047-Q1-K1-A8
tccctgctctacccactcttccgtctagatctcgagtcttccgcccttttatgttttttaatatcattttttctatctgttggattttattttaacttatttaccctattaataatttttctaatatcaaatatactatcaatataccaattattaccatatgttatcctataaatcacattccaaaacaccatacccaatctatccaaaaaggcctacgctataaaataatactataaattatctcctaattactattctttaccgtattttctcagatctttctaccaatcaatcctaaaactgacacatgaactattctgattcttaccaccaacatgcattcacacactaac

SEQ ID NO: 8414 - DNA, 312 bp, Bos taurus
  Clone ID: 36-LIB3058-048-Q1-K1-A8
cggacgcgtgggtcgcgagcggccgcctaattttttttttttttttttttttttttttgtttttttttttatttttttttttttttaaattttttttttttattataataataaaaaaaaaaaaaaaaaaaaaaaaaaaaaaaaaaaaaaaaaaaacaaaaaaaaaaaaaaaaaaaaaacaaaaaaaaaaagaaaaaaaatatacaaatacaacaataccgaaacacaagaagaaagaaaagaactaacctaataaacaatataagacaaaacagaatgcttaaaagagtaaaaaataagaaagataaagct

SEQ ID NO: 8415 - DNA, 426 bp, Bos taurus
  Clone ID: 36-LIB3058-049-Q1-K1-A12
ataacagctaccatgacaaccctgtggtttccaaggagctgaggatagagagaaactagttcatatgaaaaatagactggcctaaggagcagcagtcgctagtggctaacagtgtaaactgggccagccctctggtagacacaggatagataactttttggatagcatgtttttttctgttaattagttgtgtactttggcctctgtcatatcttcacaatggtgctcttttcatggggtattagccattcagtcatagcaggtaatttgaagatcttgatttgtttcagaatgatgcacattttgtattttccagcttgtctatcacttgtttggggttgtaccagaaaggtctggagaatgattctttgattatgattctctaacaaatgaaaattggacattaaacaacacaaatgatatgta

SEQ ID NO: 8416 - DNA, 432 bp, Bos taurus
  unsure (393): unsure at all n locations; Clone ID: 36-LIB3058-049-Q1-K1-A8
cggacgcgtggggtttgacatagttggttggatattaggaaaaattgtcaggagcttccactttgctgttaacctgtattgataaatcactgcccttctttggatctcagttttttatttatctgtgtggtgaagtcaggtcataccatagacgtgagagaaacctattgatatgtgaatgacaaagatgatagataagagctgaagctattgcatacagaatatccaactatgatctctgtgaataagcaatttgaacataaaaagctatggctgttcttgtttgtaatgtaaatatggtccattcttaaagtgaaattcagtctactgtaggttgaattggataaccatttacacaagagatggctttttcctttgcttaaataaacattnttggattacttctgaagaatgaaaaccaggagtatattt

SEQ ID NO: 8417 - DNA, 330 bp, Bos taurus
  Clone ID: 36-LIB3058-050-Q1-K1-A12
gttctagatcgcgagcggccgccctttttttttttttttgaaatttaaagaaaaatttattgaagatctgaaaaacaatttctaaaagattaacttttccagaaaactgtagctacacaatgcattgcgtctatcatgttaaaacgtgcattagacacaaatacaaaaaccatgaaacaagccaccgttcttcaacaatcgaaaacaaattactaaaatgaagacagaaaaaaaaaaaaaaaaaaaaaaaaaagaaaaaaaaaataaaaaaaaaaaaataaaaaacaaaaagaaaacgaaataaaaggggcggtcttttttaaggttcca

SEQ ID NO: 8418 - DNA, 332 bp, Bos taurus
  Clone ID: 36-LIB3058-050-Q1-K1-A8
gcggccgctcccggggcggtggacgcaatggcggcccagaagagaccctcccagagatccaagtacctggcctcggcgagcaccatggaccacgccaggcacggcttcctccctagacacagagacacgggcatcctcgactccctcggccgcttctttggctcggacaggggtgcgcccaagcggggctcaggcaaggtcccgtggctcaagcagagcaagagccccctgggcccccatgcccgcagcccgcccgggctgtgcaacatgtaccaggatggacaccacgcggccagaaccacccactatggctccctgccccagaaggcgca

SEQ ID NO: 8419 - DNA, 325 bp, Bos taurus
  Clone ID: 36-LIB3058-056-Q1-K1-A8
gagatgtaggtagttgtagtcggacgggcggcccgggcaggtgggaacagcccccgccgtgccccacccccccatcgccctgcgcccacccacatcgcccctgcccccggcagccgcgcacgggcgagggggctcccttcacctcggtgcctcagttcccccaactgttaaggggggacgggctggccgcggccgaggggagagggccggtgaggctgcccgcgcccgccctctgacgaggattggtttttaagtgcaatacttgacctgccggcttgcctgtgcctccgttgcgctcatgcaataaccagcctagtccctgtcc

SEQ ID NO: 8420 - DNA, 340 bp, Bos taurus
  Clone ID: 36-LIB3058-058-Q1-K1-A12
acgatcgcgagcggccgcccttcttttttttttcttcttttttttttttaggattaacacgagtcatttaattatcaggcttacaagttggcgaggttgggcaaagccaggagagtaacttaacgcctttctatcaagtgacagcctgattagcagggccgtttctgagcggaaggcaatgtagggcaccccaggaaccccagcttctacagcagtgttaaaacccctcctttagaggcactggatagggcatggcccgtgacagtcaagggccactccactggcttttggtgcccactgacccctttgagcagacacacaaaggccttcagagggaccc

SEQ ID NO: 8421 - DNA, 417 bp, Bos taurus
  Clone ID: 36-LIB34-002-Q1-E1-A8
atctgtcttcacaaaccggagggtttttggtccaatgggagttatgaaaaatgctgtttctgtggctgaggatgaacaatggaagagaatacggacattgctgtctccaaccttcaccagtgggaagctcaaggagatgttccctatcattgggaagtatggagatgtgttggtgaggaacctgaggaaggaagcagagaaaggcacgtccgtcgacatgaaagaggtctttggggcctacagcatggatgtgattactagcacatcatttggagtgaatattgattcccttggcaacccacaagatccctttgtggagaatgccaagaagctcttaagatttgatatccttgatccatttctactttcagtagtactctttccattccttatcccaatctttgaagtattaaatat

SEQ ID NO: 8422 - DNA, 397 bp, Bos taurus
  unsure (293): unsure at all n locations; Clone ID: 36-LIB34-003-Q1-E1-A8
acttccacacacacagtccttatcaatgtgagggcaggtaggatgacaggaaggacttccccatacacaaggatggatcagtgaactgctggttttgttttaaaacaaggggccccattccttcaaccgtggccacctcctgggaagagaggaagcgggagagcagcccatgtccccctgtcacccacgtcctccagccaggcaagctgtttgcctgcaccgccactgcaagctggatccagagttgcaggcagaccaatttctgcatcagtattatctcgactgaaggctangactgcagagggctctgcggtatttagtggggcccagaatggtgtgtctcagttaatccagagggagttcagaccagtgcagtcagcagagatgctgagactgc

SEQ ID NO: 8423 - DNA, 351 bp, Bos taurus
  Clone ID: 36-LIB34-004-Q1-E1-A12
ctgatcaaccatcaaagccaaataacatagagagtgctaccaagaattccaagagtatgatggaagaaattatgaaatatgaaacactgataacaacacatgaatcaacaattcgatttttgcaagaaatatataactcaaatagtcaaaaaatcgttaacctaagagataaagtggtccagcttgaagcaaactgtcaagagccttgtcaagatacagtgaaaatacatgatgtaactgggagagattgccaagatgttgccaataagggggccaaagagagtggactttactttatcagacctctgaaagctaagcagcagttcttagtctactgtgaaattgatgggt

SEQ ID NO: 8424 - DNA, 407 bp, Bos taurus
  Clone ID: 36-LIB34-004-Q1-E1-A8
ctgaagctttttattcctaagaagagaaaatcagtcaccggagagattgtccttattaccggagctggacacggtattggcaggcagactgcctacgaatttgccaaacttaagtgcaagctggtcctgtgggatataaataagcatggacttgaggaaacagccaccgaatgcaagagactgggtgcaaaggctcatacctttgtggtagactgtagtaaccgagaagatatttacagctctgcaaagaaggtgaaggcagaagttggagatgttagtattttagtaaataatgctggtgtagtctacacatcagacttgttcgctacacaagaccctcagattgaaaagacttttgaagttaatatccttgcacatttctggactacaaaggcatttcttcctga

SEQ ID NO: 8425 - DNA, 397 bp, Bos taurus
  Clone ID: 36-LIB34-005-Q1-E1-A12
cggacgcgtgggtggggatgaagctttatagcttgggagtccttgtcgccaccgtcctgttctgtggggagcatgccttcgcctttcagaggggccaggttttatctgctcttcctagaacctccaggcaagttcaaattctgcagaatgttactacaacatacaagattgttctctggcagccagtagcagctgaatatattgtgaagggatacgaagtccatttttttgtgaatgcatctgatgtaagcaatgtgaaagcccatttaaatgcgagcagaattccattcagggtcctggtggaaaatgtggaagatcttatccggcagcagacttccaatgacaccatcagcccccgggcatcctcctcctactatgaacagtatcactcactaaa

SEQ ID NO: 8426 - DNA, 402 bp, Bos taurus
  Clone ID: 36-LIB34-006-Q1-E1-A8
cggacgcgtgggtgcaggagaaggaggtgatacaggacgtggtggcagaaaaatgaagaggatcctggttttcctccttgctgtagcctttgtgcatgctctagagagaggccgagattatgagaaagataaagtctgcaaggaccttgccagcctgggaagagatgacttcacatctttgtcaatggtcctatacagcagaaaatttcccagtggcacctttgaacagatcagccatcttgtgaatgaagttgtttccttaacagtaacctgctgtgcggaaggggccgatcctgactgctatgacaacaggacttcagcattgtctgacaagtcctgtgaaagcaactctccattcccagtgcaccctggaactcctgagtgctgcacccatgagggcct

SEQ ID NO: 8427 - DNA, 413 bp, Bos taurus
  Clone ID: 36-LIB34-007-Q1-E1-A12
acacaaaactttggcacaatgaagtgggtgacttttatttctcttctccttctcttcagctctgcttattccaggggtgtgtttcgtcgagatacacacaagagtgagattgctcatcggtttaaagatttgggagaagaacattttaaaggcctggtactgattgccttttctcagtatctccagcagtgtccatttgatgagcatgtaaaattagtgaacgaactaactgagtttgcaaaaacatgtgttgctgatgagtcccatgccggctgtgaaaagtcacttcacactctctttggagatgaattgtgtaaagttgcatcccttcgtgaaacctatggtgacatggctgactgctgtgagaaacaagagcctgaaagaaatgaatgcttcctgagccacagagatga

SEQ ID NO: 8428 - DNA, 342 bp, Bos taurus
  Clone ID: 36-LIB34-007-Q1-E1-A8
atgtgagtgaaagccttcagagggaagctgccaagaagcaagcaatgaaacagaccaaacttgaaattcagaaggctcttgcagaagattctactgtatatgaatatgacagtatttatgatgaaatgcagaaaaagaaggaagaaagtaaccccaaattgcttttgggaaaagaccgaaagcccaagtacattcacaacttactgaaagcagttgaaattagaaaaaaggaacaagaaaaaagaatggaaaagaaaatacagagagaacgagaaatggaaaagggagaatttgatgataaagaggcatttgtaacatctgcttataagaaaaaactgcaag

SEQ ID NO: 8429 - DNA, 404 bp, Bos taurus
  Clone ID: 36-LIB34-008-Q1-E1-A8
ctcattaaactttttttaatgggtctcaaattctgtgacagatttttggtcaagttgttttcattaaaaagtactgattttaaaaactaataacttaaactgccacacacaaaacatatggtccacaaaaacattctcctttccttctgaaggttttacgatgcattgttatcattaaccagtcttttactattaaacttaaatggccaattgagacaaacagttctgagaccgttcttccaccactgattaagactggggtggcaggtattggggataatattcatttagccttctgagctttctgggcagacttggtgaccttgccagctccatctgccttcttgtccactgctttgatgacacccacagcgactgtctgtctcatgtcacgcacagcaaaa

SEQ ID NO: 8430 - DNA, 410 bp, Bos taurus
  Clone ID: 36-LIB34-009-Q1-E1-A8
gaacttctaatcagaagagaactgaacttgcaacgtccccatccaagacataaccaagcgtttcctagacagtaccaggactgctccactatgcaaaggctgatgaagtttcgggtcctctggggcatccacatgtcctgccctggcttccaccatgcccctcagcacctgcgctgccgatctttatcaggagctggaaccctaagatggaatgactatgacagacctgaggaatttaactttgcaagtgatgtactggaccactggactcaaatggagaaggagggcaagagaagtccaaacccagccctgtggtgggtgaatgatcaaggggatgaagtgaagtggagcttcagagagatgacagacttaacctgtcgtacagccaacgtcctgacacagacctgcgg

SEQ ID NO: 8431 - DNA, 388 bp, Bos taurus
  Clone ID: 36-LIB34-010-Q1-E1-A12
gctgcctcgagcagggagctggtggctcttccatccccagaccagccaagcctgtgagtgacaccccagacagaggaaccagagccatgcggagtctcagcggactgctgttgttactgactgcctgcctggcagtaaacgccagctccgtgcccacattgcccgatgacattcaagtgcaggagaacttcgacctgtctaggatctatgggaagtggttcaatgtggtcgtgggctccacctgcccatggctgaagaggttcaaggagaagatgaccatgagcacagtggtgttgaaagcggggccgacgagcaaggagatcagcgtcaccaacactcacaggcggaaaggtgtctgtgaatcgatctctggtacttatgagaaaac

SEQ ID NO: 8432 - DNA, 383 bp, Bos taurus
  Clone ID: 36-LIB34-010-Q1-E2-A8
tctagatcgcgagcggtcgcccttttttcttcttctgggaccctattattcaaatgttggtgtgtctgatactgtcccagaggtctctgagactatcttcagttcttttcattcttttcactttattctgctcttcagaagttattttcaccattttatcttccagctcactgattcattcttctgcttcagatattctgctattgattccgtctagagtatttttagtttcagtaattgtgctgtttgtctctgtatgcctattctttaattcatctaggtctttgttaattgattcttgacctttctccattttgttttcaagcttttgtaatgcaatacgatcagtatctggatggtttttaaatgtattctttgaaaaa

SEQ ID NO: 8433 - DNA, 379 bp, Bos taurus
  Clone ID: 36-LIB34-011-Q1-E1-A8
acgatctgcttgggcagccctcctgctgctctggggtctgtccctgagcccagtgactgagcaggcgacgttctttgaccccaggccatccctgtgggccgaggccggctcaccgctggcaccctgggccgatgtgacgctgacctgccagagcccgctgccgacccaggagtttcagctcctcaaggatggcgtgggccaggaaccggtgcacctggagtcccctgcccatgagcacaggttcccgctgggaccagtgaccagcaccacccggggcctctaccgctgcagctacaacggcaacaacgattggatcagcccgagcaacctggtggaagtgaccggagcagagcccctgcccgcaccctcgatctcaacc

SEQ ID NO: 8434 - DNA, 300 bp, Bos taurus
  Clone ID: 36-LIB34-012-Q1-E1-A12
acccacgcaaccgaggacgcgtgggttttggggaaattacatataccaaattgctagaagacatccctaattttatgcactagaactcctttactatgcaagtacatttaatggagtttttcaagaatgctgccaagctgatcataaaggtggctgcctgctagcaaagattgacactatgatagaaccagtactgacttcatctgccatacagagactcacgtgtgctagtaatcagaaattttgagaaagagctttaaaagcatggtcattacctctcctgagccagaaattttccaa

SEQ ID NO: 8435 - DNA, 388 bp, Bos taurus
  Clone ID: 36-LIB34-012-Q1-E1-A8
gatacctttatgatgattgcacttcctaacatgaacaaatctttcacgtgtactttgttcatgccttttgaagagtttgaaaaactgctaaccagtagtgatgtgctggacttcttccagaaatactttccggattccatccctctaattggaaagcaagccctggtacaagatttctttctgttgcccgcccagtctatgatatccgttaaatgctcttcttttcactttaaatcacattgtttgttgatgggagatgctgcccatgccatcgtgcccttttttgggcaaggaatgaatgcgggctttgaagactgcttggtatttgatgaattaatggataaattcaataatgattttagtatgtgtcttccagaattctcaagac

SEQ ID NO: 8436 - DNA, 394 bp, Bos taurus
  Clone ID: 36-LIB34-013-Q1-E1-A8
agttcacctccacaatatttgcagtgattggagtcctgggtgctggatactcctttattgtttcagccgtttcaatcaacaagggtccaaaatgtttcatgagccaagacagcacatggggctaccccttccaggacggagattacctcggggactctaacttatggagcaggtgccaaaagcctagtgatgtggttccctggaatctgaccctcttctccatcctgctgatcatacgagcagttcagataattatctgtgccatccaggtgatcaatggcctcctggggaccctgtgtggagattgccagtgttgtggctgctgtgggggagatgggccagtctaaacctccatgatgagctgttgtaaattgacggcgtgtgagaagatata

SEQ ID NO: 8437 - DNA, 319 bp, Bos taurus
  Clone ID: 36-LIB34-014-Q1-E1-A12
aggacgcgtggtgtgatttctgccaagtgctctgaatgtcacattgtgcagtttcagttactcgcggatatagggagggagtgactatgattctcttaaggtagtcaaatgcctcgttatataattagtgaagcgcatgagtggttgaacgacattcacaatgtccctatctactatcaagcgaaataacagtcaagggaacggatttggcggaatcaatggggaatgaaaagactgttgagcttgactctactctggtacggtgaaaagatatgacaggtgtataatatgtgagaggcccccggcgcaccctcgtttc

SEQ ID NO: 8438 - DNA, 374 bp, Bos taurus
  Clone ID: 36-LIB34-014-Q1-E1-A8
ccgggtccacccacgagtccgagcggccaagcttgcgcgcaactcccgacaagcggactcccgaacgagatggactgggtgtgggcgctagtcctactgacggctctgggcaccgacggagcggaacgcgacagccgggtgagcagcttccgactcaaggagaacttctacaaggctcgcatctccggaacctggtacgccatggtacaacaacgactccgagggtctgtttctgcaacagaacatcgtcgccgtgttcaccgtggcaaaaacaggtgacatcagcgccacaggcatgggccgagtccgtctcttaagaaactgggacatgtatgcagacatggagggcaccttcagacacactgacgacactg

SEQ ID NO: 8439 - DNA, 387 bp, Bos taurus
  Clone ID: 36-LIB34-015-Q1-E1-A8
ggattccactgagccaccctatagccagaagagatacgaagaaattgttaaggaagtcagcacctatattaagaaaattggctacaaccccgacacagtagcatttgtgccaatttctggctggaatggtgacaacatgctagaaccaagtgctaatatgccatggttcaagggatggaaattcacccttaaggacggcatggcaattggaacaacccggcttgagccccggaatgcaatccggcaacaactcccccaactgacaaacccttgcctttgcctccccaagatgtccaataaaattggtggtattggaacggtcccggtgggtcttgtggaaactggtgttctcaaacctgcaatgggggtcacctttgcccaagtcaa

SEQ ID NO: 8440 - DNA, 422 bp, Bos taurus
  Clone ID: 36-LIB34-016-Q1-E1-A12
cggagagccggagccagagggacggccaagcccaggagccagggaaccgacgaccgagctgatcaaagggtgagaactcagaattcacatggacaagtgaaagccctgggatgattcaacacagaaaagggaaagtagggcatttataacccagcggaaagtgacaaccgtgctcttgacctctctgtgctgaagtcaggagtcatgtggctggaaatactccttgcctcagtgctgggctttgtcatctactggttcgtctccaaggacaaggaggagactttgccccttgaagatggatggtgggggcctggggtgaggcccacagctggggaggataagagcatccgcccattcaaggtggaaacatcagatgaggagatcaatgacttacatcagaggattgacagggtccgtttaac

SEQ ID NO: 8441 - DNA, 388 bp, Bos taurus
  Clone ID: 36-LIB34-016-Q1-E1-A8
cggacgcgtgggattccaggctcggagccccgggcccgccgacaccatgagttggtcctcgcaccctccgagtgtaatcttctacattctttcattgctttcttcagcatgcctggcatatgttgctacccgagacaactgctgcatcttagatgaaagatttggtagttattgcccaactacctgtggaattgcagatttcctgaataattaccaaaccagtgtagacaaagatctacgaactttggaaggcatcttatatcaggttgagaacaaaacatcagaagccagagagctggtcaaagcaatccaaatcagctataaccctgatcaaccatcaaagccaggtaacatagagagtgctaccaagaattccaagagtatgatg

SEQ ID NO: 8442 - DNA, 344 bp, Bos taurus
  Clone ID: 36-LIB34-017-Q1-E1-A12
gcagtgcagtcatggaagggttcgctggtgcaagcatctcctgccaacctggaggcagctcggaacttcgtgcagcaattctccctggccggggctacaaacctgaatggaggtctgcttacgggaattgagatcttgaacaaagctcagcacagtctcccagaactcagcaaccacgcctcaattctcatcaggttgacagatggcgagcccacagaaggggtgatggttcgtacccaaatcctcaagaatgtccgaaatggcatcaagggcaggttcccactcaacaacttgggctttggccatgatgtgaacttgaccttcctgaaggtcatgtccctgga

SEQ ID NO: 8443 - DNA, 405 bp, Bos taurus
  Clone ID: 36-LIB34-017-Q1-E1-A8
aaactttggcacaatgaagtgggtgacttttatttctcttctccttctcttcagctctgcttattccaggggtgtgtttcgtcgagatacacacaagagtgagattgctcatcggtttaaagatttgggagaagaacattttaaaggcctggtactgattgccttttctcagtatctccagcagtgtccatttgatgagcatgtaaaattagtgaacgaactaactgagtttgcaaaaacatgtgttgctgatgagtcccatgccggctgtgaaaagtcacttcacactctctttggagatgaattgtgtaaagttgcatcccttcgtgaaacctatggtgacatggctgactgctgtgagaaacaagagcctgaaagaaatgaatgcttcctgagccacaaaga

SEQ ID NO: 8444 - DNA, 410 bp, Bos taurus
  unsure (380): unsure at all n locations; Clone ID: 36-LIB34-018-Q1-E1-A8
cagcagcacctgaagaaggtttatgccagttttgccctctgtatgtttgtggcggctgcgggggcctatatccatgtggtcacccatttcattcaggctggcctgctctctgccttgggctctttggggttgatgatttggctgatggcaacacctcacagccatgaaactgagcaaaaaagactgggacttctggctggatttgctttccttacaggagttggcctgggccctgctctggacttgtgcattgccatcaaccccagcatccttcccactgccttcatgggcacagcaatgatcttcacctgcttcaccctgagtgcactctatgccaggcgccgtagctacctctttctaggaggtatcttgatgtcggncatgagcctcatgctcttgtcttccctggg

SEQ ID NO: 8445 - DNA, 329 bp, Bos taurus
  Clone ID: 36-LIB34-019-Q1-E1-A8
acaagattttgtatttctgtaaataatgtataagatatgtgaacacatctacgatttttcattgtaaggccagttttactgattaaaagataaagctaggacctttcaggggtgtttcaaacctttgatgtttgatctaaatttagcatttgagggaattagatacttttgattcattgatatcttcccatagtgttaagttactgggtaatttacagatgtagaagctccctttgaaagcccttctttctacttaagagacctaggggtcacttggtttatgggaaatggcaaataagtatctgacaattaagaattcaggttgattt

SEQ ID NO: 8446 - DNA, 417 bp, Bos taurus
  Clone ID: 36-LIB34-020-Q1-E2-A8
ggatgctctattgtttccatcctttatccacagccagaagagaaaccctcaaacgcacctgaaggatccggacatggtctgggacttctggagcctgcgtcctgagtctctgcatcaggtttccttcctgttcagtgatcgagggattccagatggacacaggcacatgaatggatatggatcgcatactttcaagctggttaatgcaaatggagaggcagtttattgcaaattccattataagactgatcagggcatcaaaaacctttctgttgaagatgcagcaagacttgcccacgaagatcctgactatggcctccgcgatcttttcaatgccattgccacaggcaactacccctcctggactttatacatccaggtcatgacatttagtgaggcagaaatttttccatttaa

SEQ ID NO: 8447 - DNA, 332 bp, Bos taurus
  Clone ID: 36-LIB34-021-Q1-E1-A8
ggactgctttatgtgttccagctcatctacaaagtgtctctctattcctgcacagacctcggtgagagcagcaagtttggaaacctcaaaccttgcatcgtctagcaactcagaaaaaagggaaccagtcagaaaaagagtgctggagaaacggggggaagactttaaaaagggaagcgagatatatagattgaggactcacgacgatagtgaagattaaaacaacacctggaaagggaaattcactcaacagaagttatgcgacaagttcaataagtgcaaaaatcaatggttcccctaagaattaaatccaccaaaaatccgccggaaaa

SEQ ID NO: 8448 - DNA, 437 bp, Bos taurus
  Clone ID: 36-LIB34-022-Q1-E1-A12
cgaaggggaaggaggagaagcgcttaaagcggcgggagcgggtgcgggagtggggtaggacccagggctaaggcaggcccccgcccccctccctcccgcctcagtggatcatgcccagggcggcagtggcggcggttgcgggggggaagtgactgggcggtgccggcgcaggagacgatgccgtttccagttacaacacagggatcacagcaaacacagccgccacagaagcactatggcattacttctcccatcagcttagcagcccccaaggagactgactgcctgctcacacagaagctggtggagactctgaagcccttcggggtttttgaagaggaagaggaactgcagcgcaggattttaattttgggaaaattaaataacctggtagaggagtggatacgagaaatcagtgagagcaggaatcttccaca

SEQ ID NO: 8449 - DNA, 416 bp, Bos taurus
  Clone ID: 36-LIB34-025-Q1-E1-A8
gtgtttctcagaaaagaacgtgcagtgaaatagggcggaggcacctgtgactggtgtcgggaactttgtggctgtaaaccaaactcatcctttatttccagtttttcgaggagagtttacatgtacgagaaagcccaaagaggaaggagaaccaaaccctgtcagtcacaccatttcaatatttcagaagcttgaagtgaaataccttttggtgtcacgggtttctctgtagaaccagcctgaaaacagcacctgttagaggctttatgaagagatgaagttctaacattagcagtcagcctcatgtttgtcctcccgtgactgagcaacttgtcaacaaactgtattatgggaatcaggatttacagcgagtctgctaccagtgtagtgggaggaaataagagatgctccttccc

SEQ ID NO: 8450 - DNA, 315 bp, Bos taurus
  Clone ID: 36-LIB34-026-Q1-E1-A8
gaaaacattccaggcaaatctatgcttaggaatggaaagagggaacgtttctggagtagattgctaacactccctgggggtctaggaagacttcctggaggagaccgagaaggacatcctgctgcggcccgagctggaggaactgaggaacgagcactctgcacgcttcaagctctggtacacggtggacaaagcccctgaagcctgggactacagccagggcttcgtgaacgaggagatgatccgggaccacctgccgcccccagaggaggaaccgctggtgctgatgtgtggacccccacccatgatccagta

SEQ ID NO: 8451 - DNA, 310 bp, Bos taurus
  Clone ID: 36-LIB34-028-Q1-E1-A8
acagtctgtagctgcctcgagcagggagctggtggctcttccatccccagaccagccaagcctgtgagtgacaccccagacagaggaaccagagccatgcggagtctcagcggactgctgttgttactgactgcctgcctggcagtaaacgccagctccgtgcccacattgcccgatgacattcaagtgcaggagaacttcgacctgtctaggatctatgggaagtggttcaatgtggccgtgggctccacctgcccatggctgaagaggttcacggagaagatgaccatgagcacagtggtgttgaaag

SEQ ID NO: 8452 - DNA, 415 bp, Bos taurus
  Clone ID: 36-LIB34-029-Q1-E1-A8
accgacttcgccttcagcctctacaagcagttggctttgaagaaccccaataagaatgtcatcttatccccgctgagtgtctccatagccttggccttcctgtctctgggggcccgtggctccaccctgacagagatcctggaaggtctcaagttcaacctcacagagatccaggagaaagaaatacaccatagctttcagcacctcctgcaggcgctcaatcaacccagcaaccagctgcagctgagcgtgggcaacgccatgttcgtgcaggaggagctgaagctgctggacaagtttatagaagatgcccaggtgctgtactcctctgaggccttcccgaccaacttcagggattctgaagctgccaggagtctaataaatgactatgtgaagaataaaacccaagggaaaa

SEQ ID NO: 8453 - DNA, 377 bp, Bos taurus
  Clone ID: 36-LIB34-030-Q1-E1-A8
ctcagcaagcaagtgcagcgagtgaccgtggatgcccctgtcagctctgtggcccttcgccagtcgggaggctatgttgccacagttggaacaaagttctgtgctttgaactgggaagatcagtcagcagttgtcttggccacagtagataaagagaagaaaaacaatcgattcaatgacgggaaggtggatcccgctgggagatactttgctggtaccatggctgaggaaacagctccggcagttttggagcgccgccaagggtccctgtactcgctctttcctgaccaccatgtggaaaagtactttgaccaggtggacatctccaatgggttgggttggtctatggaccacaaaatcttctattacataaatag

SEQ ID NO: 8454 - DNA, 422 bp, Bos taurus
  Clone ID: 36-LIB34-031-Q1-E1-A8
gcgggtcagtacagcagcgatctgcgcaagtgctgcgaagacggcatgcgggacaaccccatgaagttcccgtgccagcgccgggcccagttcatcctgcagggcgacgcgtgcgtcaaggccttcctggactgctgcgagtacatcactcagctgcggcagcagcacagccgcgacggcgccctggagctggccaggagtgacctggatgatgacataatcccagaggaggacatcatttcccgaagccaattccccgagagctggttgtggaccgtcattgaggaccttaaacaagcagacaaaaatggaatctccacgaagctcatgaacgtgtttttgaaagactccatcaccacttgggagattctggccgtgagcttgtcagacaagaaagggatctgtgtggcctgaccctatga

SEQ ID NO: 8455 - DNA, 411 bp, Bos taurus
  Clone ID: 36-LIB34-032-Q1-E1-A12
cagttgtccacgcgagcgccatggccgccttacgtgccctgctgccccgcgtccgcgccccgctgcggccctggctcttctgcccggtgcagcgctccttcgcctcgagcgcagcctttgagtacatcatcacagcaaagaagggaaggaacagcaacgtggggttgatccagctgaaccgccccaaggccctcaatgcgctctgcaacggcctgatcgtggagctcaaccaggcactgcaggccttcgaggaagacccagccgtgggggccattgtcctcacaggcggggagaaggtatttgcagctggagccgacatcaaggaaatgcagagcctcacgttccagaactgttactctggcgggtttttgagccactgggaccagctcacacgtgtcaagaagccagtca

SEQ ID NO: 8456 - DNA, 398 bp, Bos taurus
  Clone ID: 36-LIB34-032-Q1-E1-A8
gaccgattgggttcctttagcagtgatccctctgataagccaccttgccgaggctgctcctcctacctcatggagccttatatcaagtgtgcagaatgtggtccacctccttttttcctctgcttacagtgtttcacacgaggatttgagtacaagaaacatcaaagtgatcatacttatgaaataatgacctcagattttcctgttcttgatcccagctggactgctcaagaagaaatggctcttttagaagctgtgatggactgtggctttggaaattggcaggatgtagccaatcagatgtgcaccaagaccaaggaggagtgtgagaagcactatatgaagcatttcatcaataaccctctgtttgcatcttacctgctgaacctgaagcaagc

SEQ ID NO: 8457 - DNA, 411 bp, Bos taurus
  Clone ID: 36-LIB34-033-Q1-E1-A8
catgaacattaatatgaatatctctgatcctatttattggatcaacagacctactaggcctagtaccccattcattcacaccaacgacacaactatcaataaacctatgcatagccatccccctgtgagcaggagccgtaattacaggattccgcaatacaactaaagcatcacttgcccatttcttaccacaaggaacacccactccagtaatcccaatactagtaattattgaaactatcagcctttttattcaacctatagccctcgccgtgcggttaacagctaacatcactgcaggacacctattaattcacctaatcggatgagctacacttgcactaataagcattagcactacaacagctctaattacattcaccattctaatcctactaacaattctagagt

SEQ ID NO: 8458 - DNA, 448 bp, Bos taurus
  unsure (407): unsure at all n locations; Clone ID: 36-LIB34-034-Q1-E1-A12
aaaaatttcttttgactcgatgtaaaattacctacataaaatttcgttttctctttaaaggaagagtagccttaattttgaaagactagaagcccaacttaaggcatgctactgcaggatcatattttctaaagcaaaggtaaatattttataaagattaaatctgtttatatacctattttcatattcaacatttactttaaaatgtatctcttttagccatctgtgttggcattgtctatcatcgcattggagatccaagcacagaagtatatagagttaacagaaggagtagaacgtcttcagaaacattccaaggtatgtcaaggtcatagcctaaatcctattcacagctgtaaaaaaaactaaaccacttgttcctaaagtaaagtgagatgtcatgtgtntgcttgaaacttaagtaactcacccttaaatttttttgaca

SEQ ID NO: 8459 - DNA, 408 bp, Bos taurus
  Clone ID: 36-LIB34-034-Q1-E1-A8
aaacagcgttgggacggcccatctcctctgttggcgttctcggcttaggaacaatgggccgaggcattgtcatttcttttgcaaaggcccagatccctgtgattgccgtagaatcagacaagaagcagctagagactgcaagcaagataataacctccatcttggaaaaagaagcatccaaaatgcagcagagtgggcacccttggtcaggaccaaaacccaggttaactacatctatgaaagagctcagtggtgtagatttagtcattgaagcaatttatgacgacatgaacttgaagaagcatgtctttgctgaactatcagctgtgtgcaagccagaagcacttttatgcaccaacacttcagccctggacattgaatagattgcttcttccagtgaccgtcctc

SEQ ID NO: 8460 - DNA, 412 bp, Bos taurus
  Clone ID: 36-LIB34-035-Q1-E1-A8
cacaacagcaaatctctgcctgacagacgctcgcctgtgcatgatacactctacaactaactcgcctgagagcggggcccatctccgagcgacgatcatgcagtcagacttagcacagcattgcccataaactgcaggatgagctcctgttgtgagtggtacaaatgtgactcttgcctcattcatgtgtttcgcacaaggagcattcagactcttggtacactttgctgtgctaaagtgtgtggacaccgtcagagacttccattactgtagtcccacatctgcctgctatgactccgaggacggctgtggcatcgatttccattgcagtacaggcaaattcatcaagaatccacttctgtgtaatgaccacactgtctgcgtggactattcatatgaagacaactgtgaa

SEQ ID NO: 8461 - DNA, 189 bp, Bos taurus
  Clone ID: 36-LIB34-036-Q1-E1-A12
aggaaatgagctcctgctctgtcctccagtcgccatcttgtggctgaagctgccagccctccctccatcctttccaacatacacagaaattcacagtggctgctttgcagcagagctgtaattaatgcattttgtattttatcttgtgtgcacatcccaccacaaacataagcggaagaaataacaacg

SEQ ID NO: 8462 - DNA, 384 bp, Bos taurus
  Clone ID: 36-LIB34-037-Q1-E1-A12
acgcaagcctctaaattgtgtcatattacgagcggccgcccttttttttttttttttttttttaacagcaaaggaatgtctttattcagggggcatgggctttggactggcagtcgggggtacagcagtgctatttcggtaggtacccagcaggatggcattgatgtgctccagtgtctgattgctgaagaccatattgaggtgctgtgtccctggcagaggcagcaggtgcacaggctgtttctggcggccctgccagcgggcacagagctcggtgctgcgcgtggccacagtgtcatcaccatcctcatatagcacatccacagggtctgtgtaggggaagccgtggtcatagatctaggtgctgggaatggggaaggctat

SEQ ID NO: 8463 - DNA, 422 bp, Bos taurus
  Clone ID: 36-LIB34-037-Q1-E1-A8
caaaactttggcacaatgaagtgggtgacttttatttctcttctccttctcttcagctctgcttattccaggggtgtgtttcgtcgagatacacacaagagtgagattgctcatcggtttaaagatttgggagaagaacattttaaaggcctggtactgattgccttttctcagtatctccagcagtgtccatttgatgagcatgtaaaattagtgaacgaactaactgagtttgcaaaaacatgtgttgctgatgagtcccatgccggctgtgaaaagtcacttcacactctctttggagatgaattgtgtaaagttgcatcccttcgtgaaacctatggtgacatggctgactgctgtgagaaacaagagcctgaaagaaatgaatgcttcctgagccacaaagatgatagcccagacct

SEQ ID NO: 8464 - DNA, 376 bp, Bos taurus
  Clone ID: 36-LIB34-038-Q1-E1-A12
gcgctggtcgacgcaagaccctagggtgagtcgtagtaggcgggcgcgcgtggcgccggcgcagcaacgtcgtgaatcgccggctgcgcggccgtgagtgtgcgcttttcccgggcccggccgcgtcgtcgcataggcatgagctacgaccgcgccatcaccgttttctcgcccgacggccaccttttccaagtggagtacgcgcaggaggccgtgaagaagggctcgaccgcggtcggtgttcgaggaaaagacattgttgttcttggtgtggagaagaagtcagtggccaaactgcaggatgaaaggacagtgcggaagatctgtgcgctggatgataatgtctgcatggcattcgccggcctcactgctgatg

SEQ ID NO: 8465 - DNA, 427 bp, Bos taurus
  Clone ID: 36-LIB34-038-Q1-E1-A8
gctgcgctgtcgctcctcctgatccgcggggggtgcgtcgtcaacgacgactcctcgcaggaggccgacgtgctggtggaggacggcgtggtgcaggcagtggggcgccacgtgctgccgcccggggacgcgccagccgggctgcgggtcctcgacgccgccggcaagctggtcctgcccggcggcatcgacacgcacacacacatgcagttccccttcatgggctcgcgctccgtggacgacttccatctgggcaccaaggctgccctggcaggaggcaccaccatgatcatggattttgctattccacacaaaggccactccctcattgaggcctttgacacctggcgaagctgggctgacccccaagtctgctgcgattacagcctgcatgtggcagtgacgtggtggagtgaccaggttaaag

SEQ ID NO: 8466 - DNA, 334 bp, Bos taurus
  Clone ID: 36-LIB34-040-Q1-E1-A8
caaaaatttggagaaagagctttaaaagcatggtcagtagctcgcctgagccagaaatttcccaaggctgagtttgtagaagttaccaagctagtgacagatctcacataagtccacaaggaatgctgccatggcgacctacttgagtgcgcagatgacagggcagatcttgccaagtacagatgtgataatcaagatacaatctccagtaaactgaaggaatgctgtgataagcctttgttggaaaaatcccactgcattgctgaagtacaaaaagatgccatacctgaaaacctgcccccagtaactgctgactttgctgaagataaggatg

SEQ ID NO: 8467 - DNA, 418 bp, Bos taurus
  unsure (291): unsure at all n locations; Clone ID: 36-LIB34-041-Q1-E1-A8
atgggaaactccagcatccgggcaggcggcggctctggatccactgcccacaccccgctctcgcaggcagacatgaggacagagagaatgtcccccctcctggctctggggatcctggtggctgggctctgctccagggtccactgcctcccagagaatgtgaccccagaagaacagcacaaagtgacatctgtggatggccactcattagcctccagcaacactgacttcgccttcagcctctacaagcagttggctttgaaggaccccaataagaacgtcatcttctcncctctgagcatctccatagccttggccttcttgtccctgggggctcatggccccactgtgacagagatcctggaaggtctcaagttcaacctcacagagacccccgagacagaaatccaccagggct

SEQ ID NO: 8468 - DNA, 410 bp, Bos taurus
  Clone ID: 36-LIB34-042-Q1-E1-A12
caaatacatcacacgttagagatgttatctggagtcaagaggagcctcagaacatgggtccttggttttttgtttctccaaggtttgagaagcagctggcctgcaagctccgtcttgtgagccgacccgcgttgcctgtaccggctgtgggaatcggcaccattcacctacagcagcatgaagaaatcctcactaagaccttcaacccatgacgtcctttgaagaaacactacttccttataagaaaactgccataaaaagaaaggcttgtctcctccactcgctaggtaccatgaaaagattgtattcctagaagacattgagactgatgagggtggacgagaggtaaatctagaatacatggaacagccaaaagaattgttcttttagacatgaatcccacaagtcac

SEQ ID NO: 8469 - DNA, 291 bp, Bos taurus
  Clone ID: 36-LIB34-042-Q1-E1-A8
ctcggagtgtaatcttctacattcattcattgctttcttcagcatgcctggcatatgttgctacccgagacaactgctgcatcttagatgaccagatttggtagttattgcccaactacctgtggaattgcacatttcctgaataattaccaaaccagtgtagacaaagatctacgaactttggaaggcatcttatatcaggttgagaacaaaacatcataagccagagagctggtcaaagcaatccaagtcagctataaccctgatcaaccatcaaggccaaataacata

SEQ ID NO: 8470 - DNA, 278 bp, Bos taurus
  Clone ID: 36-LIB34-044-Q1-E1-A12
actcgtcggtcgacgcacgccactagaatgcgtcggtgtactgtggcctgtcctgtcatatagctacacaactgatggtgtacattgcaagaacataccagatagagggtatcttgctgttactgtggttaggagatcagatgctaataccatctgggacaatctgaaagaaatgaagtcatgccacactgcagtagatagaagcactggcaggaaaatccccatgggtttgctctataacacgattaataactgtatattatggcactttttcaacg

SEQ ID NO: 8471 - DNA, 388 bp, Bos taurus
  Clone ID: 36-LIB34-044-Q1-E1-A8
tgacagggctgaggaccgctccatcttctcagctgtcttggatgagctgaaggtggctcaggcaccatggaaagctgttaacactttgaatgaggcattggaatttgcgaagtctgtgggcttcccctgcttgttgagaccttcctatgttttgagcgggtctgccatgaatgtggtattctccgaagacgagatgaataaattcctataggaggccactagagtgtctcaggaacacccagtggtgctgacgaaatttattgaaggggcccgggaagtggaaatggatgctgtccgcaaagatggacgagtcatctcccatgccatttctgaacacgtggacgatgcgggcgtccactcgggggatgccactctgaagctgcccaca

SEQ ID NO: 8472 - DNA, 358 bp, Bos taurus
  Clone ID: 36-LIB34-045-Q1-E1-A8
taaagatattggtaccctttatctactatttggtgcttgggccggtatagtaggaacagctctaagccttctaattcgcgctgaattaggccaacccggaactctgctcggagacgaccaaatctacaacgtagttgtaaccgcacacgcatttgtaataatcttcttcatagtaataccaatcataattggcggattcggtaactgacttgttccccgaataattggtgctcccgatatagcatttcccccaataaagaatatcagcttctgactcctcgctccctcattccgactactcctcgcatcctcgagagttgaagctggggcaggaacaggctcaaccgttgtaccgccc

SEQ ID NO: 8473 - DNA, 314 bp, Bos taurus
  Clone ID: 36-LIB34-046-Q1-E1-A12
cgcacgcctctatggaggctcgaatgattcgatccgttatccacagccagcacagaaatcctcatacgcacctgacggatccgggtatggtcagggacttctggcgcctgagtcgtgagtctgggcatcaggtttccttcctgttcaatgattcagggattcgagatggtcataggcacaggaatggatatggatcgcatacattcaagctgggtagtgtaaatggagaggaattttattgcagaattctagtataagactgatcagggcatcattaacctttctgttgctgatgcatgcaagatgtgcacatc

SEQ ID NO: 8474 - DNA, 230 bp, Bos taurus
  Clone ID: 36-LIB34-046-Q1-E1-A8
agctgctcggatggctgaggctttgatgctaccaccctggatgagcatgggaacatgctgtttttaaaaagggagtttgtgtggaagggtcatgcctgggcccggcagttgatctcagagaggtggaaggatgcccccagtcccgtgggatgctgcattccgcgatgatcgtgacagtgtccttctgatcaaaggggaaacagtccgggtagatccgccgtgagaagggg

SEQ ID NO: 8475 - DNA, 427 bp, Bos taurus
  Clone ID: 36-LIB34-047-Q1-E1-A8
attaactgctgactttgctgaagataaggatgtttgcaaaaactatcaggaagcaaaagatgccttcctgggctcgtttttgtatgaatattcaagaaggcatcctgaatatgctgtctcagtgctattgagacttgccaaggaatatgaagccacactggaggaatgctgtgccaaagatgatccacatgcatgctattccacagtgtttgacaaacttaagcatcttgtggatgagcctcagaatttaatcaaacaaaactgtgaccaattcgaaaaacttggagagtatggattccaaaatgcgctcatagttcgttacaccaggaaagtaccccaagtgtcaactccaactctcgtggaggtttcaagaagcctaggaaaagtgggtactaggtgttgtacaaagccggaatcagaaagaatg

SEQ ID NO: 8476 - DNA, 423 bp, Bos taurus
  Clone ID: 36-LIB34-048-Q1-E1-A12
gtaaaagctgaagggaaaggacaaggcaccttgtcggtagtgaccgtgtaccatgccaagctcaaaggcaaagtctcctgcaaaaagttcgacctccgggtttccatacgcccagcccccgaaacagtcaagaagcctcaggacgccaaaggttccatgatccttgacatctgtaccaagtacctgggagaccaggatgccactatgtccatcctggatatatccatgatgacaggcttctcacctgatgttgaagacctcaaaacgctgagcactggtgtcgacagatacatctctaagtatgagatgaacagagactccaacaagaacacactcatcatctacctggacaaggtctcacacacagtggacgactgtctgtccttcaaagttcaacagtactttaatgtcggacttatacag

SEQ ID NO: 8477 - DNA, 422 bp, Bos taurus
  Clone ID: 36-LIB34-048-Q1-E1-A8
aacggcctacattgccttggccctgctctctgtgactatcagctttaggatatataagggtgtgatccaggctatccagaaatctgatgaaggccacccattcagggcatatttggaatctgaagttgctatatctgaggagttggttcagaagtacagcaattctgctcttggtcatgttaactgcacaataaaagaactcagacgcctcttcttagttgatgatttagttgattctctgaagtttgcagtgttgatgtgggtatttacctatgttggtgccttgttcaatggtctgacactactaattttggctctgatttcactcttcagtgttcctgttatttatgaacggcatcaggcgcaaatagatcattatctgggacttgcaaataagaatgttaaagatgctatggctaaaa

SEQ ID NO: 8478 - DNA, 441 bp, Bos taurus
  Clone ID: 36-LIB34-049-Q1-E1-A12
actcgtgggtcgacgcaagcctctagggtcagtcggaggatgtgtacagcagtgaggagcctgcagaggaacatggcgctgctctgggggctcctggcgctcatcctctcctgcctgtcaagcctgtgctcagcgcagttctctcctgtgagcaccatggagcccttggatctgcagctaatggacgggcaggcccagcagaagctgcccccactttccctcctcaagctggacaaccaggagccaggtggccagattgccccgaagaaggccccagaagactgcaagttgtccccaacccctgagcagacacgcaggctggcccgggccatgatgaccttcaccacagacctcttctccctggtggcccaaagctccaccaggcccaacctcatcctgtcacctctgagtgtggccctggccctgtctcacctggcacta

SEQ ID NO: 8479 - DNA, 430 bp, Bos taurus
  Clone ID: 36-LIB34-049-Q1-E1-A8
attttgtgcctaccaccagataaggctactgtgtccgacgggagtcagactgttgttggtgttgtttttctggatgtgctaggtcttcactgctgcacgcaggcttttctctagttgcagcaagcaggggctactcttcattgcagagcttggacttctcattttggtggcttctcttgtagcggagcacgggctctaggggcacgggtttcagtagttgtgatgcactggtttagttgccccatagcaaatgcgatcttcccggaccaggcatggaacctgtatctcctgcattgcaagacagattcttagctactggactaccagggaagccctagaagtcagactccttaataaaatggatggggaagagaagctctttcggagaaatgccagaagtttggtagtggcgcagccatgtctctgtgtg

SEQ ID NO: 8480 - DNA, 431 bp, Bos taurus
  Clone ID: 36-LIB34-050-Q1-E1-A8
ggcctccctgtccatcaccaattcccggagtttactcaaattcatgtacattgagtcggtgatgccatccaaccatctcatcctctgtcatccccttctcctcccgccttcaatataagtcttatcaaactatttataaggctttttcagaaatgtttagcaaatgggaattattaacacgatacagaacctagaactcctaagataaaatattgcatctaatccttagtttaggaagaaaccagtatacttatttcagtattatagaggtgagggcattggtatagaattcaaggtattatgttattgaacgcctgtactcccagctttgtctggaagtggtgttatctttgcacaaaagaagtgcataaagttatttaaacatccgtgattagtttttccactttgaatagaatgtactcagtggctaa

SEQ ID NO: 8481 - DNA, 181 bp, Bos taurus
  Clone ID: 36-LIB34-051-Q1-E1-A8
aggaggcttgtaaagctaattagaaggctgtgtgctgtggagggtccaaaacttgttgtttcaactcaaacagccttagcctaaacacgacacaaccacaggcatctcagcctaccctgagagtaagaggaaaaaagagaaatgaaaactcagagcttattcatctgttttccttttctgt

SEQ ID NO: 8482 - DNA, 233 bp, Bos taurus
  Clone ID: 36-LIB34-052-Q1-E1-A1
gctttttaatatgctgtctaggttggtcatagcttttcttccaaggaacaagcgtcttttaatttcatggctgcagtcaccatgtgcagtgattttggaaccccccaaaataaagtctgtcactgtttccatatctatttgccatgaagctaacctaaaaatccttaagaatgacacttcctagtaataagagaaaatagccataatctttctaaggtgaaaagaatgggtgg

SEQ ID NO: 8483 - DNA, 243 bp, Bos taurus
  Clone ID: 36-LIB34-052-Q1-E1-A12
ctgttgtccagtctgatatgaaacattggcccttcatggtggtgaatgatgctggcaggcctaaggttcaagtagaatacaagggagagacaaagagtttttacccagaggaggtgtcatccatggtcctgacaaagatgaaggaaatcgcagaagcctaccttgggaagacggttaccaacgctgtcgtcacagtacctgcctattttaatgactctcagcgtcaggctaccaaagatgctg

SEQ ID NO: 8484 - DNA, 351 bp, Bos taurus
  Clone ID: 36-LIB34-055-Q1-E1-A8
gtggccttctttgaggagagagccctccagctaggcctgggctgtcagaaagtggaggtggcacctggccgtgtagtgactgtgttaacctggccaggcaccaaccccaaactctcctccgtcttgctcaactcccatacggatgtggttcctgtcttccaggaatattggagtcatgatccctttgaggccttcaaggatgcagacggctacatctatggcaggggcgcccaggacatgaagtgtgtcagcatccaatacctggaggctgtgaggaggctgaaggctgaaggccaccatttccccagaaccatccatttgacctttgtgccagatgaggagattgggggt

SEQ ID NO: 8485 - DNA, 322 bp, Bos taurus
  Clone ID: 36-LIB34-056-Q1-E1-A12
ggtcaacccacacgtccggtggtgactctcatctgctccaagatgaagccactgtggaccctcctctttgtggtcgcagcccccagacgggtcctgtcccaggtgcagctgcgggagtcgggccctagcctggtgaagccctcaaagaccctctccctcacatgcaccgtctctggattcgcattgcccatgtatagtgtaagctgggtccggcaagctccagagaacgcgtgggagtgtcttggtagtctcataggcatctggacgtttcagacttaccccagtcctgaaatcccgtctcatgatcaccaaggacagttcc

SEQ ID NO: 8486 - DNA, 371 bp, Bos taurus
  Clone ID: 36-LIB34-056-Q1-E1-A8
gattaatggtttaaaaaaaaaggcaatgcctttttctcattagttgaacaagaaactgaagaaatattacctatatgttttacaatatttttctcttccaaaatttatttctgaaaacaagttttaaccaccgttctgcactttgaaataaaattaatcctgactagatcagtataatggacaagaccagaacatttcttaggactcctggtactctactttaagtaacaaagggttggagaaaatgaaccacccttaaagatacaagcttggttaacactgttaaattctccaagacaaaaactcttccgattcttccagtttggaaggggaaaacaaaatttccacttttgggaatagagacccagaac

SEQ ID NO: 8487 - DNA, 220 bp, Bos taurus
  Clone ID: 36-LIB34-057-Q1-E1-A8
aattgatgtacggagtaccttttgaacttccttcagaagctcagtcaaaagattttctgatccctattggaaaagccaaaatagaaaggcaaggaacacacgtaactatagttgctcattcaagacctgtgggccactgcttagaagctgcaacagtactgtctaaagagggaattgaatgtgaggtgataaatttgcgaaccatcaggccaatggacat

SEQ ID NO: 8488 - DNA, 223 bp, Bos taurus
  Clone ID: 36-LIB34-058-Q1-E1-A8
cgtaaactataacctaggggtttctgttggatggttggcaactaagaatggaggaagaacaacatagacatgttctccactttcttatttctcaaaacaatgttatcttcgtctttttaatcttaggtttttaacagattaaacctttaaagcaagaagtgaattctgtcttttcagacccagaaatacacatgaatactttgctatgattacattttagata

SEQ ID NO: 8489 - DNA, 209 bp, Bos taurus
  Clone ID: 36-LIB34-059-Q1-E1-A12
ggaggccatgagactttagccaccagtaccagtcatcaacatagagctgatcacgcccatcaccttccctgatggacgctccttacctgcaggaatcttagtctccctctccagtttatgggcttcatcacaacccgaaggtgtggccgaacccatacgtgtttgacccagctcagtttgcgccaggttctactcgacacatccatgcc

SEQ ID NO: 8490 - DNA, 206 bp, Bos taurus
  Clone ID: 36-LIB34-059-Q1-E1-A8
aaactatttcaaaagttatattaggcccagaaatcaaaagagtcagccagactctttttttgtttttatgttcaacaagatcttacatttattaagaaatgattaatggtttaaaaaaaaaggcaatgcctttttctcattagttgaacaagaaactgaagaaatattacctatatgttttacgaatatttttctccttccaaaaa

SEQ ID NO: 8491 - DNA, 173 bp, Bos taurus
  Clone ID: 36-LIB34-062-Q1-E1-A8
tattcttgaccctttttatcatctttcaactaaaagtttcaaaacacaacttttatcacaatccagaactgacaccaacaaaaatattaaaacaaaacaccccttgagaaacaaaatgaacgaaaatttatttacctcttttattacccctgtaattttaggtctccctctcg

SEQ ID NO: 8492 - DNA, 349 bp, Bos taurus
  Clone ID: 36-LIB34-063-Q1-E1-A8
ccacgcgtcaagatgccgtgagccagcagatctttgtacagaatattgatacagttgtgttcgttgggaattttctcagaatcaatatggtctccatgaagctgctagcatacgccatggatttttggtccaaaggacagctaaaagctctgtttttggaacatgaaggttactttggagctgtcggggcactgttggaactgttcaaaatgcctgatgaccagtaaagatgagccatagacatggagcagccctctgtgatgacagggacgcaagctctgctgctggagaaggtgagagccacaggacggaagccaagccattatggcagatgaacctgctggatttg

SEQ ID NO: 8493 - DNA, 388 bp, Bos taurus
  Clone ID: 36-LIB34-064-Q1-E1-A8
aaacggagctggtggctcttccatcgccagaccagccatgcctgtgagtgacaccccagacagaggaaccacagccatgcggagtctcatcggactgctgttgttactgactgcctgcctggcagtaaacgccagctccgtgcccacattgcccgatgacattcaagtgcaggagaacttcgacctgtctacgatctatgggaagtggttcaatgtggccgtgggctccacctgcccatggctgaagaggttcaaggagaagatgaccatgagcacagtggtgttgaaagcggtgccgacgagcaatgagatcagcgtcaccaacactcacatgcggaaaggtgtctgtgaatcgatctctggtacttatgacaaaacaagcactgat

SEQ ID NO: 8494 - DNA, 201 bp, Bos taurus
  Clone ID: 36-LIB34-065-Q1-E1-A12
ggagtgaccaacttcaaaccaggtgacaaagtaattccactccacgcacctcaatgtggaaaatgcaagttctgtctaagtccacgcacaaatttttgtggaaaactcaagcattttaaaaatcctatgggtgatcaaaaattaatggaagatggaaccagcaggtttacctgcaaaggaaaaccaatttaccatttcatg

SEQ ID NO: 8495 - DNA, 211 bp, Bos taurus
  Clone ID: 36-LIB34-065-Q1-E1-A8
cacagcacacagccttctaattagctttacaagcctcctcctcatccgccagtttggcgacaccagccttaatttttcactactatttttcgccgactccctatccactccactactaattttaaccatatggctcctccctctaatactaatagctagccaacatcatctatcaaaagaaaacctaacccgaaaaaaactatttattact

SEQ ID NO: 8496 - DNA, 230 bp, Bos taurus
  Clone ID: 36-LIB34-066-Q1-E1-A8
tctcatttgctcctggctcagtgaccccttaaaaactgtcctcgatggttttctcagtcacccccaccctgctgccctcagcctttgacctggaagttatcaatattgattccagtaccttatgttctttcttccttggttccctttgttttcaacttctgtttcctgtgcatctgagctcatctgttcattttactttataatgtgttctctcaaataaatacggagtg

SEQ ID NO: 8497 - DNA, 239 bp, Bos taurus
  unsure (178): unsure at all n locations; Clone ID: 36-LIB34-067-Q1-E1-A8
gaaccagacagcacagccatgctggaggcactgggctccctggtggctgccctctggaccacgctccgtcctggcattgtcctactgggggcctttgtctttctcctctttgctgatttcctcaaaaggcagcacccaaagaactacccaccagggcccctgcgcctgcccttcatangcaatttcttccacctggtacttgggtgaaagggaatctatggttccgtcagcagtgttgt

SEQ ID NO: 8498 - DNA, 411 bp, Bos taurus
  Clone ID: 36-LIB34-071-Q1-E1-A8
acacccactaataaaaattgtaaacaatgcattcatcgaccttccagccccatcaaacatttcatcatgatgaaatttcggttccctcctgggaatctgcctaatcctacaaatcctcacaggcctattcctagcaatacactacacatccgacacaacaacagcattctcctctgttacccatatctgccgagacgtgaactacggctgaatcatccgatacatacacgcaaacggagcttcaatgttttttatctgcttatatatgcacgtaggacgaggcttatattacgggtcttacacttttctagaaacatgaaatattggagtaatccttctgctcacagtaatagccacagcatttataggatacgtcctaccatgaggacaaatatcattctgaagagcaac

SEQ ID NO: 8499 - DNA, 422 bp, Bos taurus
  Clone ID: 36-LIB34-073-Q1-E1-A8
actgcatcctcgcgtggctgaaggagcaaggctatgacgtcattgcctacctggccaacatcggccaaaaagaagactttgatgaagccatcaagaaggcgctgaagcttggggccacaaaggtgttcattgaggacatcaacaaggagtttgtggaggagttcatctggccggccatccagtccaacgcactgtacgacgaccgatacctcctgagcacctctctcgccaggccctgcatcgcccgcaagcatgtggagatcgcccagcgagaaggagccaagtatgtgtctcacggcgccacaggaaaggggaacgaccagatgcggtttgagctcacctgctactcgctggccccacagatcaaggtcatcgctccctggatgatgcccgagttctataaccgcttccagggccgcaag

SEQ ID NO: 8500 - DNA, 431 bp, Bos taurus
  unsure (412): unsure at all n locations; Clone ID: 36-LIB34-074-Q1-E1-A8
aagaggcatgtcaggtggtctggtattcccatctttttcagaattttccacagtttattgtgactcacacagtgaaaggctttggcatagtcaataaagcagaaatagatgtttttctggaactctcttgctttttccatgatccagcagatgttggcaatttgatctctggttcctctgccttttctaaaacccgcttgaatatctggaagttcacagttcatttattgctgaagcctggcttggagaattttgagcattactttactagcatgtaagaatgccaagagaatgcactggtcatagggaaataccctcttccaataacacaggaaaagactgttcacaaagacatcaccagatgggcaacaccaaaatcagattgattatattctttgcagccaaagatggngaagctctacacagttagc

SEQ ID NO: 8501 - DNA, 356 bp, Bos taurus
  unsure (114): unsure at all n locations; Clone ID: 36-LIB34-075-Q1-E1-A8
tgcgtcgtattaagggtttttggtccaatgggagttctgatgaatgctgtttctgtggctgcacgatgagtagtggaagagaatacggacattgctgtctccaaccttcacaantgggaagctcaatcgagatgttcactatcattgagaagtgtggagacgtcttcgtgaggacactgtggaaggttgcaaagtgaggcacatccgtccacatgaaatacgtccttggggcctacatcatggaggtgattactagcacatcatctcgggtaactcttgattcccttggcacaccataagatctctttgtcgctattgccaagaagcactcatcatgtaaaatccttgatgcattt

SEQ ID NO: 8502 - DNA, 410 bp, Bos taurus
  Clone ID: 36-LIB34-076-Q1-E1-A12
tacaacacccagtagtgagtcgtattaaaactatggttcagaagaacagattaagcgcttcatccctgagatggttgcagggaaatgtattggtgccatagcaatgacagagcctggggctggaagtgatttgcaaggaataagaacaaatgccaaaaaggatggaagtgactggattctcaatggaagcaaggtatttgtcactaatgggtggctgtgtgacattgtgatcgtagtagcgatcacaaatcgagaggctcactctcctgcccatggcattagcctttttctggtggaaaatggaatgaaaggatttatcaagggacgaaagctagataaaattggactaaaagcccaggatactgcagaatttttctttgaagatgtacgggtgccagcaagtgccctgc

SEQ ID NO: 8503 - DNA, 484 bp, Bos taurus
  Clone ID: 36-LIB34-076-Q1-E1-A8
gggtcgacgcacgaatccggttagacccgtgtaactaaaataataaattggcaattgaatggaaaaggtaagatttactgagcaaaataattagttgatcacattagaaaaaaaaatccttcacccttgaggaggtggaatggatgatggatgggccaagtaccagccccaaattcaagaatagtttttgaaatttgtattttatttaatttgatacgtttttttttttttcttggttaaagaaaattattttacttcggttacaataactttttgctcacactcttaaacaagagggtttccctggtagctcagctggtaaggaatctgcttgcaatgcaggagatcttgattcctgggtcaggaagaacccctgtagaaggaataggctacccattccagtattcttggacttccctggtggctcagatggtaaagaatctgcctgcaatgttggaaactgggttcaatccctgggttggga

SEQ ID NO: 8504 - DNA, 241 bp, Bos taurus
  Clone ID: 36-LIB34-077-Q1-E1-A8
cgggtcgacgcaaacgtccgggtagacacgccgaacaaagtcagctttctccagtctttctacgtcccagaatctgtctcctgctcaagataacccggtgaacgttgatctccctccagtgtcagagcagattatgcagactctgagcgaacttgccaagtctttccaagatatggctgaccgctgcttgctggtcctacacctggaagtcagggtccactggttccactaactcatccct

SEQ ID NO: 8505 - DNA, 226 bp, Bos taurus
  Clone ID: 36-LIB34-078-Q1-E1-A12
tatagaaagtcgtattatggcgactctcagctacgacagggacacgaatgatgtggtcgctcctaactgtgtcacgtagggatctaaaaatggatctcactgctctgaaaaggtctcaagcggccgtcttcctgttttgcttcggaaatcggggacatgatcacgattgaacattctgacttatccattgcggatatcgcttatgaattgggtgtgatgtggtctg

SEQ ID NO: 8506 - DNA, 330 bp, Bos taurus
  unsure (23)...(24): unsure at all n locations; Clone ID: 36-LIB34-078-Q1-E1-A8
catatagtacgtcgtattaaganntatcaggactttcctcacttttaggagcccccagcttcgttagcacaattatcaacatagagcctccctcattgtcacagtgccatacccctctgttcgggggatccgtaataagtaccgccgttctaggacgactctcgctcactgtattagcagccggcatcatatgtgctattaacagatcggaatctagatacaaccttcttcgactcggcaggaggaggagaccctagtctatatcaggacttattctgattctttggtcaccgcgaagtctatattttagtcgtacctgggtttggaata

SEQ ID NO: 8507 - DNA, 414 bp, Bos taurus
  Clone ID: 36-LIB34-079-Q1-E1-A12
gcctcagaccacactatctccactcgctcagacctgtggaagattagcgaccatgatttccaatgggataggaaccgtcaccgctggaaaaaggagtatatgtcttctccctttgctgcttattggcctctggggctgtgtgacctgtcatcggagccctgtggaagacgtctgcacagccaaacctcgggacattcctgtgaatcccatgtgtatttaccgttcctcagagaagaaggcaactgagggccaaggctccgagcagaagatccctggggccaccaaccggcgggtctgggaactgtccaaggccaattcccactttgccactgccttctatcagcatttggcagactccaagaataacaatgacaacattttcgtgtcacccctgagtatctccacagcttttgc

SEQ ID NO: 8508 - DNA, 426 bp, Bos taurus
  Clone ID: 36-LIB34-082-Q1-E1-A12
accccacaaaactttggcacaatgaagtgggtgacttttatttctcttctccttctcttcagctctgcttattccaggggtgtgtttcgtcgagatacacacaagagtgagattgctcatcggtttaaagatttgggagaagaacattttaaaggcctggtactgattgccttttctcagtatctccagcagtgtccatttgatgagcatgtaaaattagtgaacgaactaactgagtttgcaaaaacatgtgttgctgatgagtcccatgccggctgttgaaagtcacttcacactccccttggagaagaaatgggttaagtttgcacccttcgtgaaacctatggtgacatggctgactgctgtgagaaacaagagcctgaaagaaatgaatgcttcctgagccacaaagatgatagcccagac

SEQ ID NO: 8509 - DNA, 416 bp, Bos taurus
  unsure (345): unsure at all n locations; Clone ID: 36-LIB34-082-Q1-E1-A8
gccaggaggagcgcgcgggcagcggtgaccgaggcgtgctgggattccagaagtggagaaggaggcaagatgaagactctactgctgttgatggggctgctgctcagctgggagagtggctgggcaatctcggacaaagagctccaggaaatgtccaccgaggggagtaagtacgtgaataaagaaattaaaaatgccctcaaggaggtgaaacagataaagacccaaatagaacaaaccaatgaagagcgcaaattactgctcagctccctagaggaagccaagaagaagaaagaggacgccctgaatgacaccagggattctgaaaacaagctgaaggcgtcncagggggtgtgcaatgagaccatgacagccctttgggaggaatgtaagccctgcctcaagcagacctgcat

SEQ ID NO: 8510 - DNA, 371 bp, Bos taurus
  Clone ID: 36-LIB34-083-Q1-E1-A8
aatgctttcagacgggttaaggcacatagacacggagtttagtgcaccttccagtacagaacagatcacggtacaacaacactttctgtcggctatggaccaggacctgcacactaagatcctgactaagggctccgcgatcgttgcaaggccagtgacacatgcaacaacacgtcctgcacattatagatccaattcatgacagtaactaatgcatatactattccatttaatccatgtatgctgtacaacagtttggactcacagtgtactatcgcctgtagccagttggaacagtgggcataaaccgaaacccacttgattactttgcagaggatcaacagttagcttttgaaccacataacatgccg

SEQ ID NO: 8511 - DNA, 422 bp, Bos taurus
  Clone ID: 36-LIB34-084-Q1-E1-A8
gctaaattaattgaatgtggctggaaggatcagttgaaggcacactgtaaaggtaattaaagaaaagggactagaacacgttactgttgatgacttggtggctgaaatcacaccaaaaggcagagccctggtacctgacagtgtaaagaaggaactcctacaaagaataagaacattccttgctcagcatgccagcctttaagattgaattagattgtgttgttttgtggttttatttctaaagtaaaacttgccataaattaggaatcgatttcccaaaataaaatccttttttgtatgatggtatacagttttcagtaatgatgtatacattgtattgatttttttccctaaatgtgttattttaataaatatctcatgaatgagtttgaagtttccttggattttggaataaatgggac

SEQ ID NO: 8512 - DNA, 390 bp, Bos taurus
  Clone ID: 36-LIB34-085-Q1-E1-A8
agcaataggggcccctgaagctgaaaggcgtcgcagagctcggagtgactaagcggaagaataaaaagaaagacaaagacaaggcgaaactcctgtaagcgatgggaacgagcaaaaagaacgaggaggagaatcgacacggtctggacatacggacaccggcccaagcggtatttgagaagatgcaggataagcggcatatggaacggatcctgacgaatgcatccataacccacaagcagagagtagaggacttcaacagacacctggacacgctcacagagcactatgacattcccaatgtcagctggaccagttaccaggctcaccatgggtaccgattggcatcgatgaggagcagaaggcaacgtcgcggctatgtttggggcc

SEQ ID NO: 8513 - DNA, 463 bp, Bos taurus
  Clone ID: 36-LIB34-086-Q1-E1-A8
catgagcacctccgacctgaagaatgagctgaagcggtgcctcagacagccccaggacaagaagcctgaggagctcaccatcccaggggacgctggaggaccctgcgcaccacacacacagaagaagcctgtgaagaaggtcgtgaacgaagagaagaagcccaggaaacctggctctgccttactcaacaagcctgtcacctttggatcctcggaacacttagtgaatcccaaactaactgtccaggagggtgcagccaaagcccctaccgtgccgccgacctcagcgtctctcaacgcctaggtgctggagaacttcctaaccatgtccaggccggagctcctggagtatgtggttaaagttgtcctggactacaacaccgcccacagcaaggtggccctgtccgagaactacaccgtcgcgtccgtggctgacgcgtctctgaactaccggccgcatccc

SEQ ID NO: 8514 - DNA, 429 bp, Bos taurus
  Clone ID: 37-BOVMS1-001-Q1-E1-B2
aagaaaactgcctaattaacataaccctaaattggaattactcaaatttgaattcacctatgaaacatacaattcaaagtaacagtataaatgtgaaatgcaaatgacaagcctggaaaggtaaactgtgaatcttcatttctaacattgatccaagtttctatattgggtcaatatattgtatttaggtggtgtttaaaaagggtaacctacttaaactatgaggtttacatcacaaccaccatttcacaaatgcactttttaaggcacaataacggtcactattctagacagtgagaatagttagtttcttggcacctataatgcaagtaattattaacccagagatgtggaccttactgctacatagaaatcacatttaaatttgacggcatttatgtaaagcacaactaacaactcattaatttt

SEQ ID NO: 8515 - DNA, 319 bp, Bos taurus
  Clone ID: 37-BOVMS1-002-Q1-E1-B2
agaatactgtcgcgcctgtgcgacacatcggttacgatgggaaaagactgtgtattatcagtccttccggagtctatgaccaacgttttttgcaattactgagattccacaatttattgactgggattccagtaacacatggcataccatttgataaatgtagtcattggggaatgctgatttaacagaatattccaaaatgcgacatcccagaatacggggaatatttcaagcatcctatatcaaaatagactgccccaactttccttgaggggcctgaaaacaattatgaatcaacagtggctatccatcaaattga

SEQ ID NO: 8516 - DNA, 471 bp, Bos taurus
  Clone ID: 37-BOVMS1-003-Q1-E1-B2
ggtcggttcatccgggtcgcccacgcgtccgctataaaagaattgccggataaaattggcaacacgtaatttgcaagctggattcccaattgtaattgttcattcgtggtaatctagtttctataaaaacgtatttttgcacaacatttttaacaatcggtgtaccttcatctaggatgtgttccattttggcaaacagctttccggcataaatccagagaagtgctttatatgaagtttattactttgagcagagtttgtgatttagtattttatgttgttggatttgaattttagagttcttagataattatttcaaatggctattgatgcattcatgttaccagataattggaccattccgtcttgatggcagattagttgtttgggaaatcagtatttttctagaaatgggcaaccctttaaagagaaaatactttaagggaagttttgggaaagattttttttttt

SEQ ID NO: 8517 - DNA, 374 bp, Bos taurus
  Clone ID: 37-BOVMS1-004-Q1-E1-B2
gggtcggccacgcgtccgggttaacaagcaaggatcaaaggacaagaaaagccagacaaaatgatcggagcaacatttgttccccccaaatccaaaaaatttaagtcaaaaggtcactaccaattggttgtggacaaccatttacttggtgtaaagaacttaatttcagtataaactggctctgggcagcattggtgatggatgctgtgtcctgagttgtagccgctgtaattgtgaatattaactgagatagtgaaacatggtgtcagttttctattgcattttttcaagtggaaaagttcactaaatggttgacacacacaaattggtggagaaattgtgcatatggcaaatttaaggtaaaaatctttaat

SEQ ID NO: 8518 - DNA, 294 bp, Bos taurus
  Clone ID: 37-BOVMS1-005-Q1-E1-B10
taaagacccactgatacacctcttgtggctcagctgggacccacattgtcatcacacgacacaagagttggagcggctgctccaactcagctgctcaccctgttctgtgagcagaaagaacttactgaaatgcatggtttaaataacttcctcatcaaaaccttccttctgttttttgtgctttcaaataactaatccgaatttccaacaaattaacatttgaatttagctgtaactctcaactgaccctttttcactgtactaaacgtttggtttcccatgtgtagcgtgttt

SEQ ID NO: 8519 - DNA, 395 bp, Bos taurus
  Clone ID: 37-BOVMS1-005-Q1-E1-B2
ggtcgaccacgcgtccgaaaaaaaaaaaaaaaaaaaaaaaaaaaaaaaaaaaaaaaaaaaaaaaaaaaaaaaaaaaaaaaaaaaaaaaaaaaaaaaaaaaaaaaaaaaaaaaaaaaaaaaaaaaaaaaaaaaaaaaaaaaaaaaaagggggggccccccaaaaggttcaaacctaaattacccttcaaggcaaattaaaaccccttcaaaagtgccacaaaatttaaattcacgggccttcttttaaaaacttcgaaacggaaaaaacccgggggtaaccaaattaaacccctttaaaaaaaatccccttttcccaaacgggggtaaaaccaaaaaggccccaacatttcccctttccaaaaatttgcccaccttaaagggcaaatggaaccccc

SEQ ID NO: 8520 - DNA, 459 bp, Bos taurus
  unsure (321): unsure at all n locations; Clone ID: 37-BOVMS1-007-Q1-E1-B10
gtcgacgacccgtccgggcaaagagaccaaggcaggtgaagcaccatctgagaatcctgctccagctcccgagcagagcagtgcagagtaacagccagctcccccaggcaccttcaccatccgcaggtgacttaatgaccattcaaaaaataaagcaaaaagcagaccacgaccttacgaacaccaaagaaacgtccaagcaataaagtggaagattaataaccaagatgtggacattagaatgtttactacacttccttacaaaacagacaactgcacgaggaaaacgtcagccgttttttccagcagctgagatcctgngaatgcctgcacattaacgagagagcgacctccccagtttcagcaaccactaggtttatatttttttcctggtttttactgttttggtaatatgaattgaaagaagaattattaataccacatggggagacccctccc

SEQ ID NO: 8521 - DNA, 444 bp, Bos taurus
  Clone ID: 37-BOVMS1-007-Q1-E1-B2
tacaactaggattccaagatgcaacatcaccaatcatagaagaactacttcactttcatgaccacacgctaataattgtcttcttaattagctcattagtactttacattatttcactaatactaacgacaaagctgacccatacaagcacgatagatgcacaagaagtagagacaatctgaaccattctgcccgccatcatcttaattctaattgctcttccttctttacgaattctatacataatagatgaaatcaataacccatctcttacagtaaaaaccataggacatcagtgatactgaagctatgagtatacagattatgaggacttaagcttcgactcctacataattccaacatcagaattaaagccaggggagctacgactattagaagtcgataatcgagttgtactaccaatagaaataacaatccgaatgt

SEQ ID NO: 8522 - DNA, 475 bp, Bos taurus
  Clone ID: 37-BOVMS1-008-Q1-E1-B2
ggtcgacgacgcgtccgggacaacaaggtacaggaaaaacactcttggcacgagctgtggctagccagctggattgcaatttcttaaaggttgtatctagttctatagtagacaagtacattggtgaaagtgctcgtttgatcagagaaatgtttaattatgccagggaccatcagccatgcatcatttttatggatgaaatagatgctattggtggtcgccggttttctgagggtacttcagctgatagagagattcagagaactttaatggagctactgaatcaaatggatggatttgatactctgcatagagttaaaatgatcatggctactaacagaccagatacactggatcctgctttgcttcgtccaggcagattagatagaaaaatacatattgatttaacaaacgaacaagcaaggttagatatattgaaaatccatgcaggtcccattacaaagcatggtgaaat

SEQ ID NO: 8523 - DNA, 483 bp, Bos taurus
  Clone ID: 37-BOVMS1-009-Q1-E1-B10
ggtcggcatccgggtcgatcacgcgtccgcaaaacctcacaggcctattcctagcaatacactacacatccgacacaacaacagcattctcctctgttacccatatctgccgagacgtgaactacggctgaatcatccgatacatacacgcaaacggagcttcaatgttttttatctgcttatatatgcacgtaggacgaggcttatattacgggtcttacacttttctagaaacatgaaatattggagtaatccttctgctcacagtaatagccacagcatttataggatacgtcctaccatgaggacaaatatcattctgaggagcaacagtcatcaccaacctcttatcagcaatcccatacatcggcacaaatttagtcgaatgaatctgaggcggattctcagtagacaaagcaacccttacccgattcttcgctttccattttatccttccatttatcatcatagcaattgccatag

SEQ ID NO: 8524 - DNA, 462 bp, Bos taurus
  unsure (86): unsure at all n locations; Clone ID: 37-BOVMS1-010-Q1-E1-B2
agaaatccgagcaatcaaaaactggccaactccccaaccaaaattgacgggggcgcctccttcccggcagcctcaacaggttacanacatgcaagaacacagagctcccacagcaacgatcatcttcagttgctacccagcagacaacggtatcctccatcccatcccatccatccactgctggaaaaatcttccgtgccatgtatgactatatggctgctgatgcagatgaggtatccttcaaagatggagatgccattgtcaatgttcaagctattgatgaaggttggatgtacggcactgtgcagaggactggcaggactggcatgctcccagccaactacgttgaagctatttagacacttcaaagcatcaatcctgtctacatgacctacaaatcttgttagtatttcagtttagactctccactattctccaagttctcaaactgcctaatagttt

SEQ ID NO: 8525 - DNA, 369 bp, Bos taurus
  unsure (329): unsure at all n locations; Clone ID: 37-BOVMS1-011-Q1-E1-B10
gccgatttggcagaaagtataatgaagaatcttaggcgggtgcatccgatttccaccatgattaagggtctctatggaataaaagaggatgtcttccttagtgttccttgcatcttgggacagaatggaatctcagacgttgtgaaagtgactctgactcatgaagaagaggcctgtttgaagaagagtgcagatacactttgggggatccagaaagaactgcagttttaaagtcttctaatgttgtatcacttcactgtctaggctacacaggattttagttggaggttgtaattcatattgtcctttatatctgatctgtgattaanacagtaatgtttagacagcctaagaaaaaatcaatttcct

SEQ ID NO: 8526 - DNA, 218 bp, Bos taurus
  Clone ID: 37-BOVMS1-015-Q1-E1-B10
aaaaaaaaaaaaaaaaaaaaaaaaaaaaaaaataaaaaaaaaaaaataaaaaaaaaaataaaaaaaaaaaaaaaaaaaattaaaaaacaaaaaaaaaaaaaaaattaaaatcatagggggaaaaaaaaaaaaggttggctgctcaaatggttcaactttaatgttcccatcaggctcaatacaaagttcttctgagatttcactgaaattcaaatcca

SEQ ID NO: 8527 - DNA, 461 bp, Bos taurus
  Clone ID: 37-BOVMS1-016-Q1-E1-B2
ggtcgcattccgggtcaaccacgcgtcggctccaactcagctgctcaccctgttctgtgagcagaaagaacttactgaaatgcatggtttaaataacttcctcatcaaaaccttccttctgttttttgtgctttcaaataactaatccgaatttccaaaaaattaacatttgaatttagctgtaattctcaactgacctttttccctgtactaacgtttggtttccctgtgtggcgtgttttctgagcgttcctactttcaagcatggaacgtgcaggtgatttggaaagtgtaggcagatctgagaaaacgagcctgttacagaagaacgtcatcacagcgaatacttttggaagcttaacaaaactaacccagctgtccttttatctttttttttaattaataattcctttgttttaattaatagcagcatagtttatgggtttggagacttgcatgag

SEQ ID NO: 8528 - DNA, 323 bp, Bos taurus
  Clone ID: 37-BOVMS1-018-Q1-E1-B2
atgcgacgtcataactcctccaaaatgtcacctaaattcaattcactggccgtcgttttacaacgtcgtgactgggaaaaccctggcgttacccaacttaatcgccttgcagcacatccccctttcgccagctggcgttatagcgaagaggcccgcaccgatcgcccttcccaacagttgcgcagcctgaatggcgaaatggacgcgccctgtagcggcgcattaagcgcggcgggtgtggtggttacgcgcagcgtgaccgctacacttgccagcgccctagcgcccgctcctttcgctttcttcccttcctttctcgccac

SEQ ID NO: 8529 - DNA, 408 bp, Bos taurus
  Clone ID: 37-BOVMS1-019-Q1-E1-B2
tgcttgtgctactcaagccatagtaagtgtgttattgaactgcacgcatcaagatgtccatttaggagagacattatcagagtttaaagaattttcacaaagtttcgatgcagctatgaaaggtttggcgctgagtaattcagatgtcatccgacaagtgcacaacagttttgccagacagcaaatgtttgaatttgatgctaagacagcagcaaaagaagaagatgcttttcactttgtcagttacgttcctgttaatggaagactgtatgaactagatggattaagagaaggaccgattgacttaggtgcatgcaatcaagatgactggatcagcgcagtgaggccagtcatagaaaaaaggatacaaaagtacagtgaaaggtgaaatcgatttaacttaatggc

SEQ ID NO: 8530 - DNA, 381 bp, Bos taurus
  unsure (317): unsure at all n locations; Clone ID: 37-BOVMS1-021-Q1-E1-B10
atttactcaaagcaaatgtgaaaatcttcaaatgccagggtgcagccttggacaaatatgccaagaagtcagttaaggttattgtggtgggaaatccagccaataccaactgcctgactgcctccaagtcagcaccatccatccccaaggagaacttcagttgcttgactcgtttggatcacaaccgagctaaagctcagattgctcttaaacttggagtgacttctgatgatgtaaagaatgtcatcatctggggaaaccattcctcaactcagtatccagatgtcaaccatgccaaagtgaaactgcaacgaaanggaatttgggtttacgaaactctgaaagatgacagctggctcaagggagaattcatcacgactg

SEQ ID NO: 8531 - DNA, 401 bp, Bos taurus
  unsure (66): unsure at all n locations; Clone ID: 37-BOVMS1-021-Q1-E1-B2
ctcactcctcacccctcctcagtatctctccctttccaaccatctgtctcccaccttctcctgtcncccagtaaacactgggtattcactgtgttttgagaattctagaaccagccttggataaaagagaattttatgtagaagaacaatgttagaacacttgtttatgatatctttacagactcagaatcattatagaaggttttaattatttcaaattatagtgtactttcattttgtatcacgatttttcagttctgttgttggaatggtacgtatttttcatatttgattgtatcatagttgtttaccatttctaaggagttgccaatctgagatctaactagagatcaaaattgaattcagaaaacatttaataaaatgaaatttcagtaagaagt

SEQ ID NO: 8532 - DNA, 398 bp, Bos taurus
  Clone ID: 37-BOVMS1-022-Q1-E1-B2
atgcgacgtcatagctcttctatagtgtcacctaaattcaattcactggccgtcgttttacaacgtcgtgactgggaaaaccctggcgttacccaacttaatcgccttgcagcacatccccctttcgccagctggcgtaatagcgaagaggcccgcaccgatcgcccttcccaacagttgcgcagcctgaatggcgaatgggacgcgccctgtagcggcgcattaagcgcggcgggtgtggtggttacgcgcagcgtgaccgctacacttgccagcgccctagcgcccgctcctttcgctttcttcccttcctttctcgccacgttcgccggctttccccgtcaagctctaaatcgggggctccctttaaggttccgatttagtgctttacggcacct

SEQ ID NO: 8533 - DNA, 447 bp, Bos taurus
  Clone ID: 37-BOVMS1-023-Q1-E1-B2
acgcgtccggcacgcggacgccctttttttttttttttttttttttttttttttttttttttttttttttaaaaataacaaattatttactgctttataatgttaaagtatttcaccaagacaagttgcagtcaaattaatgtgagttatggaaaatgaaatacataaagatgtatttaaacaagtgcagactaaatattttccatacagggtatgtaaatgaaaagatatacagtaagtgcacacttgatacgactatgcaggcaatagttagtttcagaatacaactaggattccaagatgcaacatcaccaatcatagaagaactacttcactttcatgaccacacgctaataattgtcttcttaattagctcattagtactttacattatttcactaatactaacgacaaagctgacccatacaagcacgatagatgcacaag

SEQ ID NO: 8534 - DNA, 452 bp, Bos taurus
  Clone ID: 37-LIB188-001-Q1-E1-B2
acagagctaaggcacaacctggttgtttccaagagttaggagggcagcagtggagatgggaagcaagccctcttggacgctgggtcccccggtgggcttcttggctgggggctgggcctcagccccgagccccagcaaacccaaggctgtgttgaagaggttgatgggcgtggaaccatcggtgatgagggtggattttaggcccaggctctgcagcaattttacctgcatctccggccctgccacagccatgtctctgatggtgctgggccccagggcctctgtcatctgcttgaacttcttcacctccacctcagccagctgctgggccttgctcacttccagctccagctgggcccgggcatagagcagctccagctctcgtacaaaaaccttacataaattaaaaggatgaataaatttacaggtgtgaatgcaaactgtttcaactc

SEQ ID NO: 8535 - DNA, 292 bp, Bos taurus
  Clone ID: 37-LIB188-002-Q1-E1-B2
atggccgcgggataccgcgtagtcagcgccctgcccatccagcaccaggactggactggaggaaaggagttcaagtgcaaggtcaacaacaaaggcctctcggcccccatcgtgaggatcatctccaggagcaaagggccggcccgggagccgcaggtgtatgtcctggacccacccaaggaagagctcagcaaaagcacgctcagcgtcacctgcatggtcaccggcttctacccagaagatgtagccgtggagtggcagagaaaccggcagactgagtcggaggacaagt

SEQ ID NO: 8536 - DNA, 297 bp, Bos taurus
  Clone ID: 37-LIB188-003-Q1-E1-B2
gatactttctctgacacattctccatgaagttaggactggagacttcctgcgggaccgtcactgtgatggggaaggagttgaagagtttcacaatcaccttggtgaggtcagacgggatgctggggtcggagttgtgggaattcaccgtgaagacctgcaggtagtgctggtcgtcgctctgcgtgaggttggccagctgggacacccaggtgaactgctcgttcagctgcttgagcagggccgacgtgttgagcatcttctgctggtaggactggagcagctggtcgtacagcctg

SEQ ID NO: 8537 - DNA, 248 bp, Bos taurus
  unsure (85): unsure at all n locations; Clone ID: 37-LIB188-004-Q1-E1-B2
ccggacaacaatctaagctactgtgtttggaggatttcgggttcccggcaagacaaggaacaagccaaacttgcccgcagtgtanatataacctccaaccaagttcaaggcaactgcctcccctttcaagcacaagaacatgcagtcgtcagtggtggacccctggcacatgtcacgttctggccgctctgctggctccactgctgggacatcttctgctcctcaagtcccacggcacaccacacgac

SEQ ID NO: 8538 - DNA, 390 bp, Bos taurus
  Clone ID: 37-LIB188-005-Q1-E1-B2
ggcggccggacaccttatacaaatactggaaatgcaattgtgtagattgacttggggaatatatccaatttcatatatttaatttgaaggtcattttcacattttggccttattttttcagcttcacttggtgctggcttctgtggggttgagctgctgacctgctgcctgtcaggcagctggaggcaaacgtcactgtcaagattcaatgacattctcctccgccaaaaggccctgtcagctacacaaagaggggagcttttctgtaccgcctgcagagggagaaggacttcaaggccaaggaagctgcggctctgggatcccatggtagttgcagcactgaactagagaaggtcacccagcagaagatgaccatccttcaaacctact

SEQ ID NO: 8539 - DNA, 359 bp, Bos taurus
  unsure (129): unsure at all n locations; Clone ID: 37-LIB188-006-Q1-E1-B2
acttcattatggaagagttagcactaagcaggaaacctttccatgctgtgaagaagctgggacagaaggttcttccttgagtgtgaccatcttcacttcagctcaggagccctgttggctgaagtgtanggcgtcctttctgattcctgaagtagatgaagagccccacggcaaggaagagcagacccagaacgaagcccccgactccactcatcatcttgctctgagcagagtcagaccgtgccctccattctactgtgatagggctcgtccggctggggtgatccacttggcaggtgtagacctctccactctgaggaactgtttcaagcatcaccatggtctggaaggtccagtct

SEQ ID NO: 8540 - DNA, 361 bp, Bos taurus
  Clone ID: 37-LIB188-008-Q1-E1-B2
acttgagctggacagagtcactcgagcccctccagggagctgtggctaaattcttctctgccagctgtgttccctgcattgatagacaagcataccccaacctgtgtcagctgtgcaagggggagggggagaaccagtgtgcctgctcctcccgggaaccatacttcggttattctggtgccttcaagtgtctacaggacggggctggagacgtggcttttgttaaagagacgacagtgtttgagaacttgccagagaaggctgacagggaccagtatgagcttctctgtctgaacaacagtcgggcgccagtggatgcgttcaaggagtgccacctggcccaggtcccttctcatgctgt

SEQ ID NO: 8541 - DNA, 409 bp, Bos taurus
  unsure (213),(342): unsure at all n locations; Clone ID: 37-LIB188-009-Q1-E1-B2
acagaaatgagaagcagaagcaagatgaaagcatgctctgggaagcagggagaggctgggaatgatccagagagggtctctgagcacagtccccagtgatggcagttctacgtggagctctcctctaatcactgagcttgaacgaggaggtgtaaggcagcggccattgccgagcaccggccagatctgggttgtcattctagtagtgcttcncctgccggagctgcccacagccttcctcccagcctcagcgtctggaggaagaatgcttttctcagctccctgcttggccatcacctgactgtgctcagactctccaggggagaaaaggagaatctccanaacaaaccaaatacagagcttgaagtaactatgaattgaaaaaaggctaatgagtgatgatgactac

SEQ ID NO: 8542 - DNA, 404 bp, Bos taurus
  unsure (8),(353): unsure at all n locations; Clone ID: 37-LIB188-011-Q1-E1-B10
atgcgccngtacgccatggaggccggatagccatgaaagggataggctgcctgcaagagcccagttccccttatgaccagcgaggaacccccaactgccacacagctgcagtgcaggtggtatagaccaggagacaaaactaagcaaactagcgctttgtggccaagattctttgcccccacccaaaccagccctaataacattaaagtgcccgccctccctaaacccacacagaaaagcttaaataaaccccagcccggttctcgggctattcctccatttccggacggacacccctgagaaggggttgggagaagtcccagctgagcccctccaccagtggttcagcctgngtggagggtagcaagaacaacggtgaaagtggggacccaagacgtatcact

SEQ ID NO: 8543 - DNA, 445 bp, Bos taurus
  Clone ID: 37-LIB188-011-Q1-E1-B2
gccatgggcgcgggatacgtgaataaagaaattaaaaatgccctcaaggaggtgaaacagataaagacccaaatagaacaaaccaatgaagagcgcaaattactgctcagctccctagaggaagccaagaagaagaaagaggtcgccctgaatgacaccagggattctgaaaacaagctgaaggcgtcccagggggtgtgcaatgagaccatgacagccctttgggaggaatgtaagccctgcctcaagcagacctgcatgaagttctacgcgcgggtgtgcagaagcggatcgggactggttgggcaccagcttgaggagttcctaaaacagagctcccccttctacttctggattcaacggtgacgcatcgattccctgatggagaatgaccgggagcagagccacgtgatggacgtcatggaggacggcttcacccgggcgt

SEQ ID NO: 8544 - DNA, 450 bp, Bos taurus
  unsure (416): unsure at all n locations; Clone ID: 37-LIB188-013-Q1-E1-B10
ccatggccgcgcggatacagcgccgaatctaccttcgaggggatcctcaaaaacccaagagcagagtctttgaacagcaggtccctctggccgggtggagagccaaagagctggaagctccgagacttgttttttccaaatttctcctgcgccttgctgagaagcttccagatcaagtcttccttgccatccacacttcgggccacgacagcatgagaagggacctgggccaggtggcactccttgaacgcatccactggcgcccgactgttgttcaggcagagaagctcatactggtccctgtcagccttctctggcaagttctcaacactgtcgtctctttaacaaaagccacgtctccagccccgtcctgcagacacttgaagggcacagaataaccgaagtatggttcctgngaagagcaggcacactggttctcccctcccccct

SEQ ID NO: 8545 - DNA, 211 bp, Bos taurus
  Clone ID: 37-LIB188-013-Q1-E1-B2
gcaatggccgcgggatacacatagtccacgcccggctcgcaagccttgtccagccggtcctccagagtgacctccttctccgtgcggtgcatgaagcagttctcctctgcacagcggcaggtatctttgtggcagagtttgctcagcattccgtcctctttatccgggtgatagaagcggatacaagtttcatccaggttgtaataggagt

SEQ ID NO: 8546 - DNA, 276 bp, Bos taurus
  Clone ID: 37-LIB188-015-Q1-E1-B10
actcccgcaactgccgcgcaatgtcctgcttggcgttcctcagagcggcctccagctcggccagcttggcctgagcatccttaacagccatctcaccacgctgctcagcgtcagcgatggcagcctccagggaagccctctggcctttgagaccctcgatctcagcctggagacggttgatgttccggttcatctcagaaatctccgtcttcgtgcgacgaaggtcatccccgtgcttcccagccagtgtctgcagctcctcatacttgatttggt

SEQ ID NO: 8547 - DNA, 454 bp, Bos taurus
  unsure (233): unsure at all n locations; Clone ID: 37-LIB188-017-Q1-E1-B10
atgcgcccgtacgccatggacgccggataccaaaacctatccctatggccccaccaacataagcccccagggctgggtctgtgcccacaaagggttggcctgttttgactgaactaacctgtggatttagtccaacaaatgcatttgcctgatttcagggctgaatttctgcttgacccaagtgtcaggcagagctgggtggcctcagctgactggcggtggacaagctgcangatgggccgaaagtgcattactagagatgaccgcggttgaggacacctatttcccaggacccatggctatgtgaccacactggccgtgagtgactggttgttgaggatgactactctttagcaaacctattgtgtgtctgtagaggctgtttgatgattaaaacaatggctacttcctgttttggcaaatgcttgactgcattttcatttgaatgaacaat

SEQ ID NO: 8548 - DNA, 334 bp, Bos taurus
  unsure (260),(288): unsure at all n locations; Clone ID: 37-LIB188-018-Q1-E1-B2
ggctcaaacctaaactcaatcaagtgttccaagaacttccggccgtttaattaattgggtttgggaacaatgaaatccttttgaccaagccgggtccttggcggcccccggaaatttccaaggactccggaacggaatcccccaacccctggcggactcctggttgactccggaaaaacccggtttggtgggacctggtagttcccttgttccttaccgggaactcctgtggtaagtgttttctctcctctgcggcctgntaagggtgggtgggcattggcatcccanaggtggctagaagtcaatgatttaagcaagcttgtgaatagatatg

SEQ ID NO: 8549 - DNA, 396 bp, Bos taurus
  Clone ID: 37-LIB188-019-Q1-E1-B2
actgtcccagtgggtcgtgtggagactggtgttctcaaacctggcatggtggtcacctttgctccagtcaatgtaacaactgaagtgaagtctgtagaaatgcaccatgaagcattgagtgaagcccttcctggggacaatgtgggctttaatgtcaaaaacgtgtctgtcaaagatgtccgtcgtggcaatgtggctggtgacagcaaaaatgatccacccatggaagctgctggcttcacagctcaggtgattattttgaaccatccaggccaaatcagtgctggatatgcacctgtgctggattgtcacacagctcacattgcttgcaagtttgctgagctgaaggagaagattgatcgtcgttctgggaaaaagctggaagatggccctaaa

SEQ ID NO: 8550 - DNA, 281 bp, Bos taurus
  Clone ID: 37-LIB188-020-Q1-E1-B2
agggaagaaaacccaacagcatttcaaatttaattccttgccaaaatgaccccagggaattttaaatacggaggaccttggaaaaaacccaccttcaggaagggaaaaaaaggtcccccccccctgaaaattggggccaaaaccagggaggacttaaggcccagggaggcaggcaaccttctttgagagctttaccccccaaggaagggccaggttcccaaaaacggggaggttaacaattttttcaggttggcaaaggcccttaaaaaacctttccccaa

SEQ ID NO: 8551 - DNA, 231 bp, Bos taurus
  Clone ID: 37-LIB188-024-Q1-E1-B10
gccggagaccttggcaaccacaatttcgaatcccttggatcatggaggcatggatcccaacgtcagagtaaatcgcacagcctggcatcatcttatccagaatgcagagggtcaattcattggccacaaagcacgatgagaacacaagtgcaccatcttttccatggaggtcacccagctcctgctccaggtcgacgtggaatttactaattccagaaatatttctactag

SEQ ID NO: 8552 - DNA, 367 bp, Bos taurus
  Clone ID: 37-LIB188-024-Q1-E1-B2
acctcatcgagaccgtgatcgccgggcgagacttctataagatcttgggggtgcctcgcagtgcctctataaaggatattaaaaaggcctacaggaaactagccctgcagcttcatcctgaccggaatcctgatgatccacgagcacaggagaaattccaggatctgggtgctgcttatgaggttctatcggatagtgagaaacggaaacagtatgatacatatggtgaagagggcttgaaagatgggcatcagagctcccatggagacattttttcacacttctttggagattttggtttcatgtttggaggaacccctcgtcagcaagacagaaatattccaagaggaagtgatattattgtaga

SEQ ID NO: 8553 - DNA, 423 bp, Bos taurus
  Clone ID: 37-LIB188-025-Q1-E1-B10
tgggcccgggatacaagaaaagttaagtattttgcacaaaggaaatttgttgatgatccagtagaactgatgcccatagaacgcagtttcttaaggattttgttttgcttctttgagggaggcggccatcgtcattgtcagttcagctgggggttccttccttcatgctgaggacctgtgtctttgaagttgctgacgtcctcggaatcccaggcaggctggtgaatgctcaggggctcccatggaggcatctggtggcctcgggccccctttgcttgtaggaggcttagcaagttccttgtcgcttcttcccactgggcatactccctcagctgctccttcaggctctcctcctcatgaagttgtggggactctgccacactcttttttcccattaagtgtccgacagcccagtggttgccg

SEQ ID NO: 8554 - DNA, 431 bp, Bos taurus
  Clone ID: 37-LIB188-026-Q1-E1-B2
gctcaaagcctccatggccgcggcataccaaaaccttacctatggccccaccaacataagcccccagggctgggtctgtgcccacaaagggttggcctgttttgactgaactaacctgtggatttagtccaacaaatgcatttgcctgatttcagggctgaatttctgcttgacccaagtgtcaggcagagctgggtggcctcagctgactggcggtggacaggctgcacgatgggccgaaagtgcattactagagatgaccgcggttgaggacacctatttcccaggacccatggctatgtgaccacactggccgtgagtgactggttgttgaggatgactactctttagcaaacctattgtgtgtctgtagaggctgtttgatgattaaaacaatggctacttcctgttttggcaaatgcttgactgca

SEQ ID NO: 8555 - DNA, 354 bp, Bos taurus
  Clone ID: 37-LIB188-027-Q1-E1-B2
actggaaagagcgaaagcacagcatttctatcaacttatccttccaatggaacgatagatttaaaatattttccatattatgggaaaaaactgcatgggaactacctgcagccactagttgccgtccaggtcggctttggtagtgatgctgacgtaagagaagtaatggttgagtgcaagatcgatggatcacccaacctaaaaacccagaatgaccgtgacaagtttttaggacgagttgcattcaagatcaccatgcatgcatagtaggagttaggatgtctctacagagtaaacgttgtgttgtctgtcttcattttgtatcagcgggacctgccattccagaattatgag

SEQ ID NO: 8556 - DNA, 292 bp, Bos taurus
  Clone ID: 37-LIB188-028-Q1-E1-B10
gccataggcccgggataccaaataaagtatgaggagctgcagacactggatgggaagcacggggatgaccttcgtcgcacgaagacggagacttctgagatgaaccggaacatcaaccgtctccaggctgagatcgagggtctcaaaggccagagggcttccctggaggctgccatcgctgacgctgagcagcgtggtgagatggctgttaaggatgctcaggccaagctggccgagctggaggccgctctgaggaacgccaagcaggacatggcgcggcagctgcgcgagt

SEQ ID NO: 8557 - DNA, 328 bp, Bos taurus
  Clone ID: 37-LIB188-028-Q1-E1-B2
catgcgccaagccgccatgagcccgggatgcccgataggcatagtatttcacatcatagtttcgacttcgaaatccttggtatgttcatttctttgggtataaacagggactatccgggaaatccacctaatgcttaagaaactaatctaggacaataccgtgtggggcaggcagcgcaaatgtcatcctcccggtgactggcacagggggctgtttgccccggactgattgcggaatactgttagctggctcacggagcaactgtcctctatgcatgtgctgtctcggggcttcagtcattcacagcacacatgtatcacaaggtca

SEQ ID NO: 8558 - DNA, 388 bp, Bos taurus
  Clone ID: 37-LIB2809-001-Q1-E1-B2
gggcgccggacacaccacagcagcctcattgggcatatctctctggggatagggcactgctttctggggaacaggcaagactttggactgacaaagggacaacacggactgaggacgacacatcacagttggacgccaaggctgctcacgctggtacatccaacactgacgcagacgcagacgaaggtgcagattttcaacatcactgcgagtcacgctcttgctttcactaaaaggctcaactggatacttacggaacggcagttctttgtgcttacgacccattaactccttcactttggacactcccattacttcaagctgcacgcacagctgcaccaccacacgggtttgactaagaggacagatcttttgtgtcaagctgtta

SEQ ID NO: 8559 - DNA, 281 bp, Bos taurus
  Clone ID: 37-LIB2809-002-Q1-E1-B10
gctccctaccgacatgggcccgggaacagaaaagatcccctctttgtgtagctgacagggccttttggcggaggagaatgtcattgaatcttgacagtgacgtttgcctccagctgcctgacaggcagcaggtcagcagctcaaccccacagaagccagcaccaagtgaagctgaaaaaataaggccaaaatgtgaaaatgaccttcaaattaaatatatgaaattggatatattccccaagtcaatctacacaattgcatttccagcatttgtataaggt

SEQ ID NO: 8560 - DNA, 104 bp, Bos taurus
  Clone ID: 37-LIB2809-002-Q1-E1-B2
actgaaaatcaagatcaagcgagcttttgcccttctgctccacgggaggtttctgtcctccctgagctcgccttaggacacctgcgttaccgtttgacaggtgt

SEQ ID NO: 8561 - DNA, 421 bp, Bos taurus
  unsure (355): unsure at all n locations; Clone ID: 37-LIB2809-004-Q1-E1-B2
ccatgaccgcgggatggtcgagtagaaagggcaattcagtaagtatatttagagtccaagctactactactgagaaattacagtatttattcagttcagttcagttgagtagctcagtcgggtccgagtctttgcgaccccatgaatcgcagcacaccaggcctccctgtctagcacgaactcccggagtttacccaaacgcatgtccatcgaatcggtgatgccatccagccatctcatcctctgtcgtccccttctcctcgagcccccagtccctcccagcagcacggtcgttcccaatgagtcaagtcttcgcatgaggtggtcaaaatattggagttacagtgtttatganagattcaagaagttgaaaattcagagtcctcagtttcagagaaataacatgtgactgaaaacatgt

SEQ ID NO: 8562 - DNA, 385 bp, Bos taurus
  Clone ID: 37-LIB2809-006-Q1-E1-B2
cgccatgggaccgggatacagcagaaaggcctgaatgggcatatctctctggggatagggcactgctttctggggaacaggcaggactttggactgagaaagggacagcacggactgaggaggaaacatgacagttggaggaagaggctggtgaggctggtgcatccaagactggagcagaggcagaggaaggtgcagattttcaacatcagtgagagtcaggctctggctttcagtaaagggctcaactggatatttagggaagggcatttctttgtgcttaggagccatagcctccttcactttggagactcccattacttcaggctgaaggaaaggcggcaccaccacaggggtttgagtaagaggagggatgttttgtggg

SEQ ID NO: 8563 - DNA, 362 bp, Bos taurus
  Clone ID: 37-LIB2809-007-Q1-E1-B10
accccagatggaaattgttcccaatagtgctgaggaacgacttcacagtatgaaagagggaatccatgcccaacagaaagaacctatgataggagtgaatcaggaactggcctacttctaccctgagcttttcagacaattctaccagctggatgcctatccatctggtgcctggtattacgttccactaggcacacaatacactgatgccccatcattctctgacatccctaatcccattggctctgagaacagtgaaaagactactatgccactgtggtgaagagtcaagtgaattctgagggactccacagttatggtctttgatggttctgaaaattccatgctctaaatgtcctttc

SEQ ID NO: 8564 - DNA, 298 bp, Bos taurus
  Clone ID: 37-LIB2809-007-Q1-E1-B2
acttggcatatctctcttgcgataccgcaaagatttctgagaaacactcacgactttatagtgacaactgcaccgcatctactaatcatgacccatcacaattcttcgaggaggccgttcacgctggtacatcctatactggggcagacgccccatgaatgtccagattttcaacatcactgatagtcatgctcttgccttcactagtgggctcacctgtatctccacggatcggcatttctttgtccatatcatccataacccccttcaccttgttcactcccattactttaagccc

SEQ ID NO: 8565 - DNA, 419 bp, Bos taurus
  Clone ID: 37-LIB2809-008-Q1-E1-B10
acatgggcccgggatactgcttaagagcgtgctaagcgcactctctcttccaacacccaagccagtactgagattgattccctctatgaaggaatcgacttctatacctcgattacccgtgcccgatttgaataattgaatgctgacttgttccgtggcaccctggaccctgtggagaaagcccttagggatgccaaactggacaagtctcagattcatgatattgtcttggttggtggctcaacccgtatccccaagattcagaaacttctccaggacttcttcaacgggaaagaactgattaagagcatcaaccctgatgaggctgttgcatatggtgcagctgtccaggcaaccattttgtctggagacaaatctgaaaatgttcaagacttgctgctgttggatgtcactcctct

SEQ ID NO: 8566 - DNA, 365 bp, Bos taurus
  Clone ID: 37-LIB2809-008-Q1-E1-B2
atggccgcgggatacctggtgagattgtggaaagcctttcaagcagtgagaaaattgagaagtttcagagtgaggaacagcagcaaacagaggatgaactccaggataaaatccacccctttgcccagacacagtctctagtctatcccttccctgagcccatccctaacagcctcccacaaaacatccctcctcttactcaaacccctgtggtggtgccgcctttccttcagcctgaagtaatgggagtctccaaagtgaaggaggctatggctcctaagcacaaagaaatgcccttccctaaatatccagttgagccctttactgaaagccagagcctgactctcaccgatgttgaaaatctg

SEQ ID NO: 8567 - DNA, 314 bp, Bos taurus
  Clone ID: 37-LIB2809-009-Q1-E1-B2
ggataccttcaaagatgatattcaagggacggctgcggtggctctggccggtctgcttgccgcgcaaaaagtcattgggaaaccgatctcagatcatagaatcttatttcttggagcaggagaggctgctcttggaattgcaaatctgatagttatggctatggttgaaaatggcctctcagaagaagaggcacgaaagaaaatttggatggttgacaagtttggtttattatttaaggggcggaaagctaaaatagaaagtcatcaggaagcatttgctcagtcagctccagagagcctacctgatacttttg

SEQ ID NO: 8568 - DNA, 457 bp, Bos taurus
  Clone ID: 37-LIB2809-011-Q1-E1-B10
catgcccccgtacgccatagcggcgggatacaagctttattttttatttttttttttttttttttttttttttttttttttttttttttttttttttttttttttagaaacagtttattttccatcaaccaaatttccattttggtggaagtttgtggaagttctgcaagtgtctggaagaagagcttacgaccactcggtggtggttcctacccattccgtggcctgggcggtgggggctgcagaccagtcttcagtggaaggctgagcactccagtcttcagtggggaactgctgaatgggcacggaaggcacctgcacgccttcagaccagtctgccacctcaggctgagcagccgtgaactctggagctggagcagtccattcaccctgaaactcctccttggtcacagccttctcagctgctgcctgctcttccttttcaacctcctcagga

SEQ ID NO: 8569 - DNA, 146 bp, Bos taurus
  Clone ID: 37-LIB2809-011-Q1-E1-B2
cactgttgcattaaaaacgccatcagggacatcgagcaagggtcaaaagtctagagcgccattcatgcacccctggagattagtccttacatgtccattgtcactacagggcccagggctcagagacgagttagcttcaagggggt

SEQ ID NO: 8570 - DNA, 383 bp, Bos taurus
  unsure (61): unsure at all n locations; Clone ID: 37-LIB2809-012-Q1-E1-B2
agaaagcctgaatgggcatatctctctggggaaagggcactgctttctgtggaaaaagcangactttggactgagaaagggacagcacggactgaggacgaaacatggcagttggaggaagaggctggtgacgctggtgcatccaagactggagcagaggcagaggaaggtacagattttcaacatcagtgagactcaggctctggctttcagtaaacggctcaactggatatttagggaagggcatttctttgtgcttacgagccatagcctccttcactttggagactccgattacttcaggctgaaggaaaagcggcaccaccacaggggtttgactaagacgagggatgttttgtcggacgctgttagggatgggccca

SEQ ID NO: 8571 - DNA, 393 bp, Bos taurus
  Clone ID: 37-LIB2809-013-Q1-E1-B10
tggtgaaattgaggaaagcctttcaagcagtgaggaatctattacacgcatcgataagaaaattgagaagtttcagagtgaggaacagcagcaaacagaggatgaactccaggataaaatccacccctttgcccagacacagtctctagtctatcccttccctgggcccatccctaacagcctcccagaaaacatccctcctcttactcaaacccctgtggtggtgccgcctttccttcagcctgaagtaatgggagtctccaaagtgaaggaggctatggctcctaagcacaaagaaatgcccttccctaaatatccagttgagccctttactgaaagccagagcctgactctcactgatgttgaaaatctgcaccttcctctgcctcggct

SEQ ID NO: 8572 - DNA, 262 bp, Bos taurus
  unsure (230): unsure at all n locations; Clone ID: 37-LIB2809-013-Q1-E1-B2
gccatggcggcgggatactttttgtactcggtgtccagcacaaggactttgttctcattcaaggcatcgatcttgaacaccgcagggatcttggttttttctgcaatgatcttcttctgagcacactcaccgttctctcatttctgcagcaggatctccaggtcgccctcaggggtgggcttcagctcctccacatacactctcacgggggcactctgggcgtccagcanggagatgtcgctggccgccatggccaaggagt

SEQ ID NO: 8573 - DNA, 396 bp, Bos taurus
  Clone ID: 37-LIB2809-015-Q1-E1-B2
caccagaatcaatgacattgatgaccacagcagcctgcagagtattgggagtgacgagggttactccagtgccagtgtcaaactttcgttcacctcctagaacccagcatgacatgacagtgcagggcaaagtattcactgggccaattcaatccaaacaatctcttaaattgggttcatgatgcagtctcctctttaaagctaagcaaaactatacttgaacaagagtcaagagacctctatttaagcaaatacttagcaaaaagtggggcagagcctcccctgcagaacaaatattcgtatttgaaaatcagtttctaatggcagcagaaaatgtgtgtgaaattttttcaattttgattagttgatttgaaagaggacactggagattacatc

SEQ ID NO: 8574 - DNA, 376 bp, Bos taurus
  Clone ID: 37-LIB2809-017-Q1-E1-B2
gggatactgcctgattctcacttcttgcccaacagctgaaggcccctcttccagccaagcagcagtggtgaagtagacgtctcatgggactgggctggaggtggactggctgagctctggctctcacaccatcagtagtttgggttagaagctaagtcctttgtggccccggtgaccagacctcttcttgcccctcaatcctagctcagatcgcagctcagcctctaccctctttccacagtccatcgtgacgctggatggcggcaaacttgtccacgtgcagaagtggaatggacaagagacatcacttgtgcgggaaatggttgacgggaaactcattctgacactcacccatggcactgcagtttgcactcgt

SEQ ID NO: 8575 - DNA, 449 bp, Bos taurus
  unsure (411): unsure at all n locations; Clone ID: 37-LIB2809-019-Q1-E1-B2
ctccagccgaaatgggcccgggctacctggagagaatgtggaaagcctttcaagcagtgaggaatctattacacgcatcaataagaaaattgagaagtttcagagtgaggaacagcagcaaacagaggatgaactccaggataaaatccacccctttgcccagacacagtctctagtctatcccttccctgggcccatccctaacagcctcccacaaaacatccctcctcttactcaaacccctgtggtggtgccgcctttccttcagcctgaagtaatgggagtctccaaagtgaaggaggctatggctcctaagcacaaagaaatgcccttccctaaatatccagttgagccctttactgaaagccagagcctgactctcactgatgttgaaaatccgcaacttcctcncggttctgccccagtcttggatgcaccagcctcaccag

SEQ ID NO: 8576 - DNA, 389 bp, Bos taurus
  Clone ID: 37-LIB2809-021-Q1-E1-B2
catgcgcaaacgccatgtacccggatgcccagaaaggcctgaatgggcatatctctctggggatagggcactgctttctggggaacaggcatgactttggactgagaaagggacagcaccgactgatgaggaaacatgacacttggacgaatatgctggtgaggctggtgcatccaagactggagcataggcagaggaaggtgcagattttcaacatcagtgagagtcatgctctggctttcagtaaagggctcaactggatatttacggaacggcatttctttgtgcttaggagccatagcctccttcactttggagactcccattacttcaagctgaatgaaatgctgcaccaccacacgggtttgagtaacatgacggatgttttg

SEQ ID NO: 8577 - DNA, 447 bp, Bos taurus
  Clone ID: 37-LIB2809-022-Q1-E1-B10
tgggggcgggctacaagcttaattattttttttttttttttttttttttttttttttggtgccttaaaatgtaatttattgaaaagaagaaagacaaaatctcagttaatgcacacaattatttgatatgatggcacttacaggagaagtgattcaaaggcttttaaaacattttccatacagaaatttaatgaagactttaattccctttgactcagtggcctttataccagcatgatactactggaatttaggtaacaggctgttaggacaatttcacttaaggatgttacactatctaaaatacagtagagaactcaagaagaaagagtgccttcaatttgagattgccctattctaaaacagcagttgaagcctttggatagaatggtttgacatgatagatgacaagacatgtatagcatgggattttcagaaccatcaaag

SEQ ID NO: 8578 - DNA, 338 bp, Bos taurus
  Clone ID: 37-LIB2809-023-Q1-E1-B2
atacagtatactataaaattttctttttaaattgaaacccaacaattctgcctttacgatgctaagctcaagctcctaattcctcgcgtaacttccttcccctctgtttccaatatccctccctttgttttgtccccgtaaacttccgggagccgtcacctcattgccccccaggcaagcacgtggtcagtcaatggtgggtttccaccgtccagaggctatacaaacctgcggtagtctcaaactactggactttgtgccagctgacactttccatgagctgtctgagcattaaagtggatagctcatgctagagatatgacattatcttctgggaa

SEQ ID NO: 8579 - DNA, 364 bp, Bos taurus
  Clone ID: 37-LIB2809-024-Q1-E1-B10
cagaaaggcctaaatgggcatatctctctggggatagggcactgctttctggggaacaggcaggactttggactgagaaagggacagcacggactgaggaggaaacatgacagttggaggaagaggctggtgaggctggtgcatccaagactggagcagaggcagaggaaggtgcagattttcaacatcagtgagagtcaggctctggctttcagtaaagggctcaactggatatttagggaagggcatttctttgtgcttaggagccatagcctccttcactttggagactcccattacttcaggctgaaggaaaggcggcaccaccacaggggtttgagtaagaggagggatgttttgtggg

SEQ ID NO: 8580 - DNA, 379 bp, Bos taurus
  unsure (11)...(12): unsure at all n locations; Clone ID: 37-LIB2809-027-Q1-E1-B10
aaaaagaaaannaaaaatcaacccacaaagcttctaaaaaaggaacccgcaggcacttcctcttgtggaatgtttaaaaagttagcctactaaagaaaacagtcggcttcttgtgaaggttttggagaaatatgtatcagttcgttttatttgggtattcaataatatccttggtgataatgctgactccatggcttctgaccccagaattgaccctgctgccactggttgtagccctgagattgatttttgtagccacgattgtttcctcgtcctctgaagttctggttgtagttccctctgttaggcattccccctctgttgtagttccctctgtttgagtaaccgccaccgctgggaaagacagggccgccagggt

SEQ ID NO: 8581 - DNA, 294 bp, Bos taurus
  Clone ID: 37-LIB2809-027-Q1-E1-B2
ctgagcaggataaccatggcaacaacacatcatcagtaaggtaaaactaacctgtctcacgacggtctaatcccagctcacgttccctattagtgggtgaacaatccaacgcttggtgaattctgcttcacaatgataggaagagccgacatcgaaggatcaaaaagcgacgtcgctatgaacgcttggccgccacaagccagttatccctgtggtaacttttctgacacctcctgcttaaaaccccaaaggtcagaaggatcgtgaggccccgctttcacggtctgtattcgt

SEQ ID NO: 8582 - DNA, 440 bp, Bos taurus
  unsure (352),(406),(423): unsure at all n locations; Clone ID: 37-LIB2809-029-Q1-E1-B2
atgctccgtacgccatgggcgccggatacaacagaaaaggctgaatgggcaaaacccccctggggatagggcactgctttctggggaacacgcaggactttggactgagaaagggacagcacggactgaggaggaaacatgacagttggaggaagacgctggtgaggctggtgcatccaagactggagcagacgcagaggaaggtgcagattttcaacatcagtgagagtcaggctctggctttcagtaaagggctcaactggatatttagggaagggcatttctttgtgcttaggagccatagcctccttcactttggagactcccattacttcaggctgaaggaaaggcngcaccaccacaggggtttgagttagacgacggatgttttgtgggacgctgttanggatgggcccacggaanggatagactagagactg

SEQ ID NO: 8583 - DNA, 189 bp, Bos taurus
  Clone ID: 37-LIB2809-031-Q1-E1-B2
cagaaaggccagaatgggcatatctctctggggatagggcactgctttctggggaacaggcatgactttggactgagaaaggggcagcaccgactgacgaggaaacatcacacttggaggaagacgctggtgaggctggtgcatccaagactgcagcagctgcagcaggaatgtgcacattttcaccat

SEQ ID NO: 8584 - DNA, 342 bp, Bos taurus
  Clone ID: 37-LIB3057-001-Q1-K1-B2
tcgggcagcagcctgatcccgacccatgtctatcccggtctaacgttcactacaacgatgagaggtgcctaggatatggcagctaccggcgcagacactagcgacctcaagagcggcatgctgctgcacgagattttcacgtcgacgctcaacctgctgctccttggcctttgcatgtttctgctctacaagatcgtgctcggtgaccagtcggcggccagcgatagcgacgacgacgagccgtccccgctgccccgccttaagcggcgcgacttcacccctgccgagctgcggcgcttcgactgcgtacaggacccgcgtatactcatgggcatcaatggc

SEQ ID NO: 8585 - DNA, 342 bp, Bos taurus
  Clone ID: 37-LIB3057-003-Q1-K1-B2
ccgcagtctgccgcctcggagtcgccgctgccggcgccatagccatagccatggccagtcagtcgcagggcatccagcagctgctccaggcggagaaacgggccgccgagaaggtgtccgaggcccgcaagcgaaagaaccggaggctgaagcaggctaaagaagaagcccaggctgaagttgaacagtaccgcctgcagagggagaaggagttcaaggccaaggaagctgcggctctgggatcccatggtagttgcagcactgaagtagagaaggacacccaggagaagatgaccatgcttcaaacctactttcagcagaacagggatgaagtcttggata

SEQ ID NO: 8586 - DNA, 382 bp, Bos taurus
  Clone ID: 37-LIB3057-004-Q1-K1-B10
ctcgcaaacgcacagacccacgcagttttatccggtaaagcgaatgattagaggtcttggggccgaaacgatctcaacctattctcaaactttaaatgggtaagaagcccggctcgctggcgtggagccgggcgtggaatgcgagtgcctagtgggccacttttggtaagcagaactggcgctgcgggatgaaccgaacgccgggttaaggcgcccgatgccgacgctcatcagaccccagaaaaggtgttggttgatatagacagcatgacggtggccatggaagtcggaatccgctaaggagtgtgtaacaactcacctggcgaatcaactagccctgaaaatggatggcgctggagcgtcgggcccatacccgggcgtc

SEQ ID NO: 8587 - DNA, 464 bp, Bos taurus
  Clone ID: 37-LIB3057-005-Q1-K1-B2
tcggcgagcggccgccctttttttttttttttttttgacatcgctacagagtctggttttatttaagatgaaacccattagagccaagcatgcattacaaagctattaagctcaaagaagtttgccagggaatggatcattaagaaccattttaaaaatggataggatgaatgggggcttaacaagttgtggtgtagatgaatctgcaattcaagagcttaaagtaagtgtcaatcttgcttgaatccctgcgcaggcagtggagcaggttataaaaagcggaataacgtgcatcttcatccttagtttgcagggacgggagtcctgaccacacaggggtagggctcagtcctcttggcttccaggaataaccggcccaaatttaatttcaattccttcaatggggtttcaaggatttccttaattttggtaacatttaaaaatctgtatggcatgataactgc

SEQ ID NO: 8588 - DNA, 440 bp, Bos taurus
  Clone ID: 37-LIB3057-006-Q1-K1-B10
cggacgcgtgggagaaaaacaagacccatatatatgctgtctacaagaagcccacttcagacctcaagacacagacagtctgaaagtcagaggagagaaaaatatattccatgcaaatgggaagcaaaagaaagctggagtagcaatcctcatatcagacaaaataaaccttaaaataaagaagattacaagagataaggaaggacactacataatgatcaagggattaatccaagaggaagacatgacaattgtaactatgcacccaacagaggagcacttctataaataagacaaacactaacagatataaaaggagaaattgacagtaacacaataatagtaggagactttaacaccccacacacaccaatagacagatcatcaaaacagaaaattaataaggaaacacaagtcttaaatgatacattagatgagat

SEQ ID NO: 8589 - DNA, 437 bp, Bos taurus
  Clone ID: 37-LIB3057-009-Q1-K1-B2
cgaacatggcaccgcgttggtgggcgttggtgtgtctgtccaatcatggcggtggcactgctgctcgttttcggggttccctcagcctctgcccagagaaagaaggagatggtgttgtctgaaaaggttagtcaactgatggaatggaccaataaaaggcctgtaataagaatgaatggagacaagttccgtcgccttgttaaagccccaccgagaaactactccgttattgtcatgttcactgctctccaacttcatagacaatgtgtcgtgtgcaagcaagctgatgaagaattccagatccttgcaaactcctggcgatactccagtgcatttaccaacaggatattttttgctatggtggattttgatgaaggctctgatgtatttcagatgctaaacatgaattcagctccaactttcatcaactttcctgc

SEQ ID NO: 8590 - DNA, 407 bp, Bos taurus
  Clone ID: 37-LIB3057-010-Q1-K1-B10
gcgctctctggctcgccgctgccgctgccgctgcgctccggccgctcgccgcggcccttggatgggggtgtccagctgagccccgcgatccgcctgcctctgccaggacccgcacagataaacgaatcctgaacgttgcagttttctgattgctgtgcaaggatggaggccccactggtgagtttggatgaagaatttgaggaccttcggccctgctgctcggaagaccctgaggagaagccccggtgtttctatggctcgtctccccaccatctcgaggacccctccctatctgagctggagaatttttcttctgaaatcatcagcttcaagtccatggaggacctggtgaatgaatttgatgagaagctcaacgtctgctttcggaactacaacgccaagacaga

SEQ ID NO: 8591 - DNA, 350 bp, Bos taurus
  Clone ID: 37-LIB3057-010-Q1-K1-B2
gcttgctttgagccagccaaccagatggtgaaatgtgaccctcgccatgggaaatacatggcctgctgcctgttgtaccgtggtgatgtggttcccaaagatgtcaatgctgccattgccaccatcaagaccaagcgtaccatccagtttgtggactggtgccccactggcttcaaggttggcattaactaccagcctcccactgtggtacctggtggcgacctggccaaagtacagcgagctgtgtgcatgctaagcaacaccacagccatcgctgaagcctgggctcgcctggaccacaaatttgacctgatgtatgccaagcgtgcctttgttcactggtacctggg

SEQ ID NO: 8592 - DNA, 426 bp, Bos taurus
  Clone ID: 37-LIB3057-015-Q1-K1-B10
cgagcagagaggtgcgcgagccccgacccgctgcccgcaccgccgcgcacactccggcgcccggtgcccgagaaacggcgtgatgaccgccgaggagacgaaggcggccgagagcggagcgcagtcggcgccgctgcgcctcgaaggggtggacatcagccccaagcaggatgaaggggtgcttaaggtcatcaagcgagagggcaccggcatggagacacccatgattggggaccgagtctttgtccactacacaggctggctgctcgatggcaccaagttcgactccaggctggaccgcaaggacaggttctccttcgacctggggaaaggggaggtcatcaaggcttgggatattgctgtagcgaccatgaaggtgggtgaagtgtgccatatcacctgcaagccagagtacgcctatggctt

SEQ ID NO: 8593 - DNA, 409 bp, Bos taurus
  Clone ID: 37-LIB3057-015-Q1-K1-B2
ctggctgggtagatggggaaacgtgctgtatacagcttttcttgtatagtaaaacattgtctcgccctttctgtttagaatgaccagtccatggatgagatgcaaatcattggaggcgatgatctttggactctggctggaaagaatgtcctcattgttgagtttgttggtgaagagaacacctagaagtgatggctttagacctgactatgctggatttgagattccaaacttatttgtggtgggttatgccttagattacaatgaatacttcagagatctaaatcacatatgtgtgatcaatgaacacggcaaagaaaaacttagagtctaaagaaggtaaattttaccatcgcatcttcagataacatcctacttaatgactacactcatgaagtcagcattgtaa

SEQ ID NO: 8594 - DNA, 214 bp, Bos taurus
  Clone ID: 37-LIB3057-017-Q1-K1-B10
tgttcacctatcctttcaccctctgctccttctccgctgagtcatgaaactgtttgaaatggctttatgtcacagaagactttaatccttcaaattcttgtataactttgaataaatggttaatgttcacttaaaaagacagattttggagattgtattcatatctatttgcatttgatttctaggtcaattgatgtgattattattattaaat

SEQ ID NO: 8595 - DNA, 451 bp, Bos taurus
  Clone ID: 37-LIB3057-018-Q1-K1-B2
agagtcttcaccaacagcttggtgtttggcacctcggaccgtgtctatgagaagctgaaggacctggaggaaggcatcctggccctgatgcgggagctggaagatggcaccccccgggctgggcagatcctcaagcagacctatgacaaatttgacacaaacatgcgcagtgacgacgcgctgctcaagaactacggtctgctctcctgcttccggaaggacctgcataagacggagacgtacctgagggtcatgaagtgccgccgcttcggggaggccagctgtgccttctagttgccagccatctgttgtttgccccttccccgtgccttccttgaccctggaaggtgccactcccactgtcctttcctaataaaatgaggaaattgcatcgcaaaataaatttttttttttattttttttttatttttttttttattatttatttttt

SEQ ID NO: 8596 - DNA, 341 bp, Bos taurus
  Clone ID: 37-LIB3057-019-Q1-K1-B2
gctatatacaactccgaaaaggtccaaatgtcgtaggtccatatggcctacttcaaccgatcgccgatgcaatcaaacttttcactaaagaaccactacgacccgctacatcttcagcctcaatatttatcctagcacctatcatagctttaggcctagccttaaccatgtgaattcccctaccaataccctatcctcttatcaacataaacctaggagtcctatttatactagccatatcaagcctagccgtatactccattctctgatcaggctgagcttccaactcaaaatacgcactaatcggagccctacgagcagtagcacaaacaatctcatta

SEQ ID NO: 8597 - DNA, 435 bp, Bos taurus
  Clone ID: 37-LIB3057-021-Q1-K1-B10
tcgatggccctcaacagctgccatacctccttccttcctacccctgaagataaagaacaagcgcaacagacccaccatgaagtccttatgagcttgattcttgggttgctgcgctcctggaatgaccctctctatcacctagtcaccgaggtgcggggtatgaaaggagccccagatgctatcctatcgagggccatagagattgaggaagaaaacatacgacttctggaaggcatggagatgatatttggccaggttattcctggagccaaagagactgagccctaccctgtgtggtcaggactcccgtccctgcaaactaaggatgaagatgcacgttattctgctttttataacctgctccactgcctgcgcagggattcaagcaagattgacacttaccttaagctcctgaattgcagaatcatctacaac

SEQ ID NO: 8598 - DNA, 317 bp, Bos taurus
  unsure (20)...(21),(46): unsure at all n locations; Clone ID: 37-LIB3057-022-Q1-K1-B10
atcgcgagcggccgcccttnntttgttttttttttttttttttttntttttttttttgcgtggttcacaactttaatagaatattctaactattctgtacaaattgaaaacactgtattcagttacaaatgttaagtaaggctgagcactttacagcctggccacagcctgaactccccgggccagaggtcacacactcaaaacccacacgccaccaaggacaggtcgttcgaaacccaaggcttttaagacaaaatgagtgtggggccaaaaaatgggagctacgagaaagcaagacttgtggcactacggaggaa

SEQ ID NO: 8599 - DNA, 375 bp, Bos taurus
  Clone ID: 37-LIB3057-022-Q1-K1-B2
gccgccgccgcatcctccgcgcccgccaggagccggcgtcccccgcgctccttgcgctgggcctggccatggattccgtcgcgctgatgccgctcctgctgctgctgctgctgcagcctccgcccgccacccccgcgccgcctgtccgcgaccccttcgccctgcagcttggggacacgcagaactgccagctgcggtgccgagaccgctaccctaaacctcagcttgctcaggaggagctgggggaggaccccattcaatccaggagagcgaaggcgtatgacagggccgtcctgaccagcgcttgcgagcgaggctgccgcctcttctccatctgccgattcgtggccaggagcttcaagcccaatgccaccc

SEQ ID NO: 8600 - DNA, 246 bp, Bos taurus
  Clone ID: 37-LIB3057-024-Q1-K1-B10
aacggtccgaggctgtctggctgtggaatagagaggctaggttcaggtcttctacggttgcagtgaaagtttcttgaaaatcttgttttaattgagtctttaataaatacaacgtaaaaatggcttcaaaaagagctctagtcatcctggctaaaggagcataggaaattgatacggttatccctgtagatgtcatgagacgagcttgaattaaggtcaccgttgcacgtcttgctggaaaagacc

SEQ ID NO: 8601 - DNA, 359 bp, Bos taurus
  Clone ID: 37-LIB3057-024-Q1-K1-B2
tccgcgctctcttgccccccatattggtcaatttcccgttcctcgttcctaacccaaaccgccaagagcttgaattctgaaaaaaaagttcaaatctgaaaacatcaatgctgccaagactatcgcagatatcatccgaacatgtttgggaccgaagtctatgatgaagatgcttttggaccccatgggaggcatcgtgatgaccaatgatggcaatgccattcttcgagagattcaagtgcagcatccagcagccaagtcgatgattgaaattagccggacacatgatgaagaggttggagattggaccacatcagtaattattcttgcttgtgaagatctgtctgtggctgaacact

SEQ ID NO: 8602 - DNA, 410 bp, Bos taurus
  unsure (34): unsure at all n locations; Clone ID: 37-LIB3057-025-Q1-K1-B2
cccacgcgtccggttctagatcgcgagctgacancctatttcttcccatatttaatgggcccgtttaatatcatcgatagcaactccaatgaaattgttgataacttttatgatatgaacttaaaggagtctcttcttcggggcatctatgcttatggttttgagaagccatcatctattcatcagagagctattattccatgtattaaaggctatgatgtgattgctcaagctcagtcaggtactggcaagacagccacatttgctatttccatcctgcaacatttggagattgagttcaaagagacccaagcactagtattggcccccaccagagaactggctcaacagatccaaaaagtaattctggcacttggagattatatgggaacaacttgtcatgcctgcat

SEQ ID NO: 8603 - DNA, 266 bp, Bos taurus
  Clone ID: 37-LIB3058-001-Q1-K1-B2
tgggggaggatgcaaagtctgagttgatgggggatgctcagctgaatgatggcgccctggaggctgaaacgcgggattccaatgaggaggaacccaaggagcatgtcaaacgctatgggggattgttgcgcaaataccccaagaggagctcaaaggtgaccgggaaggacgcttgggaaggggaggggggtgaggttggccatgaagacctgtacaagcgctacgggggattcttacggcgcattcgttccaagctcaaatgggac

SEQ ID NO: 8604 - DNA, 367 bp, Bos taurus
  Clone ID: 37-LIB3058-002-Q1-K1-B2
cccacgcgtccggccagtagtcatatgcttgtctcaaagattaagccatgcatgtgcaagtatgaactaattcgaactgtgaaactgcgaatggctcattaaatcagttatagtttgtttgatggtacgtgctactcggataaccgtagtaattctagagctaatacgtgcaacaaaccccgacttccgggaggggcgcatttattagataaaaggctgacgcgggctctgcccgccgatccgatgattcatgataacttgacggatcgcacggccttcgtgccggcgacgcatcattcaaatttctgccctatcaactttcgatggtaggataagggcctaccatggtggtgacgggtgacggaga

SEQ ID NO: 8605 - DNA, 437 bp, Bos taurus
  unsure (384): unsure at all n locations; Clone ID: 37-LIB3058-003-Q1-K1-B2
cggacgcgtgggtcgcagttcggttcttttggtgtggtcaggcctctggttgctagatttctgcctcggtcgcgcattatttcccgcctggggatggcgacctacacctgcaacacctgccgggcggtgttggaagatgcggaggcgcagcgggtccactacaagacggactggcaccgctacaacctgaggcgcaaagtggccggcatggcccccgtcagcctcgagggcttccaggagcgggtgcgggcacagcgggccctggcggagccagagagcaaaggcgcggccacctactgcaccgtctgcagtaagaagtttgcttccttccaggcctacgaaaaccacctcaggtctccgcggcacgtggagctcgagaagcangcggtgagtcggaaagtggcactcatgaacgagaagaacttggagaaagggct

SEQ ID NO: 8606 - DNA, 77 bp, Bos taurus
  Clone ID: 37-LIB3058-004-Q1-K1-B10
aaaaaaaaaaaaaaaaaaaaaaaaaaaaaaaaaaaaaaaaaaaaaaaaaaaaaaaaaaaggaaaagaaaaaaaaaag

SEQ ID NO: 8607 - DNA, 442 bp, Bos taurus
  unsure (417): unsure at all n locations; Clone ID: 37-LIB3058-004-Q1-K1-B2
gtggagtaaaacaatggtggggtatggacctgaggatgatcactttgtcacagagctgacttacaattacggcattggcagctaccagcttggcaatgacttcctgggtatcacggtggcttccaggcaagctgtcagcaacgctaggaagctgaagtggccgctcagtgaaatgggagatggtgtgtttgaaaccaaagcccctggaggatataagttctatttgcaggactgtagtccacctcagtcagatcctgtattaaaagtaactctagcagtgtctgaccttcagaagtccttgaactactggtctaatctactgggaatgaaaatttatgaagaagatgagaagaaacagagggctttgctgggctatgctgataaccagtgtaagctggagctgcgggccatcccggngaaaagtgatcatgcaacaggtttt

SEQ ID NO: 8608 - DNA, 376 bp, Bos taurus
  Clone ID: 37-LIB3058-005-Q1-K1-B2
tcccttgtcacctggaaccccatgcagccggaacccaggcctagcggggccggggcccgtacccaattcctgcccctgagatcacagcgccctgagggggcaggggacacggcgatgtacgcctgcaccgagtgcaaggccgaggtgacgcccttccagcatggcaaccgcaccttcagctacaccctggaggaccacacgaagcaggcctttggcatcatgaacgaactgcggctcagccagcagctatgcgacgtgacgctgcaggtcaagtaccagtacgcacctgccggccagttcatggcccacagggtggtgctggcctcgtccagccgctgtttcaaggccatgttgaccaacggtctgcgggagcagg

SEQ ID NO: 8609 - DNA, 215 bp, Bos taurus
  Clone ID: 37-LIB3058-007-Q1-K1-B10
cggacgcgtggggcctgatttccggatagctgtcacaggagttgtccttgatctggataaatctataaaaattgtaaagaaatttaaactaactggttttccatataaaattttcaagaacacttcattcattaagggaatgtttaattctgccttggaagtagccaaatttgaatgtgctatgattcgaacggtcagtggaataaggggacaga

SEQ ID NO: 8610 - DNA, 402 bp, Bos taurus
  Clone ID: 37-LIB3058-008-Q1-K1-B2
gaagaaaccaaaagaccggacccgagccactgaagagtcgttagaggcagaatcagagcctaaagcttaagaggagctttcaggtgacaaaatacttgaatctgaacaggataaaatgagccaagggtttcatcctgaaagagacccctctgacctaaaaaacgtgaaaactgtggaagaaaatggagaagaagctgagcctgtacgtaatggtgctgagagtatttctgagggtgaaggaatagatgctaattcaggctccactgatagttctggtgaaggggtcacattcccatttaagtcagaatcctggaagcctcctgattcggaaggcaagaagcagtatgacagggagtttttgctggatttccaattcatgccagcgtgtattcagaaaccaga

SEQ ID NO: 8611 - DNA, 353 bp, Bos taurus
  Clone ID: 37-LIB3058-009-Q1-K1-B10
gcggtttctggaggcgaagaacgcggttggccaatcgcaagccagaagatgaaggttctgtgggttgccgtggtggtcgcgcttctggcaggatgccaggcggatatggagggagagctggggcccgaggagcccctgactacgcagcagccccgggggaaggacagccagccttgggagcaggcgctgggccgcttctgggattacctgcgctgggtgcagaccctgtctgaccaggtgcaggaggagctgctcaacacccaggtcattcaggaactgacggcgctgatggaggagaccatgaaggaggtgaaggcctacaaggaggagctggagggacagctaggccccat

SEQ ID NO: 8612 - DNA, 398 bp, Bos taurus
  Clone ID: 37-LIB3058-009-Q1-K1-B2
ctcccagctcgaggcccgcggggagcgtggttcagtccgtcggcccgcggtggggcggcctggctgcatcttcgcggcgcccaaggacaaccattaatgggagcggcagggatggctcgttcgcggtctctctagtacaaggcggtcgacctggtcttcgccaagatgaatggctacccgcactggcccgtccggatcgatgaactcccagagggagctgtgaagccttcagccaataaatactctatctttttttttggcacccacgaaattggctttttaggtcccaaatacctcttttcttttacaaggaattctaagactagtttggaaaattattcctacggaaaggatttaatgaatgtttgttgtgaaattgaatataatccatgtattat

SEQ ID NO: 8613 - DNA, 301 bp, Bos taurus
  Clone ID: 37-LIB3058-010-Q1-K1-B10
gttctagatcgcgagcggccgacctttttttttctcttttgtgaccaaagctttttcggtgtgtttaaacaagctggcccctaatggctgcctctttgtactacatgttcctgatgctacctaacaaaaaccttatctttatcaccgatctcgatacaagcacgatgaacatcaacaacatcggtactgccgagcgcaaatacttagtgtggatcgaatgcttcatcctgggctacctgttcacctttcatcacatgctgatctactagcatgagtataaccatgtctgccccttcattgt

SEQ ID NO: 8614 - DNA, 379 bp, Bos taurus
  Clone ID: 37-LIB3058-010-Q1-K1-B2
cagctgtcgcggatctgaacgcgagctgttcctgtggctgcgcagctaccttgctgcggacagaactgtcaccatgccccactcgtacccagccctttctgctgagcagaaaaaggagttgtccgacattgccctgcggattgtggccccaggcaaaggcattctggccgcagatgagtctgtaggcagcatggccaagcgactgagccaaatcggggtggagaacaccgaggagaaccgccggttgtatcgccaggttctgtttagtgccgatgaccgtgtgaagaagtgcatcggcggtgtcatcttcttccatgagacactctaccagaaagactataatggtgtcctcttctttcgcaccattcaggataagggg

SEQ ID NO: 8615 - DNA, 432 bp, Bos taurus
  Clone ID: 37-LIB3058-011-Q1-K1-B2
ctcactcaaaatacttttcttgcttatattacaaggctcattttctcttaatctttctactattcttgttcttccttctcaaaattgagaatagtcttatttattttttaggattttgcaggatcgtggtctttccaaatatcccaatctgttaaatcaattacttgacttacaaccaagtcacagctctccctacctaattgcctttcttgtggatatctatgaagacatgctagaaaaccaatgtgacaacaaggaggacattcttaataaagcgttagaggtaagctggcaggacgtggcacttttcttctggaatctcagtgccccagtgcgcatgcccttttcaaaacacggctcctcagaactctgcagggctcctctgctgcttcaggccacacccacgtcactagtgcacgtggcctatggtct

SEQ ID NO: 8616 - DNA, 420 bp, Bos taurus
  Clone ID: 37-LIB3058-013-Q1-K1-B10
tttcacgtttgaaaatctcatgtctagaagctgaaaaaaaagaagccaaacaaaaatacacagatcaccttcagtcttatgtcatatactctttaggacaacctcttgaaaaactaaaccatttctttgaaggtgttgaagcccgggtagcacagggtataagagaggaggaagtgagctatcaacttgcgtttaacaagcaagaactccgaaaagctattaaagagtatcctggaaaagaagtgaaaaaaggtctcgataacctatacaagaaggttgataaacatttatgtgaagaggagaacttacttcaggtggtgtggcactccatgcatgatgaatgtattcgccagtacaagcattttgaaggtttgatagctcgctgttaccctggatctggtgttacaatggaattcacta

SEQ ID NO: 8617 - DNA, 379 bp, Bos taurus
  Clone ID: 37-LIB3058-016-Q1-K1-B2
gcaagatggctgccctttaggttttgttagaaaggagacccgactgcaaactgctggattgctgcaaggctgagggacgagaacgagaatgtgtttaacatggttgtggaagtacctcggtggacaaatgctaaaatggagattgccacgaaggaaccactgaatcccattaaacaagatgtaaaggatggcaagcttcgctatgtggcaaatatctttcctcacaagggttatatatggaattatggtgccctccctcagacttgggaagatccccatcgaaaagataagagcacagactgctgtggagataatgatcctattgatgtttgtgaaataggctcaaaggttctttctcgtggagaaagttgttcatgtg

SEQ ID NO: 8618 - DNA, 451 bp, Bos taurus
  Clone ID: 37-LIB3058-018-Q1-K1-B2
gctctggcccggcgcggagtgggcgctctacggggacactggaccgggcaccctgggccgggcaccgggctgtgtggagaggtgagcgggctcgcctgaccgcgtccttgccaccccgagccagaaggggcgaattcctgaggccccggtcctccgtagcctcctcccggcggcgtcggcgtgcagtctgcccggtcagctagctcgtcgccgccgacccttcccttgcccccgccccgcctccccttctccgcccagcggccgggtctgtggtggaagcagcccgaacaagactgcttgaggtgaaggatatctactaataccagcactttgaatgaaaatttgtttttctgccacaaactgaacttttttgtgtgtgtctaggggggaattgaaacaaacctaattttgtggcatagcagctatgcagcttgaaatccaagtagcacta

SEQ ID NO: 8619 - DNA, 325 bp, Bos taurus
  Clone ID: 37-LIB3058-020-Q1-K1-B2
gttctagatcgcgagcggccgccctttttttttttttttttttttttttttttttttttttttttttttttttttttttttttttttttaattttctagtatttctctggaaatttaaggggcacgaaatgcacaaactaattcccttctcctccatttaaagagtttgtgaccttttgggtaaccatttaatcaagtacttgatggcatttaaaaattaaacataaagttaagtgcctttgctgggaaggctgctataatatataattgacacttttttgggtcccttgaaacaggataaaaaaataattaaaccattgggggg

SEQ ID NO: 8620 - DNA, 499 bp, Bos taurus
  Clone ID: 37-LIB3058-022-Q1-K1-B2
ccgtaattccggtcgaccacgcgtccggtctgttcgtatgatccgtaataattaccgacgtactactactactctagctccctgtattagcggacggcatgacaatgctcttaacggactcgaaacctacatacaaccttcttggacccggctggaggaggagaccctattgtatatcaacacttattgcgattctttgcacacgcacggaactatattggtaatattacctgggcttggaatactctctcatatcgtgacctactacttatgatgaaaagacccattcggatatatgggaatagttagggctataatggcaaccggatatctacgttccatcgtatgagcccagcatatattcactgtcggaataaacatctacacacgagcctacttcacattaggcactataaccatagctattccaaccggcgtgaaagtgttcagctgacaggcaacacttgatggacgcaatatcaaatggtctcctgctata

SEQ ID NO: 8621 - DNA, 412 bp, Bos taurus
  Clone ID: 37-LIB3058-023-Q1-K1-B10
catcaacttagattcctgtgtagtagtccataggctattgataaatttggcggcccggatcttcttgttccagcctaagtaactgacacaatgctaggcctcaattcgatttttactgtgaaggtacttgaagcgatgcatgtgtgaatttaacataccgtagtcttaaagtgacctgtacatgaaggacaccgtgtgatcagaaataaagacagcctaggaaaggagcttgctaaagccatatatgcaaaccttctaatatgtgcgtttctgcaagcgccatacttgtacagcgtgatataaggtaacatggattacctttgcacaagcttcaaggttaaagctaaccctgttctttgaagcactcatgtgagcatcagaagaattggccgaagttgcttaatgtacatat

SEQ ID NO: 8622 - DNA, 175 bp, Bos taurus
  Clone ID: 37-LIB3058-023-Q1-K1-B2
ctcaaaaacctatttgtttttgttacatgtgatttttctatttctctagcccaaagtggattacagaagatacacctatagaaccattaccttttggtcaatgtgccaaggcttatctacttctggacgttcaagggctttctttaaaagccaatggcaattaccaccgaattgg

SEQ ID NO: 8623 - DNA, 418 bp, Bos taurus
  Clone ID: 37-LIB3058-026-Q1-K1-B2
tcgatcgcgagcggccgccctttttttttttttttttttttttttttttttaagtttgaagtctcctgtatttggcttttgatggctcaaaaataataagatttgacttgtttcacatatcctttttctaaaaaaatctcttacccccaccccaagaaactgtaacacccaggttaatttcctgcaataagtagtcatttaattaaagaacaaaattaacaggaatcaaaatgttgcagctgtattttttgttagacattatataaaaaaagaaaaagtataattcagtaaatcattttgtataacaggaacttaaagagttctctaattgtgatgagaattaaaaggtcttttccacatggtacttgaagacacttgttttcacaattccttggtcacagccttattgtggtttccc

SEQ ID NO: 8624 - DNA, 416 bp, Bos taurus
  unsure (8): unsure at all n locations; Clone ID: 37-LIB3058-027-Q1-K1-B10
cacgcgtncggtttaacgacagactttaatgtaatagtagaggccctgagcaaatcaaaggcagaactgatggaaataagtgaagataaaactaaaattagaagatctccaagcaaacctctccctgaagtgactgatgagtataaaaatgatgtaaaaaacagatctgtttatattaaaggctttccgacagatgcagctcttgatgacataaaagaatggttagaagataaaggtcaagtactaaatattcagatgagaagaaccttgcacaaagcatttaaaggttcaataattgcttgatttgatagtattggatcaacttaaaaggtttggtgagacccctggccagaagtacaaagacacagacctggtaatacttttcaaggaagattatttcaccaaaaaaaatgaag

SEQ ID NO: 8625 - DNA, 400 bp, Bos taurus
  Clone ID: 37-LIB3058-029-Q1-K1-B2
acggatgtagagcatctttacatgtgcttgttagccatccgtatgtcttctctggtcaaggacttgtaaaagaatgaaagtagaacactttttaacaccatacacaaaaataaactcaaaatggattaaagatctaaacctaataccagaaactataaaactcccagaggagaacataggcaaaatactctctgacacacatcacagaaggatcctctatgacccacctaccataatattggaaataaaagcaaatataaacaaatgggacctaagtaaacttaaaagcttcttcacatcaaaggaaaatattaacaatgtgaaaaggcatccttcaaaatgggagaaaataatagcatatgaagcaactgacaaacaactaatctcaaaaattatacta

SEQ ID NO: 8626 - DNA, 158 bp, Bos taurus
  Clone ID: 37-LIB3058-030-Q1-K1-B2
ctcgagaatccctgcagttgatcaagagactgggaaatgggcagttggaggaagtatggatgaggacctggaatggaaactcaagagtagccatatagactcttaagccatgcacattgtcccctgaatcatgtcttgaggaggcgcatatcatgaat

SEQ ID NO: 8627 - DNA, 280 bp, Bos taurus
  Clone ID: 37-LIB3058-031-Q1-K1-B10
cgacccacgcgtccggttcgacagatagccgtaacttctgttctgtgccagccgcatccctgagacaagatggtgaaagtcggagtgaacggattcggccgcatcgggcgcctggtcaccagggctgcttttaattctggcaaagtggacatcgtctccatcaatgaccccttcattgaccttcactacatggtctacatgttccagtatgattccactcacggcatgttcaacggctcattcatggcatattacggtattcttgttattaatggaatgg

SEQ ID NO: 8628 - DNA, 228 bp, Bos taurus
  Clone ID: 37-LIB3058-033-Q1-K1-B10
gatctagatcgcgagctgacgattttctttttttttcttgaaatttaaataaaaatttagggtaaatcttaaaatcaatttgtaaaagattaacttttccagaaaactgtaactacacaatgcattgtgtctatcatgttaaaacgtgcattagacacaaatacaaaaaccattaaacatgccaccgatcttcaacaatctaaatcatattactaatatgaagacagt

SEQ ID NO: 8629 - DNA, 428 bp, Bos taurus
  unsure (407): unsure at all n locations; Clone ID: 37-LIB3058-035-Q1-K1-B10
caaagtggaaagaaagatgttcaggtatttagatgggaggcacctgtccctgttgccaggttgggagccaaatatattctctttggtgtacaaaaccgagaactcactccagtctccctagtaccactgaagagagaagaaaaaaaaaagaatgccagcaaaacaataagagcatttgcccaaatctacctattgcagctgggagaagggggtcaaagcaaggatctttctcccatagaaagagagcactgaccccgatggcgatggactatttaagccctaactcagccaaccttacttatagcataagggagcatagtgtttgtgtagacaaagggggcgcttggccttatacctcgttagagaagagaaacagggtgtagtcagcatcttcttactcccttctncctgataacagctaccatgac

SEQ ID NO: 8630 - DNA, 433 bp, Bos taurus
  unsure (30): unsure at all n locations; Clone ID: 37-LIB3058-036-Q1-K1-B10
gtgtgaactaagttaatatcataacagtgnactgttagtaattttaaattcagaatgttaagagaatgaggtaattgttttcctaaaaactttttcctatgttataactcacaccattgtaccattttttggaggttttgtagtgtttaagaggaaagacagtaaaaatgtcatattcaataaacaatatcatgtctcaactttttaaatggttaatagggcataactgaatgctgctatcttgaaatgtgcacaggtacacttactttttctttttttaagtttttcccattcaagaaaaccttgttgtgatctgtactgcaggaaccaaatgtcatgcatcatacatatgtgtataaagtacataaaatatatctaaatatacataatggggggagggtaatattgtctgtgaaataatgtaagaaacttt

SEQ ID NO: 8631 - DNA, 393 bp, Bos taurus
  Clone ID: 37-LIB3058-036-Q1-K1-B2
cggacgcgtggggtgccccacagtctcttttcttttccagcatctggaggctgttcattgcaccaagacatctttggggatacttattgtgggattcagggtgaggtgcagaggaggacgctgcagaggcgcggactgcagggggcaacctgtgaagctgctccccaggtgtgtcctcgcccctggacacgcggaaggggaccgctgcagttttacggtcctatagtgattgcccacgtttcaataattttccgaagacatatagctcccaagtagagtgaggctcaagtactgccttggtccacgatggctagggaatcgaaggaaagcgcagctttggacgcccagtctgcagaggaccggacggggatcctgaccgtgaagtggaaaaag

SEQ ID NO: 8632 - DNA, 431 bp, Bos taurus
  unsure (25): unsure at all n locations; Clone ID: 37-LIB3058-040-Q1-K1-B10
aagatccttctattctacgtaattntttaggttgcctggcgggcatcttcatcggaagcatccaagtgatgctgctcaccatcagtgaatttaagcccacatatcaggaccgagtggccccaccaggattaacacagattcctcagatccaaaagactgaaattgcctttcgtcctaacgatcccaagagctatatgacatatgtggataacatagataatttcctgaagaagtacagagattcagcccagaaggatgatatgattttcgaagattgtggcaacgtgcccagcgaactcaaagatcgaggagaattgaacaacgaacaaggagagcgaaaagtctgcaggttcaagcttgaatggctgggaaattgctctggaataaatgatgaaacttacggctacaaagatggcaaaccatgtgtcatt

SEQ ID NO: 8633 - DNA, 442 bp, Bos taurus
  unsure (52): unsure at all n locations; Clone ID: 37-LIB3058-041-Q1-K1-B2
cgggccgacccactcgtccgctgggcctgaggagactcacgctgctgatatngttttcgtgcagcccttatcactctgtggagaactttctctcccctgggcacaatggcaactcttaaggaaaaattgattgcaccagttgcagaagaagagacaaggatcccaaacaataagatcactgtagtgggtgttggacaagttggtatggcatgtgccatcagcattctgggaaagtctctgactgacgagcttgctcttgtggatgttttggaagataaactcaaaggagaaatgatggacctgcagcacgggagcttattccttcagacaccaaaaattgtggcagacaaagattactctgtcactgccaattccaagatcgtggtggtaactgcaagagttcgccagcaagaaggggagagtcgcctgaatttggtgcaaa

SEQ ID NO: 8634 - DNA, 379 bp, Bos taurus
  Clone ID: 37-LIB3058-042-Q1-K1-B2
acgcgcgtctgcgggctgctgcagcggcggaggactcttagccagatccaggactgagctctcgggaccatgaaccctaccatcggcatcgccctcctgctaacagtcttacaggtggcccgtgggcagaaggtgaccagcctgacagcctgcctggtgaaccagagccttcgtctagactgccatcatgagaataccaccaccacgcccattcagtatgagttcagcctgacccgtgacacaaagaagtgggtgctctctggctccaatggggtcactaggccagaatacagctcccgaaccaaattcttcagcaagtacaacctcaaggtcctctacctgtccaactttaccaccaaagatgaagggatctacacgt

SEQ ID NO: 8635 - DNA, 365 bp, Bos taurus
  Clone ID: 37-LIB3058-043-Q1-K1-B10
gttctagatcgcgagcggccgccctttttttttttttttttttttttttttttttttttgtggttccatggacatgggctttatttggactctactgggggaagggagggagggagctaggactggtgggtagatgggggcagggggaaagggagaggctcctcaatttgctttttaatttagtgcatgttgcctggaggttaggatgagtgagaacagctgtggaagtgagaggtgaggaagaaagaaggtcagagagtggacactttccttggggaagcgtgccaggaccaggatatggggactggaggtggggaggaaggcacccctaatacactgagactcaaccaaggtcactgcttgct

SEQ ID NO: 8636 - DNA, 424 bp, Bos taurus
  Clone ID: 37-LIB3058-044-Q1-K1-B2
gacgagacagccgttccgggtccccgtttgcaagacgctgaagcccagctcccctccgagaaccccgtccccagcttcttaatacaactgcctcgacgctaaccattgtctaaattcccaagtgcagcaggcatccccccaccctgcccacatgcgcgtcctgcaggctcctggccagcggctcaatggagaagacggtgcagctgtcagctcacccttgaagatcagcgaggtccctgagggtccagggtgggcgaccctgcacgcccaccttctgccctgggacggccttggacgcggccctggggaccctgccgccgggcccccatgcagagtgtggagaccggcctgtggctctgagcttcctttggtttctttcccgcctgctctcacctgttaaagcactttctttcctaaccgatca

SEQ ID NO: 8637 - DNA, 421 bp, Bos taurus
  Clone ID: 37-LIB3058-045-Q1-K1-B10
gatgagttccagcttcacactaatgtatatgatggaacagtttttggtggctccatttatcagaaggtgaacaagaagttggagaccgctgttaatctggcctggaccgcaggaaacagcaacactcgcttcggaatagcagccaagtaccagattgaccctgatgcctgcttctcggctaaagtgaacaactccagcctgataggattaggatatactcagaccctaaagccaggtatcaaactgacactgtcggctctgctggatggcaagaacgtcaatgctggtggccacaagcttggtctaggactggagtttcaagcataaatgactattgtacaatcgtttaattttaaactattttgcagcatagctaccttcagaatttagtgtaccttttaatgttgtatgtctgggatgc

SEQ ID NO: 8638 - DNA, 365 bp, Bos taurus
  Clone ID: 37-LIB3058-045-Q1-K1-B2
ttaccgggccgacccacgcgttcgaacgaaatggcggtgccgaaggggagctttatggctcaggcccaactggggatcccgcggctgctgctgctggccatggccctggccggaggctcgggaaccgcttcggctgaagcgtttgactcggtcttgggtgatacggcgtcttgtcaccgggcctgtcagttgacgtatcccttgcacacctaccccaaggaagaggagttgtacgcgtgtcagagaggttgcaggctggtttcaatttgtcagtttgtggatgatggaattgatttaaatcggaccaaattggaatgtgaatctgcatgtacagaagcatattcccaatctgatgagcaatatgc

SEQ ID NO: 8639 - DNA, 413 bp, Bos taurus
  Clone ID: 37-LIB3058-046-Q1-K1-B2
gattttctggctcaagtaaacctacattttgacttgtctttgttataaatgaagtcataatgaactagccctaaagatctttatttctgtcttccataagacaagatatggcctacatacctcattccttgggctactgctgtagtcttacattcatgattatgaatttgaaagtaaatactaattatggaaatagtgctataggcctgcatgcctgaaacattttaattggtttaaagtccttttgtagaatggggtacttgatttcctttaaaggaaacatgttttctcattgaattacagggaatttttattaattccaaaaatgcagtcactttaaattatgtaagtataagatcagttccttggataaactccaagctcatttgttttaggttattaaaactggcact

SEQ ID NO: 8640 - DNA, 437 bp, Bos taurus
  Clone ID: 37-LIB3058-047-Q1-K1-B2
gtgttcggacgtaagaagacggccacatccgttgcgcactgcaaacgaggtaacgggcgcagcaaggtgaacggacgacccctggagatgatcgaaccgcgcacgctgcaatacaagctactggaacctgttctgctcctgggcaaggagcgatttgctggtgtggacatccgcgtccgagtgaagggtggtggtcacgtcgcccagatttacgccatccgccagtccatctccaaagccttggtggcctattaccagaaatatgtggatgaggcttccaagaaggagatcaaagacatcctcatccagtatgaccggaccctgctggtagccgatccccgtcgctgcgaatccaagaagtttggaggtcctggtgcccgtgcccgctaccagaaatcctaccgattagcccgtcatgaagcccagcggtttccttt

SEQ ID NO: 8641 - DNA, 387 bp, Bos taurus
  Clone ID: 37-LIB3058-051-Q1-K1-B10
gccggcgactgtgaggcgggcaactgctcctgtggaggccgttgagtcccccgcaactcgccaccatgagcagcaccctagctaagatcgcggagatcgaagccgagatggctcggactcagaagaacaaggccacagcacaccacctagggttgcttaaggctcgtcttgctaagcttcgcagggagctcattactccaaaaggtggtggtggtggaggaccaggagaaggatttgatgttgccaagacgggtgatgctcgaattgggtttgtgggttttccgtctgtggggaagtcaacgctgctcagtaacctggcaggggtatattctgaggtggcaggctatgagttcactaccctgaccactgtgcctggcgtcatcagat

SEQ ID NO: 8642 - DNA, 409 bp, Bos taurus
  Clone ID: 37-LIB3058-051-Q1-K1-B2
cggacgcgtgggcggatcccggcagcagctgcagcgcctctcgtcttgtaggctctcctagctatcgccttttcgcttccggaaacatggcctccggtgtggctgtctctgatggggtcatcaaagtgttcaacgacatgaaagtgcgtaagtcgtcgacaccagaggaagtgaagaagcgcaagaaggcggtgctcttctgcctgagtgaggacaagaagaacatcatcctggaggagggcaaggagatcctggtgggtgacgtgggccagactgtagacgacccctatgccacctttgtcaagatgctgccagacaaggactgccgctacgccctctacgatgcaacctacgagaccaaggagagcctgaaggaagacctggtgttcatcttttgggcccctgagtg

SEQ ID NO: 8643 - DNA, 410 bp, Bos taurus
  unsure (360): unsure at all n locations; Clone ID: 37-LIB3058-053-Q1-K1-B10
gcggcggcggcggcggcggcggcggctgcggcggcggctcggcaggcgggttcaggcttcaggggccagccgccgccatgatcctgctggaggtgaacaaccgcatcatcgaggagacgctcgcgctcaagttcgagaacgcggccgccggaaacaaaccagaagctgtagaagtaacatttgcagattttgatggagtcctctatcatatttcaaatcctaatggagataaaacaaaagtgatggtcagtatttctttgaaattctacaaggaacttcaggcacatggtgctgatgagttattaaagagggtgtacggaagttacttggtaaatccagaatcaggatacaatgtctctntgctatacgaccttgaaaatctgcctgcatccaaggattccatcgtgcat

SEQ ID NO: 8644 - DNA, 437 bp, Bos taurus
  Clone ID: 37-LIB3058-054-Q1-K1-B2
aggaaatcagtggtcacacctctggtattaaaaaggctttgtggtgcagtgaggataaacagatcctttcagcggatgataaaactgttcgcctttgggatcatgctactatgacggaagtgaaatctctaaattttaatatgtccgttagcagtatggaatacattcctgagggagagattttggtaataacttatggacgatctattgcttttcatagtgcagtaagtttggacccaattaaatcctttgaagctcctgcaaccatcaattctgcatctcttcatcctgagaaagaatttgttgttgcaggtggtgaagattttaaactttataagtatgattataatagtggagaagaattagaatcctacaaaggacactttggtcctattcactgtgtgaggtttagtcctgatggagaactctatgccagt

SEQ ID NO: 8645 - DNA, 170 bp, Bos taurus
  Clone ID: 37-LIB3058-057-Q1-K1-B10
taatcattctagaggtgtcgtggttaagtctacagtcatgacttctcgtttagatgcatatgcttatcagatgatgaaaactattagtataactgctgttagggaaacgaatgagcctattgatgagatagtatttcatattgtgtatgcatttgggtagtcggaggatg

SEQ ID NO: 8646 - DNA, 432 bp, Bos taurus
  Clone ID: 37-LIB3058-058-Q1-K1-B2
cggacgcgtgggcgcgagcggccgcccttttttttttttttttttactgaaaaggacattcattactttactatttacttaaatgatccaaacaaaataaacatagcaatacaaaattgcaagaaatttacaaaagctgtacaaaataacttaacatttaaaaatgggactgatacagtccatatggtctcaagggagctgtacaattacagatttatgtagcttttttaagggggtaaaagaaaggatgctttaaggcttctttaagagtgatccttttagctggttcatactccaacattttctgaataaggtcaaagagaagctcatgttcagcatcttgggaaagcataaattccttcagaggtttacaacgccttgaaacgtatctgccagcagaactatgttcatcccagtctaatcgatcatgat

SEQ ID NO: 8647 - DNA, 403 bp, Bos taurus
  Clone ID: 37-LIB34-001-Q1-E1-B10
aacaggaccccgctccccgcggacacccccgtggtgaaacaggtcaccgctctacacagacgcatggaggccgtcgtggaggtggctgccatgtgtggagtcaacatcatctgcttccaggaggcgtggacgatgccctttgccttctgtacgagagagaagcttccctggacggaatttgccgagtcagcagaggacgggccgaccatcaagttctgtcaggagctggcgaggaagcacggcatggtggtggtgtctcctgtcctggagcgagactcggaccacggggacgtcctgtggaacacggctgtggtcgttgccagctccggagcggtcctgggcaagacgaggaagaaccacatcgccagagtgggcgacttcaacgagtccacatactacatgg

SEQ ID NO: 8648 - DNA, 212 bp, Bos taurus
  Clone ID: 37-LIB34-002-Q1-E1-B10
ctagagtgcttctatgtatcccacgactgcaagcagctccttgccaatattttcatcgcggaccctgcaaagatatttacaatcacggagatcaagaagcacccctgggtcttgatgaacttgcaaaaagagctcacggaagcagcccacacaatgtacttcaacagagacatcagcggctcgagctactctgtcaagtccctggacgagat

SEQ ID NO: 8649 - DNA, 170 bp, Bos taurus
  Clone ID: 37-LIB34-002-Q1-E1-B2
ccgggccgcctcacgcgtccagaaagagctttaaaagcatggtcagtagctcgcctgagccagaaatttcccaaggctgagtttgtagaagttaccaagctagtgacagatctcacaaaagtccacatggaaggctgccatggtgacctacttgaatgcgcagatgacag

SEQ ID NO: 8650 - DNA, 380 bp, Bos taurus
  Clone ID: 37-LIB34-003-Q1-E1-B10
cttgatgaactgaaaaggcaagaagtggcaaggttaagaatgctgattaaagctaaattagattcttttcaagatacaggtatggaccaccatgctcttctaaaacaatttgatcatctaaaccacctgaatcctgacaagtttgaatctacagatttagatatgctaatcaaagcggctacaagtgatctggaacactatgataaagctcggcatgaagaatttaaaaaatatgaaatgatgaaggaacatgaaaggagagaatatttaaaaacactgagtgaagaaaagagaatagaagaagaatctaaatttgcagagatgaagaacaaacatgaatatcatcctaaagttaatcatccaggaagcaaagatcaact

SEQ ID NO: 8651 - DNA, 401 bp, Bos taurus
  Clone ID: 37-LIB34-003-Q1-E1-B2
tgcctctacagtaggtacagatggcattgtcccaactcagtcccttctcagccatggagcttctcctggcctctgccatcttctgcctggtgttctgggtggtcaggacctggcggcctcgggtccctcaaggcctgaagagtccaccggagccctggggctggcctctgcttgggcacatgctgacgttggggaagaacccgcacgtggtcctgtcgcagctgagccagcgctatggggacatgctgcagatccgcattggctgcacacccgtgctggtgctcagcggcctggacaccgtccggcatgccctcgtgcggcagggcgatgatttcaaaggccggaccgacctctacagcttcaccttggtcactgatggccagagcatgaccttcaaccca

SEQ ID NO: 8652 - DNA, 282 bp, Bos taurus
  Clone ID: 37-LIB34-005-Q1-E1-B2
cagaatgctgctgccaatgatgacccataatatcctggattgtaatactttcaacattgtacccgacatggtgggaatgcaacatcaaagactttggctggattattccactgggcattagcttcgctcagactgaaaacaaactggtctaggaacacggccacatcactcctgtgatattcctatactctccgtagcattcgttacgaactgagtcactggctactgatcagtacttacgatggacattcgatcctgtcaattaggaacatctgttcctgg

SEQ ID NO: 8653 - DNA, 299 bp, Bos taurus
  Clone ID: 37-LIB34-006-Q1-E1-B2
caggcaactggagaggaatgctgaaaacttcaaaagctgaggagttactatctgaggaaaaatcaaaaccaattccaattatgccagccagtccacaagaaggccacgctgtgaatttgctggatgtgccagttcctgttgcacgaaaactatctgcccgtgaacagcgagactgtgaagttattgaacgactcatcaaaccatactttcttagtgtcagaaagaatattcaatacagtgtgccaacagcagtactgcactttttggttaatcatgtgaaagatactcttcagagtgag

SEQ ID NO: 8654 - DNA, 321 bp, Bos taurus
  Clone ID: 37-LIB34-007-Q1-E1-B2
atctccgcttcctcctttcctcaggcatcaaagcagagaccacgggaacctaattcaccaggctctaggctggatgccccgccatgacatccctaaggccccttctgatgctggccctgctggcgtgggttgttgtggttgaccaagagtcgtgcaagggccgctgcaccgagggcttcaacgccaccaggaagtgtcagtgtgacgagctctgttcttagtaccagagctgctgtgcccacttcatggctgagtgcaagccccaagtgactcgtggggatgtgttccatctgccagaagatgagtacgggttcgatgact

SEQ ID NO: 8655 - DNA, 384 bp, Bos taurus
  Clone ID: 37-LIB34-008-Q1-E1-B10
ctcatccacagcttctgatagatccaagaggactctcctctctcagactacctgtcaccatggcccaccagtttccagccctcacttcagaacagaagaaggcactctcagaaactgcccgacgcattgttgccaatgggaaggggatcctggctgcagatgagtccgtaggcacgatggggaaccgcctgcaaaggatcaaggtggagaacacggaagagaaccgccggcagttccgcgaactcctcttcactgtggacagctccgtcagccagagcatcgggggtgtgatcctcttccatgagaccctctaccagaaggacggccagggaaaactgttcagagacatcctcaaggaaaaagggatcgtggtgggaatcaagt

SEQ ID NO: 8656 - DNA, 383 bp, Bos taurus
  Clone ID: 37-LIB34-009-Q1-E1-B10
atttgttggtagaaattatatgtccaagaagcatgatgaacttccactaggataaatataaagagattcacactgaaatatatcacacagcactgaaagtcaaatataaagagaaaatcttaaaaagcagtaagaggaaaacagttcattacatataagattaacagctgacatcccatcagaaacactggaggccagcagtgctttaaaaacctgtcaaccaagaattctatattcagcaaaattatttttcaaaaataaagacatttcaaaataaagggaagctgagaagatacattgctagcaggcctgacttacaatgctaaaataagttcttcaggctaaaagcacgtgacacaagagagtaattcaaatctatatgg

SEQ ID NO: 8657 - DNA, 379 bp, Bos taurus
  unsure (351),(358): unsure at all n locations; Clone ID: 37-LIB34-010-Q1-E2-B2
attattcttccacatgtaataacatttttatatatcatgttatcagaaattttttttcataccttatatctctctaaagctatcaaaatgtagttggtgtgagttttcagaaaaagtttttaggacaaatgacattaaaaacagcacatggttttctttcatatttgtcatttccattgtgtaccaagaagtaactaaaaggatgattgtggacagtcagtgttcataatttccattccagtggattgtgagaagtttcaaattaggaagagaaattgaggtgaagtaaaatcatgtgtttaaaatccacttttgaacctctcctttaattatgtaagatctatcacaganaactaanaaagatttatcattaaaccgg

SEQ ID NO: 8658 - DNA, 385 bp, Bos taurus
  unsure (226),(267): unsure at all n locations; Clone ID: 37-LIB34-011-Q1-E1-B10
agggacctcattagccatgacgagatgttctccgacatctacaaaatccggaaggtcccggacggcctttttcggaaggtgaagggaaaaatggccattaggacaaagggtaacatcaataactccctcattggtggaaatgcctcccctaaaggccccgagggcgaaggtaccaaaagcacattaatcactggtgtcgatattgtcaatgaaccatcacttgcangaaaccagcttcacaaaagaagcctacaagaagtacatcanagattacatgaagtcaatcaaagggaaacttgaagaacagagaccagaaagagtaaaaccttttatgacaagggctgcagaacaaatcaagcacatccttgctaatttcaaaaactat

SEQ ID NO: 8659 - DNA, 366 bp, Bos taurus
  Clone ID: 37-LIB34-011-Q1-E1-B2
agaacagctctaagccttctaattcgcgctgaattaggccaacccggaactctgctcggagacgaccaaatctacaacgtagttgtaaccgcacacgcatttgtaataatcttcttcatagtaataccaatcataattggaggattcggtaactgacttgttcccctaataattggtgctcccgatatagcatttccccgaataaataatataagcttctgactcctccctccctcattcctactactcctcgcatcctctatagttgaagctggggcaggaacaggctgaaccgtgtaccctcccttagcaggcaacctagcccatgcaggagcttcagtagatctaaccattttctctttacac

SEQ ID NO: 8660 - DNA, 383 bp, Bos taurus
  Clone ID: 37-LIB34-012-Q1-E1-B2
ggcggctctggatccactgcccacaccccgctctcgcaggcagacatgaggacagagagaatgtcccccctcctggctctggggatcctggtggctgggctctgctccagggtccactgcctcccagagaatgtgaccccagaagaacagcacaaagtgacatctgtggatggccattcattagcctccagcaacactgacttcgccttcagcctctacaagcagttggctttgaaggaccccaataagaacgtcatcttctcccctctgagcatctccatagccttggccttcttgtccctgtgggctcatggccccactgtgacacagatcctggaaggtctcaagttcaacctcacagagacccccgagacagaaatcca

SEQ ID NO: 8661 - DNA, 392 bp, Bos taurus
  Clone ID: 37-LIB34-015-Q1-E1-B2
cggacgcgtgggcaggccttgagaaatgtggctcttatacctcctgctgccagtcctgttctacagggtgggaggcgccacacccacccctcagaagctctatggggaggtgatgtccccgctgttccccaagccttaccctaacaattttgagaggaccactgtgatcacagtacccacggggtacaaggtgaagcttgtcttctggcagtttgacctggagccttcggaaggttgtctctatgactatgtcaagatttctgctgataagaagaccatggggaggttctgtgggcagctgggttctcccctgagcaatcccccaggaaggaaggaattcatgtcccaagggaacaagatgctgctgaccttccactcggacttctccaacg

SEQ ID NO: 8662 - DNA, 412 bp, Bos taurus
  Clone ID: 37-LIB34-018-Q1-E1-B10
actcaccatggctcgggcattgagagtgccagttgcactgtggctgttgggcttgtgctggtctttggctaaagcccaccctctggctagagctcctgagcttgggcacggagttgaaggtgggaatgtggccaagccggatccagaagtgacggaacgctgctcggatggctggggctttgatgctaccaccctggatgagcatgggaacatgctgtttttaaaaggggagtttgtgtggaagggtcatgcctgggcccggcagttgatctcagagaggtggaaggatgcccccagtcccgtggatgctgcattccgctatgatcgtaacagtgtccttctgatcaagggggacaaattctgggtatatcctcctgagaaaggggatgaatatccaaagttgctccaagag

SEQ ID NO: 8663 - DNA, 417 bp, Bos taurus
  Clone ID: 37-LIB34-018-Q1-E1-B2
acataaggcggtggtgttcctacttctcttatttctgaaatcaggtctcggagacctcctggatgactatgtaaacacccagggggcttccctgcttagtttgagtcggaagaacctggcgggaagaagcgtagaggactgtgcagccaagtgtgaggaggagacagacttcgtttgcagggcattccagtaccacagtaaagagcaacaatgcgtcgtaatggccgaaaacagcaagaacacccccgtctttaggatgagggatgtcattctatatgagaagagaatctaccttttggagtgcaagaccggaaatgggcagacctacagagggaccacagccgaaacaaaaagtggggtcacctgccaaaaatggagcgccacttctccacacgtggccaagttttcgcctgaaaa

SEQ ID NO: 8664 - DNA, 260 bp, Bos taurus
  Clone ID: 37-LIB34-019-Q1-E1-B2
aatttcctcatgcaacaaagcagagaccacgggaacctagttcaccaagctcgaagctggaggccccgccatgacatccctaaagccccttctgatgctggccctgccggggtgagttgttgtggctgaccaagagtcctgcaaggggcgctgcaccgacggcttcaacgccaccaggaaatgtcagtgtgacgaactctgttcttactaacaacagctgcctgtgcccacttcatgggctgagtgcaagccccaagtga

SEQ ID NO: 8665 - DNA, 405 bp, Bos taurus
  Clone ID: 37-LIB34-020-Q1-E1-B10
aatcccacataggaacccatgaaagatgatatcactggggaaccgttgatccgccgatcagatgataataagaaggccttgaaaatccgcctggaagcctaccacactcaaaccaccccgctggtggagtactacagtaaacgggggatccactccgccatcgatgcgtcccagacccctgacgtcgtgtttgcaagcatcctagcagcattctccaaagccacatcctagtaacagaaggccaggcgggactgcaccactactcatcaccccacggcatgatccctgctcttaggtgctgggcagagggaggggcggtcagggtaaggatggggacagaggagcggtgagggcccaagcgggggagaggagctgtgttgccatgaagcagtttcatttacgtgg

SEQ ID NO: 8666 - DNA, 379 bp, Bos taurus
  Clone ID: 37-LIB34-020-Q1-E2-B10
aatcccccaaaggaacccatgaaagatgatatcactggggaaccgttgatccgccgatcagatgataataagaaggccttgaaaatccgcctggaagcctaccacactcaaaccaccccgctggtggagtactacagtaaacgggggatccactccgccatcgatgcgtcccagacccctgacgtcgtgtttgcaagcatcctagcagcattctccaaagccacatcctagtaacagaaggccaggcgggactgcaccactactcatcaccccacggcatgatccctgctcttacgtgctgggcagagggacgggcagtcagggtaacgatggggacagaggagcggtgagggcccaagcgggggagaggagctgtgtt

SEQ ID NO: 8667 - DNA, 429 bp, Bos taurus
  Clone ID: 37-LIB34-020-Q1-E2-B2
tgaaggcagctccctgccggccgcatttaaacactttgccctgatgcagcgggacagctgggtggacatcttccgacttctcttctggggcggttcctatggtggtgctggacagccccagctcatcagccgcaactggtttggtctgccgggacgactggatgcggccatggccggccacatctatgtctcaggctcagctcccagcttcccccgggccaagatgactaagtctgcacgccgccatcgcaaacgctaccgctcgctccgaagccgtggtcgaggccgcggccgaaaccagaacccctaccggcgatctcgatctgccttcctgtcctggctctccagcgaggagctgggcctgggagccaacaactatgatagcttcgagatggactggcttgtgcctgccacctgtgagcccatcca

SEQ ID NO: 8668 - DNA, 426 bp, Bos taurus
  Clone ID: 37-LIB34-021-Q1-E1-B10
gcctgtcaccatggtatcccggctacctgtttccaaggatgagcccgaaacactgacattacgctctggtcaccccagccctccctccactgctacctcgttcagtggtccccgacctcgacgccagcccccaccaccacctcgttcccctttctatctggtaagttttactgtctcaaaggagaggggacaggaaactgaattcttttggagtattgctatacagtggatggaacaagataatgtcacttttatcttggtaaattacaaagcctgttttttttggacgtaatacttcaatgccactggacagagccctcccctgggcctttactcttatctgtaaaatgggaataataattcaggtcctacttttcacagaggaatagttgaggacataatgtgcttttaaaactattaatcact

SEQ ID NO: 8669 - DNA, 391 bp, Bos taurus
  Clone ID: 37-LIB34-021-Q1-E1-B2
aacgtcatgtgtgaacctggctataggatggttggttcccaggacatcctttgctcagagaacaaattctggagtccagatgtgcccaagtgtgagaaggtatctgctgaagtttgtgaggcagtctttaaaggccaaaaactcctaaagtgtctcccgaatgccatggaagcaaaggtggccctggagttacaacattgtctctggagattgaaaaactggagcaagaaaaacgcaaattggaaattgcttgaggctttctcttggatacattctcaggaaagaagttgcagtatcagtatgcttcactgtgcatgagagttcttgccacactcacacaaaatacaggatgcttggggctggtgcactagaatgaaccgaataaacgaaa

SEQ ID NO: 8670 - DNA, 446 bp, Bos taurus
  Clone ID: 37-LIB34-023-Q1-E1-B10
gggtccacgcaagcgtctacagtgtctcgcatgatgttaagagctggggctttggacacaatgtcaagactggtatgggttccctacccctgctgattaggattactgactatgagcctttgaatccccattcaagtcttttttttttttctcccccttctgtggggcttcttcgtactttataatgtttttatgatagtcaaatgacataatatatataagcatggattgtaattttaaattctatgtacatgtaagaatcactaaataaattaggagggtgtatagtctgcccttaagcatattaaaacgtgtgccataaaaatgtgtaatgccttaattatagagttaccttcactttcactttttactttcattccatggagaaggaaatgggcacccactccagtgttcttgcctggaaaattccaagggacgggggagcc

SEQ ID NO: 8671 - DNA, 408 bp, Bos taurus
  Clone ID: 37-LIB34-023-Q1-E1-B2
agccttcggaaaaatttcgaacaaaaattcaaaactttccaaaggaattgcttaggtggagtttgttgatgttagctcagtgcctctagcaataggattaactggtcagcgggttttaggagtgccgatcatagtacaagcatcacaggcagaaaaaaacagagctgcagcaatggcaaacaatctacaaaagggaagtgcgggacctatgaggctttatgtgggctcattacattttaacataactgaagatatgcttcgagggatttttgagccatttggaaggattgaaagtatccagctcatgatggatagtgaaacaggtcgatccaagggatatggatttattacgttttctgattcagaatgtgccaagaaagctttggaacaacttaatggatttgagct

SEQ ID NO: 8672 - DNA, 460 bp, Bos taurus
  Clone ID: 37-LIB34-024-Q1-E1-B2
actgagactcattgttcgacgcaacactctacagtgaatcatactattgtcaaagattcctgcccactgcccctgccctgcccctggcatcttccccacctagatccctcagcttctccaccactttccaacccccaggaccccatgctggacttcctccaatgttggccctgacactgaccaacctccttcttcccaggtctcacacacagtggaggactgtctgtccttcaaagttcaccagtactttaatgtcggacttatacagcctggggcagtcaaggtgtactcctattacaacctggatgaaacttgtatccgcttctatcacccggataaagaggacggaatgctgagcaaactctgccacaaagatacctgccgctgtgcagagggtaagtgctcaggccccaggatggtggccacaaccactggaccccggctcccttgggggtggggg

SEQ ID NO: 8673 - DNA, 159 bp, Bos taurus
  Clone ID: 37-LIB34-025-Q1-E1-B10
cacacaacagtgaccaaagtgtgtccagtgatctcacagaagacatcaaaaatggtgcatgcaccgtgaatgtgctcacagagacacgtgcacaagattctgcacccttggccttaaccttagtatgactttaggtgcaggaacatttttaacaggttt

SEQ ID NO: 8674 - DNA, 437 bp, Bos taurus
  Clone ID: 37-LIB34-025-Q1-E1-B2
acggtccgagattcccggggccaaccaacgcgttcggccgcgcccggcctcggtctgcccgccgccggctagtgccatggatgccaaggtcttcgtcgtgctggccctcgtgctgactgcgctgtgcctcagcgacgcgaaaccggtcagcctgagctacagatgcccttgccgattctttgagagccatgtcgccaaagccaacgtcaagcacctcaaaatcctcaacactccaaactgctcccttcagatcgtggcaaggctgaagaacaacaataggcaagtgtgcattgacccgaaattgaagtggattcaggaatacctggacaaagctttaaacaagtaagcacaacaaccaaaacggactttccactagacccacccgaggaaagctaaacctgaatgagataaaagggcaaaggtgccggggacgaagg

SEQ ID NO: 8675 - DNA, 389 bp, Bos taurus
  Clone ID: 37-LIB34-026-Q1-E1-B10
tcatcacatcatggggttgcagaaggtcccaagggttcggttgttcgccgatgaaagtggtacgtgagttgggtttagaacgtcgtgagacagttcggttcctatctaccgttggtgttaaagggagaactgcgaggagccagccctagtacgagagggctgggctgggtcaacctatggtgtaccggttgttatgccaatagcagcgccgggcagctaagttggtatggaagaactgctgcgccgcgggaaatccttctctatacaagttctcgtacgaagtttttgaacagaacttcgataggcgagaggtgtaagcaccgcgaagtgtgaagcgatctcgtactaaacgaatgggaattgacaacaaaggaaagctaggggggaag

SEQ ID NO: 8676 - DNA, 260 bp, Bos taurus
  Clone ID: 37-LIB34-026-Q1-E1-B2
attaccaccagattgcaattggtcgccatgtttaattattgtttgagcaaactgaatttgcattcaatgtgtctgctgatgagacgcaagattgctgagataagtcaagtctacattctctttggagaagacttgcgttaagttggatcgcttcgtgaaaactatggtgacatggcggattgctgtgtgaaattcaagactgacatgagtgattgcttcctgaggcaggaagctaatagttgagtccttcaactggtgtc

SEQ ID NO: 8677 - DNA, 401 bp, Bos taurus
  Clone ID: 37-LIB34-027-Q1-E1-B10
gtcacttcacactctctttggagatgaattgtgtaaagttgcatcccttcgtgaaacctatggtgacatggctgactgctgtgagaaacaagagcctgaaagaaatgaatgcttcctgagccacaaagatgatagcccagacctccctaaattgaaaccagaccccaatactttgtgtgatgagtttaaggcagatgaaaagaagttttggggaaaatacctatacgaaattgctagaagacatccctacttttatgcaccagaactcctttactatgctaataaatataatggagtttttcaagaatgctgccaagctgaagataaaggtgcctgcctgctaccaaagattgaaactatgagagaaaaagtactgacttcatctgccagacagagactca

SEQ ID NO: 8678 - DNA, 330 bp, Bos taurus
  Clone ID: 37-LIB34-027-Q1-E1-B2
gcaaccgagtggtggaagagtcagagctggcacggacggcaggatttgggatcaacatcttaggcatggatccgctcagcaccccttttgacaaccagtactacaatggactctgtgaccgagtttgggacggcaacaccttgacgtactaccgcaggccctggaacgtggcttcgctgacctatgacaccaaagctgacaagaatttcagaactgaaaatcatgaagaaagcattcagatactcagaactattatcgaagagaagaaattaaattttaatgcaggtttatctgtagaatatacacctgttgaagcaattgaaaaggatt

SEQ ID NO: 8679 - DNA, 420 bp, Bos taurus
  Clone ID: 37-LIB34-029-Q1-E1-B2
ccgggcccgccgacaccatgagttggtcctcgcaccctccgagtgtaatcttctacattctttcattgctttcttcagcatgcctggcatatgttgctacccgagacaactgctgcatcttagatgaaagatttggtagttattgcccaactacctgtggaattgcagatttcctgaataattaccaaaccagtgtagacaaagatctacgaactttggaaggcatcttatatcaggttgagaacagaacatcagaagccagagagctggtcaaagcaatccaaatcagctataaccctgatcaaccatcaaagccaaataacatagagagtgctaccaagaattccaagagtatgatggaagaaattatgaaatatgaaacactgataaccacacatgaatcaacaattcgatttttgc

SEQ ID NO: 8680 - DNA, 289 bp, Bos taurus
  Clone ID: 37-LIB34-030-Q1-E1-B2
actagatctagatcgcgagcggccgctcgcccatcacattaggagtctacttcacactactacaagcctcagaatactatgaagcaccttttactatctccgacggaatttacggctcaactttttttgtagccacacgcttccacgggctccacgtcatcattgggtccaccttcttaattgtctgcttcttccgccaattaaaatttcatttgacttctaaccaccacttcggctttgaagccgctgcctgatacggacatttcctagacgttatctgacctttccg

SEQ ID NO: 8681 - DNA, 144 bp, Bos taurus
  Clone ID: 37-LIB34-033-Q1-E1-B2
gagggcttgcagaaagaactcgtgagtgtggtgcccgctaggcaagtgccccagcataaggacttagcccgcagtgcacctgctcaatgctgtacgtaaggatgccctgcgtcacgatcctgtggtccctgtgaactcccgggt

SEQ ID NO: 8682 - DNA, 410 bp, Bos taurus
  Clone ID: 37-LIB34-035-Q1-E1-B10
atgagctacttggaacccctggaaagccatctagtggtgtccaacctgataccatctgcctgggagcatagaaaccagtcaactttcagtttctttcaggccacgagcatcatgcacccttgggtagccatcctgggccgcctactccttctgacagatggtgtaacctcttattctcaagtgactggaagaaccggtgagtctgtcaggctaccctgcttatatactggagaaatcacaactgcatgctggggccgaggggaatgttcttggtggagctgcagagaagacattatccagactgatggatacaaagtcacttttcagaaggacagacgttatcaactaagaggatatattggcgaaaggaatttgaccttgaccataaagaatgctgacccatctgacag

SEQ ID NO: 8683 - DNA, 429 bp, Bos taurus
  Clone ID: 37-LIB34-035-Q1-E1-B2
caagaatgctgccaagctgaagataaaagtgcctgcctgctaccaaagattgaaactatgagagaaaaagtactgacttcatctgccagacagagactcaggtgtgccagtattcaaaaatttggagaaagagctttaaaagcatggtcagtagctcgcctgagccagaaatttcccaaggctgagtttgtagaagttaccaagctagtgacagatctcacaaaagtccacaaggaatgctgccatggtgacctacttgaatgcgcagatgacagggcagatcttgccaagtacatatgtgataatcaagatacaatctccagtaaactgaaggaatgctgtgataagcctttgttggaaaaatcccactgcattgctgaggtagaaaaagatgccatacctgaaaacctgcccccattaactgctgac

SEQ ID NO: 8684 - DNA, 238 bp, Bos taurus
  Clone ID: 37-LIB34-036-Q1-E1-B2
gttcatgttagcaaacttgggacctactttggatcaatcacctgtcgtcataactggctggctactgcttttcatccacactacaccatgacctacacagatgggactgatgtcaactcgagctcttcatgtgttttgaacggagatttagttcgtgcggaggcattgattttgagaaaacgtgtcatgtaggttgtctgcatctacaacccatttacactcatcattcgtttgttta

SEQ ID NO: 8685 - DNA, 407 bp, Bos taurus
  Clone ID: 37-LIB34-039-Q1-E1-B10
cgggtccacgcacgcgtccggaataaaacactgaagagtgcatcgccaagatcatgaaaggagaagctgatgccatgagcttggacggaggctacctctacatagcaggcaaatgtggcctggtgcctgtcctggcagagaactacaaaactgagggtgaaagttgcaagaacacaccagaaaaagggtatcttgctgtagctgtggttaaaacatcagatgctaatatcaactggaacaatctgaaagacaagaagtcctgccacactgcagtagacagaaccgctggctggaacatccccatgggtttgctctacagcaagattaataactgtaaatttgatgaatttttcagcgcaggttgtgcacctggatctccgcgaaattccagtctctgtgctctgtgc

SEQ ID NO: 8686 - DNA, 436 bp, Bos taurus
  Clone ID: 37-LIB34-039-Q1-E1-B2
gtcgagtccggagtgaggagctcgggcgctggagcggagggagactcttcagcttaagcttgccgctgccacggccaccgcctgtacttttgctcggagggagtcgcagagggtctgtcgccgccgtcctctggagggcagcgcgattgggggcccagacctccagtccgggagagatttttcgtcgtcccccctccccccagcgagggagcccgagcggccgccaaacaaaggtgcaggtgaatctggtgttttcggggagatcgcgaccccaggatcatcatgaaggcgcttgatgaacctccctatttgacagtgggcactgatgtgagtgctaaatacagaggagccttttgtgaagccaagatcaagacagcagaaagacttgtcaaagtcaaggtaacatttagacatgattcttcaacagtggaagttc

SEQ ID NO: 8687 - DNA, 350 bp, Bos taurus
  Clone ID: 37-LIB34-040-Q1-E1-B10
aacaaatgattaaatcctagccccaatactggactaacctactatagaatggaagcaataatgttaatatgagtaacaagaacaattttctccttgcataagtctaagtcagtgcctgataggactctgaccactaacagtcaatatacataagcgatcaataaacaatttaatgattatactgttgacccaccagaggagtgcatctaaggaaagattaaaagaagtaaaaggaactcggcagacacaaaacccgcctgtttaccagagacatcatgctccagcattctgagtattggaggcattgcccgcccagtgacaactgtttaacgggcgccgtatcctgaccg

SEQ ID NO: 8688 - DNA, 396 bp, Bos taurus
  Clone ID: 37-LIB34-041-Q1-E1-B10
atcatgatgaatatcttggtgccatttgctcctgcaattgctttggatgccagcggggctggcgctgtgacaactgccgcagacctggggctgaacccggtaacgaaggctccactgcccactcctacaaccagtattcccagagataccatcagagaactcacactaatgtcaactgcccaattgagtgcttcatgcctttggatgtacatgctgacagagaagattcccgagagtaatagttccaacccagagaaacaagcgtggatctctgccaatgtccatccaatctgcactggtgttcgcagaccccatgttagtgtgttcctttcatataccctttactctggagtaacttctccagcttcagctcaactcacatcttctccaatcatc

SEQ ID NO: 8689 - DNA, 393 bp, Bos taurus
  Clone ID: 37-LIB34-041-Q1-E1-B2
ccaacaaaactttggcacaatgaagtgggtgacttttatttctcttcgccttctcttcagctctgcttattccaggggtgtgtttcgtcgagatacacacaagagtgagagtgctcatcggtttaaagatttgggagaagaacattttaaaggcctggtactgattgccttttctcagtatctccagcagtgtccatttgatgagcatgtaaaattagtgaacgaactaactgagtttgcaaaaacatgtgttgctgatgagtcgcatgccggctgtgaaaagtcacttcacactctctttggagatgaattgtgtaaagttgcatcgcttcgtaaaacctatggtgacatggctgactgctgtgagaaacaagagcctgaaagaaatgaatg

SEQ ID NO: 8690 - DNA, 362 bp, Bos taurus
  Clone ID: 37-LIB34-043-Q1-E1-B10
agataatgatagtcaagatcatacgatctcagaaatagaatggcgaagatggaacagatgtttaccaaagacctgtacgaactagaagaccaacagagatgaaccatacactacgaagcaatcagtagcagaataactgaggcagaagaacagataagtgacctggaggactgcgtggtgaaaatcactgccacagaacagaatatagaaaaaagaatgaaaacaatgaagaccagactaagaggcctctgggacaacagtaaacacaccggcatttgcattataggggccccagatggagaagagagagagaaaggacccaagaaaatatttgtgaagtagatgaaaatttccctaacatg

SEQ ID NO: 8691 - DNA, 419 bp, Bos taurus
  Clone ID: 37-LIB34-044-Q1-E1-B2
agattcggtaactgacttgttcccctaataattggtgctcccgatatagcatttccccgaataaataatataagcttctgactcctccctccctcattcctactactcctcgcatcctctatagttgaagctggggcaggaacaggctgaaccgtgtaccctcccttagcaggcaacctagcccatgcaggagcttcagtagatctaaccattttctctttacacttagcacgagtttcctcaattttaggagccatcaacttcattacaacaattatcaacataaagcccctcgcaatgtcacaatatcaaacccctctgttcgtatgatccgtaataattaccgccgtactactactactctcgctccctgtattagcatccggcatcacaatgctattaacagacgggaacctaaa

SEQ ID NO: 8692 - DNA, 398 bp, Bos taurus
  Clone ID: 37-LIB34-045-Q1-E1-B10
ctcagatttcacctgcactggctggaccatgggctattatatgtgctggcaagtcttccaatgagatcaggacatgtgatggccatggctgtggccagtacacggctcagagaaatcagaagcttcaccaaggtgtagatgtcttgtgctcagatggctctacggtttacgcacctttcaccggaaagatcatgggcaagaagaaaccttatagaaacagaaatgccatcagtaatggggttcggatctcgggaggaggtttctgcattaaaatgttctacatcaagccaattaagtataaaggttctatcaagaagggagaaaaactgggaactccgctccccttgcaaaaagtttaccctggaatacaatcccacatacatattgaaaactgtgac

SEQ ID NO: 8693 - DNA, 364 bp, Bos taurus
  Clone ID: 37-LIB34-045-Q1-E1-B2
cgggtccaccacgcgtccggagaacccctgacgccgatggctgcgtgcacgcggacccggatctgggtgtgttgtgtcctacaggatgtaagttgcaagatactttgggaagacaggagagaccaatccgagggagtatagaagatttacgtaatactgtgggctctgtttcacggacctcgtcgtccacctttcaatagataactctgctaaaagacatgtgggaaggaaagcagaatcaagtacaagataatggaaatgtagtaaacgagtactcctcacatccggagaagcaccagttatatatagatgagactgtgaagaataatatcccaactaagcttcgtgtgctccgttcaattct

SEQ ID NO: 8694 - DNA, 425 bp, Bos taurus
  Clone ID: 37-LIB34-046-Q1-E1-B2
gatgcatcctaatttttctgagtctcagcttctttccctgtaacctggagatgtattggctgtcctcctgcctttcataattgtaatgaaaacacaaaacacagaaggtatgtgaaagtactttaaaaattacaaagttacttgaattaaaggtaacaatatgtggtaaatgtcttctgtactcctatctttatcagtgcattatgaccctaggtaaattcttgttactaagccagtaactaggaatcagtataatttaacaggacttctatcctgaataactgataactagcatggaaaaatgaatatatgtgtgtgcagatatggttattgagagctacaactttcagcatttgccccacacacagtcagttccttctggttcagtgaattgacctccttcacagtctgacacatccttgtct

SEQ ID NO: 8695 - DNA, 263 bp, Bos taurus
  Clone ID: 37-LIB34-047-Q1-E1-B10
acgcgtccgaggacacgtgggcaggtccctggaagcagcctggccccctctgctcatccctggaaggtgacagcgacagtgctaggggctccaggtgcacgggcgctgtatgtcctggtgacaaggaggctctgggccacagaacagcaataaagcaccttccttggaaaaaaagataaaaaaaataaaaaaagacaaaaaaaaaaaagaaaaaaaaagaataaaacaaaaaaaaaagcaaaaaaagaaaagcgtcacaactg

SEQ ID NO: 8696 - DNA, 363 bp, Bos taurus
  Clone ID: 37-LIB34-047-Q1-E1-B2
aagcagtgtccagttgatgagcatgtaaaattagtgaacgaacgaactgagtttgcagaaagatgtgttgctgatgagtcccatgccggctgtgaaaagtcagttcacactctctttggagatgtattgtgtaaagttgcatcgcttcgtgaaacctatggtgacatggctgactgctgtgagaaacaggagcctgaatgaaatgaatgcttcctgagccagaacgatgatagcctagacctcacgacattgataccagaccccaatacattgtgtgacagagtttaaggcagatgataagaagttttggggaagatacctatactagagtgctagaaagagatccctacttttatgcaccag

SEQ ID NO: 8697 - DNA, 371 bp, Bos taurus
  Clone ID: 37-LIB34-048-Q1-E1-B2
ggtttaaagatttgggagaagaacattttaaaggcctggtactgattgccttttctcagtatctccagcagtgtccatttgatgagcatgtaaaattagtgaacgaactaactgagtttgcaaaaacatgtgttgctgatgagtcccatgccggctgtgaaaagtcacttcacactctctttggagatgaattgtgtaaagttgcatcccttcgtgaaacctatggtgacatggctgactgctgtgagaaacaagagcctgaaagaaatgaatgcttcctgagccacaaagatgatagcccagacctctctaaattgaaaccagaccccaatactttgtgtgatgagtttaaggcagatgaaaagaaattt

SEQ ID NO: 8698 - DNA, 282 bp, Bos taurus
  Clone ID: 37-LIB34-049-Q1-E1-B2
gtgccatctgtggatggtcagtcactagcctcaaccaacaatgacttcgcgttcagtctctacaagcaattaggcttgtaagacctcacacagaacttcatcttgaatgctctgatgcatcaccaaagtcatggccctcatgtcacggagggtctcacgacctacatgtgatagagatactgaaaagtctcaagttcaacctcagagagactgtcctaaacctttgttagcaaagtcttcaagcaactcctgaagtacgttcaatcagccaaacatgaaaat

SEQ ID NO: 8699 - DNA, 408 bp, Bos taurus
  Clone ID: 37-LIB34-050-Q1-E1-B10
ttccgtagccacccacgcgctccgcatggagaccattggggaacatgacccctggtactgtcccaactgtaagaagcaccagcaggccacaaagaagtttgacctgtggtccttgccgaagatcctggtggtccaccccaaacgtttctcctacaatagatactggagggataagcttgatacagtcgtggagttcccagtcagaggtctgaacatgtcggagtttgtctgtgacccgtcagcgaggccatatgtgtacgatctcatcgccgtgtccaatcactatggagccatgggggttggccactacactgcgtacgcgaagaacaaactgaacgggaagtggtattactttgatgatagcaatgtgtccctggcctgtgaggatcagatagtgacgaaagcagc

SEQ ID NO: 8700 - DNA, 426 bp, Bos taurus
  Clone ID: 37-LIB34-050-Q1-E1-B2
atgatttcttgcaacttcgaaaaatttaaaaccatgaaacatctattactgctacttttctgtgcttttatagttcaggcccaatttcctactgactatgacgagggacaagatgacagacctaaggtaggtttgggtgcccgcggtcatcggccctatgacaagaagaaggaagaggcccccagcctgagacctgtgccccctcccatcagcggaggtggctatcgggctcgtcccgccacagcaactgtgggccagaagaaagtggagagaaagccccctgacgctgatggctgcctgcacgcggacccggatctgggtgtgttgtgtcctacaggatgtaagttgcaagatactttggtaagacaggagagaccaatccgaaagagtatagaagatttacgtaatactgtggactctgtttcc

SEQ ID NO: 8701 - DNA, 232 bp, Bos taurus
  Clone ID: 37-LIB34-051-Q1-E1-B2
cagctagagccaaggtgtggatgttggagtgttgtttttgttctcttttttacagaaactttgaaaaaaaaacactgtaggtctcccccatgacaatgtcttccattaagattgagtgtgttttgcgggagaactgccactgtggtgagtctccagtgtgggaggaggcgtccaactctctgctcttcgtagatattcctgccaaaaaggtttgccggtgggattctctcac

SEQ ID NO: 8702 - DNA, 243 bp, Bos taurus
  Clone ID: 37-LIB34-052-Q1-E1-B2
caccccaacaacagcttcagcccctgcagcgcccacgaccgcaagtgcctgcagaagcacttggccaaaattcgagaccggagcaccagtgggggcaagatgaaggtcatcggggcgccccgagaggaagcccggcctgtgccccagggctcctgccagagtgagctgcaccgggcgctggagcggctggccgcctcacagagccgcacccacgaagacctttacatcattcccatccccaac

SEQ ID NO: 8703 - DNA, 260 bp, Bos taurus
  Clone ID: 37-LIB34-054-Q1-E1-B2
ccgggtccacccacacgtccgagaagggctacccttttagtcttccatcatgagaaccatatagaggaaggatccttgtcgctgcggcgacacccgcattctccgtcgccatgactgaacagatgacgcttcgtggcaccctcaagggccacaacggctgggtgacccagatcgctaccactccccagttcccggacatgatattgtccgcctctcgagataagaccatcattatgtggaagctgaccagagatgagacc

SEQ ID NO: 8704 - DNA, 336 bp, Bos taurus
  unsure (296): unsure at all n locations; Clone ID: 37-LIB34-055-Q1-E1-B10
aataatctctcatatcgtgacctactactcaggaaaaaaagaaccattcggatatatgggaatagtttgggctataatgtcaatcggatttctaggtttcatcgtatgagcccaccatatattcactgtcggaatagacgtcgacacacgagcctacttcacatcagccactataattattgctattccaaccggggtaaaagtcttcagctgattggcaacacttcatggaggtaatatcaaatggtctcctgctataatgtgagccctaggctttattttcttatttacagtanggggtttaactggaattgtcttagccaactctttcctcga

SEQ ID NO: 8705 - DNA, 353 bp, Bos taurus
  Clone ID: 37-LIB34-055-Q1-E1-B2
gggcactttgctgagactagacaggagctgaggcagaggagaaaagtgcagagcagagccatgaagattatcttggatctccttctgcttctgctcatcatcatttattcctacttggaatctctggtgaaggtcttcattcccaggaggagaaaatctgtggctggagagattgttctcattacaggagccgggcatggaataggcaggcagaccgcctatgaatttgcaaaacggaagagcagactggttctgtgggatattaataagcatggtgttgaggaaactgcagcagaatgcagaaaactaggggccactacacacgtgtttgtggtagactgcagtaacagaga

SEQ ID NO: 8706 - DNA, 385 bp, Bos taurus
  Clone ID: 37-LIB34-056-Q1-E1-B2
acaaaactctatactgagtcgtattagcccagtgctctgaatgtcaaagtgaagaaattcactgaagcgcgggtaaacggcgggagtaactatgactctcttaaggtagccaaatgcctcgtcatctaattagtgacgcgcatgaatggatgaacgagattcccactgtccctacctactatccagcgaaaccacagccaagggaacgggcttggcggaatcagcggggaaagaagaccctgttgagcttgactctagtctggcacggtgaagacacatgagaggtgtagaataagtgggaggcccccggcgcccccccgtttcccgcgagggggcggtgcggggtccgccggccttgcgggccgccggtgaaataacactactc

SEQ ID NO: 8707 - DNA, 204 bp, Bos taurus
  Clone ID: 37-LIB34-059-Q1-E1-B2
gccctatccacggcagagatgttttccgtgagggacctctgcctggtcctgagtttggtgggtgcaattaagacagaagatggtagtgatcctcccagtggtgactttttaactgaaggaggaggggtgcgtggcccaagacttgtggaaagacagcaatctgcctgcaaagagacaggctggcccttctgctctgatgaagac

SEQ ID NO: 8708 - DNA, 316 bp, Bos taurus
  Clone ID: 37-LIB34-060-Q1-E1-B10
acgaaaaccgagtaacgaagatggaacgactggagatcactactcttgctcttgtgatttgtgtcacatgcctggtttttctttttgtgtggaagaaaagtcacaaacgtttgggaaagctcactcctggtccaactccccttcacatcaatgggaatctgatggaactaaacctcaatgacatcgctgcatctctttccaagttggtcaaacaatatggacctgtttacactctgcaccttggatccgagaccactgtggtcttacatggatatgaagtggtgaatgaagctctaattgaccaaggtgatgaatt

SEQ ID NO: 8709 - DNA, 241 bp, Bos taurus
  Clone ID: 37-LIB34-060-Q1-E1-B2
acggaacttaggagcaggtccgggctgaagtcgcctcccagatggcctccaggctgaccccgctgaccctcctgctgctgctgctgctggctggggacagagtcacctcagatatgatcgtcggcccagggaacttacaagaaggggaaagtgaaggagacagccagaaaggaggtattctcgatggtgagtccattcaaggcaacgaggactctcccaccttgctgataactaacctgac

SEQ ID NO: 8710 - DNA, 445 bp, Bos taurus
  Clone ID: 37-LIB34-061-Q1-E1-B10
cgcctggctgtacgggccgtaacttccggaggcccccacgggcccgatagacgcaccaaaaaataagacagctaagagccctgtaggggtgcagcccatactgaatgagaacaccttctgcgtcggcctgtccaagtaccaggacgacacctgctatggcgacgccggcagcgccttcgtcgttcacgacaaggaagacgacacctggtatgcggccgggatcctgagctttgacaagagctgtgctgtggctgagtatggtgtgtacatgaaggtgacctccattctggactgggttcggaaaaccatcgctaacaactaaggcggggctggctaggagcagctgcctggaaggacgaggggaaagctgcacaggagtggaggggacacgagtgcagtgtggcgctggtgggttccagccaataaagagcttgctttgcctcaa

SEQ ID NO: 8711 - DNA, 215 bp, Bos taurus
  unsure (63): unsure at all n locations; Clone ID: 37-LIB34-062-Q1-E1-B2
ggcccgcccccatccacacgtaccacctaacccttttattttcaacccaagaaaacatataanccagcatcaacaaaaaagaggatggtttgtgtacaaacgggagccatatggcattcgagtggctccagttcctctctacaattctttccatgatgtttataaatttatcaagctgctcacttctgtacttggctctgtagaaacataaaatt

SEQ ID NO: 8712 - DNA, 403 bp, Bos taurus
  unsure (32),(300),(373): unsure at all n locations; Clone ID: 37-LIB34-063-Q1-E1-B2
ttctggaatgtggttgcgatatgggaacacangacccgaaagctgagcaaggcctttgggtccccccgcctggcctgttacaccctgggtggggccatcctgctcttgaacgtcctgcgctcccactgcttcacgcaggccatgctgagccagccccggatgcagagcctggacaaccccgcggtctaccacgtgggcctggcactcctgggagtgggtggcgtgttcgtcctttccagtttcctggcgctgggcttcaccgggaccttcctaagcgactacttcgggatcctcaaggangccagagtgaccatgttcccgttcagcgtcctggacaaccccatgtactggggcagcacagccatctacctgngctgggccattgtggccgccagacgctgac

SEQ ID NO: 8713 - DNA, 392 bp, Bos taurus
  Clone ID: 37-LIB34-064-Q1-E1-B10
agacactagcatcatgaatatatttgatcggaagatcaactttgatgcactccttaaattttcccacataaccccctcgacacagcagcacctgaagaaggtttatgccagttttgccctctgtatgtttgtggcggctgcgggggcctatatccatgtggtcacccatttcattcaggctggcctgctctctgccttgggctctttggggttgatgatttggctgatggcaacacctcacagccatgaaactgagcaaaaaagactgggacttcgggctggatttgctttccttacaggaattggcctgggccctgctctggacttgtgcattgccatcaaccccagcatccttcccactgccttcatgggcacagcaatgatcttcacct

SEQ ID NO: 8714 - DNA, 228 bp, Bos taurus
  Clone ID: 37-LIB34-064-Q1-E1-B2
aaccttccagccaacacagctttgctacggtttggctttccccaggcatggctgatcaccgaagcctgtatcacaaaagtggcagccaaatgtgggttaccccctgagaaagtccgaatgataaacatgtataacgaacttgatcacacaccctacaaacaggacattaataccacgaacctgacccagtcttggaaagaatgcatggccacgtcttcctacacccta

SEQ ID NO: 8715 - DNA, 216 bp, Bos taurus
  Clone ID: 37-LIB34-065-Q1-E1-B2
ctggtggagctcacgtacaccagcaacgacagcgccctcttcatcctccccgatgagggcaaaatgcaggacctggaagccaagctgaccccggagacgctgacgcggtggcgaaactccctgcagcccagacttatacatcgactcaggctgccaaggttttccatctccagccactaccagctgaaagacatcctttcccagctgggtatcaag

SEQ ID NO: 8716 - DNA, 261 bp, Bos taurus
  Clone ID: 37-LIB34-066-Q1-E1-B2
tctagatcgcgagcggccgcccttttttttttttttttttttttgggttttctgttttcttttttcacatctggatggctgtcaccagagatctttcagtcgctagcatgttcctcctcttctcccctccccactttttctttctattaatcaaaagaaatttcaaaatcaatgggatggtcggatctcacaggctgagaactcgttcacctccaagcatttcatgaaaaagctgcttcttattaatcatgcaaactcttg

SEQ ID NO: 8717 - DNA, 238 bp, Bos taurus
  Clone ID: 37-LIB34-067-Q1-E1-B2
aatgactgcggagactattcagatgaggataactgtgaacaggatcctcgtcccccttgccgcaaccgagtggtggaagagtcagagctggcacggacggcaggatttgggatcaacatcttaggcatggatccgctcagcaccccttttgacaaccagtactacaatggactctgtgaccgagtttgggacggcaacaccttgacgtactaccgcaggccctggaacgtggcttcgc

SEQ ID NO: 8718 - DNA, 235 bp, Bos taurus
  Clone ID: 37-LIB34-070-Q1-E1-B10
gaaaagcttcttaaatcagagagaaactttgagagaaacttccaaggcaaatttcccaaagaaaatgggcaccaagggaaaaattattaaatgcaaagcagctatcgcctgggaagcaaacaagcccctcagcattgaagaggttgaggtagctccccccaaggatcatgaagttcgaatccagataattgccagctgctctgtgccattctgatgcccaatattctccaatcct

SEQ ID NO: 8719 - DNA, 234 bp, Bos taurus
  Clone ID: 37-LIB34-070-Q1-E1-B2
gaacgccccctccgtcaacaactgcgcgcaggatcgggagagccccgatggcagttacacagaggagcagagtcaggagagtgaggtcaaggtgctggccacagactttgatgacgagtttgacgacgaggagcctcttcctgccatagggacatgtaaagccctctacacgtttgaaggtcagaatgagggaaccatttcagttagttgaagggagagacgcctgtacgtaat

SEQ ID NO: 8720 - DNA, 416 bp, Bos taurus
  Clone ID: 37-LIB34-071-Q1-E1-B2
ctggaggcgaagaacgcggttggccaatcgcaagccagaagatgaaggttctgtgggttgccgtggtggtcgcgcttctggcaggatgccaggcggatatggagggagagctggggcccgaggagcccctgactacgcagcagccccgggggaaggacagccagccttgggagcaggcgctgggccgcttctgggattacctgcgctgggtgcagaccctgtctgaccaggtgcaggaggagctgctcaacacccaggtcattcaggaactgacggcgctgatggaggagaccatgaaggaggtgaaggcctacaaggaggagctggagggacagctaggccccatggcccaggagacacaggcccgcgtgtccaaggagctgcaggcagcccaggcccggctaggctccgacatg

SEQ ID NO: 8721 - DNA, 278 bp, Bos taurus
  Clone ID: 37-LIB34-072-Q1-E1-B2
tctcccgggccgtccgatcgcttccaggggcacatgggttccagatcgcgagcggacacccgggcttcctgcactggttgagaagtgtccacccctgcgtcagtcggccatttccgtcaagctgagtggtgctttcacaggactgtcccagcccattggcatccaggaactgctgaaatgtcattaggaccacgtcgagcccaccactgatgtgttcacctgcagcgatccctggtgtgtagcactttggcattgtcactcagttgttgcatagtgct

SEQ ID NO: 8722 - DNA, 420 bp, Bos taurus
  unsure (61),(189),(333),(363),(384): unsure at all n locations; Clone ID: 37-LIB34-073-Q1-E1-B2
agatttctgtgcagaaattgaatttagttttcagcctttagctaaggactttttccagtangtgctcagctacttaaacccataaaactattctcaaacattcatcattagacaactggagtttttgctggttttgtaaccttctaaaatggataggctattgaacattccacattcaaagttttgtanggtggtggggaaggggggaatcttcaatgtttattttaaaataaaagaagttcttgacttttctcatgtgtggttgtggtacatcatattggaagggttatctgtttacttttgcaaataagtatttcttctgctagcacctcnccttgtgtgctttaaatgacatctgcctgngatgtaccacaaccatatgtntgttttattttaagcagatagataaaatatttgtgg

SEQ ID NO: 8723 - DNA, 417 bp, Bos taurus
  Clone ID: 37-LIB34-074-Q1-E1-B2
atggaaacccgaggcgtgtttgcggcggaggcgccgttatcccgggcccagcagacccgagcctgaggcggccgcagactggctctcagtgatcgctcatccccgctggactttggttccgtggtgcacatggagtgtaggactcaggggtctgggccagagtgagcgaagcctgaggcccaagatggagaagaaacgaagaaagaaatgaaagcctcgtttcaggccaagccacaagaggccatgaaatttaacttttatttacgttggacaagactgtaaaatggcggatcagtaatgtttcagctgaaagctgaaacaaaaattaacttataatcaaggaagaaaaaagtgcgatttgagtttatgcgattttatgaccatactcacttacgaccatgaagcttgtcaacatct

SEQ ID NO: 8724 - DNA, 411 bp, Bos taurus
  Clone ID: 37-LIB34-075-Q1-E1-B10
caagcctcaagagagagtcgtactaccatccccagaccagccaagcctgtgagtgacaccccagacagaggaaccagagccatgcggagtctcagcggactgctgttgttactgactgcctgcctggcggtaaacgccagctccgtgcccacattgcccgatgacattcaagtgcaggagaacttcgacctgtctaggatctatgggaagtggttcaatgtggccgtgggctccacctgcccatggctgaagaggttcaaggagaagatgaccatgagcacagtggtgttgaaagcggggccgacgagcaaggagatcagcgtcaccaacactcacaggcggaaaggtgtctgtgaatcgatctctggtacttatgagaaaacaaacactgatgggaagtttctctatcac

SEQ ID NO: 8725 - DNA, 432 bp, Bos taurus
  Clone ID: 37-LIB34-075-Q1-E1-B2
gtcgatgcaccactctaaagtgagtcgtattactccagtgtttttgcctggagaaccagggacgggggagcctggtaggctgccgtccctggggtcactcagtcggacatgactgaagtgacttagcagcagcagcagcagtgagtttccactgagatacaagagcttctctgatttttttttcccccaagtattctgaagatctcaagcactgtctaggaaatttttaaaatatttttactgtggcaaaatcataaaagttaccatcctgactttttaagtgtacagtacagaagcgctaactatatgcagattattgtggaaaataaagcacctttaacccctgttccccactggcaaggcaccaacagccactgccctagccgtaattttctttccctgcaacactggcagtattggcagtaactgccc

SEQ ID NO: 8726 - DNA, 285 bp, Bos taurus
  unsure (178): unsure at all n locations; Clone ID: 37-LIB34-076-Q1-E1-B2
ataaccaaggaacgctgtgtcttcataaaccagtggcaggtcaaccatgacccgaagctgtggggggacccatctgtgttccggccagagagattcctcacgtctgatggcaccaccattgataagacggcaagcgagaaagtgttactcttcggcatgggcaagcgccggtgcatangggaggtcatggccaggtgggaggtcttcctcttcctggccatcttgctgcaacggctggagttcagcgtgccaccaggtgtgaaagtggacctaacccccacctat

SEQ ID NO: 8727 - DNA, 315 bp, Bos taurus
  Clone ID: 37-LIB34-077-Q1-E1-B10
acccacgcgtccggttaaggactcacagaatggatggcatcattcaagtatggctatactccagaggcggggtcatagagctattccagaagcagaaattggcttaacagttcattttgttacgacagagaagtactgtgatacatacggcgagcccagtacaggattgaagacaacaactccaggtccaaacctttcccaagccttaacacccaatgagagtttaatgccaaatgcctcagtgaatacgacaacatatgtagctgacacagaatcagaacatggcagatacatgtatggatttgactgaaagac

SEQ ID NO: 8728 - DNA, 262 bp, Bos taurus
  unsure (113): unsure at all n locations; Clone ID: 37-LIB34-077-Q1-E1-B2
tatcggcttctgactcctccctccctcattcctactactcctcgcatcctctatagttgaagctggggcatgaacaggctgaaccgtgtaccctcacttagcatgcaggctancccaagcacgagcttcagtagatctaaccattttctcgttacacttagcaggagtttcctcaattttaggagccatcaccttcattacaacaattatcaacataaagcccctcgcaatgtcacaataccaaacccctctgttcgtaaga

SEQ ID NO: 8729 - DNA, 307 bp, Bos taurus
  Clone ID: 37-LIB34-078-Q1-E1-B2
tatagtaagtcgatatatgtctgcttgggcagccctcctgctgctctggggtctgtccctgagctcattgactgttcatgcgacgttctttggccccatgccatcgctgtgggctgaagccggctcagggctggcaccctgggccgatgttactctgacctgccagagcccgctgccgacccagtagtttcagctcctcaaggatggcgtgggccattaaccggtgcacctggagtctcctgtccatgagcacatgttcgcgctgggaccagtgaccagcatcatccgggggctctagtgctgcagc

SEQ ID NO: 8730 - DNA, 345 bp, Bos taurus
  Clone ID: 37-LIB34-079-Q1-E1-B2
ggtcgaccacgcgtccggttggactggaatcctgatctgggtctcacgcaagtcgtcaccagcgatgctgacttctcaagagtcacaaatgaccacaagctggcacctttcccaagtgatccacaaggccgtgctcgacgtgggcgaggagggcacggaaggagctgctgtcaccgatgtcacaacgtttacttcattaccgttgcacgcgctaaatatcagtttcaacaggccctttctgctttccatactctgcaaagagactcatagcatcatccttttgggcaaagtcagcacccccaatgaagcctagagctccccgcctccctaacgaagtgggtgccc

SEQ ID NO: 8731 - DNA, 418 bp, Bos taurus
  unsure (399): unsure at all n locations; Clone ID: 37-LIB34-080-Q1-E1-B10
agattccaggctcggagccccgggcccgccgataccatgagttggtcctcgcaccctccgagtgtaatcttctacattctttcattgctttcttcagcatgcctggcatatgttgctacccgagacaactgctgcatcttagatgaaagatttggtagttattgcccaactacctgtggaattgcagatttcctgaataattaccaaaccagtgtagacaaagatctacgaactttggaaggcatcttatatcaggttgagaacaaaacatcagaagccagagagctggtcaaagcaatccaaatcagctataaccctgatcaaccatcaaagccaaataacatagagagtgctaccaagaattccaagagtatgatggaagaaattatgagatatganacactgataacaacacatg

SEQ ID NO: 8732 - DNA, 143 bp, Bos taurus
  Clone ID: 37-LIB34-081-Q1-E1-B10
gtctgcgtaccagatttccctatatcgagtcgtattatatgcatgggagctcggggtttcatggcgtttgcacctcacacttttgaacggggaatgacacatagtttgtaactgcgccgcatcatacgaaaaccaatatcaat

SEQ ID NO: 8733 - DNA, 394 bp, Bos taurus
  unsure (174),(303),(382): unsure at all n locations; Clone ID: 37-LIB34-082-Q1-E1-B2
atgttggttggggttgtgatggaggtggagtgggatgcactgagagtgctgggagcggttacagccctgttcctgctgctgtgggcgacctgggctgtgggatccacagtctatatttacctgctgcctcaggcacgccggagcaaccactggctccgggcacacggggcctgngcagtggtgacaggagccaccagcggcattggcaaggcttacgcacatgagctcgcccggagaggtctgaacgtcgtcctcatcagtcgagacctgagcaagttgaagcacgaggcaaaggagatagangggctttacggcaaaagaacacgagtgattcaggtggatttcaccgggggcttggaaatctacgagaccattgaggcangactgaagggcc

SEQ ID NO: 8734 - DNA, 387 bp, Bos taurus
  Clone ID: 37-LIB34-083-Q1-E1-B2
gccgaaggagcgagcgagcgagcgagcgagcgagcgagcgagccgagcctcccgccgccgccatgggccagaacgacctgatgggcacggccgaggacttcgccgaccagttcctgcgcgtcacgaagcagtacctgccgcacgtggcacgcctctgcctcatcagcacgttcctggaggacggcatccgcatgtggttccagtggagcgagcagcgggactacattgacaccacctggaactgcggctacctgctggcctcctccttcgtcttcctcaacctgctcggacagctgaccggctgcatcctggtgctgagcaggaacttcgtgcagtacgcctgctttgggctctttggcatcatcgcgctgcagacgatcgcctaca

SEQ ID NO: 8735 - DNA, 421 bp, Bos taurus
  Clone ID: 37-LIB34-084-Q1-E1-B10
acatttgcaatctcataattagtggatgtgactctacactcactgtactgggcatgagtgctgtaatttcctcaatagcccattatttgggtcttggaatattggctttcattgggtcaactgaagaagatgataggcgacttggctttgtagcacctgttttatttttcattttggctcttcagactggtttaagtgggctaagaccagaagagagacttatccgcttaagcagaaacatgtgccttttattaacagcagtcctgcatttcatccatggaatgacagaccccgtattaatgtcgctcagtgcctctcatgtgtcatctcttcgtaaacatttttcctgtgctccttggttctgcttgcctgtttaatcttcctgttatactcagttatgttctttggcatcactatgcac

SEQ ID NO: 8736 - DNA, 431 bp, Bos taurus
  Clone ID: 37-LIB34-084-Q1-E1-B2
ggtcgacgcccgcgtccgatttgacgccgggacacaggtgtcgtgaaaaccaccgttaaacctaagccaaaatgggaaaggagaagacccacatcaacatcgttgtcattgggcacgtagattcagggaagtctaccacgactggccatctgatctataaatgtggcgggatcgacaagagaacaattgaaaagttcgagaaggaggctgccgagatgggaaagggctccttcaaatatgcctgggtcttggacaaacttaaagctgaacgtgagcgtggtatcaccattgatatctccctgtggaaatttgagaccagcaagtactaagttaccatcatttgagccccaggacacagagactttcaacaaaacatgattacaggcacatcccaagctgactgtgctgtcctgatcgttgctgctggtgtt

SEQ ID NO: 8737 - DNA, 402 bp, Bos taurus
  Clone ID: 37-LIB34-085-Q1-E1-B2
ttccaggccgacccacgcgtccgggaagggataaagcccacctgcttcgagaggagtgatgaccttggggggctgtggagattcaccgaacatgttgaagaaggcagagccagcctctacaagtctgtggtttccaacagctgcaaggagatgtcttgttacccggactttccattcccagaagattatccaaactatgtgccaaattctcaattcctggattatctcaaaatgtatgcaaaccggttcaacctcctggaatgcattcaattcaagacaaaagtctgcagtgtaagaaaacgcccagattttactgccacagggcagtgggaggtagtcactctgtgtgaaaggaagcaagagtcagccatctttgatgctgtcatggtctgtactggtttt

SEQ ID NO: 8738 - DNA, 365 bp, Bos taurus
  Clone ID: 37-LIB34-086-Q1-E1-B10
agctgcatcatccacagcttctgatagatccaagatgactctcctctctcagactacctgtcaccatggcccaccagtttccagccctcacttcagaacagaagaaggcactctcataaactgcccgacgcattgttgccaatgggaaggggatcctggctgcagatgagtccgtatgcacgatggggaatcgcctgcaaaggatcaaggtggagaacacggaagaaaaccgccggcagttccgcgaactcctcttcactgtggacagctccgtcagccagagcatcgggggtgtgatcctcttccatgagaccctctaccagaaggacggccagggaaaactgttcagaaacatcctcaaggaa

SEQ ID NO: 8739 - DNA, 410 bp, Bos taurus
  Clone ID: 38-BOVMS1-002-Q1-E1-B6
acgcaaagatgtagaagctgatgaagaagacagtaggaaaaaagatgcttctgatgatctagatgatttgaatttctttaatcagaagaaaaagaagaaaaaatcaaaaaagatatttgatattgatgaagctgaagaaggtataaaggaccttaagattgaaagtgatgttcaggaaccagctgaaccagaggaagatcttgacattatgcttggcaataaaaagaagaaaaagaaggttgtcaagttccctgatgaggatgaagtactagagaaagatgaagctttagaagatgaagacagcaaaaaagatgatggtatctcattcagtaaccagacaggccctgcatgggcaggctcagaaagagactacacatatgaagagctactgaatcgagtgttcaacatca

SEQ ID NO: 8740 - DNA, 451 bp, Bos taurus
  unsure (418): unsure at all n locations; Clone ID: 38-BOVMS1-003-Q1-E1-B6
tcataattagctcattagtactttacattatttcactaatactaacgacaaagctgacccatacaagcacgatagatgcacaagaagtagagacaatctgaaccattctgcccgccatcatcttaattctaattgctcttccttctttacgaattctatacataatagatgaaatcaataacccatctcttacagtaaaaaccataggacatcagtgatactgaagctatgagtatacagattatgaggacttaagcttcgactcctacataattccaacatcagaattaaagccaggggagctacgactattagaagtcgataatcgagttgtactaccaatagaaataacaatccgaatgttagtctcctctgaagacgtattacactcatgagctgtgccctctctaggactaanaacagacgcaatcccaggccgtctaaaccaaac

SEQ ID NO: 8741 - DNA, 429 bp, Bos taurus
  unsure (299),(427): unsure at all n locations; Clone ID: 38-BOVMS1-004-Q1-E1-B6
atgaaatcaatagcccatctcttacagtaaggaccataggacatcagtgatactgaagctatgagtatacaggttatgatgactgacgcttcgactcctagataattccaacatcagaattaaagccaggggagctacgactattagcagtcgataatcgagttgtactaccagttgaaataacagtccgaatgttagtctcctctgaagacgtattacactcatgagctgtgccctctctaggactaacaccagacgcaatcccaggccgtctaaaccaaacagcccttatatcgtcncgtccaggcttatattacggtcaatgctcagaactttgcgggtcacaccacagtttcatagccattgtccttgagttagtcccactaaagtactttgaaaaatgatctgcgtcaatattatagaatanaa

SEQ ID NO: 8742 - DNA, 366 bp, Bos taurus; identical to SEQ ID NO: 1154
  Clone ID: 38-BOVMS1-007-Q1-E1-B6

SEQ ID NO: 8743 - DNA, 280 bp, Bos taurus
  Clone ID: 38-BOVMS1-008-Q1-E1-B10
cacgcgtccaggtaaacaagctgcgggtgaagagccgggaggttcacacaaaaatcatcagtgaagagtgatcgtgtcctgatgctatggtataagtgaaattacgaatttaaagtgattacttcgttgatgtgacaatgctatgtagattttctgaacaatcatattaaaattgcactgatgcatattatgtattattctcactgacttccaaccataactgagaacaatcagtgcttctaatttttagtcttaatttatttaaaagttttaattgttg

SEQ ID NO: 8744 - DNA, 462 bp, Bos taurus
  Clone ID: 38-BOVMS1-008-Q1-E1-B6
agtaacgtcaatgtttttgccattgctattgtcctgtagctggctaaaaatacttggccaaagccattaacctaagaatttgtcagtgtatcctttctaaaaagagtaacagttacttattcatatgctagatgacaagtgtgcaatatgcttcaaaactatcaacaaaaacagaatagtgcaagcaagcagtctcgtgggaagttggcagattttctcattttccatacaggatcatttaaatagggaaaacaatgttagcaaaaaacaaatatataaatatggcatgacatgaaaatacactcttaaatttacaccagcttttcactaacaatatgtatgtaaggagatggggaaatccatgaagataattaaattttctttcagctaggaaagttaacagggataaatatatgaacaaaaatgctgcaaggataactgtggagaaaatgataaaaatca

SEQ ID NO: 8745 - DNA, 366 bp, Bos taurus; identical to SEQ ID NO: 1154
  Clone ID: 38-BOVMS1-009-Q1-E1-B6

SEQ ID NO: 8746 - DNA, 445 bp, Bos taurus
  Clone ID: 38-BOVMS1-010-Q1-E1-B10
ctggattcaaaattgcaatgggagcatttgataaaaccagaccaccagtagcagctgctgctgtgggactagcacagagagctttggatgaagctaccaagtatgccctggagagaaaaacttttggaaagctgcttatagagcaccaaggaatatcatttttgctggctgaaatggcaatgaaagttgaactagctagattgagttaccagagagcagcttgggaagttgattctggtcgccgaaatacctattatgcctctattgcaaaggcatatgctggagatatcgcaaatcagttagcttctgatgctgttcagatttttggaggcaatggatttaatactgaatatcctgtagaaaaattaatgagagatgccaagatctatcagatttatgaaggtacagcacaaattcaaaggcttattatagcccgtgaacacat

SEQ ID NO: 8747 - DNA, 365 bp, Bos taurus
  Clone ID: 38-BOVMS1-010-Q1-E1-B6
ccaaaaacaaaaacaaacttctgcttaaaaataaagaaaaaagatctttctaacattaaaaaaaataatctgtttttttttcccccatagccatttaagaactagggagggtctgatatccgacaacttggaaaggtttctcatatttttctgaatggttgatgaacatagcactgatgaaattaaattatcaaaatcccatcttcattttctgatagtgaacgcaggaaaagatatcaggtacacatcataaaactgatttggaattcctgctttcagagagtacagccttccttcgcatctgtttaaactatttcttaggacttggcaatttcactaaaaattagtagtatcactgatactgt

SEQ ID NO: 8748 - DNA, 431 bp, Bos taurus
  Clone ID: 38-BOVMS1-012-Q1-E1-B10
gcttatgcatgtgttgccaagaacagagcaggagaagccacctttactgtgcagctggacgtcctggcaaaagaacacagaagagcaccaatgttcatctacaaaccacagagtaaaaaagtgtttgagggagaatcagtgaagctagaatgccagatctcggctgtacctccaccaaagcttttctggaaaagaaataatgaaatggtacaattcaacactgatcgaataagtttatatcatgataactctggaagagttactttattgataaaagatgtaaacaagaaagatgctggatggtatactgtgtctgcagttaatgaagctggagtgaccacatgtaacacaagattagatgttacagcccgtccaaaccaaactcttccagctcctaaacagttacgtgtccgaccaactttcaacaaata

SEQ ID NO: 8749 - DNA, 401 bp, Bos taurus
  Clone ID: 38-BOVMS1-012-Q1-E1-B8
atttcattctttattgtggctgagtaatattcctttgtatttatatgtcacattttctttatccaatcacctgtcaatggacacttgggttgcttccatatcttggctattgtatataatactgcaatgaacataggggagcatatatcttttcaaattagtggttttgttttcaatagataaacactcaggaatggaattgctagattataaggacagtaaaaggataacaaaggaatactatgaacaatgcattgcccacaaatttaataatctaaatgaaatggactaacttcttgaaagggcacttttcccaaaactcctacaaggagaaatagacaattcaaactgacctatatctattgaagatattgaatcaataattaataaccttgcaaaac

SEQ ID NO: 8750 - DNA, 402 bp, Bos taurus
  Clone ID: 38-BOVMS1-013-Q1-E1-B6
gtgacctggagcgtgcagaggagcgggctgagctttcagaaggcaaatgtgccgagcttgaagaagagttgaaaactgtgacgaacaacttgaaatcactggaggctcatgctgagaagtactcgcagaaggaagacaaatacgatgaagagatcaaggtcctttctgacaagctgaaggaggctgagactcgagctgagtttgcggagaggtcagtaactaaattggagaaaagcattgatgacttggaagacgagctgtacgctcagaaactgaagtacaaagccatcagcgaggagctggaccacgctctcaacgacatgacttccatataagtttctttgcttcacttcttccaagaccccttcatcgagctggatgttccacctctctgacctccgc

SEQ ID NO: 8751 - DNA, 466 bp, Bos taurus
  Clone ID: 38-BOVMS1-014-Q1-E1-B6
tatccttcagagcacaaacaagacctgcagccactatgagtgtgcgtttctaggtggactaaaaactgaaagttgtgttgagaacatggactattttcaacctgtctacaaccctggtgaggaaaaccagaagctggaaaaccctgaaatgaaaagccaggaacccactgtctttcctggtatgaaaagccaggaagccacccagatacctgcaatgaaaattccagaatctttttcactacctggaataaaaatgttacaaccggatgaaaaacctgaatacaaaagccaagatatcaaacagcctactccagctccagcagttccagttccaggtcccaaaagccatccctctgcatcttctggcaaaatgctccttccccagtgtgggacattcatcattttaatcagtgtttctgctataaatcttggtcgctctgtaatctgatacattctttacttgtac

SEQ ID NO: 8752 - DNA, 376 bp, Bos taurus
  Clone ID: 38-BOVMS1-018-Q1-E1-B10
catataatataaaaaagatgccacggtttacattacagtgacattgagaagtgactggcgtatccttcataacttttctatgaactcttcaaaaacagtcacagaatgcctttttcaaagattgtatataggctttagtgtctcgccatcgagcttgctgagtcaaatatttatgataacgaggtactgaatcgtgatcactgttgattaattggtcctaaagggataaattgatggagagaagcaaatggataactgatctgcacaactgaatcaggaaatgcaaataagactttatttggttgacattttctaaggtttcgttcagtcgtccctctaggaggctggtgagaaaaggggtcaggttcttctcgtg

SEQ ID NO: 8753 - DNA, 299 bp, Bos taurus
  Clone ID: 38-BOVMS1-018-Q1-E1-B6
atgcgacgtcacagctcttctatagtgtcacctaaattcaattcactggccgtcgttttacaacgtcgtgactgggaaaaccctggcgttacccaacttaatcgccttgcaggacatccccctttcgccagctggcgtaagacccaataggcccgcaccgatcgcccttcccaacagttgcgcagcctgaatggcgaacgggacgcgccctgtagcggcgcattaagcgccgcaggtgtggtggttacgcgcagcgtgacagctacacatgccagcgcactatcgctcgctcctttcgc

SEQ ID NO: 8754 - DNA, 311 bp, Bos taurus
  Clone ID: 38-BOVMS1-019-Q1-E1-B6
gtctgaagcctactcgcaagtttgcctacctagggcgcctggctcatgaggttggctggaagtaccaggcagtaacggccaccctggaggagaagagaaaggagaaggccaagatccactatcggaaaaagaagcagctcatgaggctacggaagcaggccgaaaagaacatcgagaagaaaattggcaaattcacagaggtcctcaagactcatggattcctagtctgagccaaataaaattgactgtttattcttcaaaagaaaatataagcaaatgaaagataaacttaaggaacgaataaaataaaa

SEQ ID NO: 8755 - DNA, 308 bp, Bos taurus
  Clone ID: 38-BOVMS1-020-Q1-E1-B10
cacgagggataaagtggagcggattcacaccacagacaagatcctgcctcacctgccaggcttggaagacctgggcgttgaggccacgcccctggaactcaaggccatcgaggtgctgcggcgtcaccgcacctaccgctggctgtcttctgagatcgaggacgtgcagccggccaagacgattcccactagtggcccctgagctgcccgcggcttttggtgttgtttgggttgctaccaaccaggccacctttggcggagaatcctgtatatagtgaatgagagcctctattaaaacctgagatgac

SEQ ID NO: 8756 - DNA, 398 bp, Bos taurus
  Clone ID: 38-BOVMS1-020-Q1-E1-B6
atcgtagaatagatttatttacctgaaaccatgtctgtgcaatgcttgttaccagcacagaaataaactgatctctatttacagcctaaagtcaaacatgcgttgtgataaactgacgtttagcattttattgatataaatgcatcacaatatttgtattgcaccaacatctgtctactgcttctgatttcattaaataaattacatttaatacagtgcaaaatagctgtttgcacactcaggaaaataactgaagttatgaactagaagcctacatttttaaccactcaacacctgcagtgttttcaataaatttataaataagcaaactgtacagggccaattaaaaagtagcatgtttcaatgacaccatagagaaatctggctacttacaactg

SEQ ID NO: 8757 - DNA, 448 bp, Bos taurus
  Clone ID: 38-BOVMS1-021-Q1-E1-B6
atcggcacaaatttagtcgaatgaatctgaggcggattctcagtagacaaagcaacccttacccgattcttcgctttccattttatccttccatttatcatcatagcaattgccatagtccacctactattcctccacgaaacaggctccaacaacccaacaggaatttcctcagacgtagacaaaatcccattccacccctactataccattaaggacatcttaggggccctcttactaattctagctctaatactactagtactattcgcacccgacctcctcggagacccagataactacaccccagccaatccactcaacacaccccctcacatcaaacccgagtgatacttcttatttgcatacgcaatcttacgatcaatccccaacaaactaggaggagtactagccctagccttctctatcctaattcttgctctaatcc

SEQ ID NO: 8758 - DNA, 403 bp, Bos taurus
  Clone ID: 38-BOVMS1-022-Q1-E1-B10
gaaatcttgaagtggtacctcaataaaataaagtttgatcagtctgttgatccagaaatcatagctcgaggtactgttggcttttctggagctgagttggagaatcttgtgaacgaggctgcattaaaggcagctgttgatggaaaagaaatggttactatgaaggaactagagttttccaaagataaaatcctaatgggccctgagcgtagaagtgtggaaattgataacaaaaacatcacgatcacagcgtatcatgaatctggtcatgctattattgcatattacactaaagatgcaatgcctatcaacaaagctacaatcatgcctcgagggccaacacttggacacgtgtccctgttgcctgagaatgatcggtggaatgaaactagagctcagctgc

SEQ ID NO: 8759 - DNA, 381 bp, Bos taurus
  unsure (296): unsure at all n locations; Clone ID: 38-BOVMS1-022-Q1-E1-B6
attatacctatttcctttaaaaaaaagatatcagtcagaattggagatttttaacagtgatcattatcaaagctgtgttattttccacagaatatagaatatatatttttttcgtgtgtgtttttgttaactatgctacagatattgaatgcaccttgagatcatttagtgtttttaactggtacataatttatcaagcagtatgttaaagtgtaataataaaatgtctatgtatctttagttacattcaaatttgtaactttataaacatgttttatgctgaaggaactctatanggtggtagtattaaatgaaaatttttgaggtagactggatatgggccaatagctgcttgtgactagacttttaaacttttgctct

SEQ ID NO: 8760 - DNA, 433 bp, Bos taurus
  Clone ID: 38-BOVMS1-023-Q1-E1-B10
aaaaattacagcttgttcctattgaccaggatgcttaatcactgcagtgccctggaaaaaagtgtcttagcgcatgcatatcataagagtcaagccttagaacctccaccgcaatgtctcgtatttcatatttatctaaggaaggaataggaacaagaagcattttgtaagttgaagctggtcaaagtgaagttaaccagatcatggaataaaagttcaagaagtaggtttttctttcatagcctatagccagacacatgctcattgttagtgataatgagaaacaaaccaaaaaaaaccccaagattttaaatcccgaaagataactcaaaaatttatttaaacccatagcagaaactttcttcttcaccacatcttttataggatttatttaaagcagtgaaatgagtttcatcattttttacctcctctc

SEQ ID NO: 8761 - DNA, 446 bp, Bos taurus
  unsure (313),(380),(416): unsure at all n locations; Clone ID: 38-BOVMS1-023-Q1-E1-B6
ccacgcgaccgcaaggactgaaactaagttctttaggtccaagatgtggaacactgtttcactggaatatcattaggctagtgcatcagtaacatgttaattattaataacgaattctcagtgacttttgtgaatagttaatcttggccactggctggtagacctaacttataccacaaaagccaatgatatgatgaaccaagattaatgccactccatatggagggctgcctggaagtgtgtaacttcagtaccaatcagatggtaccatcttataaagcctcttcttgtaacagtgaaaacttgtgggtangacagtggatgaagtttattgctcaactactcctccagcttgtccaatttaatgactaaaggaatanagagaaaaaatgatggttttctcaatttcatagaanaagatggtttatccattcattctttacatt

SEQ ID NO: 8762 - DNA, 327 bp, Bos taurus
  Clone ID: 38-LIB188-001-Q1-E1-B10
acaaaaatgctccagcgaaactgtcttaaatatttttctacaggtgtaaaaccaaagtttcctgcaaaccccagtccacgcccttcatgaatctactgtgtatctattttgcctctctagttctagaaaagtagagacaactttgaatccagggtttggagctgccccgcgtctgtctttcctatgcactctgagttaaaacgggactcgcgggaccgttggcggcgtgctccggcccctcagcatcttctgtgggtttggcgcctccggcctctttgtctccttcggaagtctccagggcctccggggggcttgtgcagttagcat

SEQ ID NO: 8763 - DNA, 396 bp, Bos taurus
  Clone ID: 38-LIB188-001-Q1-E1-B6
actcccgaggcagcagcacaggtggtgcagtgggtgagctttgctgatagcgacatagtgccaccggccagcacctgggtgttccctaccttaggcatcatgcaccacaacaagcaggccacagagaatgcaaaggaggaggtgaggcgaattctggggctgctggatgctcacttgaagacgagaacttttctggtgggcgaacgcgtgacgctggctgacatcacagttgtctgcaccctgttgtggctttacaaacaggttctggagccttctttccgccaggccttccctaataccaaccgctggttcctcacctgcattaaccagccccagttccgggctgtcttgggagaggtgaaactctgtgagaaaatggcccagtttgatgctaaa

SEQ ID NO: 8764 - DNA, 440 bp, Bos taurus
  Clone ID: 38-LIB188-002-Q1-E1-B10
cgccatgggcccgggatacttcgcaatgttggcatccttcgggttgtaggggcaagatacggtcacagagcctcccctcacacctttcaccacggaggggcttgcggggattgccgtctcttcattgacgaagagttgccaggcctgcacaggccagccgtcctggggctcaccctcaggctgggccccgcacacgtagcgccctgcgtcctctttcctcaggctggtaatgtgcacactgaagacaccattgtccttgggcacggacacgatcctgccctggaagtcctgagccttcttccccaacgtgttgatgaccacattgcaagctcccccattcttcttctggcacagaaatttgggcacatttgccacctcggggcccagggaacagtcaaaggtcaccgagctcctcaagtctccataaaccagctcaagct

SEQ ID NO: 8765 - DNA, 454 bp, Bos taurus
  Clone ID: 38-LIB188-003-Q1-E1-B6
catgctaccgtgcgccatggcggccggatacaagctttatttttttttttttttttttttttttttcaaaatcaacagcatttctaattttatttcttgctaaaatgacagcagggaattgtaaatactgatgagcttggcaaaaatccgacttcaggaagggagaggaaggtccctcgcgcctggagattggggctgagagcagggaggagctgaggcccagggaggcaggctagcttctttgcaggctttacctcgtcaggaaggcgcaggcttccagaagcggggaggttgagcattttttcaggttggcaatggccgtgacatactctgtccccaaatattcttcatacgttggtctgcctccaagtttggccagacactcagtgttgtcattgaacagaaggtttttggtttcagatttgaacaaacaaaacttgtccgggcagttttt

SEQ ID NO: 8766 - DNA, 428 bp, Bos taurus
  Clone ID: 38-LIB188-004-Q1-E1-B10
acacatagtacacgcccggctcgcaagccttgtccagccggtcctccagagtgacctccttctccgtgtggtgcatgaagcagttctcctctgcacagcggcaggtatctttgtggcagagtttgctcagcattccgtcctctttatccgggtgatagaagcggatataagtttcatccaggttgtaataggagtaccatctgtctgacctgtgcaaaaaatgtgacactacagaagtggagctggaagatcaagtagtcactgccagccagagcaatatctgtgatagtgacgctgagacctgttacacctatgacagaaacaagtgctacacaaacagggtcaaacttagttaccgtggtcagaccaaaatggtggagacagctctgaccccggattcctgctatcctgactaacgcaagtcatgc

SEQ ID NO: 8767 - DNA, 437 bp, Bos taurus
  Clone ID: 38-LIB188-004-Q1-E1-B6
acaaaaatgatcagcgaaactgtcttaaatatttttctacaggtgtaaaaccaaagtttcctgcaaaccccagtccacgcccttcatgaatctactgtgtatctattttgcctctctagttctagaaaagtagagacaactttgaatccagggtttggagctgccccgcgtctgtctttcctatgcactctgagttaaaacgggactcgcgggaccgttggcggcgtgctccggcccctcagcaccttctgtggatttggcgcctccggcctctttgtctccttcggaagtctccagggcctccggggggcttgtgcagttagcatccggcttagctttgtccacctcgttatcaatctcaaccttatcttctggatgcttgcttttctttacttgtccattctgggcaggataggtgctagcaatgacgtcataca

SEQ ID NO: 8768 - DNA, 433 bp, Bos taurus
  Clone ID: 38-LIB188-005-Q1-E1-B6
acttgtcctccgactcagtctgccggcttctctgccactccacggctacatcttctgggtagaagccggtgaccatgcaggtgacgctgagcgtgcttttgctgagctcttccttgggtgggtccaggacatacacctgcggctcccgggccggccctttgctcctggagatgatcctcacgatgggggccgagaggcctttgttgttgaccttgcacttgaactcctttcctccagtccagtcctggtgctggatgggcagggcgctgaccacgcggtacgattactccaagcccatccaggggcagcagaagaagccctttgagcagcactggaggaagcacacgctctcctacgttgacatcaagactgcctgcgcctcggtgcatggtgccaaccgtctgggtgcaaactcgctcctggacctggttgt

SEQ ID NO: 8769 - DNA, 412 bp, Bos taurus
  Clone ID: 38-LIB188-006-Q1-E1-B10
gggatacacgaagatagtgcatgcacttagtgagctgctccgcgccggtgctctcctgtcctggctagatcctcagttctgttgagatgaccgcctttatagtttgggttttaattacagtttctagtttcattaatgcctatagattagtgagcagaaatatcacttctgtgtagattctgccctgaagacacttcatgtgagtaactgaagcaacactagactgaacgtcctctttggaatgtgtcggccgcctgaggttccgcttctgttcttgtttgctcagtgcaggcgggcacactgatggcacacatgctttctttcgtgtgacttttacaaatgcagttttaaatgaattaagttatgtggattggttatgttcttggtcatataaacacatataagaacattt

SEQ ID NO: 8770 - DNA, 402 bp, Bos taurus
  Clone ID: 38-LIB188-007-Q1-E1-B6
catgatccctaacgccatgggcgcgggatactgtgtcacacagctgttggaagatttaatagtgaagtatctgcctgatgagctgtctgagagaaaaaaaatatatgatgaagaaactgctgaactctcacacttgaccaagaatgttccaatatttgtttgcactatggcctatcccactgtgccttgccctcttcatgtatttgagccaagatacagattgatgattcgaagaagtatacagactggaactaaacagtttgggatgtgcgtcagtgatacacagaatagttttgcagactatggttgtatgttacaaattagaaatgtactgctgcactgagcagaagctgctctgtgcctgcttgggcttcccttacaaactcagccttcatttccttg

SEQ ID NO: 8771 - DNA, 354 bp, Bos taurus
  Clone ID: 38-LIB188-008-Q1-E1-B10
acctgccaaggcggccgctcaaaccgggaggcgctggacaaaggtgatgttacagctcagatagctctgcagcctgcgttgaagttcaacggtgggggccatatcaatcacagcatcttctggacaaatctgagccctaatggtggtggagaaccccaaggggaattgctggaagccatcaaacgtgactttggttcctttgccaaatttagggaaaagttgactgctgtatctgttggtgtccaaggctccggttggggttggctcggcttcaatacggagcaaggacgcttacagattgctgcttgttcaaaccagaatcccctgcaaggaacaacaggtcatatccccctg

SEQ ID NO: 8772 - DNA, 419 bp, Bos taurus
  Clone ID: 38-LIB188-008-Q1-E1-B6
actatggctataccggggctttcaggtgcctgactgaggacgttggggacgttgcctttgtgaaaaacgacacagtctgggagaacacgaatggagagagcactgcagactgggctaagaacttgaatcgtgaggacttcaggttgctctgcctcgatggcaccaggaaacctgtgacggaggctcagagctgccacctggcggtggccccgaatcacgctgtggtgtctcggagcgatatggcatcacacgtgaaacaggtgctgctccaccagcaggctctgtttgggaaaaatggcaaaaactgcacggacaagttttgtttgttcaaatctgaaaccaaaaaccttctgttcaatgacaacactgagtgtctggccaaacttggaagcagaccaacgtatgaagaatatttgggg

SEQ ID NO: 8773 - DNA, 411 bp, Bos taurus
  Clone ID: 38-LIB188-010-Q1-E1-B10
actataaccaatgacttcatataactaattcaagagaaaagacaccacacttggaaaaaaaaaaaagatttttaaagataatggttttaattgagttaatgagatgaaaaaatcgtgaagccctatgttctacttacatgaaagaagattttttaaaaaataatcactgcacaaaatacaaagggtggggttatgctgtggtattaaatttctctccattatgtttttcttgactgttcaagggcaaattaaagtttccacggcaaatctgttctcaaaatgccgaatcgtaacacagacgtcagctgaacgtttctgagtacctttaatggtttctctgcgttgcagtttagaagtttccttaacatggcacagtcgataaatatagaaacccaggtgatcaatgttttc

SEQ ID NO: 8774 - DNA, 426 bp, Bos taurus
  Clone ID: 38-LIB188-010-Q1-E1-B6
actcttgctattgcccggaacctgactcagcagctccagaccatgtgccacaccctcctgtccaacatccaggggttaccacagaacattcaagatcgggccaaccacttgggggtgatggctggtgacatctactctgtgtttcgcaatgctgcctcctttaaagaagtgtctgatggcctcctcgcttccagcaaggggcagctgcagaaaatgaaggagtctttagatgatgtgatggattatcttgttaacaacacacccctcaactggctggcacttgatttcagtatcacagacttcacatctgagactgatgaaattccagatattatagctttggaagaggaggatggaccaaatcattctcatgctaatggccctgagccttctcagggcaaaatgttgaatgactaacaggaaaaa

SEQ ID NO: 8775 - DNA, 300 bp, Bos taurus
  Clone ID: 38-LIB188-011-Q1-E1-B6
accagctcacagctgagggcggcggccgtgtcgtgctgtatggagactccaactgcttggacgacagtcaccggcagaaggactgcttctggctcctggatgcactcctgcagttcacgtcgtatggggtgacgccccccagcctcagccactcgggggctcggcagcgcccccccagtggagcaggctcggcagccccggagaggatggaagggaaccacctgcatcggtacaagcttttttttttttttttttttttttttttttatgcgtgaaagaaacttttataaggatatcact

SEQ ID NO: 8776 - DNA, 316 bp, Bos taurus
  Clone ID: 38-LIB188-012-Q1-E1-B10
acggccaggacgccttggggatggaccccatgatggaacatgagatgggcggccaccaccctggtgctgactatccaattgacgggctgccagatctggggcatgcccaggacctcatggatgggctgcccccgggcgacagcaatcagctggcctggtttgatactgacctgtaaatcatcctttaggagttacaatacaaatggattttgggagtgactcaagaagtgaagaatgcacaagaatggatcacaagatggaatttatcaatctctagccttgcttgttaaattttttttttaatatctgtaatggt

SEQ ID NO: 8777 - DNA, 423 bp, Bos taurus
  Clone ID: 38-LIB188-012-Q1-E1-B6
acatgaagggcagatccacgtcgtagttgggggggccgtcgatgatggtgaggaacagctcaaaggtgctgaacagtgccatggggtaactgtagaaatggcccagctcattggggtcctctgtctggaagatgataaagaaggccgaggcaaagcccaggatgaccacggccatcagccagcagaatctcatcagatcgccaaaaatcatcttctggatcatgatggtgaaggggcccagcatctggaatcctcgcgcaaagtacgagtggagacggagatagtacggggtgcatttgctaaagcctggggccaaggacttctggtcaccgtctcctcagcctccaccacagccccgaaagtctaccctctgagttcttgctgcggggacaagtccagctccaccgtgaccctgggctgcct

SEQ ID NO: 8778 - DNA, 285 bp, Bos taurus
  Clone ID: 38-LIB188-013-Q1-E1-B6
actcgtccaagaagaagatcttcatgggcctcatcccctacgaccagagcggcttcgtcaacgccatccggcaggtcatcaccacccggaaacaggcagtgggacctggtggcgtggcacgccccgtccagatcgtcaacaacaagttcctgacgtggagcggactcatggagtggcaggagcccaggcctgagccccacagccggtctaagcggtggctgccctcgcacatctatgtgaaccaaggggagatcctgaggaccgagcagtggccgaggaagctgt

SEQ ID NO: 8779 - DNA, 104 bp, Bos taurus
  Clone ID: 38-LIB188-014-Q1-E1-B10
accaaacattgactggcactggagtgacctcacagctggaactgggccctgggtcgtcatcttggttactggtccatcttcagctaatatacctaatccaaaaa

SEQ ID NO: 8780 - DNA, 385 bp, Bos taurus
  Clone ID: 38-LIB188-014-Q1-E1-B6
actcgccatgatattcatcggggtattctgcctgataatcactatcactgatttctgacccattggttcctgttccttggcttccgttgtgaatgacaggttctgtgggagcagcacagtatttgggatcatacacttgccgcccaagcccatacacactcattcctttctgggaagcgactttgttggtacttgagctggacagagtcactcgagcccctccagggagctgtggctaaattcttctctgccagctgtgttccctgcattgatagacaagcataccccaacctgtgtcaactgtgcaagggggagggggagaaccagtgtgcctgctcctcccgggaaccatacttcggttattctggtgccttcaagtgtctgc

SEQ ID NO: 8781 - DNA, 416 bp, Bos taurus
  Clone ID: 38-LIB188-015-Q1-E1-B6
gccatggcggcgggatacagaactacgttagcacgagcacagggttggcggaacctcagaccccaaggaacattgttagggcaaggacaggaagcgtgtgcacgcggtgaggcagaggggtcagtgtcgctactcacggggtagtgtcggtcatctggccagtgacgctgaggcttacagttgaggaatatctgaagtatcttaaaaaccataaagctgcaacacgtgatttttataacctagttactagaaaactaaggaaagcacttattagctttgaataaagcaacatgaaaacaggagtgcacttttactaacctacaaaaaaattttctaatgcatattcagaaagattttataatacaaggaggcatattgctcattaagaatgagttctataagaaaagcacttacta

SEQ ID NO: 8782 - DNA, 380 bp, Bos taurus
  Clone ID: 38-LIB188-016-Q1-E1-B6
acgggcgaaagattcccatagggatgatccacccagcggacctgccaaggcccgtatggcaggacttccggccttgcagctggtccagctgaaagttgctgcccttcttcacgacggccacagcataatagtgggtttggggagactctttcgtcccatagatctctgctgctactggccgcagtttgtaggggtcccggcccgcctcaaacaccatgccaccatccagggtcacagcatccgcctttttctccgcgatggcccggatacattccaaggcaaaggccctcctcacacaggtgatagagggagcacccagcttcttcatcctccactgccatcggcggcatttgaaccactcaggttgggagatggtatca

SEQ ID NO: 8783 - DNA, 469 bp, Bos taurus
  Clone ID: 38-LIB188-018-Q1-E1-B6
ccgagcgcgatggcggcgggataccacttctaaaagtgcactttgcagaagtttcactcctcttccaataagtttgagttaggagcgtttaccttgtagcagagcagtattaacatctagttgttcacccagggaacaaagaggctgaccatgggctcgctttgtggatgctggtagcactgatagctggagaaggtggagacctcagtagagaaatgtaaagactgatttgaattttaagttaatgtgaaatcttggcagagaacgttttactaaataaatgccttaagagtatttaaaagatgcttccatatttcaaaatataaaatgtgtgtttgacattgtgtctgggaaggaacggctggaacctgtagcctttgggacctgctgttcccagccttcgcaggactgcttgatcctcataagcccagacgttggcccaaaagcaaaatttgaaacgttattttgt

SEQ ID NO: 8784 - DNA, 380 bp, Bos taurus
  Clone ID: 38-LIB188-019-Q1-E1-B6
acccagtttgaatataatgttgaaggagtaaccaccaaggaaatggctacccaacttgccttcatgcgtctgctggccaaccatgcctctcagaacatcacctaccattgcaagaacagcattgcatacatggatgaggaaactggcaacctgaaaaaggctgtcattctgcaaggatccaatgatgtcgaacttgttgccgagggcaacagcagattcacttacactgttcttgtagatggctgctctaaaaagacaaatgaatggcagaagacaatcattgaatataaaacaaacaagccatctcgcctgcctatccttgatattgcacctttggacatcggtggcgctgaccaagaaatcagattgaacattggccc

SEQ ID NO: 8785 - DNA, 366 bp, Bos taurus
  Clone ID: 38-LIB188-020-Q1-E1-B10
accgcgtgatcagcgccctgcccatccagcaccaggactggactggaggaaaggagttcaagtgcaaggtcaacaacaaaggcctctcggcccccatcgtgaggatcatctccaggagcaaagggccggcccgggagccgcaggtgtatgtcctggacccacccaaggaagagctcagcaaaagcacgctcagcgtcacctgcatggtcaccggcttctacccagaagatgtagccgtggagtggcagagaaaccggcagactgagtcggaggacaagtacatttctaatttgtaacatacaaccatagtctgcaaaactattctgtgtatcactgacgcacatcccaaactgtttagttccagtc

SEQ ID NO: 8786 - DNA, 246 bp, Bos taurus
  Clone ID: 38-LIB188-020-Q1-E1-B6
acaatcttaccggtccctctatcgtctaccacatatgcttctaggcggtctgttacctgcgtgacacgctttttcttgacaaattctatcttgcgcaaaaaactagatgagattggaatggcgttatatgggtaactatatgtccattcagatgttctataaaccatctggcacttgactcacgatttactaactggaaccgcgtgtgtaacatcactctggtggatctaacattcacagggttcg

SEQ ID NO: 8787 - DNA, 420 bp, Bos taurus
  Clone ID: 38-LIB188-021-Q1-E1-B6
actgtcccagtgggtcgtgtggagactggtgttctcaaacctggcatggtggtcacctttgctccagtcaatgtaacaactgaagtgaagtctgtagaaatgcaccatgaagcattgagtgaagcccttcctggggacaatgtgggctttaatgtcaaaaacgtgtctgtcaaagatgtccgtcgtggcaatgtggctggtgacagcaaaaatgatccacccatggaagctgctggcttcacagctcaggtgattattttgaaccatccaggccaaatcagtgctggatatgcacctgtgctggattgtcacacagctcacattgcttgcaagtttgctgagctgaaggagaagattgatcgtcgttctgggaaaaaactgggagatggccctaaattcttgaaatctggtgaccctgcc

SEQ ID NO: 8788 - DNA, 277 bp, Bos taurus
  Clone ID: 38-LIB188-022-Q1-E1-B10
acattatactttcttcctttcagtatcctaatattatcgcacccatgtggtgctgcttacttaatataaatttttcagtacaacaaacagaaaacatcacttttgtgatgggaaaggaggcaccaggattcaacataagcaaagaaaactagacctgaagcatcgactcagatccaagaggaaccgactctggtgcaggccagaccatgtgcactgcacacacggcttatgtcggagccagtggtgacggctcccacctgttaacagaccttatttt

SEQ ID NO: 8789 - DNA, 402 bp, Bos taurus
  Clone ID: 38-LIB188-023-Q1-E1-B10
acatcgtgtacataataaaaagccaagtaagagggctgaacttcaacctagcatttgaatatcctctggacaaggcgagctagataatcaatcactttgcacacatgttaagagtagtgttccaaaataagtaggaagctgctatacttctaagcaggggaggaaaacaacttccattttggtcatttttcttccagtaaattatactttcaattaagagcaataatggtatcataagaaaaatgctctgctttttaaattcctgagcttcaacacacattaaaatagtggtattggagtcttttgggaggcaaacagctatcagctacattcaccagtgtaacagagcctctttatcgataaactggtccaagttgggtatagcccagaccagaaggaaga

SEQ ID NO: 8790 - DNA, 462 bp, Bos taurus
  unsure (329): unsure at all n locations; Clone ID: 38-LIB188-023-Q1-E1-B6
tcccggtagccatggccgcccgatacatcgccctgagacgagtgggccggctgcttcggcatcaaggagaaggacatcgacaaggacctcgtgatctaaagccatgcctcctcctgcagaaccagattctctctctttgaccttccccctcctgttttccccaatgtttaaaatgtttggatggtttgttgttctgcctggggtcaaggtgctaatatagacttaaacgaatacattaacggtgctaaacacagacattttaacccaagtcacgacattcttagctgtaactcagctctcacggcctcttgctcacccatgaatggtcncgttttcctcttgccgcgtgcacctccacccattgtcttggtggcacatgggtggaacacttgatctgctcgagtctgccttcaacacacattgcatcttcagattttctacttttctgttcaaaactaatat

SEQ ID NO: 8791 - DNA, 385 bp, Bos taurus
  Clone ID: 38-LIB188-025-Q1-E1-B6
acaatgagaggtgctaagaagcaaattcagagcagcagagttactcagtcatctttaaaaacaaaacacacacacacagcccttgaagggaaggtagatagcatttacaaaaaaaaagtggtaactgacacaagagtcaactctaaagcccaatttccctttgtgtgctgtgcttagtcgctcagtcatgtccgactctttgtgacaccatggactgaagtccactaagctcctctgtccatggggattctccaggcaagaatactggagtgggtaacttttcccttcttcaggggattttcccaacccaggtctcccgcattgcaggtggattctttaccatctgagtcaccaggaagccatggttaacataaaaccccagggt

SEQ ID NO: 8792 - DNA, 430 bp, Bos taurus
  Clone ID: 38-LIB188-026-Q1-E1-B10
cgccatgggcgcgggatacatcttactgcgaatgctgcccacggctgtggagccagggtccagccgaggctgcctttattgtccaggtcctgaaagactcttgttcatgaactgtctcttcacaaagcaagtccaccacttgctgggtttatcattctgagggtcaaaaactttctcacaaagtcgcagtccagtctcttgcctgagttgttgtaagtaggccctcatcagctcatcttcctgtttgttcgcaggtttggcgtaaatggcattaaatggaaaactaggctctccaggaatgggaaaattagtgattcccagtgtatacatttctttctcgccttggcttttagaattgcacttttggagtttctttagacactcagaaatgtagagagttatatatatcaaggtcctatccgcttcattc

SEQ ID NO: 8793 - DNA, 395 bp, Bos taurus
  unsure (9): unsure at all n locations; Clone ID: 38-LIB188-026-Q1-E1-B6
ccgccatgncgcgggataccatagagctcaagctgtgcgggagaaggtgggtgacatcaccatcctggtgaacaacgccaccgtggaccactggaacagcctgatggacactgctgatgatgcccttctcaagtccgagcacatcaacaccctgggccagttctggactacaaaggccttcttgctccggatgctggagctacagcacggccacatcgtgtgtctgaactccgtgttggcacactctgccatcactggcgcgatcgactactgcacgtccatagcctcagccttctccttcatggacagcctcactctgaggctgctggactgtccgggcgtcagcgctaccatcgtgctgcccttctacacaagcaccgagatgttccagggca

SEQ ID NO: 8794 - DNA, 388 bp, Bos taurus
  Clone ID: 38-LIB188-027-Q1-E1-B10
acgtgattacagagctagggtttccagcagggctccaaatggtcaggcatggcttctataccaggtctaaggaagcagcggggacgtcacaggacgaggagagggcaggtaactaccataggcccctgtgggcatcagcaggggcctcatactgctcggtgacatcagatgcaggtctaaggagccaacgagtgactgcaggggctcgcccatccacagcttacttggcgagcgggtttctgaagctcctgccgggaaacttggccttgctgcccagttcctcttcaattctgaggatctggttgtacttttttttttttaaacaacaattattttgtgtacatcgagatgtacttgcatgatagactgtagtcaatgttcggtccct

SEQ ID NO: 8795 - DNA, 434 bp, Bos taurus
  Clone ID: 38-LIB188-027-Q1-E1-B6
actgaaattgaaatggtgatttaaaaactcccaaaagcaaaactccaagaccagatggtttcacaggcaaattctattaaatatttagagaatacctatccttctgaaaattttccaaaaaatttcaaaggaaggaacactccccaaaattattctgtgaggcctccaccatcctgattccaaaactagacagcacaaaaagagaaaattacaagccagtatcactgatgaatatagacgcaaaaattctcaacaaaatactagcaatccaaatccaacaatatttttaaatgatcatacaccatgatcaagtgggatttatcccagggatacaaggattttttttaatatctgcaaatcaatcagtgtgatacaccacatcaataaattgaagaataaaaaccatatgacatctcaatagatgcataaaaatt

SEQ ID NO: 8796 - DNA, 407 bp, Bos taurus
  unsure (373): unsure at all n locations; Clone ID: 38-LIB2809-002-Q1-E1-B6
acaactagctttggagttgatattaatagaaattattccaaaattattcttaggtcacaaataactactatcccacataaaaagggaaaaatcccacccaattaaggaaaaggtatcctgtgtatgtttccatggcaatgagtttatgcattctcagattttgtccggctagttatccaccctttatctgatgcatttattccatctctcagagagaaccatatagattcctgacggcatccaggacacgtggctcgtggtggacacacttcatggtggatactgctactataaaaatactcagaacttaagagaattccaagatgctttataaaaagcattagtcatgcctcaaaactgccctttgaggtangtcagtattattatcccattttaacaagaaggaa

SEQ ID NO: 8797 - DNA, 446 bp, Bos taurus
  Clone ID: 38-LIB2809-003-Q1-E1-B6
atgtaaaatgtggacaggcacccctccaacagtcttgaaaacacgcagctgtgttactcataggaatattcatcttgcaaagtgtttcctcacacgtgctgcccgtggaccccgctgtcgccgtcgccgccctgcagctgcagctgcatctgtgcctgcatccgcgcaatcatctcctgcatgcggcggagctcagcttccttctccagcagtatctggtctttattcatgtcctcattttctactttcctgccgcctctcttgagcctctcggaccggaagttctcatactgcaggtcctgggtcaactcctggagattctgcatgtgactgatgagcatcgtcctcagcttcacgaagtcgttgtgctccgggttctccaactccagtacgccccaagggtacaggcggcctccgaccttcttggctttggcttcagtcagctg

SEQ ID NO: 8798 - DNA, 451 bp, Bos taurus
  Clone ID: 38-LIB2809-006-Q1-E1-B10
actctcaccccggccctggcccgggcccggggagcaacttgacttcggccccagtgccctccaccacaacacgctcgctgaccgcatgccctgaggagtccccgctgctcgtcggccccatgctgattgagtttaacatacctgtggacctgaagcttgtggagcagcagaacccgaaggtgaagttgggtggtcgctacacccccatggactgcatctctcctcacaaggtggccatcatcattccattccgcaaccggcaggaacacctcaagtactggctgtattacttgcacccaatcctacagcgtcagcagttatactatggcatctatgttatcaaccaggctggagagtccatgttcaaccgcgcaaagctcctcaatgttggctttaaagaggccttgaaggactatgactacaactgctttgtgtttagcgatgtggacct

SEQ ID NO: 8799 - DNA, 395 bp, Bos taurus
  Clone ID: 38-LIB2809-006-Q1-E1-B6
actttgtattttttcagtctgagaagctgttcctattcaaaaagaaaaaatattgtcaatttcgtggataccatctatcatagtatctctttcccaggagtaaataatgagaaactaataatcttactttagtgttgtttctaccacagagaatttggattagcctaattcttcttcttttttttttttaatattaggaaaactactttgttacattatttttaacttaaaatatattataatgcagtcagatataaataagtattcagtcaatcctaaaagaaatcagtcctgaatattcactggaaagacttttgctgaaactccaatactttggccacctgatttgaagaactgatgcattggaaaagatctgattctgggaaagattgaag

SEQ ID NO: 8800 - DNA, 446 bp, Bos taurus
  Clone ID: 38-LIB2809-007-Q1-E1-B6
actcctggttcagccgctcggtgtcagctcgcacgtcactcagctgggcttcgataccactgatcagcgcctggatctgcgccagctgggctccgaagcgagcctccgtttccgccagtgtgccttccagggcggctttcatgctgagctgagactgcagctcgatctccagaccctggagggtgcgccgcaggtcggtgacctccgtcttgctgatctgcagctgctccgtgtggccagcgacctccctgttcagctcctcggtctggctgatgaaccaggcctcagcatccttccggttcttctcagcaatgacctcatattggcttctcatgtcactcaggatcttggctaggtcgatgcccggagcagaatccacctccacactgacctggccacccacctggcccttcagcacactcatttcctcctcgtggttcttcttc

SEQ ID NO: 8801 - DNA, 299 bp, Bos taurus
  Clone ID: 38-LIB2809-009-Q1-E1-B6
catgctccgaccgcgatcggggcgggatactcattgaccatggcggccagcgacatctccctgctggacgcccagagtgcccccctgagagtgtatgtggaggagctgaagcccacccctgagggcgacctggagatcctgctgcagaaatgggagaacggtgagtgtgctcagaagaagatcattgcagaaaaaaccaagatccctgcggtgttcaagatcgatgccttgaatgagaacaaagtccttgtgctggacaccgactacaagaagtcaacccagcttgctgcttcttccca

SEQ ID NO: 8802 - DNA, 437 bp, Bos taurus
  unsure (376),(393): unsure at all n locations; Clone ID: 38-LIB2809-011-Q1-E1-B6
actatgtgacaggagatggctgccggcgggacaaggatggctattactggatcactggcaggatcgatgacatgctgaacgtatctggacacctgctgagcacggcagaggtggagtcagcactcgtggaacacaaggctgttgcagaggcagccgtggttggacaccctcatcctgtgaagggcgaatgcctctactgctttgtcaccttgtgcgatggccacatcttcagcccagctctcactgaggagctcaagaagcagattagagaaaagattggccccattgccacaccggattacatccagaatgcacctggattgcctaaaactcgctcagggaaaatcatgaggcgggtgcttcggaagatcgctcnagaatgacacgacctgngggacacgtccactgtagtcgaaccatccatcatcacccagctc

SEQ ID NO: 8803 - DNA, 271 bp, Bos taurus
  Clone ID: 38-LIB2809-012-Q1-E1-B10
tcccgagcgccactggcggcgggatacaccttgggcatggcggccagcgacatctccctgctggacgcccaaattgcccccctgaaagtgtaggtggaggagctgaagcccacccctgagggcgacctgaagatcctgctgcagaaatgggacaatgcagactgtgctcagaacaggatcattgcagaacaggccaagatccctgcggtgttcaagatcgatgccttgaacgagaacaaagtccttgtgctggacaccgactacaagaagt

SEQ ID NO: 8804 - DNA, 286 bp, Bos taurus
  Clone ID: 38-LIB2809-012-Q1-E1-B6
acagcagaaaggcctgaatgggcatatctctctggggatagggcactgctttctggggaacaggcaggactttggactgagaaagggacatcacggactgaggaggaaacatgacagttggaggaagaggctggtgaggctggtgcatcccggactggagcagaggcagaggaaggtgcagattttcaacctcagtgagggtcaggctctggctttcactcgagggcgcaactggatatttagggaagggcatttctttgtacgtaggagccatagcctccttcac

SEQ ID NO: 8805 - DNA, 356 bp, Bos taurus
  Clone ID: 38-LIB2809-013-Q1-E1-B6
cgtatgtgtatgatacataaggttatgtattaattgtagccgcgttctaacgacaatatgtacaagcctaattgtgtagcatctggcttactgaagcagaccctatcatctctctcgtaaactgccgtcagagtcggtttggttggacgaaccttctgagtttctggtaacgccgtcccgcacccggaaatggtcagcgaaccaatcagcagggtcatcgctagccagattctctacgccggacgcatcgtggccggcatcaccggcgccacatgtgcggttgctggcgcctatatcgccgacatcaccgatggggaagatcgggctcgccactttcggctcatgagcgcttgttt

SEQ ID NO: 8806 - DNA, 418 bp, Bos taurus
  Clone ID: 38-LIB2809-014-Q1-E1-B10
acaaagaaggggacctgacccacttcaaccagaagcttgaggggttcagcgtgcccaggtgctgggatgagtgcctgaagagctctgagtattacgctcggaagagtgaggtcgacaagttcaacaaggagaattgttggaaaaagagaggattgtgcataattcctaccaaatttggaataagcttcacagttccttttctaaatcaggcaggagccctgatccacgtatacacagatggctccgtgctggtgagccacgggggcacagagatgggccaaggccttcacaccaagatggtgcaggtggccagcaaagctctgaagatccccatctctaagatctatatcagcgagacgagcactaacacggtgcccaactcctctcccacggccgcctccgtcagtatcactagtgc

SEQ ID NO: 8807 - DNA, 457 bp, Bos taurus
  Clone ID: 38-LIB2809-015-Q1-E1-B6
gccatgggcgcgggataccccagcaggaaattgttcccaatagtgctgaggaacgacttcacagtatgaaagagggaatccatgcccaacagaaagaacctatgataggagtgaatcaggaactggcctacttctaccctgagcttttcagacaattctaccagctggatgcctatccatctggtgcctggtattacgttccactaggcacacaatacactgatgccccatcattctctgacatccctaatcccattggctctgagaacagtgaaaagactactatgccactgtggtgaagagtcaagtgaattctgagggactccacagttatggtctttgatggttctgaaaattccatgctctacatgtcttttcatctatcatgtcaaaccattctatccaaaggcttcaactgctgttttagaatagggcaatctcaaattgaaggcactct

SEQ ID NO: 8808 - DNA, 348 bp, Bos taurus
  Clone ID: 38-LIB2809-016-Q1-E1-B6
ccgcgacgggcccgggatacaaaacaatgacagcacagaatatggactcttccagataaataataaaatttggtgcaaagacgaccagaaccctcactcaagcaacatctgtaacatctcctgtgacaagttcctggatgatgatcttactgatgacattatgtgtgtcaagaagattctggataaagtaggaattaactactggttggcccataaagcactctgttctgagaagctggatcagtggctctgtgagaagttgtgaacacctgctgtctttgctgcttctgtcctctttctgttcctggaactcctctgccccgtggctacctcgttttgcttctttgt

SEQ ID NO: 8809 - DNA, 429 bp, Bos taurus
  Clone ID: 38-LIB2809-017-Q1-E1-B6
gccctgggcccgggaacagcagaaacgcctgaatgggcatatctctctggggataaggcactgctttctggggaacaggcacgactttggactgagaaacggacagcacggactgaggaggaaacatgacagttggacgaagaggctggtgaggctggtgcatccaagactggagcagaggcataggaaggtgcagattttcaacatcagtgagagtcacgctctggctttcactacagggctcaactggatatttagggaatggcacttcttctgtgcttaggagccataatctccttcactttggagactcccattacttcatgctgatcgaaacgcggcaccaccacatgggtttgagtaataggagggatgttttgtaggacgctgttacggatgggcccagggaaaggatagactatagactgt

SEQ ID NO: 8810 - DNA, 442 bp, Bos taurus
  Clone ID: 38-LIB2809-018-Q1-E1-B6
cgccatgggcccgggatactgatttaaaaaactaataacttaaactgccgcacacaaaacatatggtccacaaaaacattctcctttccttctgaaggttttacgatgcattgttatcattaaccagtcttttactattaaacttaaatggccaattgagacaaacagttctgagaccgttcttccaccactgattaagactggggtggcaggtattggggataatattcatttagccttctgagctttctgggcagacttggtgaccttgccagctccagctgccttcttgtccactgctttgatgacacccacagcgactgtctgtctcatgtcacgcacagcaaaacggcccaggggaggataatcagagaagctctcgacacacatgggcttgccaggaaccatatcaacgatggcagcgtcaacagatttcaagaat

SEQ ID NO: 8811 - DNA, 440 bp, Bos taurus
  Clone ID: 38-LIB2809-019-Q1-E1-B6
cgccatggccccgggatacaactagctttggagttgatattaatagaaattattccaaaattattcttaggtcacaaataactactatcccacataaaaagggaaaaatcccacccaattaaggaaaaggtatcctgtgtatgtttccatggcaatgagtttatgcattctcagattttgtccggctagttatccaccctttatctgatgcatttattccatctctcagagagaaccatatagattcctgacggcatccaggacacgtggctcgtggtggacacacttcatggtggatactgctactataaaaatactcagaacttaagagaattccaagatgctttataaaaagcattagtcatgcctcaaaactgccctttgaggtacgtcagttataataacccaattttaacagaaggaaaactgaggcacattat

SEQ ID NO: 8812 - DNA, 411 bp, Bos taurus
  unsure (370): unsure at all n locations; Clone ID: 38-LIB2809-020-Q1-E1-B6
acctggagagattgtggaaagcctttcaagcagtgaggaatctattacacgcatcaataagaaaattgagaagtttcagagtgaggaacagcagcaaacagaggatgaactccaggataaaatccacccctttgcccagacacagtctctagtctatcccttccctgggcccatccctaacagcctcccacaaaacatccctcctcttactcaaacccctgtggtggtgccgcctttccttcagcctgaagtaatgggagtctccaaagtgaaggaggctatggctcctaagcacagagaaatgcccttccctaaagatccagttgagccctttactgaaagccagagcctgactctcactgatgttganaatctgcaccttcctctgcctcggctccagtcttggatgca

SEQ ID NO: 8813 - DNA, 384 bp, Bos taurus
  Clone ID: 38-LIB2809-021-Q1-E1-B10
actagagtagaaagggcaattcattaagtatatttagaatccaagctactactactgagaaattacagtatttattcagttcagttcagtttagtagctcagtcgggtccgactctttgcgaccccatgaatcgcagcacaccaggcctccctgtctatcactaactcccggagtttacccaaactcatgtccatcgaatcggtgatgccatccagccatctcatcctctgtcgtccccttctcctccagcccccagtccctcccagcagcagggtctttcccaatgagtcaagtcttcgcatgaggtggccaaaatattggagttacagtgtttattagagattcaataagttgaaaattcagagtcctcagtttcaaagaaa

SEQ ID NO: 8814 - DNA, 417 bp, Bos taurus
  Clone ID: 38-LIB2809-021-Q1-E1-B6
gccatggccgcggaataccccagctggaacgacttcacagtctgaaagagggaatccatgcccaacagaaagaacctatgataggagtgactcaggaactggcctacttctaccctgagcttttcagacaattctaccacctggatgcctatccatctggtgcctggtattacgttccactaggcacacaatacactgatgccccatcattctctgacatccctaatcccattggctctgagaacagtgaacagactactatgccactgtggtgaagagtcaagtgaattctgagggactccacagttatggtctttgatggttctgaaaattccatgctctacatgtcttttcatctatcatgtcaaaccattctatccaaatgcttcaactgctgttttagaataaggcaatctc

SEQ ID NO: 8815 - DNA, 445 bp, Bos taurus
  Clone ID: 38-LIB2809-023-Q1-E1-B10
gggatacaaatttacttggacctctgcctcatctttcttcttttgcgcttcagcctgcgcattcgcttcttcctccacttcgctctcatggcgcagaggtttctctttttttttttttttttttttttttttttttatgccttaaaatgtaatttattgaaaagaagaaagacaaaatctcagttaatgcacacaattatttgatatgatggcacttacaggagaagtgattcaaaggcttttaaaacattttccatacagaaatttaatgaagactttaattccctttgactcagtggcctttataccagcatgatactactggaatttaggtaacaagctgttaggacaatttcacttaaggatgttacactatctaaaatacagtagagaactcaagaagaaagagtgccttcaatttgagattgccctattctaaaacagc

SEQ ID NO: 8816 - DNA, 406 bp, Bos taurus
  unsure (332): unsure at all n locations; Clone ID: 38-LIB2809-023-Q1-E1-B6
gccatcggcccgggatacaacagaaaggcctgaatgggcatatctctctggggatagggcactgctttctggggaacaggcaggactttggactgagaaagggacagcacggactgaggaggaaacatgacagttggaggaagaggctggtgaggctggtgcatccaagactggagcagaggcagaggaaggtgcagattttcaacatcagtgagagtcaggctctggctttcagtaaagggctcaactggatatttagggaagggcatttctttgtgcttaggagccatagcctccttcactttggagactcccattacttcaggctgaangaaaggcggcaccaccacaggggtttgagtaagacgacggatggtttttttttggggtttttgcgggggggggg

SEQ ID NO: 8817 - DNA, 358 bp, Bos taurus
  Clone ID: 38-LIB2809-024-Q1-E1-B6
acaactaactttggagttgatattaatagaaattattccaaaattattcttaggtcacaaataactactatcccacataaaaagggaaaaatcccacccaattaaggaaaaggtatcctgtgtatgtttccatggcaatgagtttatgcattctcagattttgtccggctagttatccaccctttatctgatgcatttattccatctctcagagagaaccatatagattcctgacggcatccaggacacgtggctcgtggtggacacacttcatggtggatactgctactataaaaatactcagaacttaagagaattccaagatgctttataaaaagcattagtcatgcctcaaaac

SEQ ID NO: 8818 - DNA, 415 bp, Bos taurus
  Clone ID: 38-LIB2809-025-Q1-E1-B6
gatactgtccaattgggaagacgctactgattctgataaaagtgactgatttgacacagggcttggctgcacagatgaagctgttgagtctagcgctgactgagcctctgggacactaacgtctgtgcactggactggtaaggactcagacagacttgtgacagaaggcgcaggtgggcttattctaccattactactattctgtccttgaagatgttctttatagcacactgaacacatgccgttcgtccagcttgctgcttcttcccagtcttgggttcaagatcttgacaaccatgaaacttctcaaccttacctgtcctgttggtgttgctcttgccaggcctaaacatcctatcaagcaccaaggactccctcaagaagtcctcaatgaaaatttactcaggttttttgt

SEQ ID NO: 8819 - DNA, 387 bp, Bos taurus
  Clone ID: 38-LIB2809-027-Q1-E1-B6
ggataaccagatggaaattgttcccaatagtgctgaggaacgacttcacagtatgaaagagggaatccatgcccaacagaaagaacctatgataggagtgaatcaggaactggcctacttctaccctgagcttttcagacaattctaccagctggatgcctatccatctggtgcctggtattacgttccactaggcacacaatacactgatgccccatcattctctgacatccctaatcccattggctctgagaacagtgaaaagactactatgccactgtggtgaagagtcaagtgaattctgagggactccacagttatggtctttgatggttctgaaaattccatgctctacatgtcttttcatctatcatgtcaaaccattcc

SEQ ID NO: 8820 - DNA, 441 bp, Bos taurus
  Clone ID: 38-LIB2809-028-Q1-E1-B10
gccatgggcccgggatacagcagaaaggcctgaatgggcatatctctctggggatagggcactgctttctggggaacaggcaggactttggactgagaaagggacagcacggactgaggaggaaacatgacagttggaggaagaggctggtgaggctggtgcatccaagactggagcagaggcagaggaaggtgcagattttcaacatcagtgagagtcaggctctggctttcagtaaagggctcaactggatatttagggaagggcatttctttgtgcttaggagccatagcctccttcactttggagactcccattacttcaggctgaaggaaaggcggcaccaccacaggggtttgagtaagaagagggatgttttgtgggaggctgttagggatgggcccagggaagggatagactatagactgtgtctgggcaaag

SEQ ID NO: 8821 - DNA, 407 bp, Bos taurus
  Clone ID: 38-LIB2809-028-Q1-E1-B6
gggatacagacaagtccattaatgagtccagaaatgcaacagatgaatcccgccgaagactgattgcacatctggctgagcacattctcttcactgctagcaagtcctgtgctattatgtccacgcacatcgtggcctgtctgctcctctacagacacaggcagggaattggcctctccacattggtggaagacttctttgtgatgaaggaggaagtcctggctcgtgattttgacttgggtttctcaggaaattcagaagatgtagtcatgcatgccatacagctcctgggaaattgtatcacaatcacccacaccagcaagaatgatgagttttttattactcctagcacaactatcccatcagtctttgaactcaacttctacagcaatggggtgctccatgtc

SEQ ID NO: 8822 - DNA, 405 bp, Bos taurus
  Clone ID: 38-LIB2809-029-Q1-E1-B10
actagagtagaaagggcaattcattaagtatatttagaatccaagctactactactgagaaattacagtagttattcagttcagttcagtttagtagctcagtcgggtccgactctttgcgaccccatgaatcgcagcagaccaggcctccctgtcgatcaccaactcccggagtttacccagactcatgtccatcgaatcggtgatgccatccagccatctcatcctctgtcgtccccttctcctcgagcccccagtccctcccagcagcagggtctttcccaatgagtcaagtcttcgcatgaggtggccaaaatattggagttacagtgtttattagagattcaataagttgaaaattcagagtcctcagtttcaaagaaataacatgtgactgaaaacatg

SEQ ID NO: 8823 - DNA, 405 bp, Bos taurus
  Clone ID: 38-LIB2809-031-Q1-E1-B10
acagcaaaaaggcctgaatgggcatatctctctggggatagggcactgctttctggggaacaggcaggactttggactgagaaagggacagcacggactgaggaggaaacatgacagttggaggaagaggctggtgaggctggtgcatccaagactggagcagaggcagaggaaggtgcagattttcaacatcagagagagtcaggctctggctttcagtaaagggctcaactggatatttagggaagggcatttctttgtgcttaggagccatagcctccttcactttggagactcccattacttcaggctgaaggaaaggcggcaccaccacaggggtttgagtaagaggagggatgttttgtgggaggctgttatggatgggcccagggaagggatagacta

SEQ ID NO: 8824 - DNA, 405 bp, Bos taurus
  unsure (383),(386),(392): unsure at all n locations; Clone ID: 38-LIB3057-001-Q1-K1-B10
gcgagcggccgccctttttttttttttttttcgtgaaacttgaaaggttttattggttaactacagacagctttaagagtcgggatacctggcgccatcactgcctgggcgaatcctcacccaggctgcgaggcggtaggagggcagaagagaggccttcagggtcaactttccgcggagagaggcccctgcccgctgcgccctcactggcccttcttgtgggcgttcttgatgatggcgtttttgaacagcgtgacaaggggcgtttggctcttctcggaggtcatgaacccgccgtagcgcttgtccttgggcgggctgccccagcggaagtgttccatcttatagggccccgagtccttcttctcggtcggctcagcctncgncttcgncaccaggccatac

SEQ ID NO: 8825 - DNA, 263 bp, Bos taurus
  Clone ID: 38-LIB3057-001-Q1-K1-B6
ggccccagctgtatccatttcctagtcctatagttacctcacccctgacctctggaaagagacggtgttcaccaagtctccatatcaggaattcactgaccatcttgtgaagacccacaccagagtctccgtgcagaggacacaggccccagctgtagccaccacataattttataaagggaataataaagtgaatgaaaccaataaaaataaaattaatttaaataattattatttttatatattaaaaaattttattaatt

SEQ ID NO: 8826 - DNA, 140 bp, Bos taurus
  Clone ID: 38-LIB3057-003-Q1-K1-B6
tctgagtcaaagaagcttctgaccagatttccgactacatgttcaaactgcgcatcggtgaatacatcagagtcagcaaaacttcctaactctcacgctatgccgatgtcaccttcaccccaaacttcgacagaacctta

SEQ ID NO: 8827 - DNA, 392 bp, Bos taurus
  Clone ID: 38-LIB3057-005-Q1-K1-B10
gcaagatggcgggtgaaaaggctgagaagccagatactaaggagaaaaaacctgaagccaagaaggctgatgctggcaagaaggctaaaaaggtggaaaaggtgaagaaagttaagaaggggaagccccactgcagccgaaatcctgtcctggtcagaggaattggcagatattcccgatcagccatgtactccagaaaggccttgtacaagagaaagtattcagcagctaaatccaaggtcgaaaagaaaaagaaggttcgtgttcttgctactgtcacaaaaccagttggtggagacaagaatggtggtacccgagtggtcaaacttcgcaaaatgcctaggtattaccctactgaagatgtgcctcgaaaactggtgagtcatggcaaa

SEQ ID NO: 8828 - DNA, 451 bp, Bos taurus
  Clone ID: 38-LIB3057-005-Q1-K1-B6
cggacgcgtgggcgggtttgccgccaggacacaggtgtcgtgaaaaccaccgttaaaccgaagcgcgaatgggaaaggagaagacccacatcaacatcgttgtcattgggcacgtagattcagggaagtctaccacgactggccatctgatctacaaatgtggcgggatcgacaagagaacaattgaaaagttcgagaaggaggctgccgagatgggaaagggctccttcaaatatgcctgggtcttggacaaacttaaagctgaacgtgagcgtggtatcaccattgatatctccctgtggaaatttgagaccagcaagtactatgttaccatcattgatgccccaggacacagagacttcatcaaaaacatgattacaggcacatcccaggctgactgtgctgtcctgatcgttgctgctggtgttggtgaatttgaagccggtatctc

SEQ ID NO: 8829 - DNA, 401 bp, Bos taurus
  Clone ID: 38-LIB3057-006-Q1-K1-B6
gcgggtgcgcgggtcgcctctctgagttatccagttccatccttgtcgctgcggcgacggccggattctccgtcgccatgactgaacagatgacccttcgtggcaccctcaagggccacaacggctgggtgacccagatcgctaccactccccagttcccggacatgatattgtccgcctctcgagataagaccatcattatgtggaagctgaccagagatgagaccaactatggtatcccacagcgtgctcttcggggtcactcccactttgttagtgatgtggtcatttcctcagatggccaatttgccctctcaggctcctgggatggaacccttcgcctttgggatctcacaacgggcaccaccactcgccgatttgtaggccataccaaagatgtg

SEQ ID NO: 8830 - DNA, 408 bp, Bos taurus
  Clone ID: 38-LIB3057-007-Q1-K1-B10
attgtccctcctacttgctggaaaccaccatgctctcttgagaaaaagaacatatgggaaaagtctgaatttgttgctcagattcagcgaattgatggacaccaacttcagcatgcacaagaaattatggctagtgctagtggaaatacaaaaaccaagagaaaaagagatgtaaaagtagctttagactctcagcttggtaatagaaacaccagcactccaaataaccagaatgttcaaaaatgtgactgtgagtctgaacctggtcctaaattcagtctcaaaacattaaagaaatatgcagacatatttaagagtcagtactttgattacaaggataagaagaagattataggttccaatataaaattagctatacatcagcagtgggaaccatctgtggaagat

SEQ ID NO: 8831 - DNA, 436 bp, Bos taurus
  Clone ID: 38-LIB3057-008-Q1-K1-B10
cgcagattcgacttcactcgctcgcagttcgctccgcgccctctgcaaccatgtctgacaaacccgatatggctgagattgagaagttcgataagtcgaaattgaagaaaacggaaacgcaagagaaaaatccactgccttcgaaagaaacgattgaacaggagaagcaagcaggcgagtcgtaatgaagcgtgcgccgccagtatgcactgtacattccacaagcattgccttcttattttacttcttttagctgtttaactttgtaagatgcaaagaggttggatcgagtttaaatgactgtgctaccccttttcacatcaaaagaatggagaactactgacaacgtaggccgcgccttgcctctccatctgcttgtgtggctggcagggaaggaaaagaacttgcatgttggtgaagaggaagctgggtggga

SEQ ID NO: 8832 - DNA, 417 bp, Bos taurus
  Clone ID: 38-LIB3057-009-Q1-K1-B10
ataaaaagaccctttctgaacctctattggtggagcctactgatgatgttaacgaggtggccataaatcatggggctaaggatgacagtgatgatggccccggatacaatgaaagtgaggacgacttcaccccaagtgaggagttcctgagtaatgaaagagctcagtccatgtactatcacttggaatatgaggagcaaatagaaaatgcactgaagaatgagaacgtagattccagtgaaactgtagaaaaccaacaggccaagaaagcagagagctcactgaaagaagatgagcattcgactgaaggcaacacgagggtgcacagtgtcgattcttgcctgagcttccagtgcaaaagaggacacatctgcaaagctgatcaacatggaaaaccctactgcgtctgccaagatc

SEQ ID NO: 8833 - DNA, 271 bp, Bos taurus
  Clone ID: 38-LIB3057-010-Q1-K1-B6
acggcaagctttgagccagccaacacatatgactgaaatttgaccctctacatgcgaaatacatggcctggtgactattataccgtgatgatctgcttaccaaagatgtgaatgctgccattgccaccatcaagaccaagcgtaccatccagtttgtgcactcatgccccactgcattcaacgcaagtattaacttcaagcctcccactgctttaactcgtctcgagctcaccaacctacagagaccaccacacatgctacacactacaac

SEQ ID NO: 8834 - DNA, 332 bp, Bos taurus
  Clone ID: 38-LIB3057-011-Q1-K1-B10
gcgttcgtggcgaggctcagttggatggctagcttcaccgaaagacatgcgacagggatgggaaaagggccatgccccagatgtcccaaagtcctccggatccaccatattaactaatatctaacaagtcctattctttaccgcagtgcactgatctatgtaccactcaagactctggatcaccaatgagctgagcgtctgctcacctgcaacaaacattcagacgctaaaccccctagaagttatagtgctcaacacctctatcctatgggctcccggagatcttatcacctgaacccatcatatgtaaatataaggtgacagacagcata

SEQ ID NO: 8835 - DNA, 420 bp, Bos taurus
  Clone ID: 38-LIB3057-011-Q1-K1-B6
gaaaactggagggccttcaaggccctcattgccgctcagtacagcggtgctcaggtccgcgtgctctccgcaccaccccacttccattttggccaaaccaaccgcacccccgaatttctccgtaaatttcctgctggcaaggttccagcctttgagggtgacgatggattctgtgtgttcgagagcaatgccattgcctactatgtgagcaacgaggagttgcggagaagtactcccgaggcagcagcacaggtggtgcagtgggtgagctttgctgatagcgacatagtgccaccggccagcacctgggtgttccctaccttaggcatcatgcaccacatcaagcaagccacagagaatgcaaaggaggaggtgaggcgaattctggggctgctggatgctcacttgaagaccagaact

SEQ ID NO: 8836 - DNA, 427 bp, Bos taurus
  Clone ID: 38-LIB3057-013-Q1-K1-B10
gccgggttgagaggagcgtggccttctcctctccccgccatggcgtgtgctcgtccacgtgatatcagtgtactccgaaaagggggagtcctctggcaaaaatgtcactttgcctgctgtgttcaaggctcccattcgacccgatattgttaactttgttcacaccaacttgcgcaaaaacaacagacagccctatgctgtcagtgaattagcaggtcatcaaaccagtgctgagtcttggggtaccggcagagctgtggctcgaattcccagggttcgaggtggcgggactcaccgttccggtcagggcgcttttggaaacatgtgtcgtgggggccgcatgtttgcgccaactaagacctggcgacgttggcaccgcagagtgaatacgacgcagaagcgatacgccatctgctctgcactggct

SEQ ID NO: 8837 - DNA, 374 bp, Bos taurus
  unsure (363): unsure at all n locations; Clone ID: 38-LIB3057-013-Q1-K1-B6
cacaggtgtcgtgaaaaccaccgttaaacctaagccaaaatgggaaaggagaagaccggcatcaacatcgttgtcattgggcacgtagattcagggaagtctaccacgactggccatctgatctataaatgtggcgggatcgacaagagaacaattgaaaagttcgagaaggaggctgccgagatgggaaagggctccttcaaatatgcctgggtcttggacaaacttaaagctgaacgtgagcgtggtatcaccattgatatctccctgtggaaatttgagaccagcaagtactatgttaccatcattgatgccccaggacacagagacttcatcaaaaacatgattacaggcacatcccangctgactgtgc

SEQ ID NO: 8838 - DNA, 254 bp, Bos taurus
  Clone ID: 38-LIB3057-017-Q1-K1-B6
attcccaatgagaacgaggcccagttccagatcagagactgccgcctcaacgcggaggcggtgagcagccggctgcagagcagcaacatcttcactgtggccaggaggaacgtggagggccaggacatgctctaccagtctctcaagctgaccaacggcatctgggtgctagccgagctgcgcatccagccaggcaaccccagcttcacgctgtccctgaagtgccgagctccggaggtgtcccagcacgtgta

SEQ ID NO: 8839 - DNA, 361 bp, Bos taurus
  unsure (271): unsure at all n locations; Clone ID: 38-LIB3057-019-Q1-K1-B6
cggtacgcgtgggctcgggcgggcgtcgctggcctctcggcgtggaccgtgcaggcgcaatggatccaagttcgaaatatggcaactttgaaagatattaccaggcgactaaaatcaatcaaaaacatccagaagattaccaagtctatgaaaatggtagcagcagcgaaatacgcccgagctgagagagagctaaaaccggcccgagtgtatggagtggggtccttggctctgtatgaaaaggctgatattaagactcctgaagacaaanagaagcacctcaatatcggtgtgtccctcggaccgaaggcctctgtggtgctaattcacttcctcgggttgctaaaacaggattgaaaaa

SEQ ID NO: 8840 - DNA, 316 bp, Bos taurus
  Clone ID: 38-LIB3057-020-Q1-K1-B10
ctgagatggttcttaatgatccattccctgtcaaacttctctgagctttatagctttgtagtgcatgcttggctctaatgggtaggatgaatgtgggcttaacagtctgtgatgtagatgattatgcaattaaagagtcttaaggtaagtgtcaatctttattgaattcttgaacacgcagaacaacttgagataaaatgacattttacgcgcatcttacttgtgagactgcaattacagtactcattactacaatcatgacaaggctttctgttaggatgaaggattgagcacctactataatcgctggaacgag

SEQ ID NO: 8841 - DNA, 397 bp, Bos taurus
  unsure (352): unsure at all n locations; Clone ID: 38-LIB3057-021-Q1-K1-B6
gtcgggtgttgtcatggagaagaactggtcctgttgaccagtacctgctgcaggcattgcatttttcagtgcctctcgttgatttgcttagtgtgcttctcaggtataatggtttcaccgggattcagaaagctgtactgggtcaaatggacaccagagcaccagtgaccatgaccattttttggtgcaagtttggctttgggaagtgttttggagcttctcagccccaactactgagctggtcatcgccatttgttgggtgtataaaatccacttttcattgcacataacaatacatatgagaaatggtcctttgttgcatatgataagaatttttttgactattggtcancttgcaaggcacccacttgggtattttcacctttccaatttgttc

SEQ ID NO: 8842 - DNA, 282 bp, Bos taurus
  Clone ID: 38-LIB3057-023-Q1-K1-B10
acccaacccttcggcaccaggcatctctctacttaaaagtcttagcatctacagttatcaaagtcccattatggagtctgtccagttctgtttccttttctgttgctggagagcaatctgctgcataagctgcgagctgaccaacatcaccatcacagtagagaaagaggaatgtggcttctgcataagcatcaacaccacgtggtgtgcatgctactgctacacccggtacttggtgtacaaggacccatcaagggcccaatatccataaaacgcttacct

SEQ ID NO: 8843 - DNA, 419 bp, Bos taurus
  unsure (325): unsure at all n locations; Clone ID: 38-LIB3057-025-Q1-K1-B10
gtgattccgtcctgcgcggctgctggttccaatagtagtcgtttaattccgtccggctgtctctcccacataagtgcgtgcagccaacccatggaggattcaatggacatggacatgagccccttgaggccccagaactatcttttcggttgtgaactaaaggctgacagagattatcacttcaaggtggataatgatgaaaatgagcaccagttatctttaagaacggtcagtttaggggctggagcaaaggatgagttacatgttgttgaagcagaggcgatgaattatgaaggcagtccaattaaagtaacactggcaactntgaaaatgtctgtacagccaacggtttctcttgagggctttgaaattacaccacctgtggtcttacggttgaagtgtggttcaaggcctgtgca

SEQ ID NO: 8844 - DNA, 415 bp, Bos taurus
  Clone ID: 38-LIB3058-001-Q1-K1-B10
ggaagacagtgcggccgctcccggggcggtggacgcaatggcggcccagaagagaccctcccagagatccaagtacctggcctcggcgagcaccatggaccacgccaggcacggcttcctccccagacacagagacactggcatcctcgactccctcggccgcttctttggctcggacaggggtgcgcccaagcggggctcaggcaaggatggacaccatgcggccagaaccacccactatggctccctgccccagaaggcgcagcacggccggccccaagacgaaaaccccgtagtgcacttcttcaagaacatcgtgacaccccgcacacctcctccatcgcaaggaaaggggcgaggactgtccctcagcagatttagctggggggctgagggccagaagccaggattcggc

SEQ ID NO: 8845 - DNA, 238 bp, Bos taurus
  Clone ID: 38-LIB3058-003-Q1-K1-B10
gggtgcacatcaagctggcccagctggactagcacgataagttcccctacgtgctcaagcggctgcagcttcagaagcgaggcacatgccacgtggacacagccgccgtgagcggagttttcgacctctcagatgccgaccgactagacttctcggacgtggagctgacgcacatggtggtggactgtgtgaagctgctcatcgagatcgagcagcaggtggagcaaggccaggccat

SEQ ID NO: 8846 - DNA, 382 bp, Bos taurus
  Clone ID: 38-LIB3058-004-Q1-K1-B6
aatctgatgagcaatatgcttgccatcttggttgccagaatcagctgccatacgcggaattgacacaagagcaactcatgttcctgatgccaaaaatgcatctactcttccctctaactctggtaagatcattctggagtgatatggtggactctgcacagagcttcataacctcttcgtggactttttatcttcaagctgatgattgaaaaatagttatattccagtctaagccagaaattcagtatgcaccaaaatttgagcacgaacctacaaaatttgaagactcaacactaaacaaaatggcctatttgcaaattgagaattcacaagcacatatggactatcttgaagatggagaaagtgatggctttttaagatg

SEQ ID NO: 8847 - DNA, 351 bp, Bos taurus
  Clone ID: 38-LIB3058-005-Q1-K1-B6
gagaaagtaccagtctttccacctgcccagcccatcctgcctccttggtgcctctggaggcctttgtgtctctgctgaaaggggtcagtgggcaccaaaagccagtggagtggcccctggctgtcacgggccacgccctatccagtgcctctgaaggaggggttttaacactgctgtaggagctggggttcctggggtgccctccactgccctccgctcagtaacggccctgctaatcaggctgtcacttgatagaaacgcctgaagttactctcctggctttgcccaacctcagcaacttgtaagactgataatgaaataaatcatgttgatcctaataaagataaatgt

SEQ ID NO: 8848 - DNA, 404 bp, Bos taurus
  Clone ID: 38-LIB3058-006-Q1-K1-B6
gttcaatgtcaaccccaacaagaccaccttcggggggaattgctctgccacactggcaactctggagctccacagcgagaacctcctgctcctggcgctccagttcgtgatgaacgagagctccagcagggtgttccttcaaggagtccagctgaacctgaccctgcccgacgccaaagaaggcagcttcacggccaccaacagctcactgagggcgctgcaggccacggcggggaactcgtacaagtgcaacgctgagcagcgtctgcgggtcaccagcagcttctccctcaacatgttccgagtgtggctgcaggcgttccgcgtggacggggacaagttcgggcctgtggaggagtgccagctggacgagaacagcatgctgattcccatcgctgtgggcg

SEQ ID NO: 8849 - DNA, 408 bp, Bos taurus
  unsure (361): unsure at all n locations; Clone ID: 38-LIB3058-007-Q1-K1-B6
ggacgccaatgggctcctctctacccccagcgtcaacggcgggggcggcagcgtgcttgggggtgcgggcagcggaggcggcccagtgggcagcgtggagaatgggaagccgggagctgatgtggtggacctaacgctggacagctcgtcgtcctcagaggaggaagaggaagaagaggaggatgaggaggacgaggacgaggagggcccccggccaaagcgccgctgccccttccaaaagggtctggtgtcggcctgctgactgctggccgctgccatgccagccggactctcgactttcctggtgctcaccacttggaggggcacaggcgggccttgggcacagagggaggagtgattnttttttcttttcattgttgttcattttgttttttccacccctttccc

SEQ ID NO: 8850 - DNA, 423 bp, Bos taurus
  Clone ID: 38-LIB3058-008-Q1-K1-B6
cccgcgcagccttcttgcggcgcgtgagcccgaggcagccattgcccgcttggtgttctctagtacctgtgattcttatccttaaagatgcctgaggaagtgcaccatggagaggaggaggtggagacatttgccttccaggcagaaattgcccaactcatgtctcttattatcaacaccttctattccaacaaggaaatttttcttcgggagttgatcagtaatgcttctgatgccttagacaagattcgctatgagagcctgacagacccttccaaattggacagtggtaaagagctgaaaattgacatcatcccaaacccccaggagcgtactctgactctggtagacacaggcattggcatgaccaaagctgatcttgtaaataatttgggaaccattgccaagtctggcactaaagcg

SEQ ID NO: 8851 - DNA, 425 bp, Bos taurus
  Clone ID: 38-LIB3058-010-Q1-K1-B6
gatctttggtatataggatatttgctagctgcagtaacattggatttgtgtcacttagaaagtcttaagagggcagctccccaatacttttctgattagaaatgaatactacctcaataattaccaggtggataccagcacagaagccaaagagctagtaactggtgtgttggttttaggcaggattaacaaagggcagactagactacacagaggccgcgatttccttgggctgttgctctagaggttatgcctagtaagatgactatcttttctttatttcccagctaatttttcatgtcatctcttacagatggacttaccaaggacttattgataatgctacttgattatgaagtcacctggaaatactgatgataacatattaccttattcgaacaagtcatcctttcttgagtaccaaa

SEQ ID NO: 8852 - DNA, 401 bp, Bos taurus
  Clone ID: 38-LIB3058-011-Q1-K1-B10
cgcgagcgatcgctcttaccaacttggactccttcaaggtccatgccttggacatgctgatggacaaggatgccagcacggggcttgatagcgggaccaccatgttccgtggcatagctgacaggatgctcaacgagatcaccgagctggatccaagcacgatgaacatcaacatcattgctgctgccgagcgcaagtactcggtgtggatcggaggcttcatcctgggctacctgtccaccttccagcacatgcggatcagctagcaggagtatgacgagtatggccccttcattgtccaccgcaaatgcttctaaatggactgtgagcagatgcgtatcatttgctgcatgagttaattcataaggataaatgagccaggggaaatgtatacacctcat

SEQ ID NO: 8853 - DNA, 393 bp, Bos taurus
  unsure (362): unsure at all n locations; Clone ID: 38-LIB3058-012-Q1-K1-B6
gcctaacgatgatatcactcacccaatccctgacttgactggatatattacagaggggcagatctatgtggacagacagctacacaacagacagatttatccacccattaatgtgctgccctccttgtcgcggttgatgaagtctgctattggagaaggcatgaccagaaaggatcacgccgatgtgtctaaccagctgtatgcgtgctatgctattggtaaggatgtacaagccatgaaagctgtcgttggagaagaagctcttacctcagatgatcttctttacttggaatttctgcagaagtttgagaggaactttattgctcaaggtccttatgaaaaccgcactgtgtatgagactntggacattggctggcaactgctccgaatctt

SEQ ID NO: 8854 - DNA, 219 bp, Bos taurus
  Clone ID: 38-LIB3058-013-Q1-K1-B6
cagattatcaaattcataagcccaggacattagatatcaaattgaatattgaaagttttgtgatactcccttagaggcagatctgtaccagcatacatagaagagggataggtgagagcgaaaatagaacttaacattatgcagatttatgcattatctttaaacattggtgtgttttatgtgggatctatgatcctggagatgcttcttattagatct

SEQ ID NO: 8855 - DNA, 425 bp, Bos taurus
  Clone ID: 38-LIB3058-016-Q1-K1-B10
cggcggccgtggcgctgggagctcctgtcaccgctggggcccggccgggcgggagtgctggagacgtgagggctcgagggcccggacatggggcccgccagccccgccactcgtggtctgggcccgctgctgcggttgctgccactgttaatgctgcttcttcgcatgcagctcgccgaagggaacctggccggtgggagccccagcgcggccgaggccccagggtctgcccaggtggctggactatgcgggcgcccaacccttcaccgggacctgcgcaccggccgctgggaaccagacccacagctctcacgacggtgtctccgggacccgcagcgcgtgctggagtactgcagacagatgtacccggagctgcagattgcccgtgtggagcaggcgacgcaggccatccccatggaacaatg

SEQ ID NO: 8856 - DNA, 388 bp, Bos taurus
  Clone ID: 38-LIB3058-017-Q1-K1-B10
acggaaacccccaaacactgacatttccagacatttgaaagagcggtggggcattttcaggggaaatgtaattcgcagaagcttaatctttcggttagttcacagcaatgacttttgtgttgtgaatcaaggttcgtttggaacctgaaggattggggtgaagtcatcttcatttcctttctgtttttcctgctggttggggagagccctggtgccagcgccagcgtggactctggcagctttatggggctggcctgggactgcagtgactttatttctgcaccagtttattttcctttcagagaatgaatgctgcagaaattctttggctacttagtgacaacaacttccggtatcacttttgctgctgctgctgctgctaagtcgc

SEQ ID NO: 8857 - DNA, 256 bp, Bos taurus
  Clone ID: 38-LIB3058-017-Q1-K1-B6
ccgggttcgggcgccagatgattgagaagacaaagcagcttgtggagaccaagtacacggtggaaaacggctacagcaccagcgccaaggtggtgtatggtgacacagactcggtcatgtgccgcttcggcgtctcatccgtggctgaggcgatggctttgggacgggaggctgcatactgggtgttctgtcacttgccctcgcccatccggctagagtttgagaaagtctacttgctctacctgctcatcagcaa

SEQ ID NO: 8858 - DNA, 411 bp, Bos taurus
  Clone ID: 38-LIB3058-019-Q1-K1-B6
cagccgcctctgctgcctggcgcggcgctggaaccagctggaccgctccgacgtggccgtgccgctgaccctgcacagctactcggacctcgagagcgaggagccaatcccgggcggtgttccctcgcgcagaggcccatctcccgcaggctcccgggatcccggccgggacgtgcctctcactcagtaccagcgggacttcggcgtgtggacggcgccctcggggtccagagatgcaacgcagggacgcggaccaggagcaagcagccgcaggaccaagccctccgcaacccccggccggggggtctacgtgctccccatcggtgacgcggatgcggctgcagtggcgaccacatcatacagacaggaattccaggcttggactggagtgaagccatcaagaatccacaa

SEQ ID NO: 8859 - DNA, 426 bp, Bos taurus
  Clone ID: 38-LIB3058-020-Q1-K1-B10
ggatacctcatgacacgcgcctgcttttatggagaccccaagaagccaacagacaccggcagtgatctgatccgagatgatgtcagtgtgaactgccacatggtgagcagaaagacagacacacccaccacggttcttatcctactgctgacagaactcacaggaggttcctatgcgcgccttcccatgctctgagactcccagactcttgtgcatttctgcacccgtggctctatctgaggccagatgccacctggacctgagacctagtattctgtaagagtatcatcataaagtgcattcatctaaatgtgaggtgttcttttgcttgagtggacagtaacgcctgtaccattgaactcattttgtatcaaagcaagtttgcttgcggaaaagctattgaataaaatatgtcccttaactaca

SEQ ID NO: 8860 - DNA, 442 bp, Bos taurus
  unsure (388): unsure at all n locations; Clone ID: 38-LIB3058-021-Q1-K1-B6
ggaaaagagaaagattctcaccactgaagggcgtaacgcacttatccacaagtcatctgttaattgtccttttagcagccaagacatgaagtacccatctcccttctttgtatttggtgaaaagattcgaacccgggccatctctgctaaaggcatgaccttagtcacccccttgcagctgcttctctttgcctccaagaaagttcagtctgatggacagcttgtgcttgtagacgactggatcagactgcaaatatctcatgaagctgctgcctgtatcactgctcttcgagcagccatggaggctctggttgttgaagtaaccaaacagcctggtatcatcagccagttggatcctgttaatgaacgtatgctgaacacaatccgncagatctctcggccctcagctgctggtatcaaccttatgataggcactacacgg

SEQ ID NO: 8861 - DNA, 478 bp, Bos taurus
  Clone ID: 38-LIB3058-022-Q1-K1-B10
cgacccacgcgtccggttggagttgacatacggactactacagatgaaaaagaggacttccctggtggtatagtggataagaatccacctcccaacgcataggacgtgggtttggtccctggtctgggaagtatccacaggcagaggagcaactaagcccatgtgccagaacaagagtagcctgagctctggagcgtgcaagccccaactgctgagcccacgtgctgcagctgctgaaccctgagcacccagagcctgtgctcggcgacgagaagccgtcgcagtgagaagctcgtgcacagcaacgaagatagcccccgctcgccgtaactagagaaatcctgcatgcagcgacgaagacccactgaaaccaaataaaaaaaaaatcaccatcaaagttatagataactagtaaggacctactctatagcacagggaactctactcaatacagtgacctatatgagaaaagaatcta

SEQ ID NO: 8862 - DNA, 324 bp, Bos taurus
  Clone ID: 38-LIB3058-023-Q1-K1-B6
gatttctcaagcttcattaagctagggcccaccaggaggacagctggggcagcggcagggcctcctgcaggctgggggcaccagagactcggggtgggagtaggggggccccccagggcgatgcccaggcgctcaatgattctcactgggcggagaggtggggcctagcttaataaagatttctcaagcttcatggcaaaaaaaaaaaaacaaaaaaagaaaaaaaaaaacaaagagcaaaaaatattggaaaaggaaactactattcaatagatcatgtaaaaaataatgcattagtgataatatgtgtgaactttcaagagg

SEQ ID NO: 8863 - DNA, 144 bp, Bos taurus
  Clone ID: 38-LIB3058-025-Q1-K1-B6
caattctagtcttccaggattcatggtgcatatgctggcattccacacatggagagctggtcctataggggttttctttgtatgtgtagcttgctagttagatctgtacctttaatatgttataagagcgcttattctaattta

SEQ ID NO: 8864 - DNA, 428 bp, Bos taurus
  Clone ID: 38-LIB3058-026-Q1-K1-B10
tctacatggagcagaaaaatgcacgactagaattacgcggaggtgtggacaccgacgagctggacagcaacgtagacgactgggaggaggagaccatcgagttctttgtcacagaagagattattccccttggaaatcaggagtgatccgagagcacctgtgaaagcctgcacatcctgaatccacctgtgcttctgtcgctccggcctgaggctgcgcctgggagtcgccatctccacacgtcgctgtgcctttcagcccctggcgtccgccgcagcggaggcgtgacggtccggccccttggggacctcacgcacggcagacggcgccctgcctcccacggtcggcgcctgcacagccgtgcggggcgcctgtgcgccccccaccattcaggttgtgacaggttctctcaacaggctgaacacgga

SEQ ID NO: 8865 - DNA, 300 bp, Bos taurus
  Clone ID: 38-LIB3058-026-Q1-K1-B6
cattgtattactgtcagagatttgtatacagattcttattttcatattgaatggtggggctttagtaattcaagtaatcagctgagttaattcatgatgtttgcccttttaataaaatataagggttgagttcatttcaaatgcaatttgcctttattataaatttgaggttgattctggatatataatatcttgcatgattacctagctagctttttagcatttgccatatttatcaaaaatttactttcattgcaaaacattcatatcttatacagttccatttattttctaatgtaa

SEQ ID NO: 8866 - DNA, 443 bp, Bos taurus
  Clone ID: 38-LIB3058-029-Q1-K1-B6
gagcccccggtgcccctggtgaggaactggcgccctccgcagcccatcaagggcagggtcgtgaaggcctccttcaagtgaggccgctggagctcgccctcttcaggaaaggaagccggccctgcagagcttggtccctcacctcctcttggtgcttctgactccagtatactccgggtccatccccgtgtttccacgcagagcagagcagatgagagacgccatcaccaggaaatcagagctactattcccaggatctgatgtgagagcgcttggcctctgtgataacaccttgcctataaaagtagcatttctagtaaggtttcaaagaagaagaagaagcagggtgaggagagtaaagacagggaaaaagtgcctcctgggcaccttttctgtgtcatcttatatttcacagaacttccgtttaccctttttctatgatg

SEQ ID NO: 8867 - DNA, 419 bp, Bos taurus
  Clone ID: 38-LIB3058-030-Q1-K1-B10
caaacccaagatttgaagtctgcagacttagagataaaaccctgctggactggacaggtaggtgaccttgaccttgaccttctgtatccttctttataattgacaatagctaccgttatgactgaggtgtccttatggctggtagtgttcttattactctgcatatgatcttcagtgctccagtgagatatgtttgcttctgtcttgtaaatggagtcagtgaagcaaccacataaccacagagttcaaggtcacatagctgtggagtcaggacttgaattcaggtcatccggctgctgcgctcacacgtttgcttaaaccaccacgctgagccgcgtcccggcaggtgatggcgatgaccgcagcggcacttcttacacagggctttgatgagctctaaacacacagacaccaaacaa

SEQ ID NO: 8868 - DNA, 433 bp, Bos taurus
  Clone ID: 38-LIB3058-035-Q1-K1-B6
cggacgcgtgggaaacactcccttacttgttggtggtacccatgtggggccagtgcggggaagggcctggcgcggggcttgcttcccttttggaggccctcagagtgccttgtcgggggggttctttctttctcattcaggaggcatggatgcagaggacttcctgggtcctggtcgttacctggcgctcagtgcatggacttggctgttggaaaaccacgaagactaacgtaatggttcttcctcttagtctctctgtccctgacttttcacactagagcaaatgcctcaccctcccgagaaacccagaaagaagatatggctggctcacgactatgtggggagggaaagctgctgggttcagggaggaggggtcgggaggaaaagctaggaaggggtgagccgaggtgttgctgagatgattttctgctgt

SEQ ID NO: 8869 - DNA, 423 bp, Bos taurus
  unsure (29): unsure at all n locations; Clone ID: 38-LIB3058-037-Q1-K1-B6
atcgcgagcggccgcccttttttttatanttttttttttttttttttttttttgtcaggttttaaaaaaattgtttattttgaaataatttaaaacttgaagaaagattataaaaatccattccatctgcataaacctcacccggactcagcaatgcggacatttcgcctcgtctgtgctctgcccaggcgcagcgagggggggcaggccctgtgcttcaggggcaacccgggcatgcccgttgcgggcggtctgtcttgagttcccacccaagaacccgttcagcaggcgtggccggccagcccaggctccgtctgctcacgtgggggcttcagagttatgtggagttagtgacactcgggggagctggcctgcccccggtgggaacctgaggtgaggagccaggagcacccccacaccgtg

SEQ ID NO: 8870 - DNA, 427 bp, Bos taurus
  Clone ID: 38-LIB3058-038-Q1-K1-B10
cggacgcgtgggcgagcggccgaccttttttcaatggacattaacctttatatgcggaacgagattgctgaccttgttggtggtttactggcaaaggcgcaaagacgaagaacggaacaggataaggagtacttgtgctcgataccagagacgggctacaacctaaagcggctctatccggtgggggaaatgctgataacattacgaaaaggcaaattgaagagctgaagggacaagaagtcagtcccaaagtgtacttcatgaagcagaccattggcaactcctgtggaaccatcgcactcattcatgcaatggccaataatgaagacaaactggagttcgaggatgggtctgacctgaaacagttactttctgaaacagagaagttgacctctgaagacagatcaaagtgctatgataagaatga

SEQ ID NO: 8871 - DNA, 132 bp, Bos taurus
  Clone ID: 38-LIB3058-039-Q1-K1-B6
tagatcgcgagcggccgcccttttttttttttttttttttttttttttttttggttttgttttttttttttttttttttttttttttttttttttttttttttttttttttttttttttttttttttttttt

SEQ ID NO: 8872 - DNA, 438 bp, Bos taurus
  Clone ID: 38-LIB3058-040-Q1-K1-B6
gcggggaaatgtgtatttgttcccattcctagaagctgtggtggttcagatcaccttgggaaatgcatgtttttagtttttctgtatgttgtaatctacatataatatgtttaccaccatctcccatttctagttacaactttgtaattaaaagcagcgttgtgagtggtttacctgctgcaggagggggaaggtttttcttagttctgtgtgtttttttttgtcttttgtagacttcattttttcagcatgccattgtcttagatttttctgtctagagaattctgattgtaatgctaatgcaaaggcagcgattcaaagagtgcttcatgaataaagttgagtttttgaatatgtcatgttaatagaccagctgggaagttagattgatcattcaaaagtgtttgacacagtttgctttgctaccctaaatttttg

SEQ ID NO: 8873 - DNA, 431 bp, Bos taurus
  Clone ID: 38-LIB3058-041-Q1-K1-B10
gattaccggccgcccactctcgtgaggaggctggtccagctttcatatgtggaaaggctcagaaggacttgtttcgtggcctggaaaaggttgagctcctgctggtgacctgcaggtcgtatcccctgcccctatgaccaacatgagctggagtttcctgacgcggctgctggaagagatccacaaccactccacgttcgtgggcaaggtgtggctcacggtgctggtggtcttccgcatcgtgctcaccgccgtgggcggcgagtccatctactccgatgagcagaccaagttcacgtgcaacacgcggcagccaggctgtgacaacgtctgctacgacgccttcgcacccctgttccacgtgcgcttctgggtcttccagattgtggtcatctccacgccctctgtcatgtacctgggctacgctgtgc

SEQ ID NO: 8874 - DNA, 203 bp, Bos taurus
  Clone ID: 38-LIB3058-041-Q1-K1-B6
ccggcccgacccactcatccggttgtagatcgcgagcggccgtccttaatcttttttctttttttttttttttggttttgtgttaaatttaatttttttatccttttctattttttaaatataaaaaaaaaaaaaaaaataaaataaaaagggaccagaaaaaaaaacaggaaaaaaaaaagggaaaaaaaagaactaatccc

SEQ ID NO: 8875 - DNA, 450 bp, Bos taurus
  Clone ID: 38-LIB3058-043-Q1-K1-B6
cgttcggattcccggtcgactacgcgtccggagcggccgacctttttttctactttgtttattaccccattaatgcacggcgtcaatacgcctatacgcggacactaggcaaacgcaacacactgagagcatgagcacgcagttacgggagcagcgcctagacctaaaccatggatagggcattttttaacacatggaacacacagtggactactgcccatgctacggattattgagactatcaggctgactattgaacactatagagctagccacgcggttaacagctaacatcactgcaggacacctattaactgacctagtccgaagagctacacttgcactaatcagcattagcactacaacagctataattacattcaccattctaatcctactaacaattctagagtatgcagtaactataatccaagcctatgtattcactct

SEQ ID NO: 8876 - DNA, 430 bp, Bos taurus
  Clone ID: 38-LIB3058-044-Q1-K1-B10
tcaaagtgaagacgacagcgcctcgtcggtactgtgtgcggcccaacagtgggatcattgaccccggcttgactgtgaccgtttcagtaatgctgcagccttttgactatgaccccaatgagaagagtaaacacaagttcatggtacagaccatctttgctccaccaaacatttcagacatggaagctgtgtggaaagaagcgaaacccgatgaattaatggattctaaattgagatgtgtatttgaaatgcccaatgaaaatgataaattgaacgacatggaacccagcaaagccgttcccctgaacgcttggaagcaagacgggcccgtgccaaagccgcacagcatttccctcagtgacaccgagacgaggaagctcgtggaggagtgcaagcggctgcagggggagatgatgaagctgtcggaaga

SEQ ID NO: 8877 - DNA, 395 bp, Bos taurus
  Clone ID: 38-LIB3058-044-Q1-K1-B6
accggtttcggaattgaccggactgcgacccacgcgtccgaaaaacagtgatggtagtgtttcatggtatgaatacaacattcagatgcaggatcgggggatcgactttgttgagaacactgctcttgatgatgcagaagaggagtcttttaggcagcttcatttataggacaagaatcgatttgaaaaagctaaccatgatacaggccctggcttgaaccttgaagagtgcattgcttttgaacatcctgaagaagtcgagtatatgactgaatttgtcattcaagaggctttagaagaacatgacaaacatggtgatggatttgttagttcggaagaataccttggtgactacacgcgagacccgaccgcaagtgaagatccagattggatac

SEQ ID NO: 8878 - DNA, 441 bp, Bos taurus
  Clone ID: 38-LIB3058-045-Q1-K1-B6
aagctgagcaaatcaatgatgaaatgatgcgttccgggcagctgggcctccaagatggagatctccggaaagagagtaaagaccaactctcagatgatgtctccaaagtaattacctatctgaaaaggttagtgaatgctgcgggaagtgggaggtcccagaatgggcaaaccggggaaagagcaatcaggctctttgagaaaccacttgatcctcaatctatttatcagctgattgaaatctctaggaatttacagataccccctgaagacttgattgacatgctcaaaactggagagaagccagtggaaccagagcaggaacttgagattcctgttgaacctgaagacatctcagaggttgacttagaccatccagatctgttccaaaataagatgctctccaagaatggctaccccaaagcacctggtcatgctgtgg

SEQ ID NO: 8879 - DNA, 443 bp, Bos taurus
  unsure (72),(76)...(78),(88),(95),(99),(110)...(111),(116),(118),(168),(176): unsure at all n locations; Clone ID: 38-LIB3058-046-Q1-K1-B10
accggttcggaaaaccggctcgagacatccagcgtggcactaatgcattagaaggaacagttttaggcggcnccannnggcagaaggngagcaanaagncggagaccgcnngcaancnggcccggaccgcaggaaacagcaacactcgcttcggaatagcagccaagnaccagatngaccctgatgcctgcttctcggctaaagtgaacaactccagcctgataggattaggatatactcagaccctaaagccaggtatcaaactgacactgtcggctctgctggatggcaagaacgtcaatgctggtggccacaagcttggtctaggactggagtttcaagcataaatgactattgtacaatcgtttaattttaaactattttgcagcatagctaccttcagaatttagtgtaccttttaatgttgtatgtctgggatgcaa

SEQ ID NO: 8880 - DNA, 419 bp, Bos taurus
  Clone ID: 38-LIB3058-047-Q1-K1-B10
ggagaggggcgaggactgtccctcagcttatttagctggggggctgagggccagaagcgaggattcggctatggaggcagagcgtctgactacaaatcggctcacaagggactcaaggggcacgacgcccagggcacgctttccaaaatcttcaagctgggaggacgagacagccgttccgggtccccgatggcaagacgctgaagcccagctcccctcccagaaccccgtccccagcttcttaatacaaccgcctcgacgctaaccattgtctaaattcccaagtgcagcaggcatgcccccaccctgaccacatgcgcgtcctgcaggctcctggccagcggctcaatggagaagacggtgcagctgtcagctcacccttgaagatcagcgaggtccctgagggtccacggtgggcg

SEQ ID NO: 8881 - DNA, 313 bp, Bos taurus
  Clone ID: 38-LIB3058-048-Q1-K1-B6
cactgaggagactgtcaccacctggctgtaagtagcgggaggcttctaaagctggtcggaggaataaatagtcttatttgacgcacaagtggcgtggctcgtataagccggctgctgaggcgctgagggaagctgcagaggtagtgtacgaggatgcgctatgtacattaaaagatgaactgggctgataaagatggcagatccagatgtccttactgaagttcatgcagcatcgaaacggttagccacgtatgtgattcggggatttgatggcattgaccatgctaaggccttgaacatattgatccgaatc

SEQ ID NO: 8882 - DNA, 430 bp, Bos taurus
  Clone ID: 38-LIB3058-049-Q1-K1-B10
cggacgcgtgggtcccaaaggaaatgattcctgaatattcattggaaggactgttgctgaagctccaatcctttggccacctgatgcgaagagccaactcattggaaaagaccctgatgctgggaaagattgaaggcaaaaggagaaggaggtgacagaggctgagatggttagacagcatcaccactcaatggacatgcatttgagcaaagtccggaagataatgaaggacagaggaacctggcttgctgcagtccatggggttccaaagaatgggacacgacttagtgactgaacgacaaaatctccttcaggagtactccaccactatgacctgctgcctcccaaaggccccgcctcctaattcatcacctttgggagtacagttcagcagatgacctctagttggttgacacaacatctagtccct

SEQ ID NO: 8883 - DNA, 283 bp, Bos taurus
  unsure (235): unsure at all n locations; Clone ID: 38-LIB3058-049-Q1-K1-B6
cctgctggcatgccccatccagaatcttggaaggatctttatgagccgactcatggcgccaaagtgctgaccatggccccgggcctgatcaccttggagatcgttccctttcgagttgccgcttataacaagaaaaagaagcggatggactactatgactctgagcaccatgaagactttgaatttatttcaggaacacgaatgcgaaaacttgcccgcgaaggccagaaacctnctgaaggtttcatggctcccaaagcctgggatgtgctgatggagtact

SEQ ID NO: 8884 - DNA, 355 bp, Bos taurus
  unsure (1): unsure at all n locations; Clone ID: 38-LIB3058-050-Q1-K1-B6
nggagttctccatttacccagccccccaggtttgcacagctgtcgttgagccctacaactgcatcctcaccacgcacaccaccctggagcactctgatagtgccttcatagtagacaatgaggccatctatgacatctgtcgtagaaacctcgacattgagcgcccgacatatactaacctgaataggctgataggtcaaattgtgtcctccatcactgcttccctgaggtttgatggcgccctgaatgtggatctgacagagttccagaccgacctggtgccctatccccgcatccacttccctctggccacatacgcccctgtcatctctgctgagaaagcctaccatgaaca

SEQ ID NO: 8885 - DNA, 174 bp, Bos taurus
  Clone ID: 38-LIB3058-051-Q1-K1-B6
attccgggctagacccacgcgtacgcgtgagcgtgattccgtcagcagctgcattgcctctcgactcgtaggctctcctagctgtcggcttttcgcttccggaaacatgggcaccggtgtggctggctcttatggggtcatctgagtgttgaacgacattgaagtgcgtaagtc

SEQ ID NO: 8886 - DNA, 431 bp, Bos taurus
  Clone ID: 38-LIB3058-052-Q1-K1-B6
gggagttgtcctgctgtattaaaggatatatagtccatctatatgtacctggaatcaacatggtgttgccataaaacttttttttaagtgctttgaaacagtaatgtaagaaagcttaatgggcacaagaggcatttcagcccatgcccccctcccatcttattgaagacgaaatgatggccaaaggctttgctaaactttaaattccaagatctcacagcttaaaagctgcctttaacgtttctgagtattggcctgagttggccaatttttactaaattgagtctttatgggtgaaactttccagtttacttactaaactccaggccatgcatgtactgtactccaaaagtgacgcgcctttcctgggcgaactaatgctctatccaccgagtaatcctagacactcaatctggggaacaaatggctgt

SEQ ID NO: 8887 - DNA, 308 bp, Bos taurus
  Clone ID: 38-LIB3058-054-Q1-K1-B10
gccgcaggcgaagaaaggagccccggttcctccgaatgctaaagccaaagcgggagcttcgaatgccaagaaagcgacataaaacggctatcacagacccactatatcgacgatgcgaacctcgcactcatgttagagaacaaagtcactgtaaacaaagaggcatctgaaatactaacatccgctcattgtgacgggatactatattatatactaaaccctaatggagatacaacaaaagtgatggtcaattatgtctttaaaatgatacaacgtacttcaagcacatgatgttgacgagtaattaa

SEQ ID NO: 8888 - DNA, 312 bp, Bos taurus
  Clone ID: 38-LIB3058-054-Q1-K1-B6
aagggtacaggaaaggagtgctttattttacgccatggattgatactcattctagtcagagcgcattcgaagtattcagaattagaaggagattaaagagccacgtttgggcgttacgttgactattcctcattttcatcctaaggggggttgtgacgccagtgtggggacttcgtgggggtctggtagaagagatgctgaattcaaaaggtgggaatcagtaggttatgggggaagcacggaagatgtcagctggagttagaaaagagtgggatagaggacccctccccgatctaactgtggcctgtaccc

SEQ ID NO: 8889 - DNA, 404 bp, Bos taurus
  Clone ID: 38-LIB3058-056-Q1-K1-B10
agaaggcagagaaaaaggaggagaaggcaaaggatgtgccagagaagaagaaggctgaatccccagtgaaggctgagtccccagtgaaggaggaggtgcctgccaagccagtaaaggtgagcccagagaaggaagccaaagaggaggagaagccacaggagaaagagaaggagaaggagaaagtggaagaggtgggagggaaggaggagggaggtttgaaggaatccaggaaggaagacatagccatcaatggggaggtggaagggaaggaggaagaacaggaaactaaggagaaaggcagtgggggagaagaggagaaaggagtcgtcaccaacgggctagacgtgagcccaggggatgaaaagaagggcagtgataaaagtgaggagaaagtggtggtaacc

SEQ ID NO: 8890 - DNA, 257 bp, Bos taurus
  Clone ID: 38-LIB3058-056-Q1-K1-B6
ttctagatcgcgagcggcctccctttttttttttttttttttattttttttttttttgtgttttttttttttttttttttttttttttttttttttttttttttttttttttttttttttttttttttttttttttttttttttttttttttttttttttttttttttttaaaaaggaaatatttttttttttgatttttggaaaataatcccttggtagattttaagggtcttatttaagaaatatattttaaaaa

SEQ ID NO: 8891 - DNA, 453 bp, Bos taurus
  Clone ID: 38-LIB3058-057-Q1-K1-B6
ttgagcttgcttaaaaacaaccaccttttccccgcagacgggcttccgggcgtactcaaagaaaataggtaacaatgcgtttcgcggtttctggcttggcagaaggcaagatctctaattaacgttctgcctcgttaaacagggagggggaccagggaccccgctgcggtggccactgcggggtggcgtcttctgcgtggtcccttcgcgttcgggggtcttggaccagcgcgtggggcaggtcttctggccgcttcgcgatggagaaactacattggtttgttatagacgttagcatattacttcatccaagatgacttcatgatctttcagcagcttgctttggattttaagggttcggggttgtggatagcagccgaatctaactggcatatgcttgtttgttttctctctctaactgtgtttccctgcgctgtgaagaatcaacaaaat

SEQ ID NO: 8892 - DNA, 437 bp, Bos taurus
  unsure (308),(392): unsure at all n locations; Clone ID: 38-LIB34-001-Q1-E1-B6
cggacgcgtgggtgaaaatggaaaaccaatatttgactcagtggatctctgtcgcacatgggaggccctggagaagtgtaaggacgcagggctgaccaagtccatcggggtgtccaacttcaaccacaagcagctggagaagatcctgaacaagccagggcttaagtacaagcccgtctgcaaccaggtggaatgtcacccttatttcaatcagagcaaactgttggatttctgcaagtcacatgatattgttcttgttgcctatggtgctctgggatcccaacgactaaaagaatgggtgaacccanacctcccctttctcttggaggacccagttctctctgccattgccaaaaagcacaggcaaaccccagctctggttgcccttcgcntacagatacaacgtggggttgtggtcctggccaagagtttacaca

SEQ ID NO: 8893 - DNA, 408 bp, Bos taurus
  Clone ID: 38-LIB34-002-Q1-E1-B6
aagttcctctgagatcagatcctatagtgactctgatgcagtcaccaggtcacttcttgtgaccacccactccaacagggatctggctgtaacaatgctgcttcctgcacctttctgtgtgctgccaactgcatctactcagaccctgagaattgtttctattcccattttcattcccattttcagcctgtcctcctctgagatcacagagtcttttttatattaactctgacacagtcaccagatcaccccttgtgacccctgccctaaggatttgactgtgatgctgcttcctgcatggaccctggatccactgcctgtgcactgctaacagcatctacacagaccccaacggatttttctgtatccattctccctctgcagatcattcaagggaaacacattgaa

SEQ ID NO: 8894 - DNA, 381 bp, Bos taurus
  Clone ID: 38-LIB34-003-Q1-E1-B6
ctaactgagtttgcaaaaacatgtgttgctgatgagtcccatgccggctgtgaaaagtcacttcacactctctttggagatgaattgtgtaaagttgcatcccttcgtgaaacctatggtgacatggctgactgctgtgagaaacaagagcctgaaagaaatgaatgcttcctgagccacaaagatgatagcccagacctccctaaattgaaaccagaccccaatactttgtgtgatgagtttaaggcagatgaaaagaagttttggggaaaatacctatacgaaattgctagaagacatccctacttttatgcaccagaactcctttactatgctaataaatataatggagtttttcaagaatgctgccaagctgaagat

SEQ ID NO: 8895 - DNA, 417 bp, Bos taurus
  Clone ID: 38-LIB34-004-Q1-E1-B6
gtcagtgacggggtggaacatgggcagagccctgacagcggtcagcccagacagcaccctgctcttcaatgcctacgtccacttccaaggaaagatgaaggggttctccctgctgccagggctcaaggagttctgggtggacaacaccacctcggtgtcagtccccatgctctctggcaccggcatcttccacttctggagcgacagccagaacaacctctccgtgacccgcgtgcccctgagcgccaacacctacctgctgctcatccagccgcaccacacccccgacctgcggaaggtggaggccctcaccttccagcacaacttcctgacccgaatgaagaacctctctcctcgggccatccacctgaccatgccccagctgacactgaaagcgtcctatgacctgcaggacct

SEQ ID NO: 8896 - DNA, 407 bp, Bos taurus
  Clone ID: 38-LIB34-005-Q1-E1-B6
gaacaaaagtcaaggattccggaaggcaatttcctgccattttgcggatgccaactgtcactacatagatgtggagggcaccagtcaagaaaacattgaaaaggaagttgttgatatagtcaggaaaaagtatggatttaaagacgtcactctgaaggatgtttggacatttcgagggcgtgttgtgaaaggagaaagaatcaacctttgaaatagccctttgctcaaactcttgtcaagaaaaccaaggtggaacaagatgtcagagaaaaatctttctcaatgagatgatgtaatcgtttctatccatgttaacaaaatccaagtgcacagatgcagcacttcactgcgcatgggtaattctgcagtatggtgggatgctttaatggatataaaatagtaaaagt

SEQ ID NO: 8897 - DNA, 399 bp, Bos taurus
  Clone ID: 38-LIB34-007-Q1-E1-B10
aaagtttttaactcagttaatgtcattttctttcttttttctttttcattagcatgttggcagataaactgaacatgactccagaagaagctgaaaggtggattgtaaatttgattagaaatgcaaggctggatgccaagattgattctaaattagtgagtgttgtctgtgctatgtattagatgtcagttgctgattattttatacttttgggggagtttttgttaggacattcattctagaatttttgttttaatatataatagtttttttgaaggcagtagcattctcttgtttttttttttttgttgttggatgaatattgtcatctgtactgtgcataaaaatatttgcaacatacatgtaggttgtgatgttatacttatgacttaaggaact

SEQ ID NO: 8898 - DNA, 396 bp, Bos taurus
  Clone ID: 38-LIB34-007-Q1-E1-B6
tgctaccaccctggatgagcatgggaacatgctgtttttaaaaggggagtttgtgtggaagggtcatgcctgggcccggcagttgatctcagagaggtggaaggatgcccccagtcccgtggatgctgcattccgctatgatcgtaacagtgtccttctgatcaagggggacaaattctgggtatatcctcctgagaagggggaggaatatccaaagttgctccaagagaagtttcctggaatcccattcccactggatgcagctgtggaatgtcaccgcggagaatgctctcatgagggtgtcttcttcttccaaggcaaccacacgtggttctgggacttctctacaaaaaccataaagagacgttcctggccagccgttgggaactgctcctc

SEQ ID NO: 8899 - DNA, 414 bp, Bos taurus
  Clone ID: 38-LIB34-009-Q1-E1-B6
aaaactttggcacaatgaagtgggtgacttttatttctcttctccttctcttcagctctgcttattccaggggtgtgtttcgtcgagatacacacaagagtgagattgctcatcggtttaaagatttgggagaagaacattttaaaggcctggtactgattgccttttctcagtatctccagcagtgtccatttgatgagcatgtaaaattagtgaacgaactaactgagtttgcaaaaacatgtgttgctgatgagtcccatgccggctgtgaaaagtcacttcacactctctttggagatgaattgtgtaaagttgcatcccttcgtgaaacctatggtgacatggctgactgctgtgagaaacaagagcctgaaagaaatgaatgcttcctgagccacaaagatgatagcc

SEQ ID NO: 8900 - DNA, 219 bp, Bos taurus
  Clone ID: 38-LIB34-010-Q1-E2-B6
aatacagcacggttttaggaaaacctaccacactatgtgagattatggggaacgctgacatgtggttgtttcgaacttactgcgattttgaatttcctcagccctatttaccgaatactgaatttgttgcgagactgcactgcagacctgcaaggcgcctacctacgggatcacgagagtttgtgcaaacctctggaaaagatcgagtcgtggcgttta

SEQ ID NO: 8901 - DNA, 392 bp, Bos taurus
  unsure (368): unsure at all n locations; Clone ID: 38-LIB34-011-Q1-E1-B6
atcaactcagatggaatactgccgcaccccgtgtactgttacttgcaatattcctgtggtgtctggcaaagaatgtgaggaaatcatcaggaatggaggtgaaacatctgaaatgtacctcattcagcctgaggattctagcaaaccatatagagtatactgtgatatgaaaacggaaaaaggaggatggacagtaattcagaaccgtcaagatggtagtgttgactttggcaggaaatgggatccatataaacaaggatttggaaatattgcaaccaatgcagaagggaagaaatactgtggtgtaccaggtgagtattggctcggaaatgacagaattagccagcttaacaatatgggaaccacanagcttttgattgaaaatggagact

SEQ ID NO: 8902 - DNA, 416 bp, Bos taurus
  Clone ID: 38-LIB34-012-Q1-E1-B10
acagccctgaggctgcgggacgtggaccatgtctgcttgggcagccctcctgctgctctggggtctgtccctgagcccagtgactgagcaggcgacgttctttgaccccaggccatccctgtgggccgaggccggctcaccgctggcaccctgggccgatgtgacgctgacctgccagagcccgctgccgacccaggagtttcagctcctcaaggatggcgtgggccaggaaccggtgcacctggagtcccctgcccatgagcacaggttcccgctgggaccagtgaccagcaccacccggggcctctaccgctgcagctacaagggcaacaacgattggatcagcccgagcaacctggtggaagtgaccggagcagagcccctgcccgcaccctcgatctcaaccagtcccgtgt

SEQ ID NO: 8903 - DNA, 419 bp, Bos taurus
  Clone ID: 38-LIB34-012-Q1-E1-B6
agatgactaagtctgcacgccgccatcgcaaacgctaccgctcgctccgaagccgtggtcgaggccgcggccgaaaccagaacccctaccggcgatctcgatctgccttcctgtcctggctctccagcgaggagctgggcctgggagccaacaactatgatagcttcgagatggactggcttgtgcctgccacctgtgagcccatccagagtgtctacttcttctcagaagacaagtactaccgagtgaaccttcgcacacggcgggtggacgctgtgatccctccctacccacgctccatcgcccagtactggctgggctgtccagtccctggccaagcgtagcagcctgagtccaaacagctggtcactgctgctccctgctccagcatcctccttccagctccaaagaagatttcc

SEQ ID NO: 8904 - DNA, 415 bp, Bos taurus
  Clone ID: 38-LIB34-014-Q1-E1-B6
accacacgggcccgtcgtcggttccactcgcaagctctacgaaaagaaaatcttcgagtatgagtcccagatgcggaggctctcgcccccgagctcgtccgcatcctctttctcctatcggttctcggacttagattcggcgtccgtggactcggatatgtatgatctgcccaagaaagaggacgccttactttaccagagcacgggctataatgatgactactatgaggagagttacttgaccaccatcacttacggggaacctgagtctattggcacaaccaaagggcttcggcaagtcctcagcttcactctcagatgctgatccctttcaccgccaggtccgtgatgagaatcttgtctctttggaagaggaatgcaatgatcgggaacgcctcctgtatggccaggacag

SEQ ID NO: 8905 - DNA, 408 bp, Bos taurus
  Clone ID: 38-LIB34-017-Q1-E1-B10
acaaaagtccacaaggaatgctgccatggtgacctacttgaatgcgcagatgacagggcagatcttgccaagtacatatgtgataatcaagatacaatctccagtaaactgaaggaatgctgtgataagcctttgttggaaaaatcccactgcattgctgaggtagaaaaagatgccatacctgaaaacctgcccccattaactgctgactttgctgaagataaggatgtttgcaaaaactatcaggaagcaaaagatgccttcctgggctcgtttttgtatgaatattcaagaaggcatcctgaatatgctgtctcagtgctattgagacttgccaaggaatatgaagccacactggaggaatgctgtgccaaagatgatccacatgcatgctattccacagtgttt

SEQ ID NO: 8906 - DNA, 193 bp, Bos taurus
  Clone ID: 38-LIB34-017-Q1-E1-B6
cgaagaagaaagaaagaggatggtggcctcctgggcgcagaggctgaagaccctctgggaggaggagcccatccagtgctcgcccccgtggtactttgggcagtgacggaggccacgccacactgcgggggccacacgggagctgtgacgcgtgtaatgccactcaggcgcatgtaataaaggatgtcacgac

SEQ ID NO: 8907 - DNA, 416 bp, Bos taurus
  Clone ID: 38-LIB34-018-Q1-E1-B6
aggatgatttcttgcaacttcgaaaaatttaaaaccatgaaacatctattactgctacttttctgtgcttttatagttcaggcccaatttcctactgactatgacgagggacaagatgacagacctaaggtaggtttgggtgcccgcggtcatcggccctatgacaagaagaaggaagaggcccccagcctgagacctgtgccccctcccatcagcggaggtggctatcgggctcgtcccgccacagcaactgtgggccagaagaaagtggagagaaagccccctgacgctgatggctgcctgcacgcggacccggatctgggtgtgttgtgtcctacaggatgtaagttgcaagatactttggtaagacaggagagaccaatccgaaagagtatagaagatttacgtaatactgt

SEQ ID NO: 8908 - DNA, 402 bp, Bos taurus
  Clone ID: 38-LIB34-019-Q1-E1-B10
ggcagcgccggcgtgacccacccgccatgctccccccagcgctcgtcttgctgttggggtttctctgccacgttgctatcgcaggacgaacctgccccaagccagatgagctaccgttttccacggtggttccactgaaacggacctatgagcccggggagcagatagtcttctcctgccagccgggctacgtgtcccggggagggatccggcggtttacatgcccgctcacaggactctggcccatcaacacgctgaaatgcatgcccagagtatgtccttttgctgggatcttagaaaacggaacggtacgctatacaacgtttgagtatcccaacaccatcagcttttcttgccacacggggttttatctgaaaggagctagttctgcaaaatgcactg

SEQ ID NO: 8909 - DNA, 364 bp, Bos taurus
  Clone ID: 38-LIB34-019-Q1-E1-B6
atgccaggcagatgcaacagaaaatgaaagaaacgctacagaatgtacgtaccaggttggaaattctagagaagggtcttgccacttctctacggaatgatcttcaggaggtgcccaagttgtatccagaatttccacctaaagacatgtctgaaaagtcaccagagcctcagagccttagttcacttcctcagcacagtgaagtaaatggcagcacttcaactgcaagtgcagaatcaagtagtacacctactactttgtccttgccgtgtcagagtcatccgtccgaagcacctcctgcttacactccccaggctgctgagggtcactacactgtatcctaaggaacagaatctggggagtt

SEQ ID NO: 8910 - DNA, 410 bp, Bos taurus
  Clone ID: 38-LIB34-020-Q1-E2-B6
cttctctgccgtggtatcccagagcaagggatgcttttcacattttaacaaaatgaaggtactcactgcagcactgctgtccatccttctgatcacacagcagtgttcttgtgctgtgaatcccacaggctgcgatgccgttgagcctgtggctgtgagagctctggacctgatcaataaaggacggtgggatggctaccttttccagttgctgcgggtcgctgatgcccacttggacaaagtggaatccatagctgtctactatttagtcttggatgtgaaagaatctgactgtccagtcctgtccaggaagcactgggacgactgtgagctggatgtttctcgtcgtccgtctgaaacagtgattggacaatgtaaggtaatcgctataacacttttggctgggcctg

SEQ ID NO: 8911 - DNA, 427 bp, Bos taurus
  Clone ID: 38-LIB34-021-Q1-E1-B6
ggcggctgctgattgtgttctaaggggacggagtggggtaaagacgtttgctctcctggaacagcctatctcattcctctccttcgactacccgtggcgcggagagtcagggcggcggctgcagcagcaagggcggcggtggcggcggcggcagctgcagtgacatgtccagcatgaatcccgaatatgattatttattcaagttacttctgattggcgactctggggttggaaagtcttgccttcttcttaggtttgcagatgatacatatacagaaagctacatcagcacaattggtgtggatttcaaaataagaactatagagttagatgggaaaacaatcaaacttcagatatgggacacagcgggccaagaaagatttcgaacaatcacctccagttattacagatgagcccatggcatcat

SEQ ID NO: 8912 - DNA, 431 bp, Bos taurus
  unsure (402): unsure at all n locations; Clone ID: 38-LIB34-022-Q1-E1-B10
agattgctaaccttgataaaatattttaatgaaaattcaaggcttgtaagcaccccctgggtagagctctacaatactttcccctctttactacattatttcccaggaagtcataatacaatatttaaaaacatgactgagcaaagaaagtttattttggaggaaataaagaaacaccaagaatccctggacctcaataaccctcaagattttattgattactttctgattaaaatggaaaaggaaaaacacaataaacattctgaatttaccatggacaacttgatcaccaccgtatgggacgtgtttagtgctggaacagagacaacaagcctcactctgagatatggactcctgctcctgctgaagcacccagaggtcacagctaaagttcaggaaganattgatcgtgtggttggcagaaccgaagc

SEQ ID NO: 8913 - DNA, 425 bp, Bos taurus
  unsure (287),(325)...(326): unsure at all n locations; Clone ID: 38-LIB34-022-Q1-E1-B6
gtgaaggtacccatgatgacccttcgcctggaaaccccttacttccgggacgaggagctgggctgcacgctggtggagctcacgtacaccagcaatgacagcgccctcttcatcctccccgatgagggcaaaatgcaggacctggaagccaagctgaccccggagacgctgacgcggtggcgaaactccctgcagcccagacatatagatgaactcagcctgccaaggttttccatctccagtgactatcagctgagagacatcctttcccagctgggtatcaaganaatcttcaccagcgatgcggacttctcaggaatcacannatgacacaagctggcagtttcccaagtgattcacaaggccgtgctcgacgtgggcgaagagggcacggaaggagctgctgtcacggctgtcataatgtt

SEQ ID NO: 8914 - DNA, 403 bp, Bos taurus
  Clone ID: 38-LIB34-023-Q1-E1-B6
agcttaacacatagtaaacccaagcccttgacctcttacaggagctttgtctgccctcttaataacatccggcctaaccatgtgatttcactttaactcaatgaccctgctaataattggcctaacaacaaatatactaacaatataccaatgatgacgagatgttatccgagaaagcaccttccaagggcaccataccccagctgtccaaaaaggcctccgttatggaataattctttttattatctccgaagtactattctttaccggatttttctgagctttctaccactcaagcctcgcccccacccctgaactaggcggctgctgacccccaacaggcattcacccactaaaccccctagaagtcccactgctcaacacctctgtcctattggcttcc

SEQ ID NO: 8915 - DNA, 286 bp, Bos taurus
  Clone ID: 38-LIB34-024-Q1-E1-B10
ctaaaatgattcctcagagctattgagacttgccaaggaatatgaagccacactggaggaatgctgtgccaaagatgattcacatgcatgctattccacagtgtttgacggggttaggcatcttgtggatgagcctcagaatttaatcaaacaaaactgttaccaattcgaaaaacttggagagtatggattccaaaatgcgctcatagttcgttacacttggggtactttcctggtgtcaactccaactctcgtggatgtttcagaagcctaggataagtgggta

SEQ ID NO: 8916 - DNA, 345 bp, Bos taurus
  Clone ID: 38-LIB34-024-Q1-E1-B6
tcgtagtacatcgcaagactctataatgagtcttattatcaccctcttgggactggggctggcattcttcagggattaccggtcttcttatctagcaagaatgaacgcttcccgagaagtaaaatcggtagaacttcctaactgtaagttaataggaggaatataaactggtgctgaagacctggagatacttcctaatggactcgctttcattagttccggattacgataccctggagtaaaaagctttgaacctgataagcctgggaaaaatagtgctgatggacctgaacaaagaggatcctacaagtgttggaattgaagatgactggaagtaacgttgat

SEQ ID NO: 8917 - DNA, 377 bp, Bos taurus
  Clone ID: 38-LIB34-025-Q1-E1-B6
ccgcagcccactgcacgaacagtcctcacgccgatctctttcctggttcccacccgcgccaggtgacacggagagctgacaccatggttcatcaggtgctctaccgggcgctggtctccaccaagtggctggcggagtccgtccgggctggtaaggtgggccctggccttcgggtgctggatgcgtcctggtactcgccgggcacccgcgaggcccgcaaggaatacctggagcgccatgtgcccggcgcctccttttttgacatagaggagtgtcgggacaaggcctcgccttacgaggtgatgctgcccagccaggcgggcttcgccgactacgtgggcagcctgggcatcagcaacgacacgcaatgtggtggt

SEQ ID NO: 8918 - DNA, 388 bp, Bos taurus
  Clone ID: 38-LIB34-028-Q1-E1-B10
actagttctagatcgcgagcggccgctcgcgatctagaactacccacgcgtccggcctagacatgcgtctgggatctttgaattgtgagcccatacaccttgaccccggcgaggctcagcaccgccccccaccccgatctcatgctagaaacaggtctgagtgaagagatgaggctgtgacctctgtcctgaagacctgaggttgctgggagttaggggatcgagtcccttggcgacccctgagcagtgatctacagagccaagtcagaaccaaagggatgtttcctttgcctctgtaatttcagaagatagattagggtgtgctggatatcctggcccctggggctgcgccggagtttgaaattaagaggcagctatgttatcccag

SEQ ID NO: 8919 - DNA, 403 bp, Bos taurus
  Clone ID: 38-LIB34-028-Q1-E1-B6
aaagatataagcatctgaatgcagagttccagagaatagcaagaagagataagaaagccttcttcagcgatcaatgcaaagaaatagaggaaaacaacagaatgggaaagacgagagatctcttcaagaaaattagagataccaaaggaacatttcatgcaaagatggggccgataaaggacagaaatggtatggacctaatagaagcagaagatattaagaagaggtggcaagaatacacagaagaactgtacaaaaaagatcttcacgacccagatagtcatgatggtgtgatcactcacctagagccagacatcctggaatgtgaagtcaagtgggccttagaaagcatcactacgagcaaagctagtgggaggtaatgggattccagttgagctcgttc

SEQ ID NO: 8920 - DNA, 419 bp, Bos taurus
  Clone ID: 38-LIB34-029-Q1-E1-B6
cgatattgatgtggaacacggaggcaagagaagccgcctgacccccacctctgcaggcagttccagcacagaggagaagtgtagctctcagccaagcagctgctgctctgaccccagcaagccagacagggacgtggagggcacagcacagtctctgacggagcagatgaataagatcgccctggagtcagggggtcagcatgaggaacagatggagtctgataactgttcaggaggagatgatgactggactcatctgtcttcaaaagaggtggacccgtctacaggtgaactgcagtctctacagatgcctgagtctgaagggccaagctctctggatccttcccaggaaggacccacaggactgaaggaagctgcactgtacccacatctgccaccagaagctgacccccggctga

SEQ ID NO: 8921 - DNA, 404 bp, Bos taurus
  Clone ID: 38-LIB34-030-Q1-E1-B6
gccccgggcccgccgacaccatgagttggtcctcgcaccctccgagtgtaatcttctacattctttcattgctttcttcagcatgcctggcatatgttgctacccgagacaactgctgcatcttagatgaaagatttggtagttattgcccaactacctgtggaattgcagatttcctgaataattaccaaaccagtgtagacaaagatctacgaactttggaaggcatcttatatcacgttgagaacagaacatcagaagccagagagctggtcaaagcaatccaaatcagctataaccctgatcaaccatcaaagccagataacatagagagtgctaccaagaattccaagagtatgatgggagaaattatgaaatatgaaacactgatatcaacacatgaa

SEQ ID NO: 8922 - DNA, 406 bp, Bos taurus
  Clone ID: 38-LIB34-033-Q1-E1-B6
ctccagtaaactgaaggaatgctgtgataagcctttgttggaaaaatcccactgcattgctgaggtagaaaaagatgccatacctgaaaacctgcccccattaactgctgactttgctgaagataaggatgtttgcaaaaactatcaggaagcaaaagatgccttcctgggctcgtttttgtatgaatattcaagaaggcatcctgaatatgctgtctcagtgctattgagacttgccaaggaatatgaagccacactggaggaatgctgtgccaaagatgatccacatgcatgctattccacagtgtttgacaaacttaagcatcttgtggatgagcctcagaatttaatcaaacaaaactgtgaccaattcgaaaaacttggagaatatggattccaaaatgcg

SEQ ID NO: 8923 - DNA, 443 bp, Bos taurus
  Clone ID: 38-LIB34-034-Q1-E1-B10
ggaggtggagcccagtgacaccatcgagaacgtgaaggccaagatccaggataaggaaggcattccccctgaccagcagaggctcatctttgccggcaagcagctggaagatggccgcactctttctgattacaacatccagaaagagtcgaccctgcacctggtcctccgtctgaggggtggtatgcagattttcgtgaagaccctgaccggcaagaccatcaccctggaagtggagcccagtgacaccatcgagaacgtgaaggccaagatccaggataaggagggcattccccccgaccagcagaggctcatctttgccggcaagcagctggaagatggccgcactctttctgattacaacatccagaaagagtcgaccctgcacctggtcctccgtctgaggggtggtatgcagatcttcgtgaagaccctgaccggga

SEQ ID NO: 8924 - DNA, 427 bp, Bos taurus
  Clone ID: 38-LIB34-035-Q1-E1-B6
aaaatctttgctacctagaatctacagtccctattttatggcaacactggataatggctttgtgaaattgggaaaaaaaaaaatgggagtgactgtaaacagaaatgccaaattattgatggttactgttgctgcttcaaataagtataaaattaatgtgtaagaaagcccattctttcatgataatacttggggttgaaggggggagatgggggaacattttcttaagatgaaaataattaactgctattttaaatttcttgatcattgaatgtgagacccttctaacatgatttgcgaagctgtacaagtataggcagagttatttttctgtttacatttttttttggtttattttgggggtaaattggtagctgcctaattactgtttacttcattgttatattgcagtaaaaagttataaaaa

SEQ ID NO: 8925 - DNA, 408 bp, Bos taurus
  Clone ID: 38-LIB34-036-Q1-E1-B6
aacgatgagcgccctgcaagctgtcgtcactctcctgctctgcgggcagcttctcgcggtggaaaccggcagtgaggccacagccgacagctgcccaaaggcccccgagattgctaatagccatgtggagtactcggttcgctatcagtgtgacaaatattacaaactgcatgctggaaatggggtgtatacttttaacaataagcaatggataaacaaggacattggacagcaacttcctgaatgtgaagaagatgacagctgcccagagccccccaagattgaaaatggctacgtggagtacttggttcgctatcagtgcaaaccctattacacactgcgcacctgtggagatggagtgtacacctttaacagtaagaagcagtggataaataagaacattggaca

SEQ ID NO: 8926 - DNA, 410 bp, Bos taurus
  Clone ID: 38-LIB34-037-Q1-E1-B10
gaggctgaagctagttaacatcagtgtcttggctcccaactggctcccaattcctggtgaaactcctaaagggagactgttaaatcatgaaattaatcaccatccttttcctttgttccaggctgctaccaagtttaacccaagagtcttctcaagaaatcgactgcaacaaccaggatgtatttaaagctgtggacgctgctctgacaaaatacaacagtgaaaacaagagtggcaaccagtttgtattgtaccgcataaccgaggttgccagaatggataatcctgacacattttattccttgaagtaccaaatcaaggagggcgactgtccttttcaaagtaacaaaacttggcaggactgtgactacaaggactctgcacaagctgccacaggagagtgcacagcg

SEQ ID NO: 8927 - DNA, 426 bp, Bos taurus
  Clone ID: 38-LIB34-037-Q1-E1-B6
gacacaccaacgatgagcgccctgcaagctgtcgtcactctcctgctctgcgggcagcttctcgcggtggaaaccggcagtgaggccacagccgacagctgcccaaaggcccccgagattgctaatagccatgtggagtactcggttcgctatcagtgtgacaaatattacaaactgcatgctggaaatggggtgtatacttttaacaataagcaatggataaacaaggacattggacagcaacttcctgaatgtgaagaagatgacagctgcccagagccccccaagattgaaaatggctacgtggagtacttggttcgctatcagtgcaaaccctattacacactgcgcacctgtggagatggagtgtacacctttaacagtaagaagcagtggataaataagaacattggacagaaactccct

SEQ ID NO: 8928 - DNA, 408 bp, Bos taurus
  Clone ID: 38-LIB34-042-Q1-E1-B6
caaagaaaccaccgttcaagggcttgatggcctttctgaacgctgtgctcagtataagaaagatggtgctgactttgggaagtggcgtgctgtgctgaagattgacaaccagtgtccatcccatcttgctatccaggaaaacgccaacaccctcgcccgctatgccagcatctgtcagcagaatggtctggtacccattgttgagccagaggtaattcctgatggcagccatgacatggaacactgccagtatgttactgagaaggtcctggctgctgtatacaaggccctgaatgaccatcacgtttacttggagggcaccctgttgaagcccagcatggtgactgctggacatccctgcaccaggaactatactccaaaacatgtggcaatggccacagtgacagc

SEQ ID NO: 8929 - DNA, 354 bp, Bos taurus
  Clone ID: 38-LIB34-043-Q1-E1-B6
gctgatttcaaatttaatgctggttaacaggtcgggctggatgattgccctagccctacagtggctgagcatggactttagggaaaaaaaatcttgatctttctttccttttgcattcccagacatccagctccttctctagtgcctgttcctgcaaggcagggactcctatgacagtgagaacggaagggtcggtctccggactgtgtctccatcttttatagggctcagggttgcattcccaacttgaatctggatgttaatctggcgaaaatgtcgactacctgtggaccgttcccaattcattaaccgcttccctcgttctgagaggcaaacacatatttgacaggtatt

SEQ ID NO: 8930 - DNA, 354 bp, Bos taurus
  Clone ID: 38-LIB34-044-Q1-E1-B10
aggtcaaatcagtaccagtgaaagattgtcattcagtcatcatcagtcggtgggtttttggtacaatgggacttactcaacatgctgtatctgtagcagaggatgaagaatggcagaaaatacggtcattgctgtctccattcgtcaccactgggaaacgcatagacatgttccctatcaatgggaaatatagagatctgttggtgatgaaactgatgaaggaaacaaacattggtacgtccgtcaataggcaagaggtctttggggtctacaccatggatgtgattactatcacaccatctggactgaacattgatgcccctggcaacgcacaatatcaccttgtagtgaatg

SEQ ID NO: 8931 - DNA, 300 bp, Bos taurus
  Clone ID: 38-LIB34-045-Q1-E1-B6
atccactgcccacatcccgctctcgcaggcagacatgagggcagagagaacttccttcctcctggccctggggctcctggtggctgggatccgcagtgtccactgcctcccagaaaatgtggtggtgaaggaccagcacagaagggtggatggccacacgttagcctccagcaacaccgacttcgccttcagcctctacaagcagttggctttgaagaaccccaataagaatgtcatcttatccccgctgagtgtctccatagccttggccttcctgtctctgggggcccgtggctccac

SEQ ID NO: 8932 - DNA, 255 bp, Bos taurus
  Clone ID: 38-LIB34-046-Q1-E1-B10
ttcccgggctcacccacgcgtcagagaacttgttgtttcaactcaaacagccttagcctaaacacgacacagccacaggcatctcagcctagcctgagagtaagaggaaaagagagaaatgaaaactcagagcttagtcatcggttttccttttctgttggggttaaaccaacactctcagtaaagaacgtaaatttctttaaagattttgcttcttttgtttgtgcgacaattaagaaagaatgaaaggactct

SEQ ID NO: 8933 - DNA, 386 bp, Bos taurus
  Clone ID: 38-LIB34-046-Q1-E1-B6
acagccggcgctttgggctctcgtcttagtttctcgttctcctgtcctgggagcccggcgggtccgggcctcccatctgtgccggtgcgggcgccggcatgtggctgtgggaggaacaggggggcctcatgggccccttctccttcctgctgctggtgctgctgctgctaacgcgcagtcccttcaatgcctgcctcttcactggcaggctctacctcctgttgcgcctcttcagctttgagccagtgccctcccgcagggctatgcaggtgctcaagccccgggagcgcgtttccgctagcgccaccggggaggtagccaggacgctcccgagaacacgctggcggccattcggcaggcagctaagatccgggcagcaggcttgg

SEQ ID NO: 8934 - DNA, 432 bp, Bos taurus
  unsure (367): unsure at all n locations; Clone ID: 38-LIB34-047-Q1-E1-B6
tgggatccgtgagtccctactcaaccccggaggcgaaggacgcggtttctggaggcgaagaacgcggttggccaatcgcaagccagaagatgaaggttctgtgggttgccgtggtggtcgcgcttctggcaggatgccaggcggatatggagggagagctggggcccgaggagcccctgactacccagcagccccgggggaaggacagccagccttgggagcaggcgctgggccgcttctgggattacctgcgctgggtgcagaccctgtctgaccaggtgcaggaggagctgctcaacacccaggtcattcaggaactgacggcgctgatggaggagacatgaaggaggtgaaggcctacaaggangagctggagggacagctaggccccatggcccaaggagacacaggcccgcgtgtcaaaagagctgc

SEQ ID NO: 8935 - DNA, 423 bp, Bos taurus
  Clone ID: 38-LIB34-048-Q1-E1-B10
agtcggtccggatggctagctgcgggatggcgcgccggaacccgctggataataaagtggccctagtaacggcctccactgatgggatcggttttgccatcgcccggcgtctggcccaggacggggcccacgtggtggtcagcagccggaagcagcagaatgtagaccgggcagtggcaacgctgaaagcggaggggctgagcgtcacgggcaccgtgtgccacgtagggaaggctgaggaccgggagcggctggtggccacggctgtgaagcttcatggcggcgtggacatcctgatctccaatgctgccgtcagccctttctttggaagcttgatggatgtccccgaggaggtgtgggacaagattctggacgttaacgtgaaggccacggccctgctgacaaaggcagtggtgccagaga

SEQ ID NO: 8936 - DNA, 453 bp, Bos taurus
  Clone ID: 38-LIB34-048-Q1-E1-B6
actcgcgggtcgacgcacgcctctagcttaagtcatagaagttcctaagagtgaagctctggaagtcaccaaatttgctatagaggttgggttccgccatattgactgtgctcatgtgtaccaaaatgaagagcacgttggccaggccattcgaagcaagattgcagatggcactgtgaagagagaagacatattctacacttcaaagctttggtgcactttccttcgaccagagttggtcagaccagccttggaaaagtcactgaaaaattttcacctggactatgttgatctctatattattcattttccactggctatgaagccaggggaggaattattgccacaagatgaacatggaaaactgataggtgattcggtggatccctgtcacacgtgggacgccctggagaagtgtaaggatgcagggctggcaaagtcatcggggtaccc

SEQ ID NO: 8937 - DNA, 405 bp, Bos taurus
  Clone ID: 38-LIB34-049-Q1-E1-B10
atttattactatgctgatctcactacaactattcctaattataacctttaccgccatggaactaatcttattttatattctatttgaagcaacactagtcccaacactcattattattacccgatgaggaaaccaaacagaacgcctaaacgccggactctatttcctattctatacactagctggctccctacccctattagtcgcactaatttatatccaaaacacagtaggatccctaaatttcctaatattacagtactgagtacaacctgttcataactcttgatctaatgtcttcatatgactagcatgtataatagctttcatagtaaaaataccactatatggcctccacctttgactacctaaagctcacgtagaagcccccatcgcaggctccat

SEQ ID NO: 8938 - DNA, 426 bp, Bos taurus
  Clone ID: 38-LIB34-050-Q1-E1-B6
cggacgcgtgggcaagggtagcagtcgtggacgatccaaaagtagtagattcagtggaggatttggtgccagagactatcgacagagtagtggtggcagcagttccagcttcagcagcagccgcgccagcagcagccgcagtggtggaggtggccatggaagcagcagagggtttggtggaggtggctatggaagcttttacaacagtgatggatatggaggaaattataactcccagggggttgactggtggggtaactgaacctgctttgcagtaggtcaccctgccaaacaagctaatatggaaaccacatgtaacttagccagactataccttgtgtagcttcaagaactcgcagtacattaccagctgtgattctccactgaaattttttttttaagggagctcaaggtcacatgaagagt

SEQ ID NO: 8939 - DNA, 243 bp, Bos taurus
  Clone ID: 38-LIB34-052-Q1-E1-B10
gtttgccgccgggacacaggtgtcgtgaaaaccaccgttaaacctaagccaaaatgggaaaggagaagacccacatcaacatcgttgtcattgggcacgtagattcagggaagtctaccacgactggccatctgatctataaatgtggcgggatcgacaagagaacaattgaaaagttcgagaaggaggctgccgagatgggaaagggctccttcaaatatgcctgggtcttggacaaactta

SEQ ID NO: 8940 - DNA, 348 bp, Bos taurus
  Clone ID: 38-LIB34-055-Q1-E1-B6
ggttctgaaaccctagaggacgcaactgtgagtgtctctgtcctagcctctcaacttgctttcctgtgtcctcccctgaagccagccttccgctaactgtgcgtctcacatgtcccttcctccataaggccgctggcccaactcctcttggaagtctggacagactctaggacatgcttcccctccctctctccatattgctcctgctcacacagtcccagagtttcctgggcgaagaaatggatgtctattctgagaaaaccctcaccgatccctgcaccctggttgtgtgtgctccaccagcagatagccttcgtggtcatgatggacgagatgggaaagaaggcc

SEQ ID NO: 8941 - DNA, 346 bp, Bos taurus
  unsure (335): unsure at all n locations; Clone ID: 38-LIB34-056-Q1-E1-B10
ggcagatgaaaagaagttttggggaaaatacctatacgaaattgctagaagacatccctacttttatgcaccagaactcctttactatgctaataaatataatggagtttttcaagaatgctgccaagctgaagataaaggtgcctgcctgctaccaaagattgaaactatgagagaaaaagtactgacttcatctgccagacagagactcaggtgtgccagtattcaaaaatttggagaaagagctttaaaagcatggtcagtagctcgcctgagccagaaatttcccaaggctgagtttgtagaagttaccaagctagtgacagatctcacanaagtccacaag

SEQ ID NO: 8942 - DNA, 369 bp, Bos taurus
  Clone ID: 38-LIB34-056-Q1-E1-B6
cttaccccactggggaaatactggtctattccaactgggccgatggggagcccaacaacagtgatgagggacaaccagagaactgtgtggaaatctttcctgatggcaagtggaatgacgtaccctgcagtaagcaactccttgtgatctgcgagttttgagctctcccacccaccccagggaaggggcagtgcccagagctgtgagctgccaacatcccaataaaaaggtgaccctctgctgctcagggcttccccactgagccacgggatgaggccaccaggcaggcctcctatggaactcctccctcagaataaagtttgaaactggaaaaaaaaaaaaaaaaaaaaaaaaaaagggcggccgctc

SEQ ID NO: 8943 - DNA, 220 bp, Bos taurus
  Clone ID: 38-LIB34-057-Q1-E1-B6
gaccctttacctggaaaccccttacttccgggacgaggagctgggctgcacgctggtggagctcacgtacaccagcaacgacagcgccctcttcatcctccccgatgagggcaaaatgcaggacctggaagccaagctgaccccggagacgctgacgcggtggcgaaactccctgcagcccagacttatacatcgactcaggctgccaaggttttccatc

SEQ ID NO: 8944 - DNA, 219 bp, Bos taurus
  Clone ID: 38-LIB34-058-Q1-E1-B10
cagaagctactatcaatggtctggaaccaggaacagagtacacaagccaagtcagtgccctcaagaacaatcagaagagtgagcctttgattgggaggaaaaagacaggccagtaagctctcgcgcatacaaccatctcatggaccccattccaggaaagctctgagtatatcatttcatgtcatccagttggcattgataaagatcccttacagttcc

SEQ ID NO: 8945 - DNA, 208 bp, Bos taurus
  Clone ID: 38-LIB34-059-Q1-E1-B10
ggaggagataggtatcctggtggagaaagctcaggatgagatcccagcccgtgtctgtgtcacggccccagactggcctgtccttcctggggcctgagccagaggacttgggggacctctacagccgctacaagaagctgcagcaagagctggagttcctggaggtgcaggaggagtatatcaaggatgaacaaaagaacctgaagaa

SEQ ID NO: 8946 - DNA, 239 bp, Bos taurus
  Clone ID: 38-LIB34-060-Q1-E1-B6
cccatctctccgcttcctcctttcctcaggcatcaaagcagagaccacgggaacctagttcaccaggctcgaggctggaggccccgccatgacatccctaaggccccttctgatgctggccctgctggcgtgggttgttgtggctgaccaagagtcctgcaagggccgctgcaccgagggcttcaacgccaccaggaagtgtcagtgtgacgagctctgttcttactaccagagctgct

SEQ ID NO: 8947 - DNA, 190 bp, Bos taurus
  Clone ID: 38-LIB34-062-Q1-E1-B6
cttgaggattttaaacgatacaaagatctgcaaaggctgggtctaggaaacaacaggatcacagatattgaaaacggaagtcttgctaacataccacgtgtgagagaaatacacctagaaaacaacaaactaaaaaaagtgccttcaggattacaagagttgaaatacctccagataatctttcttcata

SEQ ID NO: 8948 - DNA, 442 bp, Bos taurus
  unsure (48): unsure at all n locations; Clone ID: 38-LIB34-063-Q1-E1-B10
aagacatccctacttttatgcaccagaactcctttactatgctaatanatataatggagtttttcaagaatgctgccaagctgaagataaaggtgcctgcctgctaccaaagattgaaactatgagagaaaaagtactgacttcatctgccagacagagactcaagtgtgccagtattcaaaaatttggagaaagagctttaaaagcatggtcagtaactcgcctgagccagaaatttcccaaagctgagtttgtagaagttaccaagctagtgacagatctcacaaaagtccacaaggaatgctggcatgggtgactacttgaatgcgcaaatgacagggcaaatcttgccaagtacatatgtgataatcaagatacaatctccagtaaactgaaggaatgctgtgataagcctttgttggaaaaatcccactgcattgct

SEQ ID NO: 8949 - DNA, 395 bp, Bos taurus
  unsure (369): unsure at all n locations; Clone ID: 38-LIB34-063-Q1-E1-B6
caggcgtgacccacccgccatgctccccccagcgctcgtcttgctgttggggtttctctgccacgttgctatcgcaggacgaacctgccccaagccagatgagctaccgttttccacggtggttccactgaaacggacctatgagcccggggagcagatagtcttctcctgccagccgggctacgtgtcccggggagggatccggcggtttacatgcccgctcacaggactctggcccatcaacacgctgaaatgcatgcccagagtatgtccttttgctgggatcttagaaaacggaacggtacgctatacaacgtttgagtatcccaacaccatcagcttttcttggcacacggggttttatctganaggagctagttctgcaaaatgcactg

SEQ ID NO: 8950 - DNA, 228 bp, Bos taurus
  Clone ID: 38-LIB34-064-Q1-E1-B6
aatgaagtgggttgactttaattcccctccccttcccctcaactccggctaatccaagggtgtggttcctccaaaaacacacaagaatgagaatgcccaaccggttaaagaattgggaaaagaacaatttaaaaggctggtactgattggcttttcccaataaccccaacagtgtccattttatgaacatgttaaattaatgaacgaaccaactgaatttgcaaaaac

SEQ ID NO: 8951 - DNA, 197 bp, Bos taurus
  Clone ID: 38-LIB34-065-Q1-E1-B10
ttcgtgacatgggcaggctagactctcgtaaaagattagccagagcagctggagaaggaatttgggagcccagagtcgggtcggccttcattctgtggaggcagcctttacctgtcctgtatcgtctcagctctacatcatggcaggccagaatctgtgcaggctggacctgaagcttaggagctcaagccacgtgg

SEQ ID NO: 8952 - DNA, 256 bp, Bos taurus
  Clone ID: 38-LIB34-066-Q1-E1-B6
ccctgacgctctaacacgacttctcagtgttgaggaatagggagaccaacttcaccttttcccccttcagcattgccagcctcctcacccaaatcctgcttggggctgcaggagaacccagagtcagcctgaatcgcctcctctcttacgcccagaacttcaactgtgtccaccacgccctgagggccttcatgtccgaacgtttcacctcgttctctcagatcttccacagctcagacctgaccatcatggacac

SEQ ID NO: 8953 - DNA, 205 bp, Bos taurus
  Clone ID: 38-LIB34-067-Q1-E1-B10
gacagatcttgccaagtacatatgtgataatcaagatacaatctccagtaaactgaaggaatgctgtgataagcctttgttggaaaaatcccactgcattgctgaggtagaaaaagatgccatacctgaaaacctgcccccattaactgctgactttgctgaagataaggatgtttgcaaaaactatcaggaagcaaaagatgcc

SEQ ID NO: 8954 - DNA, 228 bp, Bos taurus
  Clone ID: 38-LIB34-067-Q1-E1-B6
agcaagcccatcctgtattcctatttccgaagctcctgctcatggagagttcgaatcgctctggccttgaaaaacatcgactatgagacagtagccatcaacctcacaaaggatgggggccagcagttctctggagaattccaggccctgaatcccatgaagcatgtgccatccctgaagattgatgggatcaccatcggccagtccctggccatcatcaagtatctg

SEQ ID NO: 8955 - DNA, 213 bp, Bos taurus
  Clone ID: 38-LIB34-068-Q1-E1-B6
gttgctgatgagtcccatgccggctgtgaaaagtcacttcacactctctttggagatgaattgtgtaaagttgcatcccttcgtgaaacctatggtgacatggctgactgctgtgagaaacaagagcctgaaagaaatgaatgcttcctgagccacaaagatgatagcccagacctccctaaattgaaaccagaccccaatactttgtgtgat

SEQ ID NO: 8956 - DNA, 213 bp, Bos taurus
  Clone ID: 38-LIB34-069-Q1-E1-B6
ggccttcctggtcctggctgcagccatggtggccactcccagggctgacagacagtgtccagcatgcggggagcctgccttggacgtggagagccaccggggagctgctgcttaacctggccaagaggagcatcttggacaagctgcacctcagccagcgccccaacccttggccggccctgtgtccgggagtttgctctgcggggctgcccc

SEQ ID NO: 8957 - DNA, 397 bp, Bos taurus
  Clone ID: 38-LIB34-071-Q1-E1-B10
acaaccacgaaccatacttcggctactcaggggcctttaaatgtctgatggagggcgctggggatgtggcctttgtcaagcactcaacggtattcgacaacctgcctaacccagaagacaggaaaaactatgagctgctctgcggggacaacacccggaagtctgtagataattaccaagaatgctacttggcaatggttccttcccatgcggttgtggctcgaactgtgggcggcaaggaggatgtgatctgggaacttctcaatcacgcccaggaacattttggcaaagataaaccagacaatttccagcttttccaatcgcctcatgggaaggacctgctgtttaaggactctgctgatgggtttttaaagattccttctaagatggattttga

SEQ ID NO: 8958 - DNA, 412 bp, Bos taurus
  Clone ID: 38-LIB34-075-Q1-E1-B6
acaacaccctaaaatgagtcgtattacagtggtgttgaaagcggggccgacgagcaaggagatcagcgtcaccaacactcacaggcggaaaggtgtctgtgaatcgatctctggtacttatgagaaaacaagcactgatgggaagtttctctatcacaaagccaagtggaatatcaccatggagtcctatgtggtccacaccaactacgatgagtacgccatttttctgaccaagaaattaagccgtcgccatggacccaccattactgtcaagctctatgggcgtgagccgcagcttcgggaaagcctgctggaggaattcacggaggtggccctgggtgtgggcatccccgaagatgccatcttcacaatgcccgacagaggtgaatgtgttcctggagagcatgatcca

SEQ ID NO: 8959 - DNA, 414 bp, Bos taurus
  Clone ID: 38-LIB34-076-Q1-E1-B10
tcccggctcgacccacacgtcaagcgtgagcctgtggagggagctgaggctgggagctggggcccgggactgaaacagcccctgtgagcagcgcagacacctgtgtacaggagcagttctctttccaggatgtggctcttagctctggtcctgacctcccttggttccttcacagcttgggggctggcaccctcaccgcctattgtggacaccgctcagggcagagtcctggggaaacatgtcagcttaagaggatttgctcagcctgtggtcgtcttcctgggagtcccttttgccaagcctcctcttggatccttgaggtttgctctgccgcagcctgcagaaccatggacctttgtgaagaataccatctcttaccctcccatgtgctcccaagacccagtgggggcacag

SEQ ID NO: 8960 - DNA, 415 bp, Bos taurus
  Clone ID: 38-LIB34-076-Q1-E1-B6
ctagagagagtcggaatatccaaagttgctccaagagaagtttcctggaatcccattcccactggatgcagctgtggaatgtcaccgcggagaatgctctcatgagggtgtcttcttcttccaaggcaaccacacgtggttctgggacttctctacaaaaaccataaagaaacgttcctggccagccgttgggaactgctcctcggccatacgatggctcaaccgctactactgcttccggggtaacaaattcctgcgcttcgaccccgtcacaggagaagtgaattccacttatcctcgggatgtccgagattaccttatgttctgccctaacagaagccatgcacataggaatgcaacccagcatatcgataagcgctgtatccacatctaatcttgtctgcattgctttctg

SEQ ID NO: 8961 - DNA, 353 bp, Bos taurus
  Clone ID: 38-LIB34-077-Q1-E1-B6
caaaactctaggaagcgtcgaatgaggctctcagcgcctctgtggcaaaagtgaattcccagtcactgagcccctatctgtttcgggcgtttagaagctcagttaaaagagtcaacgccctggacgaggacagcttgaccatggacttagagttcaggattcaagagacgacgtgcaggagggaatctgaagcagaccccgccacctgtgacttccagaggggctaccacgtgcccgtggccgtttgcagaagcaacgtgcggatgtctgctgaacaggtgcagaacgtgtgggttcgctgccactgggcctccaactctgggtccagcaacagtgaagagatgtttttttgg

SEQ ID NO: 8962 - DNA, 471 bp, Bos taurus
  Clone ID: 38-LIB34-078-Q1-E1-B10
cgccgttcgacacaagccactagagagagtcgtactgatttattggattttgcattcagaaaggagcagactgtggagcaaaggtggtggagaaaacaaaccctacagaaccagttggagtggtttgcagagtggatggtgtataccaggtggtggaatatagtgagatttctctggcaacagctcagaaacgaagctcagatggacgactgctgttcaacgctgggaacattgccaaccatttcttcactgtaccatttctgagagatgttgtcaatatttatgaacctcagttgcagcaccatgtggctcaaaagaagattccatttgtggattcccagggacagttagttaagccagacaaaccaaatggaataaagatggaaaaatttgtctttgatatcttccagtttgcaaagaagtttgtggtatatgaagtattacgggaagatgagttttccccgctgaaga

SEQ ID NO: 8963 - DNA, 304 bp, Bos taurus
  Clone ID: 38-LIB34-079-Q1-E1-B10
acccacacgtcagcggacgcgtgggtccggtgttagaagacctgtgtgggctcctgagaggccggattgaagacctgaggctgtgtcccacatacactaccaccaggaagatatttgatccgaagatcacccttgatgcgctccgtagattttcccatagaaccccctcgacacagcagcagtcgaatagcgtttatcccagttttgccctctgtcagtctgtagcggcttcgggggcctatagctaggagctcatctaatgcagtcatgatggcctgatctctgacttaggccctctgaggca

SEQ ID NO: 8964 - DNA, 387 bp, Bos taurus
  Clone ID: 38-LIB34-082-Q1-E1-B10
agctctcgagctcagaatggctcgggcactgctagtgccagttgcactgtggatgttgggcttgtgctggtctttggctaaagcccaccctcgtggatacagctcctgagcgtgggcaccgtgttgaaagtgtgaatgtggccactccggatccaggactgacggcacgctgcacggatggctgcggctttgatgctaccaccctgtatgagcatgggaacatgctgtttttaacacgggagtttgtgtctaaaggtcacgcctgtgcccggcagttgatctcatagatgtggatagatgcccccagtctcgtggaggctgcattccgctcagatcgtgacagtgtccttctgattaagggggacaaattctgggtatatcctcctg

SEQ ID NO: 8965 - DNA, 410 bp, Bos taurus
  Clone ID: 38-LIB34-082-Q1-E1-B6
aaaagttcgacctccgggtttccatacgcccagcccccgaaacagtcaagaagcctcaggacgccaaaggttccatgatccttgacatctgtaccaagtacctgggagaccaggatgccactatgtccatcctggatatatccatgatgacaggcttctcacctgatgttgaagacctcaaaacgctgagcactggtgtcgacagatacatctctaagtatgagatgaacagagactccaacaagaacacactcatcatctacctggacaaggtctcacacacagtggaggactgtctgtccttcaaagttcaccagtactttaatgtcggacttatacagcctggggcagtcaaggtgtactcctattacaacctggatgaaacttgtatccgcttctatcacccggat

SEQ ID NO: 8966 - DNA, 348 bp, Bos taurus
  Clone ID: 38-LIB34-083-Q1-E1-B10
agaagcactttgaccaatgtctatttaatactaggatgtgagttacctatgatgtgcatgcatgctcagtcatgtctgattctttgtgaccccatggactgtagcccaccaggctcctcttccccatggagttttccaggcaagaatactagcgtggcttgccatttcttactccaagggatttttttctgacccaggaactgaacctgcatctcccaagattcctgcattagcaggtgtattctttaccactgagtcacctggcatgccctgataaccatgatgatgccaatataaaaacctaataaagttcaaacatcagatttaatatttttgtcaaaatataaa

SEQ ID NO: 8967 - DNA, 397 bp, Bos taurus
  Clone ID: 38-LIB34-083-Q1-E1-B6
aagttctcgctaggtggactcaagcggcggatcctgagtctggcctcggatccgtcggaggcggtgggtgtgcggccgtccttccggcgccatgtcgttctgcagcttcttcggaggcgagattttccagaaccactttgagccgggtatctacgtgtgtgccaagtgtggctatgagctcttctccagccgctccaagtacgcacactcatccccatggccggcgttcactgagaccatccatgctgacagtgtggccaagcggccagagcacaatcggcctggagccataaaggtatcctgtggcaggtgtggcaacgggctgggccatgagttcctgaacgatggccccaagcgcggacagtcccgcttctgaaatttcagcagctcattgaag

SEQ ID NO: 8968 - DNA, 410 bp, Bos taurus
  Clone ID: 38-LIB34-084-Q1-E1-B6
gggaaaatgaagacctccaggacatgggcttggagggtaccggcagagctgtttcttctctgtgctgccctgggatctttcagtgtgcccagctccagaggtgaaaggccaccctctcttgggtcaaatgcagtcaatgagagccttgccaagacgagacagacgcggagtgtggatgtcacgccgttgcctattgattgcgagctgtccagctggtcttcctggaccacgtgtgatccctgtcagaagaaaaggtacagacatgcctacttgatccggccctctcagttccatggggaacaatgcaacttctccgacaaagaagttgaagactgtgtttccaatagaccatgcagaagtcaagtgcgatgtgaaggctttgtgtgtgcacagacagggaggtgcataaa

SEQ ID NO: 8969 - DNA, 410 bp, Bos taurus
  Clone ID: 38-LIB34-085-Q1-E1-B6
aggttctagatcgcgagcggccgcccttttttttttttttttttttttttttttttttttttttttttttgagttcaattaatttattattgctgccacttatgggtacattttcccagttctttgtctcaaatcccaatgatgcttttatacttgcaacacatattcatcgccattttccctgtgctgaaatgtctgacatgggaatatgaggtatttctcagaaaacagagtagtaaggtgtacgatgaaatgtttgggcagtatttcttacatcacatgaaattcattatgaaatgccactagatacagtctttcattacatttagcaagcttgaaatttctgtttcttatgtagaatagaaaagggaatgtgaattacataaaagttgaatgtaattaacaataaa

SEQ ID NO: 8970 - DNA, 450 bp, Bos taurus
  Clone ID: 38-LIB34-086-Q1-E1-B6
taaaatcttaatactaattattcccatcctattggccgtagcattccttacgttagtggaacgaaaagttctaggctatatacaactccgaaaaggtccaaatgtcgtaggtccatatggcctacttcaacccatcgccgatgcaatcaaacttttcattaaagaaccactacgacccgctacatcttcagcctcaatatttatcctagcacctatcatagctttaggcctagccttaaccatgtgaattcccctaccaataccctatcctcttatcaacataaacctaggagtcctatttatactagccatatcaagcctagccgtatactccattctctgatcaggctgagcttccaactcaaaatacgcactaatcggagccctacgagcagtagcacaaacaatctcatatgaagtaacgctagcaattaacctgttatcagtact

SEQ ID NO: 8971 - DNA, 431 bp, Bos taurus
  unsure (264),(405): unsure at all n locations; Clone ID: 39-BOVMS1-001-Q1-E1-B4
aatgaagacaatggcagaccgcattctgaccatgagatctgagctcagggcacgattagaagccctcaagaccccaggaacctggaaccacatcacagagcagatcggaatgttcagcttcaccgggttgaaccccaagcaggttgagtatctgatcaatgaaaagcacatctatctgctgccaagtggtcggatcaacatgtgtggcttaaccaccaaaaatctagagtacgtggccacctccatccatgaagcagtcaccanaatccagtgaagaaacagcactcacaccagcaccaccaaagcggtcctctgtttcatgtgttccctgcctgcacagacctggttgtaaacatcacaactagattagggactactgagggacagagacggctcctctggtanagtggcttctgtttaaattggccccc

SEQ ID NO: 8972 - DNA, 342 bp, Bos taurus
  Clone ID: 39-BOVMS1-002-Q1-E1-B4
ccggtcgaccacgcgtccgataatgtcgtgttttttttttttttttttgaggtgcaaataacttgctttattttgttgttactatctcaaggaggtccaacaattataactaacaattgaatttaaacttgcatgaaaataactacatcacattgacactttgggcacttactaatattttgttgtttttaaatttaacgacagctttactttgttctttattttttgcagtggcccattgcttaaatgccccagtttcagaattacctttagaaacaccactcgaaggcgttggcagcatccctgaacctccaagagttgacactgccctggcacacgaat

SEQ ID NO: 8973 - DNA, 434 bp, Bos taurus
  unsure (157): unsure at all n locations; Clone ID: 39-BOVMS1-003-Q1-E1-B4
ggtcggttatctcgggtcggcgcacgcgtccgcagaaatagatgtttccactcaataagggaactgggtgaaaggggggaatttaaataataatgggccggatccttggtggaatggcttaatacttaaacaaaaacctaacggcaaaatatacaanaatacactttcttcattaagtgaattactagcgtttctatgcctggaatgttatgtatgttttatttactagatgtttacattttgggaaggaaaacagtgttgtttgttaaaaaattgaatatttgtaatttgctgttcccaactaagatctttataccataacaaaatttgttcttttctcatgaatttataatttctaaatgaagacaggcaagtataaaattgggggaaaaatgggctttgttaatcaaatgatgtcctgatttttctaaatg

SEQ ID NO: 8974 - DNA, 409 bp, Bos taurus
  Clone ID: 39-BOVMS1-005-Q1-E1-B12
atgcgacgtcatagctcttctatagtgtcacctaaattcaattcactggccgtcgttttacaacgtcgtgactgggaaaaccctggcgttacccaacttaatcgccttgcagcacatccccctttcgccagctggcgtaatagcgaagaggcccgcaccgatcgcccttcccaacagttgcgcagcctgaatggcgaatgggacgcgccctgtagcggcgcattaagcgcggcggttttggtggttacccgcaccttaacggcaaaacttgcaacggcctaacggccggtcctttcgccttcctcccctcccttctcgccaagttcgccgggtttccccgttaagctccaaatccggggctccccttaaggttccgatttaatgctttaccggacctcgaacccaaaaa

SEQ ID NO: 8975 - DNA, 95 bp, Bos taurus
  Clone ID: 39-BOVMS1-005-Q1-E1-B4
aaaaaaaaaaaaaaaaaaaaaaaataaaaaaaaaaaaaaaaaaaaaaaaaaaaaaaaaaaaaaaaaaaaaaaaaaaaaaaaaaaaaaaaaaaaag

SEQ ID NO: 8976 - DNA, 384 bp, Bos taurus
  Clone ID: 39-BOVMS1-006-Q1-E1-B4
atgcgacgtcatagctcttctatagtgtcacctaaattcaattcactggccgtcgttttacaacgtcgtgactgggaaaaccctggcgttacccaacttaatcgccttgcagcacatccccctttcgccagctggcgtaatagcgaagaggcccgcaccgatcgcccttcccaacagttgcgcagcctgaatggcgaatgggacgcgccctgtagcggcgcattaagcgcggcgggtgtggtggttacgcgcagcgtgaccgctacacttgccagcgccctagcgcccgctcctttcgctttcttcccttcctttcacgccacgttcgccgggtttccccctcaagctctaaatccggggctccctttaaggttccgatttaat

SEQ ID NO: 8977 - DNA, 396 bp, Bos taurus
  Clone ID: 39-BOVMS1-007-Q1-E1-B4
aaaaaaaaaaaaaaaaaaaaaaaaaaaaaaaaaaaaaaaaaaaaaaaaaaaaaaaaaaaaaaaaaaaaaaaaaaaaaaaaaaaaaaaaaaaaaaaaaaaaaaaaaaaaaaaaagggggggccccccaaaaggttcaaacctaacttacccttgaatgcaacttcaaaccccttcaaaagggccaccaaaattaaattcacgggccttcttttaaaaacttcttaacgggaaaaaccctgggttaaccaaattaaacccccttgaaaaaaacccccctttcccaaacgggcttaaaaccaaaaaggccccaaccattcccccttccaaaaatttccccaccctaaatggcaaatggaaccccccctgtaccggcccataaaccccggcggttttggg

SEQ ID NO: 8978 - DNA, 312 bp, Bos taurus
  Clone ID: 39-BOVMS1-009-Q1-E1-B12
cgggtcgtactacgcgtcgggctaacctcatatgtaaactcataccagtacagcatctatacgatacaacaacagcattcacctctgttatccattacagctccagacgtgctctacggactgagtcatccagatacatacaggcacatcgtgcttctctgttgtttatcggcttatataagctcatacgagtaagcttagattacaggtcatacacttttcgacaaccatgatgtgttaccatagaccatctgtctcacaataatacccataacatttatatgatacttcctaccatgtacgatgatatca

SEQ ID NO: 8979 - DNA, 398 bp, Bos taurus
  Clone ID: 39-BOVMS1-010-Q1-E1-B4
cttctgcttaagaatacggcaaaaagatctgtctaacattattcactgtaagctgtttttttttcccccatagccatttaagaactacggagggtctgataggcgacagcttggaaaggtttctcatatttttctgaatggttgatgaacataacactgatgagattaaattatcaaaatcccatcttcattttctgatagtgaacgcacgaaaagatatcaggtacacatcataaaactgatttggaattcctgctttcagagagtacagccttccttcgcatctgtttaaactatttcttacgacttggcaatttcagtaaaaattagtagtatcactgatactgtctaatggggtaggaggcaagcaagataacaatactagtcataatgggtat

SEQ ID NO: 8980 - DNA, 309 bp, Bos taurus
  Clone ID: 39-BOVMS1-011-Q1-E1-B12
acggtccggtatccaggtcgactacgcgtccgagatcgcgagcggtcgcccttttttttcactttcatggattggttaatgatatggattccactctagtgttcttgcctgtataatcccatggactgcggagcttggtgggctgccgtctctggggtcgctaagagtcaaacacgactgaagtgacttacagcagcaatatcattttacactatcatcttacatttgtcacgactaagagactaacaatcctatattactcgttaactatactcctgttggtatttgaatttcaccattttttacatt

SEQ ID NO: 8981 - DNA, 405 bp, Bos taurus
  unsure (307),(370): unsure at all n locations; Clone ID: 39-BOVMS1-012-Q1-E1-B4
atgcgacgtcatagctcttctatagtgtcacctaaattcaattcactggccgtcgttttacaacgtcgtgactgggaaaaccctggcgttacccaacttaatcgccttgcagcacatccccctttcgccagctggcgtaatagcgaagaggcccgcaccgatcgcccttcccaacagttgcgcagcctgaatggcgaatgggacgcgccctgtagcggcgcattaagcgcggcgggtgtggtggttacgcgcagcgtgaccgctacacttgccagcgccctagcgcccgctcctttcgctttcttcncttcctttctcgccacgttcgccggctttccccgtcaagctctaaatcgggggctccctttanggttccgatttagtgctttacgggcactcgacccc

SEQ ID NO: 8982 - DNA, 397 bp, Bos taurus
  Clone ID: 39-BOVMS1-013-Q1-E1-B12
gaccaacgcgtcggagccaaatgacttcttccctgttcaagtctccttcatctccaaaaaaaattactgtaacatacaggttaccaaagtgacccaggtagatggaaacagccctgtaaggttttccacagagaccactttcctagtggataagtatgaaattctgtagtaccaagaagaaggaaccgaaaaggaaaattttcaaataaagaagaagccaacagtggctggagagttttttccaaacccacaagccattggagacccttttttttcaaacacagtgcacgattctctgagcgcaaggaccctcaactcaccctcagtgtttcagtgtcacagagacgttcttttggaaacaatgacacacataaagggaaaaggtggtgaattcctt

SEQ ID NO: 8983 - DNA, 354 bp, Bos taurus
  Clone ID: 39-BOVMS1-015-Q1-E1-B12
atgcgacgtcatagctcttctatagtgtcacctaaattcaattcactggccgtcgttttacaacgtcgtgactgggaaaaccctggcgttacccaacttaatcgccttgcagcacatccccctttcgccagctggcgtaatagcgaagaggcccgcaccgatcgcccttcccaacagttgcgcagcctgaatggcgaatgggacgcgccctgtagcggcgcattaagcgcggcgggtgtggtggttacgcgcagcgtgaccgctacacttgccagcgccctagcgcccgctcctttcgctttcttcgcttcctttctcgccacgttcgccggctttccccgtcaagctctaaat

SEQ ID NO: 8984 - DNA, 118 bp, Bos taurus
  Clone ID: 39-BOVMS1-016-Q1-E1-B12
aaaaacactaaaaaaaaaaaaaaaaaaaaaaaaaaaaaaaaaaaaaaaaaaaaaaaaaaaaaaaaaaaaaaaaaaaattaaaaaaaaaaaaaaaaaaaaaaaaaaaaaaaaaaaaaaa

SEQ ID NO: 8985 - DNA, 452 bp, Bos taurus
  Clone ID: 39-BOVMS1-016-Q1-E1-B4
ccaagccttcgccaataaccaagccaattaccaaaattggtaacgggaaaaaaatttggaatccggccaaaaagaatacaagggtacttacccatatataaggcacatattaaccatattacaaatgcttaacatgtgtaagtacttcctctttaaatttgatacctgtaacatagtgacaaccaaaatattggaaagcacttaagcactcctccttttggaaagactatatcactgtttggttagtttaccatcacagttgaaaaccagaatgggatttctcaaaacaagaggagctgaccaaagtagagtctcaagatgattgctttttcttagctgccagttgatatgaaataaatatttttctggcacataaagataaggattgatgaatttagccaatactctaatatgccctcaaatttcaatatctataccatgatagatgaaac

SEQ ID NO: 8986 - DNA, 375 bp, Bos taurus
  unsure (144),(174),(196),(225),(249): unsure at all n locations; Clone ID: 39-BOVMS1-018-Q1-E1-B4
gaaaaaagatgcaaatgccagtgctttctgggagctgcaaagaaaaagcctaaaaaacctccgttcccaagggaaaatggaaggttttggcacccaagatgaggttggtgatgaggaagattcgggacttcagaaacttcgtanatcgggcatggcatttaaatctggtgacanaaatgatgatggtttggttganattaaggtggacaagatcgaggaacttgnacaagaaaatgaagcagcgttggnaaatggaattaaaaatgaggaaaatacagagccaggtgctgaatctgctgagaatgctgatgatcccaacaaagatacaagtgaaaatgcagatggccaaagtgatgaaaacaacgaggactatac

SEQ ID NO: 8987 - DNA, 293 bp, Bos taurus
  Clone ID: 39-BOVMS1-019-Q1-E1-B12
caattcctaccaacctctaaactgacctgcacctttaccctcaccttaaatccccaatccgagctgtcaacataaactccagcctaattctctgaccccatcacccagccccttgaagacagcagagtgtcttgcttgccctgagaaggaagtgtgggccgggtgggacggccacacccagccctagggaggcatggaggcatggtgtctgcaacataaatgtcccttctcaggtaggggagtgacacctggtttaataaaggatttctcacatcacagtaggagattctaaa

SEQ ID NO: 8988 - DNA, 392 bp, Bos taurus
  Clone ID: 39-BOVMS1-019-Q1-E1-B4
caggctgccaaaaaattcatggaagaaaatgaaagactgaaacggctcttgaaaaactatggcaaggaagaagaacacattttggaagcagaaaataaaaaactagaagaagacagagaaaaactgaaaactgaattaaagaaggcttcagatgccctttctaaggcacaaaatgacgtgatgataatgaagatgcaatcagagagactttcaaaagagtacgaccggctcctgagagaacactcagaacttcaggatcgtgcagggaaagacaagaaatgcctgtgaactttatgaaagaagattgtgaatataccatgtcaagaataaaaatttcctatcatgttagcctctaaaaaatttaaaaattcagttcagaagaacatactata

SEQ ID NO: 8989 - DNA, 362 bp, Bos taurus
  Clone ID: 39-BOVMS1-020-Q1-E1-B4
ctagagttcattttctctaacaaacatgggcagagaggaggtcttggctttcattgcatttaatttatagtactaaatttaaagacgtcgtccaaacaatatcatatcatcatcttgagatgatataaattctgtgcatcagataacattgtgatgatttaaggactaactgatcacaaaaatctattatataattttaacacatgcagaaaaacatacacgccaaaaaagcaaatgactaattcgggtacatgtataattgcatccagataatttttatcccaatatcttcataaagtactggagtataatatgtctgttacctccaagataaactaaatgttccaaggttatgaaaattt

SEQ ID NO: 8990 - DNA, 369 bp, Bos taurus
  Clone ID: 39-BOVMS1-021-Q1-E1-B12
ggaggcggcagaagaagagaaagatcgtatcccaggcccagtttgcaagggaaagtggaaaaataaggaacggattctcatcttttcttctagaggaataaatttcagaacaagacatttaatgcaagacttgagaatgttgatgcctcattctaaagcagatactaaaatggatcgtaaagataaattatttgtgattaatgaggtttgtgaaatgaaaaactgcaataaatgtatctattttgaagctaagaataaacaagatctctatatgtggctttcaaactcacctcatggaccatctgctaaattccctgttcaaaatattcataccctagctgagctaaagatgactgggaactgtttaaa

SEQ ID NO: 8991 - DNA, 448 bp, Bos taurus
  unsure (288): unsure at all n locations; Clone ID: 39-BOVMS1-021-Q1-E1-B4
atcctacaaatcctcacaggcctattcctagcattacactacacatccgacacaacaacagcattctcctctgttacccatatctgccgagacgtgaactacggctgaatcatccgatacatacacgcaaacggagcttcaatgttttttatctgcttatatatgcacgtaggacgaggcttatattacgggtcttacacttttctagaaacatgaaatattggagtaatccttctgctcacagtaatagccacagcatttataggatacgtcctaccatgaggacanatatcattctgaggagcaacagtcatcaccaacctcttatcagcaatcccatacatcggcacaaatttagtcgaatgaatctgaggccgattctcagtagacaaagcaacccttaaccgattcttcgctttccattttatccttccatttatcatcatag

SEQ ID NO: 8992 - DNA, 322 bp, Bos taurus
  Clone ID: 39-BOVMS1-022-Q1-E1-B4
atgcaacgtcatagctcttctatagggtcacctaaattcaattcactggccgtcgttttacaacgtcctgactgggaaaaccctggcgttacccaacttaatcgccttgcagcaaatccccctttcgccaactggcgtaataccgaaaaggcccgcaccgatcgcccttcccaacagttgcacagcctgaatggcgaatgggacgcgccctgtatcggcgcattaagcgcagcgggtgtggtggttaccctcaccgtgaccgctacacttgccatcgccctatcgcccgctcctttcgctttcttccattcctttcgcgcca

SEQ ID NO: 8993 - DNA, 433 bp, Bos taurus
  unsure (406),(413): unsure at all n locations; Clone ID: 39-BOVMS1-023-Q1-E1-B4
gcgtccgctaaatcacatcagggaagaatccttatctctagcttggtttccacataaggttttttgaggaaggggactgggacaagaaatctgtcatgtagttatgtagacaaggaatcttattaattcagttttgttggagagttgcttgtccatatgattttttaaaagtgagatttagtttcacaaaaacttttttttctgaaattacttttggggtaatatttaaaatgagagacattttgtaaccctgtaaaatacatagggaatataacattccagtgtacacaaagaagacagattctttaatcaaataaagtattataaaatgaatgttttttagactgttgaccctctcatactttggtgtcttcttgctgattcagaatgatgtaatgggatctangattaanaattaatgatgtgtttcttt

SEQ ID NO: 8994 - DNA, 455 bp, Bos taurus
  Clone ID: 39-LIB188-001-Q1-E1-B4
catggccgcggcgatacagacagctaaagctgtgcgggagaaggtgggtgacatcaccatcctggtgaacaacgccgccgtggtccacgggaagagcctgatggacagtgacgatgatgcccttctcaagtcccagcacatcaacaccctgggccagttctggaccaccaaggccttcttgccgcggatgctggagctacagaacggccacatcgtgtgtctgaactccgtgttggcactctctgccatccctggcgccatcgactactgcacgtccaaagcctcagccttcgccttcatggagagcctgaccctggggctgctggactgtccgggcgtcagcgccaccaccgtgctgcccttccacacaagcaccgagatgttccagggcatgagggtcgggttccccaacctcttccccccactgaagccggagacggtggcccggagaacag

SEQ ID NO: 8995 - DNA, 431 bp, Bos taurus
  Clone ID: 39-LIB188-002-Q1-E1-B4
acttatgatcggccagcccaccgggcactttgacaagcttgttgttgttcaaatgaagttccctcaaatgaggagtgttggccaaagagccattgtcaaccgcagagatgctgttgaaactcagtcccaacttagccaaattattcagtcctttcaggctagctgcatcaactttggtgattttgttgccatcgagatgtaattcagtaagggaaggaggaagaccttgagggatggtagttatatttgtgtcagcaatgcggatgtaggagagcttcttcattccctgaaaggctccattttcaatgcctgagctcttcagcgggttggtgccaagttctacgacgatcatctggttcaatccattgaacacagactttcgcactttggtgatctcgttctcatggacacgcagctcctgaagagttttg

SEQ ID NO: 8996 - DNA, 313 bp, Bos taurus
  Clone ID: 39-LIB188-003-Q1-E1-B12
tttcagcgtccagacttgcaggcggcatttgatcatatcagggacggtgtacagaatgagatggttaatcatatctctgcgaccaatgattcggtgggtgacccccagcagggcatcttgggaatcctaccaaatggtgtaatcggtaagtccgactactacacctgcatggtttattcagggatactcgcagcaagtaatcaagtcaataatgtacatcatgcgtgacagtgctgtgtcttcagctatttgctggcattgtggcacaacttgcggcaaaattcagcaatgggtcacttgattgaaagggtac

SEQ ID NO: 8997 - DNA, 406 bp, Bos taurus
  Clone ID: 39-LIB188-003-Q1-E1-B4
gacacgtagtataatttctagaagccaacatataactagcgtataatataaagatacagttatagcaagaaatcgtcctgtcaaaataaaaggcctttataatgtcatattgccgtgatcaagcatgctgcaaaatgtgatagaataaacaaataataatgaagagtttataatggaaccttaatatatactgttgccagtgactttaattccatatatatacattttttttcactattttctatctgctgtatgtaagactttaaagacttcgaatgctgaggataaactgacagaccccttactcacacagcagtattcacaggcttgatttgtttttcgctttaagttgcatgacgtttctgcaggaaatattagttaatctcactccacgaacgtaagggct

SEQ ID NO: 8998 - DNA, 370 bp, Bos taurus
  Clone ID: 39-LIB188-004-Q1-E1-B4
ggatacagcgccgaatctaacttcgaggggatcctcaaaaaccaagaacaaagtccttggacaacaaggccctccgggcgggttgaaaaccaaaaaacttggaactccgaaactttgttttttcaaaatttctcctgcgccttgctgagaaacttccagatcaagtcttccttgccatccacacttcgggccacgacagcatgagaagggacctgggccaggtggcactccttgaacgcatccactggcgcccgactgttgttcaggcagagaagctcatactggtccctgtcagccttctctggcaagttctcaaacactgtcgtctctttaacaaaagccacgtctccagccccgtccctgcagacac

SEQ ID NO: 8999 - DNA, 385 bp, Bos taurus
  Clone ID: 39-LIB188-005-Q1-E1-B12
gatacaattccatttcttcagaagtcattttggaaaacagcaaattgccggaaggagtaacactaaattacaagtcttactgcaagaatggggtgaatggaacaggggaaaatgggagaaaatgctctaatatttccattggggatgaggttcagtttgaaattagcataactgcaaataaatgtccaaataagaactctgaaaccattaaaattaagcctctgggcttcactgaggaagtggagattatccttcagttcatctgtgaatgtgagtgccagggtgaaggcatcccaggaagccccaagtgccacgacggcaacgggaccttcgagtgtggggcctgcaggtgcaacgagggacgtgtcgggagacactgtgaatg

SEQ ID NO: 9000 - DNA, 294 bp, Bos taurus
  unsure (281): unsure at all n locations; Clone ID: 39-LIB188-005-Q1-E1-B4
tggcggcgggatactcgacgtagcccatgaccgtcacttcagtctgaagatcctggcaagtcgtgttcgtcatgtccatgacgttgtacctgcgaatgaccttcaaggttcctttgctgtttcctctcacctccacgttaatcttgcttcccatggaaaactgcagctcctcgtccagcctgtggacttggtggttggtcagccgcaacacgtgggacttgagcccactgcagcccaacgagctcagggtcacgttgagccccttctcctcggcggtgtangacgcaatccagt

SEQ ID NO: 9001 - DNA, 392 bp, Bos taurus
  unsure (339): unsure at all n locations; Clone ID: 39-LIB188-006-Q1-E1-B4
tgggcccgggctactactgacatcatccctgatcacaccctgctcccccagcgtccccttctactatttatcataagttatgccccgccagaccacaggggacgctgcctttggctggcaccagcaggctcgggcacacacacctttcaagtgcacgcacgtgctatgtggccatggcctcctccctgagggaaggctggggccgtggcccgtgcattgctgagcactgcagccctgtgccctggacacacatgagcgcgtgggggtccaactgctgtggactgtgcttgcgcacccaaatagtgcacggccatgcgtgtcccagcctctaagtgccanaaccaagccagagggcttctgccagaaccaggagggaagagcccccaatgcgg

SEQ ID NO: 9002 - DNA, 385 bp, Bos taurus
  Clone ID: 39-LIB188-007-Q1-E1-B12
gggataccacttcatctgcttgtcccaacattgaagcttcaaaagtttcttcaccttccaaattggccagcgttgacagaacagttgctccggaagctttagcaatgcgtttaaggtccctttttaaaactcttcgaactgccatagcaccagcctccacaaaatacttcagacacatgtcgtcaattccaccagtggttaggataacgttggcaccagttgccaggatcttctggattcgctccttggtgatgtcagattctctctgtctaatctggtccagtttttcagggtctgtaataaccacttgtacaagcttttttttttttttttttttttttttttggcctaaaatgtaatttaatgaaaagaagaaagacaaaat

SEQ ID NO: 9003 - DNA, 416 bp, Bos taurus
  Clone ID: 39-LIB188-009-Q1-E1-B12
gatacatgattcatggaggcagctacgggacagagtgcgactcagacggctaacagtgaaacctcatggcttggaagtgccagacaaacattccttggcctttgttgtccgcattgaaaggattaatggggtgagttcactggtgcaaaggaccattgccagacttcgcctgaataagattttcagtggtgtctttgtgaaggtgacccctgaaaccataaagacgcttcgtatcgtggaaccttatgtgacctggggatttccaaatctgaaacctgttcgggaactcatcttgaaacgtggacaagcgaaggtcaagaacaaggtcatccctctgacagacaacacagttattgaggaacacctggggaattttgatgtcatttgcttggaagacctcattcatgaaatttcct

SEQ ID NO: 9004 - DNA, 366 bp, Bos taurus
  unsure (345): unsure at all n locations; Clone ID: 39-LIB188-009-Q1-E1-B4
acctggctgattctgtgcacgaggctgcaggcacatttgtagtgtgtgcaatcgcagccctgccaggcctggggctccatcctggagcccgagggtgagtgtccatgtggtccaagcatgactgactgcaaaggtcccatccacacggcatgtgtgcatgtgtgacccctctgagtgtgtctgtgctaacggtcagaagctgtatacgtcggggtcagcatgggtgaatctgccagtgggaggctggtttcagaacatcaagtcaacccgggggacagcataccacctaccagtcaaaacacacccaaacggctggtttggggcctccctgtgacctccttgtcncagctccaagccaggtctctg

SEQ ID NO: 9005 - DNA, 384 bp, Bos taurus
  Clone ID: 39-LIB188-010-Q1-E1-B4
accaaaagaccttcctcctgatactgcgctgctggacctgcaaaacaacaaaataactgagatcaaagatggagactttaagaacctgaagaaccttcatacactgattctcatcaacaacaaaattagcaaaatcagccctggggcatttgctcctttggtgaaattggaacgactttatctttccaagaatcaactgaaggaattgccagagaaaatgcccaaaactcttcaggagctgcgtgtccatgagaaggagatcaccaaagtgcgaaagtctgtgttcaatggattgaaccagatgatcgtcgtagaacttggcaccaacccgctgaaaagctcaggcattgaaaatggagcctttcagggaatgaaaaagctctc

SEQ ID NO: 9006 - DNA, 439 bp, Bos taurus
  Clone ID: 39-LIB188-011-Q1-E1-B4
gggacactcctggatctgcacgctcggtgtcagctcgcacgtcactcagctgggcttcgataccactgatcagcgcctggatctgcgccagctgggctccgaagcgagcctccgtttccgccagtgtgccttccagggcggctttcatgctgagctgagactgcagctcgatctccagaccctggagggtgcgccgcaggtcggtgacctccgtcttgctgatctgcagctgctccgtgtggccagcgacctccctgttcagctcctcggtctggctgatgaaccaagcctcagcatccttccggttcttctcagcaatgacctcatattggcttctcatgtcactcaggatcttggctaggtcgatgcccggagcagaatccacctccacactgacctggccacccacctggcccttcagcacactcatttcctcctc

SEQ ID NO: 9007 - DNA, 422 bp, Bos taurus
  Clone ID: 39-LIB188-012-Q1-E1-B4
gccaagggcgcgggataccacaagaccttcctcctgatactgcgctgctggacctgcagaacaacaaaataactgagatcaaagatggagactttacgaacctgaagaaccttcatacactgattctcatcagcaacagtattagcagaatcagccctggggcatttgcacctttggtgaaattggaacgactttagctttctaagaatcaactgaatgaattgccagagaaaatgcccaaaactcttcacgaactgcgtgtccataataacgagatcgccatagtgcgatagtctgtgttcaatggattgaaccatatgatcgtcggacagcttgggatcaacccgctgaagagctcatgcattgataatggagcctttcaggcaatgatgaagctctcctacatccgcattgctgacaca

SEQ ID NO: 9008 - DNA, 236 bp, Bos taurus
  unsure (154): unsure at all n locations; Clone ID: 39-LIB188-013-Q1-E1-B12
gccgcgcgataccaaaagaccatcctcctgatactgcgctgctggacctgcaaaacaacaaaataactgagatcaaagatggagactttaagaacctgaagaaccttcatacactgattctcatcaacaacaaaattagcaaaatcagccctgnggcatttgctcctttggtgaaattggaacgactttatctttccaagaatcaactgaaggaattgccaaagaaaatgcccaaa

SEQ ID NO: 9009 - DNA, 425 bp, Bos taurus
  unsure (333): unsure at all n locations; Clone ID: 39-LIB188-013-Q1-E1-B4
acagcgccgaatctaccttcgaggggatcctcaaaaacccaagagcagagtctttgaacagcaggtccctctggccgggtggagagccaaagagctggaagctccgagacttgttttttccaaatttctcctgcgccttgctgagaagcttccagatcaagtcttccttgccatccacacttcgggccacgacagcatgagaagggacctgggccaggtggcactccttgaacgcatccactggcgcccgactgttgttcaggcagagaagctcatactggtccctgtcagccttctctggcaagttctcaaacactgtcgtctctttaacanaagccacgtctccagccccgtcctgcagacacttgaaggcaccagaataaccgaagtatggttcccgggaggagcaggcacactggttctcc

SEQ ID NO: 9010 - DNA, 286 bp, Bos taurus
  Clone ID: 39-LIB188-014-Q1-E1-B4
actcgagaggcaaagtgtttcacatcatagattccacttccaaatccttggaatgttcatttctttggctataaagagggactagccgggaaagccaggtaatgcgtaggaaactaaactaacaaaagagcgggtggggcgggcagcgctaatgtcatcctcccggggacgggcacaggggctgttagccgcgggctgactgcggagaactgttagctggagcacggagcagccgtcctcgatgcttgggctgtcgcggggcttcagtcatccccaccacacaggt

SEQ ID NO: 9011 - DNA, 379 bp, Bos taurus
  unsure (186): unsure at all n locations; Clone ID: 39-LIB188-015-Q1-E1-B12
gccatggaggcggatacgtggtcaacggtgaccagctcttctcagctctctggaacttcctggtggtccttggcttctgcttcctcaacaatcagtgggcggccaacaagaagaacgatgtgcatgttgaagccggactcagcccgggggggcatcaacttcagcttcttctccatcttctcctgntgcgtgctggccttcctggcctaccagcgctacaaggctggagtggacgaattcatccagaactacgtggaccccactccggacccgagcacggcctacgcctcctacccaggcgtgcctgcggacacctaccagcagccgcccttcacccagaacgccgagagcaccgagggctaccagccgccccctgtgt

SEQ ID NO: 9012 - DNA, 288 bp, Bos taurus
  unsure (11),(49): unsure at all n locations; Clone ID: 39-LIB188-015-Q1-E1-B4
gatactggtcncagcagattgaggagagcaccacagtggtcacctcgcnagacggccgaaaatagaactgccggaaaataaccctcacgagcttaaggcgcactgtccaagtccccggaaaattgaaccggaactccaataaaaaacctaaaggcaacctggagaaaaccctgagggaagtggaggcccgatatgccatgcagatggagcagctcaacggagtcctcctgcacctggagtcagagctggcccagacccgggcagaggggcaacgccagacccaggagt

SEQ ID NO: 9013 - DNA, 438 bp, Bos taurus
  Clone ID: 39-LIB188-016-Q1-E1-B4
ccatagccgccggatacaaggagcaagccgaaaaaggaaacctgagggtcaagcaactcaagaggcagctggaggaggtggaggaggagtcccagcgcatcaatgccaaccgcaggaaactgcagcgtgagctggacgaggccacggagagcaacgaggccatgggccgcgaggtgacagcgctcaagagcaagctcaggcgagggaacgagacctcttttgttcccacaagaaggtctggaggacgtagagttattgagaacgcagatgggtctgaggaggaaatggacgctcgcgatgctgacttcaacggaaccaaagccagtgaatgaatgacttgctcaaaaacggcacagaaacaaacccagtggactccgcttagcactgtctaaatcgattttcaaactccaaacatcacagacaaccctcacgatgaat

SEQ ID NO: 9014 - DNA, 336 bp, Bos taurus
  Clone ID: 39-LIB188-017-Q1-E1-B4
accaaagcattctttggaaaaatattcctattccaagcgttaggaccctgaccaagaagggtcttttattcgattctcctaaaaaacctcctgaggcttttgctttttcgtcttttagagtctttcacttggcacagcacactcatccgagacactgcaaatttccaaacacctgagggcattcgcatcaagccttattcatccttcatacacgtttcttctcactgtttcgcgaacttctcactcaccacaggatccgcgtcctctgcaagaaccactgattccgtcataaaatccaaaatctttcgtccaatctctgtaatctcatatatggac

SEQ ID NO: 9015 - DNA, 437 bp, Bos taurus
  Clone ID: 39-LIB188-019-Q1-E1-B12
gcgggatactgtatagactggccatcacccctctccttggaaaacgccactgggctgtttgagaacaagcagccttttagggctagagtattttctataaacagaagagctaagttcccgaagactaagctagacagatgcagctatgtgtaaattgtatatttttatgaactactgaagcacgcaccgtcacctcgctctgcgtagctttgtgaggttttgatgtatataagccgcctgtgagagtcccgaggtgggagggacaagaggacatgagagcagagactccgtggagcctttgaaggtgaccggataactgtcctcactgtgaccaattggagcccctgaagaaggggctttcatacctcgttggagacgccacctccagagttcacactgcacaggataaaaggctttattttctcccaggatgcagt

SEQ ID NO: 9016 - DNA, 417 bp, Bos taurus
  Clone ID: 39-LIB188-019-Q1-E1-B4
gccatgggcgcgggatacatcgccatggacgagtgggccggctgcttcggcatcaaggagaaggacatcgacaaggacctcgtgatctaaagcaatgcctcctcctgcagaaccagattctctctctttgaccttccccctcctgttttccccaatgtttaaaatgtttggatggtttgttgttctgcctgcggtcaaggtgctaatatagacttaaacgaatacattaacggtgctaaacacagacattttaacccaagtcacgacattcttagctgtaactcagctctcacggccccttgctcacccatgaatggtcccgttttcctcttgccgcgtgcacctccacccattgtcttggtggcacatgggtggaacacttgatctgctcgagtctgccttcaacacacattgcat

SEQ ID NO: 9017 - DNA, 195 bp, Bos taurus
  unsure (132): unsure at all n locations; Clone ID: 39-LIB188-021-Q1-E1-B12
tggcggccggatacttctcctaagagttgggcacacacttgtccaggccctggtcatcgccagcacacaaggcacagagtctggatttcgggtcagccccaggggcacagctctgactaaagaattcatcanatgcgcaggagcctgtctggttgacgatcacgcccatggggatgttccagcctgcagtcctgt

SEQ ID NO: 9018 - DNA, 412 bp, Bos taurus
  Clone ID: 39-LIB188-021-Q1-E1-B4
gcggcgggatactgggggtactcccttgaggtcgtaagtggccccatccagacccatgatcagatattctttcccaggttccaactgaaggcggcaagaggctcggaccaggaagtttctggtctgatcagcggtggccctggcatccttggtgaaatgcaggacttgggtgatacgggtctcaaagaggcggaaagcagccctgttgtcttctcggagaaccttaacctggaagccgtagtccactcggggagagtagcaggcgaatttcatccggtaaccctccaagtcctgctgcccacgctccaaggcccggcgctgtcgagggcacttcccctcagcacactggcagacatccgcagagcacaacgtggacaagagtttgctcttacgtggtgccccaataaacaca

SEQ ID NO: 9019 - DNA, 418 bp, Bos taurus
  Clone ID: 39-LIB188-022-Q1-E1-B4
acatcgtgtaaataataaaaagccaagtaagagggctgaactcaacctagcattttaatatcctctggacaaagcaagctagaaaatcaatcactttgcacacatgtaagagtagtgttccaaaataagtaggaagctgctatacttctaagcaggggaggaaaaaaacttccattttggtcttttttcttccagtaaattatactttcaattaacagcaataatggtatcataaaaaaatgctctgctttttaaattcctgaacttcaatacaaattaaaatagtagtattggagtcttttgggaggcaaacagctagcagctacattcatcagtgtaactgagcctctttatcgataacctggtccaggttgggtatagccctgaccaaagggaggacggctacgtgcatatgggt

SEQ ID NO: 9020 - DNA, 318 bp, Bos taurus
  Clone ID: 39-LIB188-023-Q1-E1-B4
atgccgaacgactggtgtttgggatcttgaatggcagagcctgtgtgatgatgcatggcaggttccacatgtatgaaggctatccgttttggaaggtgacattcccagtgagggttttccggcttctgggtgtggagaccctattggtcaccatcgcagctggagggctcaaccccaactttgaggttggcgatatcatgctgattcgtgatcacatcacaccacctggtttcagtggtgagaaacctctcagagggcccaatgaagaaaggtttcgagttcgtttccctgccatgtcggatgcctactacccggata

SEQ ID NO: 9021 - DNA, 441 bp, Bos taurus
  unsure (433): unsure at all n locations; Clone ID: 39-LIB188-024-Q1-E1-B12
ccactgacactaaaagggcacgaccgcccgcagcaagatggcaatgatccgtgtgaagtaaatgtagcagatgaccatgacatagtaatgccggaacagcttcagcttggccaggttcactgccaccttcccatcagtgccagacgcgtcctggagatgccgaatggaccagaccacggggaacaggatggtgccacagcagatgagatccaccaggaagaggatctccttccagataccgtagtcgctggcaccctcctcgcgggactccatgacaatgtaggccacgttggccaggacctgcagtgggatcactatcccaaagatcttcttctccttgtctgacagcacatacttgacgaaggcccagccggagccgatcaaggcaatggtgatgaagaggagggcacctttcagcagatgcgtgatgtantgcatgac

SEQ ID NO: 9022 - DNA, 412 bp, Bos taurus
  Clone ID: 39-LIB188-025-Q1-E1-B12
gcaatgggcccgggctactttgcacttccatgtctatcccagacctactcagctcccaccgtgcctaagagtccgggatggcttgcggactggttgccagcgacccctgtgcgggggcgaggatcaggagggagggagaggtgactgggacggagactctgcctgcccccatgtcggctacattcaggagggcggtccgaggaggcagcatgtccatagataggatcagctgctccatggcccctcctgtcacttcagccattcctaccagtaacagcccagcagctccactcacatggtgatactgttgtgccacgccacgggctggatccgcacgattcgatcctgtaacggcgtctcaaatatgttcttcgtgtgcgaattattgtccatgtcaccagtgaaaatcttg

SEQ ID NO: 9023 - DNA, 392 bp, Bos taurus
  Clone ID: 39-LIB188-025-Q1-E1-B4
ccatccaaacccaagattaaaaaatccttcccaagtttcaaattgaaggcggaaaaaggctcggacaagaaatttccgggccggatcaccggtggccctggaatccttggtgaaatgcaggacttgggtgaaacgggtctcaaaaaggcggaaagcagccctgctgtcttctcggagaaccttaacctgaaagccgtagtccactcggggagagtagcaggcgaatttcatccggtaaccctccaagtcctgctgcccacgctccagggcccggcgctgtcgagggcacttcccctcagcacactggcagacatccgcagagcacaacgtggacaagagtttgctcttacgtggtgccccataaaacacagaacacttgtgctcaaggttgt

SEQ ID NO: 9024 - DNA, 415 bp, Bos taurus
  Clone ID: 39-LIB188-026-Q1-E1-B4
tggccgcggcgatacaggacccgaagcacacttccccggccatgaacttctccaggaagctgtcccaggtgccagggtcagggtgcaccttggccatgcgatacaagtggtaataggagacggccacatccttggcgttgcgggcgatgtagatcaccttgactttctgatccagcagggtcttcggaagcagggccagaggcaagtgtgtcttgaggagccgtggggctggtgtatctttcagaagctcaacacctgtgggaaccccaggggcgctgaactcaaggaagggcacccgcaagaagacaggggctctctgacacttctccaggtcaccctcctggtagatcaggtccaggatctcgcttacccaggtggtgcccgacttggggtaggtgctgatgagcaagtcatc

SEQ ID NO: 9025 - DNA, 399 bp, Bos taurus
  Clone ID: 39-LIB188-028-Q1-E1-B12
catggccgcggaatacgtgaatacagagctagggtttccagcagggctccagatggtcaggcatggcttcgacaccaggtctagggaagcagcggggacgtcagaggactaggagaggggatgtttctaccatacgcccgtgtcgggatcagcaggggcctcatactgctcggtgatgatcacatgcaggtcgagcgagccaacgagtgactgggagggctcgcccatgcacagcttacttggcgaccgggtttctgaaactcctgcctacggacttggccttgctgcggacttcgtcttcaattccgaggatctggttgtacattgttttttttaaagaaaagttcttttgtgtagatatatattgacttgcattgtatgctgtagtcaatgttcggt

SEQ ID NO: 9026 - DNA, 395 bp, Bos taurus
  Clone ID: 39-LIB188-028-Q1-E1-B4
atgcgccgagccgccatgagcccgggatactcattgtaaggctgacggtttacttgctgcaagccgtgtatcgtgcagttacattctcccagttgatcacattccaaatggccttcaggtaatcgggcctgacatttttagactgaaggtaataagcatgctcccacacgtcaatccccagcagggggataagacctgttgttccttgcaggggatcctggttagaacaagcagcaatctgtaagcgtccctgctccttattgaagccgatccaaccccaaccggagccttggacaccaacagatacagcagtcaacttttccttaaatttggcaaaggaaccaaagtcacgtttgatggcttccagcaattcgccttggggttctccaccaccg

SEQ ID NO: 9027 - DNA, 354 bp, Bos taurus
  Clone ID: 39-LIB2809-001-Q1-E1-B4
ggccgccggatacaagatgatgttgagatgggaactctgacactgaggagaaagcttacagttctcagcagcccttcggcttccaacaactatgacaagttacgacagaaattaacgggttaaaaacgttaatcaagagttacgtctggatgaagtggcagattccaatgttggaactcagtttatccgtggtgtgtctggaagaaaaagaagtcagactagtattgcaatggagcgtattactgatccatccatcgtgtgcctggacgagcccacaactggcttagattcaagcacagcaaatgctgtccatttgctcctgaagaggatgtcgaaacaaggacagacaatcat

SEQ ID NO: 9028 - DNA, 408 bp, Bos taurus
  Clone ID: 39-LIB2809-002-Q1-E1-B4
actgaagaaactgggcaaggactcgaaagataagtgtggtaaactggaccccacctacaccagcgccactttactctttcagaaagaccctccagccaacatccagctcttccaagaggtgcccaatggtcagtccaaggaggacacagtgggccggcccctgccccacctggccgcggccatgcaagcctctggggaggccgtatactgtgacgacatccctcgctacgagaatgagctgttcctccggctggtcaccagcacccgggcccacgccaagatcaagtccattgatgtttcagaagctcagaaagtgccaggatttgtttgctttctctctgctgatgatattcccgggagtaatgaaaccggactctttaatgatgagacagtctttgcgaaagatac

SEQ ID NO: 9029 - DNA, 200 bp, Bos taurus
  Clone ID: 39-LIB2809-003-Q1-E1-B12
ctggcgagatttataaactggatgactttggaatttaacgttccctcgtgcattttgcatcgcttgggatacagcctttgggtccatactgctggcactgcaggatgtctgaacaatatcatggtcagcagcttatccggtttagatacagctggtacgatcttccattattctgaagcatctaagtcgcctttctcctg

SEQ ID NO: 9030 - DNA, 463 bp, Bos taurus
  Clone ID: 39-LIB2809-003-Q1-E1-B4
agctgggagtggaatgattcgtggctcactatgggagaggatggtgtttaaagctaattaaaggtgtggttgagcagttttaaaccatatgtgggtgagacgtggccattggccatgagacaatggccaatgaagtggtgatatcactgaaagatgatgcctgaaaatgcctctaaagtggagagattctagataaaagaaagaagacaaccagcaacttgtggaatcaacaaattgaggttggaaagagccctttgcattttgtttaaaattctttcctctttcattctatctgacctcctcaccttctttactccccttgccaattgctcagatccaccctgtatgaatgacttagaaaatctgagacatgggccctaaaagctctaaggacaagtcagatgtttatcactgcctgagttcacctcattttcctctattatgatgttccctccaagttcct

SEQ ID NO: 9031 - DNA, 316 bp, Bos taurus
  Clone ID: 39-LIB2809-004-Q1-E1-B4
catgaccgccggatagacctaccaaagaggcaatacagagcactgtagctactctagaagattctccagaagttattgagagcccacctgagatcaacacagtccaagttacttcaactgcagtcgaaaaactctaaggagacatcagagaagacaacgcacgtctagctgaaaccaaatgactacttcaaactttcctttggccagttgtctgccttcggtgaacacagaatatgattttcacagatctggctccttcctcgtctcctcttacattttacttttatgccagatttaattgtttgattcctgcata

SEQ ID NO: 9032 - DNA, 412 bp, Bos taurus
  Clone ID: 39-LIB2809-005-Q1-E1-B4
ccatggcagccggatacagcagaaaagcctgaatgggcatatctctctggggatagggcactgctttctggggaacaggcaggactttggactgagaaagggacagcacggactgaggaggaaacatgacagttggaggaagaggctggtgaggctggtgcatccaagactggagcagaggcagaggaaggtgcagattttcaacatcagtgagagtcaggctctggctttcagtaaagggctcaactggatatttagggaagggcatttctttgtgcttaggagccatagcctccttcactttggagactcccattacttcaggctgaaggaaaggcggcaccaccacaggggtttgattaaaaggaggatgttttgtgggaagctgtttaggaatggcccaaggaaagga

SEQ ID NO: 9033 - DNA, 417 bp, Bos taurus
  unsure (54),(80),(391),(403): unsure at all n locations; Clone ID: 39-LIB2809-008-Q1-E1-B12
atgggcccggcatacagcaaaaaggcctgaatgggcatatctctctggggatanggcactgctttctggggaacaggcangactttggactgagaaagggacagcacggactgaggaggaaacatgacagttggaggaagaggctggtgaggctggtgcatccaagactggagcagaggcagaggaatgtgcagattttcaacatcagtgagagtcaggctctggctttcagtaaagggctcaactggatatttagggaagggcatttctttgtgcttaggagccatagcctccttcactttggagactcccattacttcaggctgaaggaaaggcggcaccaccacaggggtttgagtaagaggagggatgttttgtgggaagctgttanggatgggcccanggaagggatagact

SEQ ID NO: 9034 - DNA, 447 bp, Bos taurus
  Clone ID: 39-LIB2809-008-Q1-E1-B4
actgtcccagtgggtcgtgtggagactggtgttctcaaacctggcatggtggtcacctttgctccagtcaatgtaacaactgaagtgaagtctgtagaaatgcaccatgaagcattgagtgaagcccttcctggggacaatgtgggctttaatgtcaaaaacgtgtctgtcaaagatgtccgtcgtggcaatgtggctggtgacagcaaaaatgatccacccatggaagctgctggcttcacagctcaggtgattattttgaaccatccaggccaaatcagtgctggatatgcacctgtgctggattgtcacacagctcacattgcttgcaagtttgctgagctgaaggagaagattgatcgtcgttctgggaaaaagctggaagatggccctaaattcttgaaatctggtggcgctgccatcgttgatatggttcctggcaagccc

SEQ ID NO: 9035 - DNA, 409 bp, Bos taurus
  Clone ID: 39-LIB2809-010-Q1-E1-B4
agcctttcaagcagtgaagaatctattacacgcatcaataagaaaattgagaagtttcagagtgaggaacagcagcaaacagaggatgaactccaggataagatccacccctttgcccagacacagtctctagtcgatcccttccctgggcccatccataacagcctcccacaaaacatccctcctcttactcaaacccctgtggtggtgccgcctttccttcagcctgaagtaatgggagtctccaaagtgaaagaggctatggctcctaagcacaaagaaatgcccttccctaaatatccagttgagccctttactgaaagccagagcctgactctcactgatgttgaaaatctgcaccttcctctgcctctgctccagtcttggatgcagcagcctcaccagcctc

SEQ ID NO: 9036 - DNA, 416 bp, Bos taurus
  Clone ID: 39-LIB2809-011-Q1-E1-B12
ccatagcggcgggatacctgaacaaaacggtcaacacgatgcgcctctggtcagctcggggccccaatgacgtcaacctcagagacttgaacgttggacactatattcacgccgtgctggaccggaatctggccgacaacatctcccgggtcctctatcccagtgataatttttttgaagggaatgagctaagattgaatcacgagtattttgtggtacctgctaccttgcaagatgtcatccgacgtttcaaagcctccaagtttgactccagcaatagcaccaaaactgcgttcgatgccttcccagatcaggttgccatccagctgaatgagacccacccttcacttgccatccctgagctgatgacgatttttgtggatattgaaaaactgccctggtccacggcatgggag

SEQ ID NO: 9037 - DNA, 307 bp, Bos taurus
  Clone ID: 39-LIB2809-012-Q1-E1-B4
gccatagcggccggatgaccaaacaatgacagcacagaatatggactcttccagataaataataaaatttggtgcaaagacgaccagaaccctcactcaagcaacatctgtaacatctcctgtgacaagttcctggatgatgatcttactgatgacgtgatctgtgtcaagaatagtctggagcgactacgaagtagcgactggttggcccatgaagcactctgttctgacaggctggatcacgggctctgtgagaggttgtgaacacctgctgtctttgctgggtctgtcctcgttctgttcctgg

SEQ ID NO: 9038 - DNA, 394 bp, Bos taurus
  Clone ID: 39-LIB2809-013-Q1-E1-B12
aaaaccggttcaagataacccaggtaacgctcagagggcacatcttccttttgaatgtgcttctgctcaacactattgggaacaatttcctcacttgacgaaatgctttcagcttccatttgcttaatatcttccatggcttgatcctcagttgattcactcccaatatccttgctcagttcattgaccttctcctttccaaacacttctggaaaaggtgccacaaaaaacctgagtaaattttcattgaggacttcttgagggagtccttggtgcttgataggatgtttaggcctggcaagagcaacagccacaagacaggtaaggatgagaagtttcatggttgtcaagatcttgaacccaagactgggaagaagcagcaagctggcttcac

SEQ ID NO: 9039 - DNA, 403 bp, Bos taurus
  Clone ID: 39-LIB2809-013-Q1-E1-B4
ccatggcggcgggatacccatttcaatagagctccacagcccagaacccattctcgggagtcatggggtcaaatcctttcttcatcacattctccctacacaccccaattgcccagtccgtcctgtctcccacctccacctcccagtaatgcctccccgaggtgaaggcctcacgacccatcacacagggccaggagtcaaatctctctggtttctcaggaagtttctgacgtgaatcttccagtcggacagattttgaatcttcgtacagaaagaggtgggggtgggcagtatctggatccagagtcacatccactgcatgcaatgtagcccttttccaattgagcccctccaggagtttctctttaaagctgaattcaatcctcccctgtctggatctttc

SEQ ID NO: 9040 - DNA, 359 bp, Bos taurus
  unsure (52): unsure at all n locations; Clone ID: 39-LIB2809-015-Q1-E1-B4
gaatgggcatatctctctggggatagggcactgctttctggggaacaggcangactttggactgagaaagggacagcacggactgaggaggaaacatgacagttggaggaagaggctggtgaggctggtgcatccaagactggagcagaggcagaggaaggtgcagattttcaacatcagtgagagtcaggctctggctttcagcaaagggctcaactggatatttagggaagggcatttctttgtgcttaggagccatagcctccttcactttggagactcccattacttcaggctgaaggaaaggcggcaccaccacaggggtttgagtaagaggagggatgttttgtgggaagctg

SEQ ID NO: 9041 - DNA, 333 bp, Bos taurus
  Clone ID: 39-LIB2809-016-Q1-E1-B12
cgtatgtgtatgatacataaggttatgtattaattgtagccgcgttctaacgacaatatgtacaagcctaattgtgtagcatctggcttactgaagcagaccctatcatctctctcgtaaactgccgtcagagtcggtttggttggacgaaccttctgagtttctggtaacgccgtcccgcacccggaaatggtcagcgaaccaatcagcagggtcatcgctaaccagatcctctacgccggacgcatcgtggccggcatcaccggcgccacaggtgcggttgctggcgcctatatcgccgacatcaccgatggggaaaatcgggctccccac

SEQ ID NO: 9042 - DNA, 470 bp, Bos taurus
  unsure (369),(425),(427)...(428),(460): unsure at all n locations; Clone ID: 39-LIB2809-017-Q1-E1-B4
gccaagggcgctggacacctcattaacaagatctgcccctgctccttcccctcactgacatagcccctcttccctgaagctatgaacatgtgagatacttgtagacacgcaagcacctggcaagtttgctttcaagagcctgctaatgaatgaggaaagtcagtccaggccaggtgtcagagcccccaccatgagaaaaagaggaatacaaaggactgagagtgttaaacaaggcaaagctcttctttttctccaaaactagtcaggcctggagactacgtgatttgtttgaagacagaaccagcagagctgcagggtgactggaagccatcgccagagggaagaacacaagcttcaagggcagatgcncagctgagctctcagaacagcccagccaggaggacaggcaggagaaacaggggcangnncacaggaacctgcagtgtggggtgttcactcnatgacacaag

SEQ ID NO: 9043 - DNA, 145 bp, Bos taurus
  Clone ID: 39-LIB2809-019-Q1-E1-B4
gaatctattacacgcatcactcagaacattgagaactttcaatgtgaggcacagcagcgttcataggataacatctaggatagtcatcgaaccctttgcacaaacgcggtcgataggctaccgcatccctgtgccaatcactaac

SEQ ID NO: 9044 - DNA, 351 bp, Bos taurus
  Clone ID: 39-LIB2809-024-Q1-E1-B12
ttaggtaaatgtagaatcgacgctgctagcactgacaaattacagtatttgttcagttcagttcagtttagtagctcagtcgggtccgactctttgcgaccccatggatcgcagcacaccaggcctccctgtctaccactaagacccagaatttatgcagtctcaggtgcagcggatctgagccacctcacattcagtgcgttccgggcagagctggcgtcccagtcaggacaagtggcctgccagtcgactgcattgatgagacccagcgcgacggtctgtcgtatgtctcgcagacgatcatcggccacgggacgcaatgcagcgaagctctcgatacatctggggctg

SEQ ID NO: 9045 - DNA, 438 bp, Bos taurus
  Clone ID: 39-LIB2809-025-Q1-E1-B4
gggcaccgagctagaataccgtgtattctataatgtcacctaaatcgtatgtgtatgatacataaggttatgtattaattgtagccgcgttctaacgacaatatgtacaagcctaattgtgtaacatctggcttactgaagcagacgctatcatctctctcgtaaactgccgtcagagtcagtttggttggacgaaccttctgagtttctggtaacgccgtctcgcacccggaaatggtcagcgaaccaatcagcagggtcatcgctagccagatcctctacgccggacgcatcgtggccggcatcatcggtgccacaggtgcggttgctggagcctatatcgccgacatcaccgatggggaagatcgggctcgccacttctggctcatgagcgcttgtttcggcgtgggtatggtggcatgccccgtagccggggga

SEQ ID NO: 9046 - DNA, 411 bp, Bos taurus
  Clone ID: 39-LIB2809-028-Q1-E1-B4
tgttcccactagtgctgaggaacgacttcacagtatgaaagagggaatccatgcccaacagaaagaacctatgataggagtgaatcaggaactggcctacttctaccctgagcttttcagacaattctaccagctggatgcctatccatctggtgccttctattacgttccactaggcacacaatacactgatgccccatcattctctgacatccctaatcccattggctctgagaacagtgaaaagactactatgccactgtggtgaagagtcaagtgaattctgagggactccacagttatggtctttgatggttctgaaaattccatgctctacatgtcttttcatctatcatgtcaaaccattctatccaaacgcttcaactgctgttttagaatagggcaatctca

SEQ ID NO: 9047 - DNA, 407 bp, Bos taurus
  unsure (282): unsure at all n locations; Clone ID: 39-LIB2809-029-Q1-E1-B4
ggaaaagggaatgggtttcggggaaacaggcagaactttggcctgaaaaagggacagcacggactgaggaggaaacatgacaattggaggaaaaagctggtgaggctggtgcatccaagactggagcagaggcagaggaaagtgcagattttcaacatcagtgagagtcaggctctggctttcaataaagggctcaactggatatttagggaagggcatttctttgtgcttaggagccataagctccttcactttggagactcccattacttcaggctgaangaaaggcggcaccaccacaagggtttgagtaagacgacggatgttttgtgggacgctgtcacggatgggcccagggaacggatagactagagactgtgtctggggcaaagggtggattttatcct

SEQ ID NO: 9048 - DNA, 369 bp, Bos taurus
  Clone ID: 39-LIB2809-030-Q1-E1-B12
cgtatgtgtatgatacataaggttatgtattaattgtagccgcgttctaacgacaatatgtacaagcctaattgtgtagcatctggcttactgaagcagaccctatcatctctctcgtaaactgccgtcagagtcggtttggttggacgaaccttctgagtttctggtaacgccgtcccgcacccggaaatggtcagcgaaccaatcagcagggtcatcgctagccagatcctctacgccggacgcatcgtggccggcatcaccggcgccacaggtgcggttgctggcgcctatatcgccgacatcaccgatggggaagatcgggctcgccacttcgggctcatgagcgcttgtttcggcgtgggtatg

SEQ ID NO: 9049 - DNA, 404 bp, Bos taurus
  Clone ID: 39-LIB2809-031-Q1-E1-B4
acaggctacagacccatcctccagggcttccggacctttgccaagaatggtggatgctgtggaggaaatgggaacaacccaaactgctgcatgaaccagaagaaagaccacaccgttactctctcaccatctttattcaacccagaggagttcatgcccctggatcctacccaggaacccatcttccctccagagttgctgaggctgaaagacgttccaccgaagcagctgcgttttgaaggggagcctgtgacctggattcaaagcctccacctttaaggagttgccggacctcaaagctcagcatcccgaggccaagctggtggtggggaacacagagatcggcattgagatgaagtttaagaatcagctatttcctataatcatctgcccagcctggatcc

SEQ ID NO: 9050 - DNA, 467 bp, Bos taurus
  unsure (9): unsure at all n locations; Clone ID: 39-LIB2809-032-Q1-E1-B12
gcatggccncgaccgccatgaggcgcgggatacatatggcatagctacacgtattgtttgttgttacattgagtcctgggcagaagttttgtcccaaaaattcattatgctgcaaagccgcatagccgtatcgaggaatgctcaagtattgaagccatgacaaccaaggcacgacggttttgagatttaccaacagccctgaaaatatcatcataaacacaaaagagatggtcatgagcagagttgctatagataccacactctgacctgctgctatagccagtgccatgggactagctgaataagccaccatcatcagggtaagcatcatgatgaagaaggcctccacctttggcttcagtcctaacaagaagtatgttatacaagtaaatataatacttggtaacatcctcatggggagtaaatcagataacagttttccaaagaagtaagatgacactctatag

SEQ ID NO: 9051 - DNA, 244 bp, Bos taurus
  Clone ID: 39-LIB2809-032-Q1-E1-B4
gggatacttggccatccggaccatgctgaggacagcctgccgtcctttaacaaaatatttgatgaacctcccagctccaggcactgcgaagccaaccaacttccagcatctcggacagtgagcaccccagctttgaccagctgccccactactgttgggtctctagttgctaggccatgtccaactccatggcgacctcacagactgctgccggccaggctcctccgtccatgggattctccag

SEQ ID NO: 9052 - DNA, 162 bp, Bos taurus
  Clone ID: 39-LIB3057-001-Q1-K1-B4
atggtttagcaccaggcgccccacgtacgtgcggtgcgtgacgggcgagggggcggccgtctttccggccgcgccccgtgtcccgggacgaagggctctccgcaccggaccccggtcccgacgcgcggcgggggcgcgccgcgccgcgccccgggggacgcg

SEQ ID NO: 9053 - DNA, 331 bp, Bos taurus
  Clone ID: 39-LIB3057-003-Q1-K1-B4
ctagttcaagatcgcgagcggccgccctttttttttttttttttttcgtgaaacttgaaagggtttatttcttaactacagacagctttaagagtcgggatacctggcgccatcactgcctgggcgaatcctcacccaggctgcgaggcggtaggagggcagaagagaggccttcagggtcaactttccgcggagagaggcccctgcccgctgcgccctcactggcccttcttgggggcgttcttgatgatggcgtttttgaacagcgtgacaaggggcgtttggctcttctcggaggtcatgaacccgccgtagcgcttgtccttgggcg

SEQ ID NO: 9054 - DNA, 216 bp, Bos taurus
  Clone ID: 39-LIB3057-004-Q1-K1-B4
aaataattgatccacattcaaagtattagacctacaatggaaccaacgctggtgctctagccggccattgactatttcagagacagctcactgttggaattcacactattcagactgttaaaatacgactggttaaagaacaaaaaaccagagcgtcctcttaattgtgcagagagacagcacatctgaactcagtctgccaacccctctgatctt

SEQ ID NO: 9055 - DNA, 288 bp, Bos taurus
  unsure (37): unsure at all n locations; Clone ID: 39-LIB3057-005-Q1-K1-B4
atttgcggtctgcttttaacttggactagtgtaactncttcatgcattaactgaaagaccagctgctatcttgaatcctcattaaacagaggtcaagcagtaggcgcctggcagtgtccagcctgaaacaaagcaataacagtgatgtttcagccaagtccagagccccaagatcacagatggctatgtctggccagaagctcctcggcagtccctctgcaaagttccctgccctgagaaagtgtcaccacctgaacagtccccgatgaagcggagagcggaagatgg

SEQ ID NO: 9056 - DNA, 427 bp, Bos taurus
  unsure (370): unsure at all n locations; Clone ID: 39-LIB3057-006-Q1-K1-B12
tttaaaccctgcgtggcaatccctgacgcaccgccgtgatgcccagggaagacagggcgacctggaagtccaactacttccttaagatcatccaacttctggatgattatccaaaatgcttcattgtgggagcagacaacgtgggctccaagcagatgcagcagatccgcatgtccctccgcgggaaggctgtggtgctgatgggcaagaacacgatgatgcgcaaggccatccgagggcatctggaaaacaacccggctctggagaaactgttgcctcacatccgggggaatgtgggcttcgtgttcaccaaggaggacctcactgagatcagggacatgctgctggccaacaaggtgccagctgccgnccgtgctggtgccatagcgccgtgtgaagtcactgtgccagcacaagacactggtct

SEQ ID NO: 9057 - DNA, 436 bp, Bos taurus
  Clone ID: 39-LIB3057-006-Q1-K1-B4
tgtgtttcttgaaatcatcaccaccatggacagcaaaggttcgtcgcagaaagggtccggcctgctcctgctgctggtggtgtcaaatctactcttgtgccagggtgtggtctccacccccgtctgtcccaatgggcctggcaactgccaggtatcccttcgagacctgtttgaccgggcagtcatggtgtcccactacatccatgacctctcctcggaaatgttcaacgaatttgataaacggtatgcccagggcaaagggttcattaccatggccctcaacagctgccatacctcctcccttcctacccctgaagataaagaacaagcccaacagacccaccatgaagtccttatgagcttgattcttgggttgctgcgctcctggaatgaccctctctatcacctagtcaccgaggtgcggggtatgaaagga

SEQ ID NO: 9058 - DNA, 415 bp, Bos taurus
  unsure (370): unsure at all n locations; Clone ID: 39-LIB3057-007-Q1-K1-B4
cggacgcgtgggttttggtgtggtcaggcctctggttgctagatttctgcctcgggcgcgcattatttcccgcctggggatggcgacctacacctgcaacacctgccgggcggtgttggaagatgcggaggcgcagcgggtccactacaagacggactggcaccgctacaacctgaggcgcaaagtggccggcatggcccccgtcagcctcgagggcttccaggagcgggtgcgggcacagcgggccctggcggagccagagagcaaaggcgcggccacctactgcaccgtctgcagtaagaagtttgcttccttcaaggcctacgaaaaccacctcaggtcccggcggcacgtggagctcgagaagcangcggtgagtcggaaagtggcactcatgaacgagaagaacttggag

SEQ ID NO: 9059 - DNA, 398 bp, Bos taurus
  unsure (380): unsure at all n locations; Clone ID: 39-LIB3057-009-Q1-K1-B4
ggccggacccgtgggctgtctgaggctgtttcggcaagtgcagaaagtgtccgcgcccttcccaatcatgtctgaaccaatccgagtccttgtgactggagcagctggtcaaattgcatattcgctgctatacagtattggaaatggatctgtcttcggtaaagaccagcctatcattctcgtgctgttggatatcactccaatgatgggtgtcctggatggtgtcctgatggagctgcaagactgtgcccttcccctcctgaaagatgtcatcgcaacagataaagaagagattgcctttaaagacctggatgtggccattcttgtgggctccatgccaagaagggatggcatggagaaggaagaattactcaaagcanatgtgaaaatcttcaaat

SEQ ID NO: 9060 - DNA, 429 bp, Bos taurus
  Clone ID: 39-LIB3057-010-Q1-K1-B12
cggacgcgtgggcggacgcgtgggcaatataccaatgatgacgagatgttatccgagaaagcaccttccaagggcaccataccccagctgtccaaaaaggcctccgttatggaataattctttttattatctccgaagtactattctttaccggatttttctgagctttctaccactcaagcctcgcccccacccctgaactaggcggctgctgacccccaacaggcattcacccactaaaccccctagaagtcccactgctcaacacctctgtcctattggcttccggagtttctattacctgagcccatcatagtttaatagaaggggaccgaaagcatatattacaagccctatttatcaccatcacattaggagtctacttcacactactacaagcctcagaatactatgaagcaccttttacta

SEQ ID NO: 9061 - DNA, 308 bp, Bos taurus
  Clone ID: 39-LIB3057-010-Q1-K1-B4
agaagcagcacgggagcaacacgttcacagtcaatgcccagcctagtgacaacgtgcctgcgaaagggaacaagagcccctcaccgtcgcctgatggctcccctgctgccacccccgagatcagagtcaaccatgagccccagccggctggtgcggccacccccggggccacccttcccaagtccccgtctcaggcagcggaagcctccgacgcggctggagcccaagagcctggggagacgaccacaagtgaagcagcctgcagctctctgcccacggtggtcgtggagaccttctcggcgacaatg

SEQ ID NO: 9062 - DNA, 395 bp, Bos taurus
  Clone ID: 39-LIB3057-011-Q1-K1-B4
gtcgggtttccagctggtgggagttggcgttgcggtactgggcgctggaaccctagtttatccagtttgggaagtcgggctgtggggtcgcacctgtctgtctgatccccgcgttccctggtttccttccccggcgtggggcttcgcgaaggtctctcgggcccctttgggccacggcggtagcggtgccttttgcgattttcttgtgattacatcttaaagctttcaagatggtattagcagaccttggaagaaaaataacatcagcattgcgctcattgagcaatgccaccattatcaatgaagaggtgttaaatgctatgctaaaagaagtatgcacagcattattggaagcggatgttaatattaaactagtgaagcaactaagagaaaat

SEQ ID NO: 9063 - DNA, 301 bp, Bos taurus
  Clone ID: 39-LIB3057-014-Q1-K1-B4
gggtttgccgccgggacacaggtgtcgtgaaaaccaccgttaaacctaagccaaaatgggaaaggagaagacccacatcaacatcgttgtcattgggcacgtagattcagggaagtctaccacgactggccatctgatctataaatgtggcgggatcgacaagagaacaattgaaaagttcgagaaggaggctgccgagatgggaaagggctccttcaaatatgcctgggtcttggacaaacttaaagctgaacgtgagcgtggtatcaccattgatatctccctgtggaaatttgagacc

SEQ ID NO: 9064 - DNA, 429 bp, Bos taurus
  Clone ID: 39-LIB3057-015-Q1-K1-B12
atttaaaaatatacatgcgtagaaaaaaaagtgaaagtaaaagtcgctcggtcgagtcgtgctctagtccatggcattctccaggccagaacactggagtggggagcctttcccttctccgggggatcttcccaacccagggatggaacccgggtctcccgcattgcaggcagattaaagactaatgaaaatatgccaggatattaataatagtttataagttgatagtaatattgggtaattttggctttttccttatactttcctgttttttcttgattatctacagtagacttgtataatttttctaatgatgaaaaagtaataaatgctatatagtatggtagtattttctgcttatgtcaacttttagattaccatttaaataggatgacttcataaattatttcagtttgaaagatcgaattt

SEQ ID NO: 9065 - DNA, 389 bp, Bos taurus
  Clone ID: 39-LIB3057-016-Q1-K1-B4
gcgagcggccgcccttttttttttttttttttttgtgagaaaacacattttatttgttgtaatgatacgcatgcttttcttctgtaaatagacaataaatttttgtagatagtcttggtgtgttatcttaatttcgtatttcactgtgtaaaatcagtgaatatagctaaagtgttagtggactggatgaaaagaaactggttactaggcaagaacaggaggctgtagttacccatgactacttttagctatgcatactaatacattctgcaggtttacagctcatcacctttaccttttttcactggtatttcatgtaaggcattaactactgtaatttttgctgatgcttaagcctgttcttgggaattgtatgcatggcactcata

SEQ ID NO: 9066 - DNA, 424 bp, Bos taurus
  unsure (382): unsure at all n locations; Clone ID: 39-LIB3057-017-Q1-K1-B12
ttcaccactgtgttctcagcacctagctgagtgcctggcacaggacaggggctcaacaagggatgagcgacccctcatctcctctgtagagggggtccacaacatctccaaccagctgagcatcggctcggacatctcggcagaacaccctgagctccggccccacgcccaggtccagggctggtgggacgggcagggcacctttgactttgcccaggtcttctccctgagccagcagcctgtgcgcgtggaggctgccaaggcccgcttccggtccgggcaggagctgctgcagcaacaacaagggggtatcacagcagaggtgatgatgggcatcctcagggacaaggagagcggcatctgtatggactctgggggcttncgcaccacggccagcatggtgtctgtgctgccccgggacacc

SEQ ID NO: 9067 - DNA, 157 bp, Bos taurus
  Clone ID: 39-LIB3057-017-Q1-K1-B4
tagagacttaccccgggaaggagggaggccgtcgacctactgggcgcgcttactcccacgggttcctgagctgttgcctggcatgtgacactgacttcctgcagcccccagcatgtggacaggcctgtgccccgacgtcacactggccctggtgttg

SEQ ID NO: 9068 - DNA, 388 bp, Bos taurus
  Clone ID: 39-LIB3057-018-Q1-K1-B4
cggaagagaacgaagggaagaaaagtgaccgagaggccgctgaacatcctcgccccggcggagcgggagccgcccgaggcagcttccccgtgacagagcctcagcctgcctggaagatgccgagactgtgcagcagtcgttcgggcgccctgctgctggccttgctgcttcaggcctccatggaagtgcgtggttggtgcctggagagcagccagtgtcaggacctcaccacggaaagtaacctgctggcgtgcatccgggcctgcaagcccgacctctccgcctagacgcctgtgtttcccggcaacggcgactagcagccgctgactgataactctttgatgtacgtcatggtgccattttcctggtaccgtttttttcgtcttaa

SEQ ID NO: 9069 - DNA, 441 bp, Bos taurus
  unsure (321),(387): unsure at all n locations; Clone ID: 39-LIB3057-021-Q1-K1-B12
cggacgcgtgggttcctggtgaagtgtgtttcttgaaatcatcaccaccatggacagcaaaggttcgtcgcagaaagggtcccgcctgctcctgctgctggtggtgtcaaatctactcttgtgccagggtgtggtctccacccccgtctgtcccaatgggcctggcaactgccaggtatcccttcgagacctgtttgaccgggcagtcatggtgtcccactacatccatgacctctcctcggaaatgttcaacgaatttgataaacggtatgcccagggcaaagggttcattaccatggccctcaacagctgccatacctnctcccttcctacccctgaagataaagaacaagcccaacagacccaccatgaagtccttatgagctngattcttgggttgctgcgctcctggaatgaccctctctatcacctagtcaccga

SEQ ID NO: 9070 - DNA, 383 bp, Bos taurus
  Clone ID: 39-LIB3057-021-Q1-K1-B4
cggacgcgtgggctcgtaaagactgactcttgtgcagctcttcattaatgttaagtatcgatgggtcagaagatgatgacctgaccttcctgggtcaagacattcgtggatttggcaaccctagtactcctccattagtagacccctttctgacgcttcggagtctggctcctgcagcacacccaagtccagcattctacctgagatgcctgtccacagcattcatgtcgccgagtccatgttgggaaaattcgacatcatcaactcttcttggcccatcaggccttacatatgccatgaggcttttcgtgcatttacagctctctatatggatcacagttttgagtcctacagactcagtgggggatttgactgggaggatt

SEQ ID NO: 9071 - DNA, 279 bp, Bos taurus
  Clone ID: 39-LIB3057-022-Q1-K1-B12
cggacgcgtgggcgcagccatggctcggggtcccaagaagcacctgaaacgcgtagcagctccaaaacgattggatgctggataaactgaccggtgtgtttgcccctcgtccatctaccggcccccacaagctaagggagtgtctccccctaatcattttcctaaggaatagacttaagtatgccctaactggagatgaagtaaagaagatttgcatgcagcggtttcattaagatcgatggcaaagtccgcacagatataacctaccctgctggtttt

SEQ ID NO: 9072 - DNA, 432 bp, Bos taurus
  unsure (312): unsure at all n locations; Clone ID: 39-LIB3057-022-Q1-K1-B4
agcttcctggtgaagtgtgtttcttgaaatcatcaccaccatggacagcaaaggttctgcgcagagggggtcccgcctgctcctgctgctggtggtgtcaaatctactcttgtgccagggtgtggtctccacccccgtctgtcccaatgggcctggcaactgccaggtatcccttcgagacctgtttgaccgggcagtcatggtgtcccactacatccatgacctctcctcggaaatgttcaacgaatttgataaacggtatgcccagggcaaagggttcattaccatggccctcaacagctgccatacctnctcccttcctacccctgaagataaagaacaagcccaacagacccaccatgaagtccttatgagcttgattcttgggttgctgcgctcctggaatgaccctctctatcacctagtcaccga

SEQ ID NO: 9073 - DNA, 180 bp, Bos taurus
  Clone ID: 39-LIB3057-023-Q1-K1-B4
tcggcgagcgtcctctcgctatctagactgactcgtggtttgagttacatcatctttaaacgctgcatggcaatccctgactcaccttctttattcccagtgaagacaggtcgacctggaagtccatctacttccttaatatcattcaacttctagatgattatccaaaatgcattattg

SEQ ID NO: 9074 - DNA, 430 bp, Bos taurus
  Clone ID: 39-LIB3057-025-Q1-K1-B4
ctttttatgctgttgtgtggtatgaatataccaccgtcgtctgttcattcacctgttgagacatttgggttctttccagtgtttggatataacaaataaagaagctatgaacactcaggtaacatttttgtgtgtggatatgtattttcatttctcttggatagatacattcttaactttttaggaagccatcacattgttttccaaagtggtggtacaacatgccccccagtactgaatgagaattccagttgcttcatatcctcaccaatgcttggtatggtcagtctttttaattttatctattctagtaggtatatagtagaatctcattaagattttatttgcatgtctctaagattaatttgatacaaatcctatgttcaattttgataaaaatctctcagcaaactgggaataaaatggagca

SEQ ID NO: 9075 - DNA, 435 bp, Bos taurus
  Clone ID: 39-LIB3058-001-Q1-K1-B4
tccgggcggcccgtcgggatggatggcttggcccggcgtttgggctgcgactgctgctggcgaccgtgcttcaaacggtctctgcattgggagcagaattttcctcagagtcttgcagagagttaggtttctccagcaacttgctctgcagctcctgtgatttgcttggacagttcaaccttctgcagctggatcctgactgtagagggtgctgtcaggaagaagcacaatttgaaactaaaaagctgtatgcaggagctattcttgaagtctgtggatgaaaattggggaggttccctcaagtccaagctttcgtcaggagtgataaacccaagctattcaaaggactacaaatcaagtatgttcgcggttcagaccctgtgctaaagcttttggacgacagtgggaacattgctgaagaactaatcatcctca

SEQ ID NO: 9076 - DNA, 444 bp, Bos taurus
  unsure (1): unsure at all n locations; Clone ID: 39-LIB3058-005-Q1-K1-B4
ncacttttgcatgtactacaggatcttagaatccccaaccagggatcgatcccctgccccctgaagtggatactctttgtcttaaccactgcaccaccaggaagtccccttgctggtctcattgtattttttatcattattagtttatgtttttgccacctctacaagggctgcagggtcttagtatctgcaaccagggatcgatcctgtgccccctgcagtggaagcactgtgtcttaaccactggactgccagggaagtccccttgctggtctcactggagccaccctgaagtccagccttgcacagctgcaaaggtttggttcactcttgctgatgctaatgattctctttccactttctgtggatatcatttccctcttcttccacattgttcattctgctcatcgaaggatcttctgttttctctttatccttttcatg

SEQ ID NO: 9077 - DNA, 407 bp, Bos taurus
  Clone ID: 39-LIB3058-007-Q1-K1-B4
ctcctccatcgcaaggaaaggggcgaggactgtccctcagcagatttagctggggggctgagggccagaagccaggattcggctatggaggcagagcgtctgactacaaatcggctcacaagggactcaaggggcacgacgcccagggcacgctttccaaaatcttcaagctgggaggacgagacagccgttccgggtccccgatggcaagacgctgaagcccagctcccctcccagaaccccgtccccagcttcttaatacaactgcctcgacgctaaccattgtctaaattcccaagtgcagcaggcatccccccaccctgcccacatgcgcgtcctgcaggctcctggccagcggctcaatggagaagacggtgcagctgtcagctcacccttgaagatcagcg

SEQ ID NO: 9078 - DNA, 342 bp, Bos taurus
  Clone ID: 39-LIB3058-008-Q1-K1-B4
cggacgcgtgggggagtttggggttgcctaacttcccacttacttgtacaaacctaggttttgctcacataaccaaatgcaagtgaacccaacattgtcagtgcaagacaatctttatagattcaggagtcaatctatatatggcttttgttcaacacttggatggatgtaaaagcagcaactttgttaaaaaaaaatgcacaatttacttcccaaaataagctgtacttgccttttcaagtcgttgaagaactcacatttgatattctcttatatgatataataatataacggatcaactcaaggcttattattcttcgcgataacttctgttttaacaca

SEQ ID NO: 9079 - DNA, 152 bp, Bos taurus
  Clone ID: 39-LIB3058-009-Q1-K1-B12
tagatcgcgagcggccgccctttttttttttttttttttttttttttacacttacaaagaaaagcaaacatttacttcaaattgcagtataggcttttcaatcacaaaaagaaagaaaagaacagtgatctgacagtggtcacatcctgtgc

SEQ ID NO: 9080 - DNA, 353 bp, Bos taurus
  unsure (271): unsure at all n locations; Clone ID: 39-LIB3058-011-Q1-K1-B4
tcggcgagcggtcgctcgcgatctagaactagcggacgcgtgggcaggaggcacttgtccctgagatcctggcctgggttcctgacttccgcggtttctgtgaagccgtggcttttctgcgggctcctgtgtgtgctggctgcgccctgagctccaagacggccgtccataacctttttgctaatgtcagggcccagggcctccatagcatggctgagggaccccttcccagaggggctgtcccaagctccaccccatggggccaggcttnctgccacctttgtctacaacaggcggatcagtaccccctaccccacctcagattgaactgtgaaagagaggttccaggggtg

SEQ ID NO: 9081 - DNA, 432 bp, Bos taurus
  Clone ID: 39-LIB3058-013-Q1-K1-B4
gaaaacatgccacaacctcaggagtcaggtcagttcttgttccagacactagaatgaaccgaagcattcctgtggaggtggatgaatcgggtcattctagtgtctggaacaagagaaaacatgccacaacctcaggagtcaggtcagatcttgaagtccccacttcatgaccttaagggaccccattcaagatgtggtttaaattaacagcagaatgacaccagcgtgctggcagagcccccagtcacgtaaaatcatttgcttatcctccagggaaaggcactaagacttatgaagatcattttttctggaaggctattcaaagaatgtgactggaccatcatgcggtagaagtcatacaccagcaaggggaagacacagatgaaaaccaatggccaatttctgaggaaagagaaatgatcagtatgtgga

SEQ ID NO: 9082 - DNA, 366 bp, Bos taurus
  unsure (277),(324): unsure at all n locations; Clone ID: 39-LIB3058-015-Q1-K1-B12
ggcagtggagcactcgggaccaggtccgcggcgcgcgcactcgctcgctcgccgcccgccagccagctctcgcttccgcgccgccagccgcgccccgcgccctcctcgctgcaccccgcgacctagagccaagaaagtttgtgtggcgagtgagggccggagaggagagcgcgcccgcggagtgccgtccagaccagcgcggccccggcgcgagaggggagcgccccgagcccaggcggcggcggctagcccgagtccgcgacccccgcccctccgnccgccatgggcgccgcggcccgcagcctgccgctcgcgttctgcctnctgctgctggggacgctgctcccccgggccgacgcctgcagc

SEQ ID NO: 9083 - DNA, 438 bp, Bos taurus
  unsure (415): unsure at all n locations; Clone ID: 39-LIB3058-015-Q1-K1-B4
ccgcggtcggagctgcagcggacttgggtgccgtcctctcctgatcctgactcaccgctgttcgctctcgccgaggaacaggtccgtcacgaagccacgccgcaggcatggcctttaacgacaccggcaagactaccgtggagccagaagtggccattcaccggattaggatcaccctcaccagccgcaacgtgaagtctctggagaaggtgtgtgctgacctgatcagaggcgcgaaggaaaagaatctcaaagtgaaacgaccagttcggatgcctaccaagactctgagaataactacgaggaaaactccttggggtgaaagttctaagacttgggatcgattccaaatgaagatccacaagcgactcattgacctgcacagtccttctgaaattgtcaagcagatcacttncatcagtattgagccgggaatcg

SEQ ID NO: 9084 - DNA, 210 bp, Bos taurus
  Clone ID: 39-LIB3058-017-Q1-K1-B4
ggtaccccaccctctgaaactgagaccagcttaggggctaactccaagatcctctgcaagtcctggaccgagggcgctggagagggctggggcccagctctgtggatctcagtctggccctagaggcctgacccttccccaacgggggcctgactaccattgtcttgggatttgggggctgtagcttctcatcactttggtacaaagcac

SEQ ID NO: 9085 - DNA, 426 bp, Bos taurus
  Clone ID: 39-LIB3058-018-Q1-K1-B4
taattccataatatttttttgccccgtatacactttgaggcgagcaaaaagattagaataaattttaacaatgagggaaatcgtgcacatccaggccggtcagtgtggcaatcagatcggtgccaagttctgggaggtgatcagtgatgaacatggcatcgaccccaccggcacctatcatggggacagcgacctacaactggaccgcatctccgtgtactacaatgaagccacaggtggcaaatatgtccctcgtgctatcttggtggatctagaacccggaaccatggactctgttcgctcaggtccttttggtcagatcttcagaccagacaactttgtttttggtcagtccggggcaggcaacaactgggccaagggccactatacagagggagccgagctggttgactcggtcctggatgt

SEQ ID NO: 9086 - DNA, 437 bp, Bos taurus
  Clone ID: 39-LIB3058-019-Q1-K1-B12
ggatacctcatgacacgcccctgcttttatggagaccccaaaaagccaacagacacccgcagggatctgttccgagatgatgtccgtgtgaactgcgagatggtgggcagaaagacagacacacccaccacggttcttatccttctgctgacagaactcacaggaggatcctttccgtgcctttccatgctctgagactcccagactcttgtgcatttctgcgcccgtggctttacctgaggccagaggccacctgtacctgagacctagtatcctgtaagagtatcatcataaagcgcattcatctaaatgtgaggttttcttttgcttgagtggacagtagcgcctgtaccattgaactcattttgtatcaaagcaagtttgcttgcggaaaagctatgaaataaaatatgtcccttaactacattgctatggaa

SEQ ID NO: 9087 - DNA, 439 bp, Bos taurus
  Clone ID: 39-LIB3058-019-Q1-K1-B4
gggggtaacaccaccaataactcgcccgccatctccaaagcagggaagatctgggtgtttttctttattattactttttttctcccctgcaggtcagtaagaggatttaagttgcactgacaaaaataccaaaatggaagcgtattttttagttctcatttgaaattgctggcactgctggccggatgcatttttgagtttgtattagttgataaattaacagtaataacaagattgtatgaaccgcatggtgcttgcagttttaaatattgtggatatttgtcctgcattggaaacgagcttcggtttttacagattcaactgtgttgaaatcaaatttgccacaacagaaattgtttttatttcatgtacaataagggatcaatttcaaaccctgcttatgatatgaaaatattaaaacctagtctattgtagtttt

SEQ ID NO: 9088 - DNA, 460 bp, Bos taurus
  Clone ID: 39-LIB3058-021-Q1-K1-B12
gggctgtgtgcccatcagtctttatagacaagttcagattgtctacccattgttctgtttgtgcattttagttaatattgctatgtattaacaagcaagtcctaatgcccaaagtatatcaaaagtagaggtagtaaaataaccccttaatgaatgcccttttgttggcttttaggaagggctgtgtcttctgggagtatctatgttaatccacctcttggaactagatgtagtctggtacttagtcgctgaaatgctggaggagtaagaggaagggtgaggggaagggctcttggctaatagctcccattatctggaagacagttttaggttttaactataggtctgtatgtgcatgtttgtgaagtacctatgtttattgtggacaagcttcattactttgcaacatctaggctttttagatgtcctgaggtgacaatgtatgatataaagtagagct

SEQ ID NO: 9089 - DNA, 460 bp, Bos taurus
  Clone ID: 39-LIB3058-021-Q1-K1-B4
cctgcccgttcgacagatagccgtaacttctgtgctgtgccagccgcatccctgagacaagatggtgaaggtcggagtgaacggattcggccgcatcgggcgcctggtcaccagggctgcttttaattctggcaaagtggacatcgtcgccatcaatgaccccttcattgaccttcactacatggtctacatgttccagtatgattccacccacggcaagttcaacggcacagtcaaggcagagaacgggaagctcgtcatcaatggaaaggccatcaccatcttccaggagcgagatcctgccaacatcaagtggggtgatgctggtgctgagtatgtggtggagtccactggggtcttcactaccatggagaaggctggggctcacttgaagggtggcgccaagagggtcatcatctctgcaccttctgccgatgcccccatgtttgtgatgggcgtg

SEQ ID NO: 9090 - DNA, 443 bp, Bos taurus
  Clone ID: 39-LIB3058-022-Q1-K1-B4
ctattacctaggggtttctgtcggatggttggtaacttagaatggacgaagaacaacacagacatgttgggcactttcttatttctcaaaacaatgttatcttcgtctttgtaatcttacgttcttaacagattaaacctttaaagcaagaagtgaatcctgtcttttcagactcacaaatacacatgtatactttgctatgattacattctagacattcatctatacttctctatatctaagactcatatcttgatctttactatcatatatgaatgaatcctttatatcatggttttttgccaatcttgaaagatctatgagaaaagataaaacaatgttgtctaactcttgattgcttataaagtattttcatagtcaatgatggttcaatatgcaataccattcctataaacctgaatgcttttatggtcaatactgtt

SEQ ID NO: 9091 - DNA, 409 bp, Bos taurus
  Clone ID: 39-LIB3058-023-Q1-K1-B12
gaaacccaaagcataagctggagctgagaaaggagaacagaaggagaaggtggaggaagaaatgaaagaagcaaaggaatctcccaaggaagagaaggcagagaaaaaggaggagaaggcaaaggatgtgccagagaagaagaaggctgaatccccagtgaaggctgagtccccagtgaaggaggaggtgcctgccaagccagtaaaggtgagcccatagaaggatgccaaagaggaggagaatccacaggagaaagagatggagaaggagaaagtggaagaggtgggagggaaggaggagggaggtctgaaggaattcatgaaggaagacatatccatcaatggggaggtggaagggaatgactaagcacaggtaactaatgtgattggcaatggtggagaagaggag

SEQ ID NO: 9092 - DNA, 423 bp, Bos taurus
  Clone ID: 39-LIB3058-023-Q1-K1-B4
atttggaatctgaagttgctatatctgatgagttggttcagaagtacagcaattctgctcttggtcatgttaactgcacaataaaagaactcagacgcctcttcttagttgatgatttagttgattctctgaagtttgcagtgttgatgtgggtatttacctatgttggtgccttgttcaatggtctgacactactaattttggctctgatttcactcttcagtgttcctgttatttatgaacggcatcaggcgcaaatagatcattatctgggacttgcaaataagaatgttaaagatgctatggctaaaatccaagcaaaaatccctggattgaagcgtaaagctgaatgagaaagcctgaaagagtttaacaaataaggaaaaaggcgagtttatctttaaaggggatattcatttgatt

SEQ ID NO: 9093 - DNA, 433 bp, Bos taurus
  Clone ID: 39-LIB3058-024-Q1-K1-B4
tcgttcgtttaccatccgcaatatggagaagtcattcatctacagggtgtccagcgcaagagcatatgccacttgctagtagacattggactggcttacgacgaccaggttaaggttcatgggttttaagtgctcttggctgaatggagcttaactgaggatttgatcgctacgagtagaatgtggcttctgttcgtagtcacaagtttaaaaacctcacagcttgtataatgtaaccatttggggtctgcttttaacttggactagtgtaactccttcatgcaataaactgaaaagagccatgctgtctagtcttgaagtccctcatttaaacagaggtcaagcagtacgcgcctggcagtgtccagcctgaaacatagcaataacagtgatgtttcagccaagtccatagccccaagatcacagatggcta

SEQ ID NO: 9094 - DNA, 412 bp, Bos taurus
  Clone ID: 39-LIB3058-027-Q1-K1-B12
ggctccggcacagccttttgtatcctcagaagaacggaaggagcggtgggaacaaggcgaggctgactacatgggagcagattcctttgacaacatcaagaggaaacttgacacttaccttcagtagaaacactgcagttttctgtggacacatccacgtcacaggcacttgtttctgatacttagtacctatagctgggttaagaaaggtctgttacaggtgctagaggctttcactaaaatttatcagatgtggggttttttgcaagacaactggtgagaactgggcaaaagttgcttagcaattcgtgtatatgaacaacagttctgctttttaaccctgagcttatatttcagaaattctcaattaagctgactgccaatgtatatggtaagggaaattcaatcttaa

SEQ ID NO: 9095 - DNA, 283 bp, Bos taurus
  unsure (135),(155): unsure at all n locations; Clone ID: 39-LIB3058-028-Q1-K1-B4
gttctagatcgcgagcggccgcccttttttttttttttttttttttttttttttttggttttgtttaaattttagttggtgtttttttttttttttttttttttttttttttttttttttttttttttttttttntttttttttttttttttttntttttttttgttttttttttttttttttttttttttttttttttttttttttttttttttttttttttgttgtttttttttttttttttttttttttttttttgttttttttgttttttttttttttt

SEQ ID NO: 9096 - DNA, 417 bp, Bos taurus
  Clone ID: 39-LIB3058-029-Q1-K1-B12
ctattattgaacgtctgcaggaaaaggagaggcatgcggcggaggtgcgcaggaacaaggagctgcaggtcgaactgtctggctgaagcgacagagggtatggcacgccccaccattagtaaacccccctgcctatattataatggatcatgcgatatcagtatgggaaatgtatgacatggtttaaaaaagaactcattataaaaaacaaaaaacagaatcaaaaataaaaaaaaaaatcaatgcggtctctttgcagaatgttttgcttgatgtttaaaaaataccttggatcttattttgtaaatacttacatttttgttaaaaaatacaagtattgcattatgcaagttatttcataatcgtacatgccctgtaacaggctttcgatgttgtgtctttccactcaaatgaatt

SEQ ID NO: 9097 - DNA, 208 bp, Bos taurus
  Clone ID: 39-LIB3058-030-Q1-K1-B4
gtctctctagacgcaaagacctggagattgaaagacccattctgggacaaaatgatgacaaatcaaagacgttaaagtgctctactttactggtggttggtgacagttcacctgcagttgaggctgtggttgaatgcaattctcgcctgaatcctgtaaatacaactttgctaaagatggcagactgtggtggactaccccaagtagt

SEQ ID NO: 9098 - DNA, 297 bp, Bos taurus
  Clone ID: 39-LIB3058-032-Q1-K1-B4
cggacgcgtgggttgatcttggcaccacctattcttgtgtgggtgtcttccagcacggaaaggtggaaataattgccaatgatcaggggaaccgaaccaccccaagctatgtcgcctttactgataccgaacggttaatcggtgatgcagcaaagaaccaagtcgcaatgaatcccaccaacacggtttatgatgccaaacgacttattggacgaagatttgatgatgcttttgtccagtctgttatgaaacattggcccttcatggtggtgtatgatgcttgtattgcctaaggtt

SEQ ID NO: 9099 - DNA, 408 bp, Bos taurus
  Clone ID: 39-LIB3058-034-Q1-K1-B12
ctcggcaccggcccagggtccccacctgttaccgcgcagaccccctgcgccagcctccgtaccagccaaggactcctgacatcaaacatggactgctgcaccgagagcgcctgctcgaagccggacgacgacattctagacatccctctggacgatccgggtgccaacgcggccgctgccaaaatccaggcgagtttccggggccacatggcaaggaagaagataaagagcggagagcgtggccggaagggcccgggccccgggggaccaggcggagctgggggcgccaggggaggcgcgggcggcggccccagcggagactaggccaggactgagcattttcgaagtttcccgagacagatggatgccgcgttcccttcgcagtgacgagacttccctgccgtgtct

SEQ ID NO: 9100 - DNA, 418 bp, Bos taurus
  Clone ID: 39-LIB3058-036-Q1-K1-B12
cctggggctgccgtggacctgcctgcttcgtcattaaaggacatccaggatctaaagtgtggggtggagcagaacgtggatatggtgtttgcgtctttcatccgcaaggcttctgatgtccatgaagtcaggaaggtcctgggagagaaaggaaagaacatcaagataatcagcaaaatcgagaatcatgagggagttcggaggtttgacgagatcctggaagccagtgatgggatcatggtggctcgcggtgatctgggcattgagatccctgcagagaaggtcttccttgcccagaagatgatgattggtcggtgcaaccgagctgggaagcccgtcatctgtgccacacagatgctggacagcatgatcaagaagcctcgccctacccgggcggagggcagtgacgtggccaatg

SEQ ID NO: 9101 - DNA, 296 bp, Bos taurus
  Clone ID: 39-LIB3058-036-Q1-K1-B4
tccaacagccacattgaaacaagttgagatacctctcttagaattcgataattaattattactaccaaaaaaaataacaatacgaatgataaaatcctctgaagacatattacacttatgaactgtgccactctctaagactaaaaacatacccaatcccaggccctctaaaccaaacaacccttctatcttgccgtacaagcttatattaccttcaatgctcataaatattcggatcaaaccacagattcatacccaaagtccttcattaaatcccactaaagtactttcaaaaa

SEQ ID NO: 9102 - DNA, 427 bp, Bos taurus
  unsure (67): unsure at all n locations; Clone ID: 39-LIB3058-037-Q1-K1-B4
cggacgcgtgggcaagaaatgaactctttcctgtccgagctgtctcggactactgcgggagacctgngggcgcgagtggccctacatgagctctacaagtatatcaacaaatactatgaccagatcatcactgccctggaggaggatggcacggcccagaagatgcagctgggctatcggctccagcagatcgcagcagccgtggaaaacaaggtcacggatctgtaggctctgcaagagcgcgggccggccgtgccccaaccctgcctggacagccctgggactgcgtgggagagaccgccttcttagatcccgtagtgcctgagcagcagagttagtggaaggtgcctcccgggctcctggtggctctggcccgggccccgctggactcgcctcgcaggccaagggccttgaggctggcggcgtg

SEQ ID NO: 9103 - DNA, 439 bp, Bos taurus
  Clone ID: 39-LIB3058-038-Q1-K1-B4
tcggtgacatattaagatatgtctaagtaatattgttacattaagatatgtctaaggtacctgggaaagataactagttttacagatgatttgtagagtcttggggtgaaatgatcaggacagaagtgatcaagcctgaagttcttgccgactcctcagctctaaaaatcatttgattcgatgagatggaatattgctagtttcccaagtcttatttcttgtaattttcatactgtaccaataaactcttaaccatctctaaaggtttatgaaagggaagtagataatttagtttaatttaggtatactttcctacttctccccccatggctccaacttcagtcctagttcatatggatcctatggaaagttaatcaccatttcactgtgtatgtcttgaagagtctttgaaataataaagagtcactctggtattttt

SEQ ID NO: 9104 - DNA, 408 bp, Bos taurus
  Clone ID: 39-LIB3058-039-Q1-K1-B4
ccttcgccgctccgccttcgccgccggttgacaccgcaaccaggtcgccatggatgatgatattgctgcgctcgaggtcgacaacagctccggcatgtgcaaggccggcttcgcgggcgacgatgctccccgggccgtcttcccgtccatcgtggggcgcccccggcaccagggcgtaatggtgggcatgggccagaaggactcgaacgtgggggatgaggctcagagcaagagaagcatactgaccctcaagtaccccattgagcacggcatcgtcaccaactgggacgacatggagaagatctggcaccacaccttctacaacgagctccgtgtggcccctgaggagcaccccaggctgctgaccgaggcccccctgaaccccaaggccaaccgtgagaagatgac

SEQ ID NO: 9105 - DNA, 422 bp, Bos taurus
  Clone ID: 39-LIB3058-040-Q1-K1-B12
acaggtggttcaagagtaaaactcttacttttaagtactttttgtgatttggtggtgtgaaggaactatgtgggaattaagtggattaggtagattttctggctcaagtaaacctacaacttgtctttgttataaatgaagtcataatgaactagccctaaagatctttatttctgtcttccataagacaagatatggcctacatacctcattccttgggctactgctgtagtcttacattcatgattatgaatttgaaagtaaatactaattatggaaatagtgctataggcctgcatgcctgaaacattttaattggtttaaagtccttttgtagaatggggtacttgatttcctttaaaggaaacatgttttctcattgaattacaaggaatttttattaattccaaaaatgcagtcac

SEQ ID NO: 9106 - DNA, 391 bp, Bos taurus
  Clone ID: 39-LIB3058-040-Q1-K1-B4
cagaaacaaatgaacaaacaaaacacattcatactcatagatacagagagcaaactagacattgccggagggggagattgataaggggatgggtgcaataggtgaaggggattcagaggtacgaacttctagctataaaataaataagtcatggggaagtaatggacacatagggaataaagttaataatattttatgctgatagatggtaactgatctacttatttatttggctgcatcaggtctttgggagaaggcaatggcaacccacttccgtattcttgcctgggaaatcccatggacagagggctataatccatggggtcgcaaagagtcagacacacctgagcgactgaacaacaacaattgagtcttagccgtggtacgtggg

SEQ ID NO: 9107 - DNA, 286 bp, Bos taurus
  Clone ID: 39-LIB3058-042-Q1-K1-B4
cccacgcgtgcgcggtttctaaaatttaattctatttgttataacacacttcagctctgatatcaactgtattaaaaaaccattgactagagatcaaactctaaccaaaagcacactcaccactcagagcagaacctctacactctctctaaaactacacggccattccttgcggaaccattgcctttgataaccatttatgcttgttgtgaatgaatttaaaaggaaatactataataaaaatgttaacaagaaggtaaaaaaacaaaaaaaaaaaataaataaa

SEQ ID NO: 9108 - DNA, 432 bp, Bos taurus
  Clone ID: 39-LIB3058-045-Q1-K1-B12
tgaacgcccagggcctgcaacatgtgtttgtgaggacgggagtggagtccaccctggaaaggagccagatcacccgggatcacatgggccagttactgtatcagctggtgcagtcagaaaagctcagcaaacaggactttttcagaggtttttcagaaacattggaattggcagatgacatggccattgatattccccatatttggttgtaccttgctgaactggtgactcccatgttaaaagaaggcggaatctccatgagacaactcatcacagaattttgcaaacctttacttcctgttggaagagctggaatcttgatttctgaaatattgcaccttctatgcaaacaaatgagccataagaaagtgggagccctatggagggaggctgacctcagctggaaggactttttaccagaaagggaagatg

SEQ ID NO: 9109 - DNA, 366 bp, Bos taurus
  Clone ID: 39-LIB3058-048-Q1-K1-B4
cgcgccgaagccgctgctgccacggatgtcggccctcctatctagtacacggccaccggagcccccgcctccccgttccgcctcgagccgcagagccctcgcgaagagagagagtgaccaggctcagggacacggcctgaggaccccgcgtccgcagccgagcctgaggacgccggagcggacggccgagaggagggagcggcgagtgggggcgggaccgagtgagcccgagaacagccgagcgggcccgaacgccgccgagcgggcccgaggcgccgggccaggccagagccgactacgggagccgacgcgggccccgcggggggcgcggagcagcgcggcaagcccggcgggcggcggcagcag

SEQ ID NO: 9110 - DNA, 390 bp, Bos taurus
  unsure (31): unsure at all n locations; Clone ID: 39-LIB3058-049-Q1-K1-B4
gtccggttctagatcgcgagcggcgcccttnttttttttttttttgcagatatcattaaaaggggattactttaattcaattcttaagaaccagggcatactttccttgagacccgtggtcacagctctcattgttgggtgtggccacgaatggaggtcactcagtcacaaccccccttaggatgaaaatgaggaatagtcaacgtaacgcccaaacgtggctctttaatccccttctaattctgaatatttcgcgtgggtttactataatgtctattaatacatagcctcaatgatgagaggataagaaaaaaaaagaaaatttcagaaacaaaatctccaaattgctcgacacacacactgtgtcattgacctggttgttactgaatg

SEQ ID NO: 9111 - DNA, 425 bp, Bos taurus
  Clone ID: 39-LIB3058-051-Q1-K1-B4
ctatctgaagttacagtgctttggtcttcaagctagggacaagagaggggtctgaaagacacttctcagagccaagaggctttcctgagtgctggttttagattttggtatgcctcagggtctgtgccgctgctctcagcagatggtttttactgcccgcctgctctttcctgtctaatagatagactagaaaaggagtttccatttcctctttggtacggattagcttcaacctccatgtcttactgctcttcctccctatgaataacacagaatcatgccacttttgccctgctggcatcgctctgagcagcaagatgccctgtcctaatgatccttactgggtttccatgcagaagaatcatcattacaataattaatagaactttgcttggaaagagttgggatacaattgtttaagagtt

SEQ ID NO: 9112 - DNA, 232 bp, Bos taurus
  Clone ID: 39-LIB3058-052-Q1-K1-B4
gttggacggacgcgatccgaaggatttttgagcgcgggacgcgagtgcggagctcggttttcggagcgtggctagcagctggcacgatgggcggtgagcaggaagaggatcggttcgacggcatgttgctggccatggcatcatcagcacatagggcggcttgcatgaactggagaacacttgattcagcttggttttactcaaatcttacttctatgatgtaagagattaa

SEQ ID NO: 9113 - DNA, 249 bp, Bos taurus
  Clone ID: 39-LIB3058-054-Q1-K1-B4
cttttattgtccattgttttaacctgtctgaatacaagatcaacaagagcactgtactcctggcaattatgacatatgttagaacatggattttgcactgtagacaacagtcaacatcagtctatggggtactacgttgctttttataaagtccaaaataaagatttattttcaaacaagtgactttggtttatttcatacattacactttttcttgcagaaaaaaaaaaaaaaaaaaaaaaaggacaa

SEQ ID NO: 9114 - DNA, 202 bp, Bos taurus
  Clone ID: 39-LIB3058-056-Q1-K1-B4
cggacgcgtgggtagttctagatcgcgagcggtcgccctttttttttttttttttttttttttttttttttttttttttttttttttattctaacactgattgtattggcttgagtggtcgttttttggttgataatgctacttttgttggttgaaaagttatttttttcataaggggaaattgtcattttatttttatgtt

SEQ ID NO: 9115 - DNA, 310 bp, Bos taurus
  Clone ID: 39-LIB3058-057-Q1-K1-B4
gcggtttctggaggcgaagaacgcggttggccaatcgcaagccagaagatgaaggttctgtgggttgccgtggtggtcgcgcttctggcaggatgccaggcggatatggagggagagctggggcccgaggagcccctgactacgcagcagccccgggggaaggacagccagccttgggagcaggcgctgggccgcttctgggattacctgcgctgggtgcaaaccctgtctgaccaggtgcaggaagagctgctcaacacccaggtcattcaggaactgacggctctgatggatgagaccatgaaggatg

SEQ ID NO: 9116 - DNA, 428 bp, Bos taurus
  unsure (381): unsure at all n locations; Clone ID: 39-LIB3058-058-Q1-K1-B4
ctgtaatcaaaatactgacaggagagcctagtgaccatgttcaagctgaagtttcagtcagtgtggaacagatccagcccctgatattttatgatgctcagggcagtgcttctccagctggaatcctgcagcatggggtatccacacgtctgtgtttaagagcatgaaagttcttccatttgagaaacactgaaaggacgaatgaggctttcctggtggcacaatggtgaagaatccacctgccatcgcaggagacacaggttagatccctgggaggggaagatcccctggagaaggaaatggcaaccccactccagtattcttgcctgggaaatcccatgtacagagtagcctgatgggctacagcctgtgggttcacanagagtcagacatgactgagcgactgaacaacaaaaggatgaatgaat

SEQ ID NO: 9117 - DNA, 401 bp, Bos taurus
  Clone ID: 39-LIB34-001-Q1-E1-B12
agctgcttgggcagccctcctgctgctctggggtctgtccctgagcccagtgactgagcaggcgacgttctttgaccccaggccatccctgtgggccgaggccggctcaccgctggcaccctgggccgatgtgacgctgacctgccagagcccgctgccgacccaggagtttcagctcctcaaggatggcgtgggccaggaaccggtgcacctggagtcccctgcccatgagcacaggttcccgctgggaccagtgaccagcaccacccggggcctctaccgctgcagctacaagggcaacaacgattggatcagcccgagcaacctggtggaagtgaccggagcagagcccctgcccgcaccctcgatctcaaccagtcgcgtgtcctggatcacacccg

SEQ ID NO: 9118 - DNA, 324 bp, Bos taurus
  Clone ID: 39-LIB34-001-Q1-E1-B4
cgcgcgatggagaccggcgtggatactagcggggctggcccggaggggagcggggagagcgcggctgacgggagataacccagctgtgatccccaaagcgtgcaatttccaggtctcctccctgcctcttctgtgagccccaagacctgcatcttagctagagttcaacatggggaaccacttgactgagatggcgcccaccacctccttcttgcctcacttccaggccctgcatgttgtggccattgggctggacccagctggaaagacctcccttctttaccgccttaagttcagagagtttgtccagagcatccccaccaa

SEQ ID NO: 9119 - DNA, 389 bp, Bos taurus
  Clone ID: 39-LIB34-003-Q1-E1-B12
ctaggcaggtgtctgcagtggaggtgctggcatcttagaggtggggaagacaatttcagatttaacatcaacatctgggtgtcttctgcatacaaaactgggtaataagatacttaggcacgttaaagtaagcctccaattttgtaactttggttacaattttgggaaaattttggaaagataatttttagagttatggaaatttgttaatttttagaattatggagattgtagatgaagcatcttgccatataaaatttatatgttatctcctatatctgttagaaacttggttgtgcctggttttactatatattttgtttcactaaaacaatggtaaaacattgtgtgcagcttctcaaaggaagaacagctgacttctcaatgtc

SEQ ID NO: 9120 - DNA, 397 bp, Bos taurus
  Clone ID: 39-LIB34-003-Q1-E1-B4
tggtggctcttccatccccagaccagccaagcctgtgagtgacaccccagacagaggaaccagagccatgcggagtctcagcggactgctgttgttactgactgcctgcctggcagtaaacgccagctccgtgcccacattgcccgatgacattcaagtgcaggagaacttcgacctgtcgaggatctatgggaagtggttcaatgtggccgtgggctccacctgcccatggctgaagaggttcaatgagaagatgaccatgagcacagtggtgttgaaagcggggccgacgagcacggagatcagcgtcaccaacactcacaggcggaaaggtgtctgtgaatcgatctctggtacttatgagaaaacaagcactgatgggaagtttctctatcac

SEQ ID NO: 9121 - DNA, 409 bp, Bos taurus
  Clone ID: 39-LIB34-004-Q1-E1-B4
tctccagtaaactgaaggaatgctgtgataagcctttgttggaaaaatcccactgcattgctgaggtacaaaaagatgccatacctgaaaacctgcccccattaactgctgactttgctgaagataaggatgtttgcaaaaactatcaggaagcaaaagatgccttcctgggctcgtttttgtatgaatattcaagaaggcatcctgaatatgctgtctcagtgctattgagacttgccaaggaatatgaagccacactggaggaatgctgtgccaaagatgatccacatgcatgctattccacagtgtttgacaaacttaagcatcttgtggatgagcctcagaatttaatcaaacaaaactgtgaccaattccaaaaacttggagagtatggattccaaaatgcgct

SEQ ID NO: 9122 - DNA, 395 bp, Bos taurus
  unsure (380): unsure at all n locations; Clone ID: 39-LIB34-006-Q1-E1-B12
cggacgcgtggggctccaaccagctcttcagttgatggatttaaggcaaatcttgtctttaaggagattgagaagaagcttgaagacgaaggagagcagtttgtgaagaaaatcggtggtatttttgcctttaaggtgaaggatggccctgggggtaaagaagccacctgggtggtggacgtgaagaatggcaaaggatcagtgctccctaactcagataagaaggccgactgcacaattacaatggccgactcggacttattggctttgatgactggtaaaatgaatcctcagacggccttctttcaaggcaaattgaaaatcaatggcaacatgggtctggctatgaagttacaaaatctccagcttcagcctggcanagctaagctgtgaac

SEQ ID NO: 9123 - DNA, 357 bp, Bos taurus
  unsure (340): unsure at all n locations; Clone ID: 39-LIB34-006-Q1-E1-B4
gataaaggtgcctgcctgctaccaaagattgaaactatgagagaaaaagtactgacttcatctgccagacagagactcaggtgtgccagtattcaaaaatttggagaaagagctttaaaagcatggtcagtagctcgcctgagccagaaatttcccaaggctgagtttgtagaagttaccaagctagtgacagatctcacaaaagtccacaaggaatgctgccatggtgacctacttgaatgcgcagatgacagggcagatcttgccaagtacatatgtgataatcaagatacaatctccagtaaactgaaggaatgctgtgataagcctttgttggaanaattccactgcattgct

SEQ ID NO: 9124 - DNA, 362 bp, Bos taurus
  Clone ID: 39-LIB34-007-Q1-E1-B4
tcccaactggctcccaattcctggtgaaactcctaaagggagactgttaaatcatgaaattaatcaccatccttttcctttgttccaggctgctaccaagtttaacccaagagtcttctcaagaaatcgactgcaacaaccaggatgtatttaaagctgtggacgctgctctgacaaaatacaacagtgaaaacaagagtggcaaccagtttgtattgtaccgcataaccgaggttgccagaatggataatcctgacacattttattccttgaagtaccaaatcaaggagggcgactgtccttttcaaagtaacaaaacttgggacgactgtgactacaatgactctgcacaagctgccaca

SEQ ID NO: 9125 - DNA, 303 bp, Bos taurus
  Clone ID: 39-LIB34-008-Q1-E1-B4
tcgatactggacaaaccggctgcagtcacggggatatttcgcttttctctgacagcggtacggcggcctgaaatgagttcacacctaaagacgtgcccctatcatgtgcagactctccgttccagaaggatcttttcagctcccaccaggacttaaaaaatcccttcgatagctctttttcgcacgcctattcagtaacgcatcctcaatatgccgtcacagtgctaatgctacgtgatattgaataagtgtccatactggaagtctgctgtgccaatcattatccacatgcatacgattcca

SEQ ID NO: 9126 - DNA, 392 bp, Bos taurus
  Clone ID: 39-LIB34-009-Q1-E1-B12
cacctctcccaagctgaagtcatccaagaagggagtgatgtcactctagttgcctggggcactcaggttcatgtgatccgagaggtggctgccatggctcaagagaagcttggggtgtcttgtgaggtcattgatctgaggactatactaccttgggatgtggatacagtttgcaagtctgtgatcaaaacagggcgactgctagtaagtcatgaggctcctttgacgggcggctttgcctctgagatcagctcaacggttcaggaagaatgtttcctgaacctggaagctcctatatcaagggtgtgtgggtacgatacaccattccctcacatttttgaaccgttctacatcccagacaagtggaagtgctatgatgcccttcgaaaaat

SEQ ID NO: 9127 - DNA, 420 bp, Bos taurus
  Clone ID: 39-LIB34-010-Q1-E2-B12
gtcacaataccaaacccctctgttcgtatgatccgtaataattaccgccgtactactactactctcgctccctgtattagcagccggcatcacaatgctattaacagaccggaacctaaatacaaccttcttcgacccggcaggaggaggagaccctattctatatcaacacttattctgattctttggacaccccgaagtctatattttaatcttacctgggtttggaataatctctcatatcgtgacctactactcaggaaaaaaagaaccattcggatatatgggaatagtttgggctataatgtcaatcggatttctaggtttcatcgtatgagcccaccatatattcactgtcggaatagacgtcgacacacgagcctacttcacatcagccactataattattgctattccaac

SEQ ID NO: 9128 - DNA, 384 bp, Bos taurus
  Clone ID: 39-LIB34-011-Q1-E1-B12
gaactaactgagtttgcaaaaacatgtgttgctgatgagtcccatgccggctgtgaaaagtcacttcacactctctttggagatgaattgtgtaaagttgcatcccttcgtgaaacctatggtgacatggctgactgctgtgagaaacaagagccggaaagaaatgaatgcttcctgagccacaaagatgatagcccagacctccctaaattgaaaccagaccccaatactttgtgtgatgagtttaaggcagatgaaaagaagttttggggaaaatacctatacgaaattgctagaagacatccctacttttatgcaccagaactcctttactatgctaataaatataatggagtttttcaagaatgctgcaaagctgaagat

SEQ ID NO: 9129 - DNA, 364 bp, Bos taurus
  Clone ID: 39-LIB34-012-Q1-E1-B4
atggaatctctcacaaatgatatttatgatgctgccttgaagctcattaatgaaattgaggagatgggtggaatggccaaagctgtagcagagggaatacctaagcttcgaattgaagaatgtgctgcccgaagacaagctagaatagattctggttctgaagtaattgttggagtaaataagtaccagttggaaaaagaagaatctgtggatgttttggcaattgataatacttcagtgcgtaataagcagattgaaaaacttaagaaggtcaaatccagtagggatcaggctttggctgaacggtgtctggatgctctgactgcatgtgctgccagtggagatgggaatattctcgctcttg

SEQ ID NO: 9130 - DNA, 435 bp, Bos taurus
  Clone ID: 39-LIB34-013-Q1-E1-B12
actggctacaattgagaaaagattgtgaatagtttagggttggtgaacactcagaggcaatggtcttaacatcagtactttcctttttttttttttaatctcctatttaagatgacaatgtaatatatgggaactgtctcccatatattacctcccaaaccttccttattttttgaaacaggtatgaatatggaatttatgttatacatgatgttgggtagtgactaagttttgtttatttctgtatggctatccagttgtcccaatattagttattaaaatgaccatcctttcttcactgctcttcaaagccatttttaatatagatcaactatctgtgtatacttgggtctgtttctgggctctctattatattccattagcctaaccgtagttttttacttaatcccatcttagctataatgccttaattac

SEQ ID NO: 9131 - DNA, 385 bp, Bos taurus
  unsure (369): unsure at all n locations; Clone ID: 39-LIB34-013-Q1-E1-B4
ataagatggattttgagctgtacttgggatatgaatatgtcactgctcttcagaatctaagagaaagtaaacccccggactcctcaaaggatgagtgcatggtgaagtggtgtgcaattggtcaccaggagaggacaaagtgtgatcggtggagtgggttcagcggcggggcaatagagtgtgaaacagcagagaacactgaagagtgcatcgccaagatcatgaaaggagaagctgatgccatgagcttggacggaggctacctctacatagcaagcaaatgtggcctggtgcctgtcctggcagagaactacaaaactgagggtgaaagttgcaagaacacaccagaaaaagggtatcttgctgtanctgtggttaaaacatc

SEQ ID NO: 9132 - DNA, 384 bp, Bos taurus
  Clone ID: 39-LIB34-014-Q1-E1-B4
atccagctcaccatggctcgggcattgagagtgccagttgcactgtggctgttgggcttgtgctggtctttggctaaagcccaccctctggctagagctcctgagcttgggcacggagttgaaggtgggaatgtggccaagccggatccagaagtgacggaacgctgctcggatggctggggctttgatgctaccaccctggatgagcatgggaacatgctgtttttaaaaggggagtttgtgtggaagggtcatgcctgggcccggcagttgatctcagagaggtggaaggatgcccccagtcccgtggatgctgcattccgctatgatcgtaacagtgtccttctgatcaagggggacaaattctgggtatatcctcctgag

SEQ ID NO: 9133 - DNA, 449 bp, Bos taurus
  Clone ID: 39-LIB34-015-Q1-E1-B12
cgcctgctgtaccggccgaaatgtctcgagtcgacccaggcctccgactgttgagatatcatacggtctagatggacgcagtgtagctaacttaggatcctgcagcggtagatgtgtctgagctgggggctcctgcacacacaacctgtctgggccgtcatacctgtgcgcatcgttgtcaccggtgatcacatccaacccttgtgtcagcagcttgcagagctgcatgcccaacataagctgctgccactttccctctgcaaactggacatgcatcaagccatgtggtcatattgcctggagaaagggtccagtatagggcaggttctctctaagcccattccagaaaccaggctggcacgggtacagatcagcttcaccacagacctcggtctcccggggggacgacatgtccatcagtcccagactcatcctgtcacctctgaatg

SEQ ID NO: 9134 - DNA, 337 bp, Bos taurus
  Clone ID: 39-LIB34-015-Q1-E1-B4
actagttctagatcgcgagcggccgcccttttttttccctttcatcactttatatcctgccattcccttctcgcttgaagagtttctgctaaaaaatcagctgacaactttatgggaattcccttgtatgttatttcttacttttccctttctgcttttaacattttttctttgaatttactttttgttcacttgattgatacgtgttttttcttgggtttatcttatatgagactctctgtgcttcatggacatcagtggatatttacttttccatgttagggaagttttcaactatgatgtcttcaaatattttctcaaaccctttgtctttctc

SEQ ID NO: 9135 - DNA, 414 bp, Bos taurus
  Clone ID: 39-LIB34-016-Q1-E1-B4
cacgttacgaggtccagctgatgcgctttgcttataacttgtcagacacagacactttccccaattcgagctccacaggagtcaagactgtggagtcggcaaccgacatcaaggccgacatcaataagacgtaccggtgtgtgagcgagactcaggtcaacatggacaatgtgacggtcacgctccgagacgcggccatccaggcctacctgtccagcagcaacttcagcagagaggagacgcgctgtgaacaggacctgcccactccgaccacgccaccccagcccgcgcccaccccagctcccgcgagccctgccgtgttcaggtacaacgtttctggcagcaacggcacctgcttgctggccagcatggggctgcagctgaacgtcacctacaggagagtcgacaacaaga

SEQ ID NO: 9136 - DNA, 357 bp, Bos taurus
  Clone ID: 39-LIB34-017-Q1-E1-B4
cggacgcgtggggttctagatcgcgagcggccgcccttttttttttttgtttttttttttttttttttttttttttttttttttttttttttttttttttttttttttttttttttttttttttttttttggaacccatctgtgaaaacaatggcctttatttaaaaaataaacttttttgtaacaccagaaagggtcactgtgaccgcacccccagccccccgaaacggggttaaaaggtgggcaaggtcacaaccccgcgaaatcccccttgggcggccctaaccactggtccaaccccctggccttggggttgaccttcagggtcagttccatgttccgggcgggtttcaaggc

SEQ ID NO: 9137 - DNA, 415 bp, Bos taurus
  Clone ID: 39-LIB34-018-Q1-E1-B12
acaagcctcagacacacagctaggcatttcagaaagaaatctgaaagacgcccatcccacagaggaaaggctctgtcctgagaatggctgatctccggatactggtcagcatcatcctaatgacaaatgctgtcctggagaaaggagggtgtaccggacctccggggccaccaggacacccagggcctccaggtataagagggcctccaggtataagaggaataccaggtttgccaggtccgccgggaactccaggaccaagtgtaaaatgcccatgccacagacagtccgccttcactgtgaagctcagtggccagttgccttccccttcaaagcctgtgcccttcacagaggtcctgtacaatgcccagagagacttacaggaggacactggggtcttcacatgcaaggtggc

SEQ ID NO: 9138 - DNA, 418 bp, Bos taurus
  Clone ID: 39-LIB34-018-Q1-E1-B4
gaggtgaaacaggtaatggatcccaaaggccagagagtgaagcttaatgatggccacttcattcctgtcctgggatttggcactgctgaagctaaagaggttcctaagagtgaagctctggaagtcaccaaatttgctatagaggttgggttccgccatattgactgtgctcatgtgtaccaaaatgaagagcacgttggccaggccattcgaagcaagattgcagatggcactgtgaagagagaagacatattctacacttcaaagctttggtgcactttccttcgaccagagttggtcagaccagccttggaaaagtcactgaaaaatcttcacctggactatgttgatctctatattattcattttccactggctatgaagccaggggaggaattattgccaaaagatgaaaatg

SEQ ID NO: 9139 - DNA, 440 bp, Bos taurus
  Clone ID: 39-LIB34-019-Q1-E1-B3
cctgcagtatggtcgtacttccgggtctaccacgcgtccgatgctggtcaccatcatcttcatctacgagaagaggcggaagccagacgaggtcctggatgatgaagacataggctctgctccattgaaaagcagtgggaaccccttgaatgacaaagacagggacaagaatgttcgccagaggaactccagctgagaggaccaggatgagtctacaggcagcgcagagaacagccccacgctcttccctctctgaaaaccccccagcaaaagcagaccgtgttgtacattcagactacacattttgtctccttttttaaaaactgaagtatgattttctctgggtagaattctgttccttaagagctttgcatttcttgtttaaacatctcgtgagcaccccaagcctcatgacgtttgtgtaaagctcctgctggaac

SEQ ID NO: 9140 - DNA, 383 bp, Bos taurus
  Clone ID: 39-LIB34-020-Q1-E2-B12
aacttaatcagaaaataaacaaaaggaatcactccataattctgatgtctgccccactgactacgggtttttagctttttgttctgtctgacactgttcgtatgtatactacattcccatcagtaagttctaccctgtgcactgattctcaactggggacgaagttaagggcttatatatattggatagaacctctctggagagtcttgaaagtccctcttgaacagagctgccccttatttgagaatcactgttttagattaaggaataaacactctgtgtctaacatcaatatgaggaagcagtccttttggtcaataacagaggccatgagaatgaaactatcccttactttcttttccccattttttttttttcctgct

SEQ ID NO: 9141 - DNA, 317 bp, Bos taurus
  Clone ID: 39-LIB34-020-Q1-E2-B4
agaaggcagctccctgccggccgcatttaaacactttgccctgatgcagcgggacagctgggtggacatcttccgacttctcttctggggcggttcctatggtggtgctggacagccccagctcatcagccgcaactggtttggtctgccgggacgactggatgctgccatggccggcgacatctatgtctcaggctcagcgcccatcttcccccgggccaagatgactaagtctgcacgccgccatcgcaaacgctatcgctcgctccgaagccgtggtcgaggcctcggcccgagtcatatagcctaccggcgat

SEQ ID NO: 9142 - DNA, 325 bp, Bos taurus
  unsure (265): unsure at all n locations; Clone ID: 39-LIB34-021-Q1-E1-B4
aaaaaggataatatgaccccggatcctttcacgactcttggtctttggggaacgacccaaatccactgaaggaagaaggaagaaaattcccttgattcccggaaggttaaattaatccaaaaaggaattcaaaaatataccaccatgcaaaatccttgtgaaaaaaatgaactaaaaccacagaacatgccaaaagctgaggaacaccgccctttggaacctgtaccacaggaggcataaggaaatcctcaaccttctgaataangtgtaagccacgaagcataaggaaaccttagacgagctgactcacactggtcacggatat

SEQ ID NO: 9143 - DNA, 438 bp, Bos taurus
  Clone ID: 39-LIB34-022-Q1-E1-B4
cacccccatcttaaagaataggcatgaaaaagtacaggagaattgtattgatcttgttgggcgtattgctgataggggagctgaatatgtgtctgcaagagaatggatgaggatttgctttgaacttttagagctcttaaaagcacacaaaaaagctattcgtagagccacagtcaatacatttggttatattgcaaaggccattggccctcatgatgtattggctacacttctcaacaacctaaaagttcaagaaaggcagaacagagtttgtacaactgtggccatagctatcgtcgctgaaacatgttcacccttcacagtactacctgccttaatgaatgaatacagagttcctgaactgaatgttcaaaatggagtgttaaagtcactttccttcttgtgtgaatatattggtgaaatgggaaaggactacat

SEQ ID NO: 9144 - DNA, 416 bp, Bos taurus
  Clone ID: 39-LIB34-023-Q1-E1-B12
gagaaactcatggaaatgttccctatcattgggaagtatggagatgtgttggtgaggaacctgaggaaggaagcagagaaaggcacgtccgtcgacatgaaagaggtctttggggcctacagcatggatgtgattactagcacatcatttggagtgaatattgattcccttggcaacccacaagatccctttgtggagaatgccaagaagctcttaagatttgatatccttgatccatttctactttcagtagtactctttccattccttatcccaatctttgaagtattaaatatcagcatatttccaaaaagtgctgtgaattttttgacaacatccgtaaaacagaataaagaaagtcgcctcaaagatactcaaaagccgcgtgtggactttcttcagctgatgattaactc

SEQ ID NO: 9145 - DNA, 458 bp, Bos taurus
  Clone ID: 39-LIB34-023-Q1-E1-B4
caggtcgtattccgggtcgaccacgcgtcgcacatcatccataaagatattggtaccctttatctactatttggtgcttgggccggtatagtaggaacagctctaagccttctaattcgcgctgaattaggccaacccggaactctgctcggagacgaccaaatctacaacgtagttgtaaccgcacacgcatttgtaataatcttcttcatagtaataccaatcataattggaggattcggtaactgacttgttcccctaataattggtgctcccgatatagcatttccccgaataaataatataagcttctgactcctccctccctcattcctactactcctcgcatcctctatagttgaagctggggcaggaacaggctgaaccgtgtaccctcccttagcaggcaacctagcccatgcaggagcttcagtagatctaaccattttctctttaca

SEQ ID NO: 9146 - DNA, 332 bp, Bos taurus
  Clone ID: 39-LIB34-024-Q1-E1-B4
taggcttactgctttcaggatatgccataggcgtgacaaataatccagaaaatggaatcattaagtgggagcattgcaagctgtcttctccttgtgttctatatgtattttgtatgtatgtatgtatgtattattattactgccaagagggtctgatagcacgtcaagggtcggggtgggacgatctaagggaggggaaattctttagctcattttaggaatttgttgccaactcttcaggtgcactgatctatgtgactctaatggtctttcatatggtgcatttagaaacttctagaactagcatgtggtggtttagatgggaattcact

SEQ ID NO: 9147 - DNA, 461 bp, Bos taurus
  Clone ID: 39-LIB34-025-Q1-E1-B4
cctgccacgtacggtccgagattcccggggccaaccaagccgtcggctccgcttcctcctttcctcaggcatcaaagcagagaccacgggaacctagttcaccaggctcgaggctggaggccccgccatgacatccctaaggccccttctgatgctggccctgctggcgtgggttgttgtggctgaccaagagtcctgcaagggccgctgcaccgagggcttcaacgccaccaggaagtgtcagtgtgacgagctctgttcttactaccagagctgctgtgccgacttcatggctgagtgcaagccccaagtgactcgtggggatgtgttccatctgccagaagatgagtacgggttccatgactacagcgacgcgcagaccgtcaacagcaacgtgggagcacagcccgagagcaccaccctggcccctgttctgcaagctcagaccctagagactcctg

SEQ ID NO: 9148 - DNA, 283 bp, Bos taurus
  unsure (226): unsure at all n locations; Clone ID: 39-LIB34-026-Q1-E1-B12
ctcccgggtcgacggcaagatttatgatgtgaccgcgtatttggatgaccatcctgagggtgctgatgtgctgcatgccgtgactggtatggatggcaccgaggaatttgaagatgcgggccacagcaaggatgccaatgagttgatgaaagattacttcattggggagttggacttggacgaaacacctgacatgcctgagatggaggttttcaggaaagagcangacaagggactcgccagcaagctggcggcttacgctgtgcagtactgggccattccg

SEQ ID NO: 9149 - DNA, 401 bp, Bos taurus
  Clone ID: 39-LIB34-026-Q1-E1-B4
ccctgacctaggacagtgaatcgataatggcactctccatcacgcggggccttctgctgctggcagccctgtgctgcctggcccccatctccctggctggagttctccaaggacacgctgtccaagagacagatgatacatcccaccaggaagcagcatgccacaagattgcccccaacctggccaactttgccttcagcatataccaccatttggctcatcagtccaacaccagcaacatcttcttctcccccgtgagcatcgcttcagcctttgcgatgctctccctgggagccaagggcaacactcacgctgagatcctgaagggcctgggtttcaacctcactgagctcgcagaggctgagatccacaaaggctttcagcatcttctccacaccctc

SEQ ID NO: 9150 - DNA, 393 bp, Bos taurus
  Clone ID: 39-LIB34-027-Q1-E1-B12
cgccacagcaactgtgggccagaagaaagtggagagaaagccccctgacgctgatggctgcctgcacgcggacccggatctgggtgtgttgtgtcctacaggatgtaagttgcaagatactttggtaagacaggagagaccaatccgaaagagtatagaagatttacgtaatactgtggactctgtttcccggacctcttcttccacctttcaatatataactctgctaaaaaacatgtggaaaggaaggcagaatcaagtacaagataatgaaaatgtagtaaacgagtactcctcacatctggaaaagcaccagttatatatagatgagactgtgaagaataatatcccaactaagcttcgtgtgctccgttcaattctggagaatttgag

SEQ ID NO: 9151 - DNA, 421 bp, Bos taurus
  Clone ID: 39-LIB34-029-Q1-E1-B4
ctataatgtcaatcggatttctaggtttcatcgtatgagcccaccatatattcactgtcggaatagacgtcgacacacgagcctacttcacatcagccactataattattgctattccaaccggggtaaaagtcttcagctgattggcaacacttcatggaggtaatatcaaatggtctcctgctataatgtgagccctaggctttattttcttatttacagtagggggtttaactggaattgtcttagccaactcttccctcgatattgttcttcacgacacatactacgttgtcgcacatttccactatgttttatcaataggagctgtatttgctattatagggggatttgttcattgattcccactattctcaggttatactctcaacgatacatgagccaaaatccacttcgcaat

SEQ ID NO: 9152 - DNA, 411 bp, Bos taurus
  Clone ID: 39-LIB34-030-Q1-E1-B4
gggtcgaccacgcgtccggatgaacagacggccatgtttctctgctctgacacctgatgaaacatatgtacccaaagcctttgatgagaaattgttcaccttccatgcagatatatgcacacttcccgatactgagaaacaaatcaagaaacaaactgcacttgttgagctgttgaaacacaagcccaaggcaacagaggaacaactgaaaaccgtcatggagaattttgtggcttttgtagacaagtgctgtgcagctgatgacaaagaagcctgctttgctgtggagggtccaaaacttgttgtttcaactcaaacagccttagcctaaacacgacacaaccacaggcatctcagcctaccctgagagtaagaggaaaaaagagaaatgaaaactcagagcttattcat

SEQ ID NO: 9153 - DNA, 422 bp, Bos taurus
  Clone ID: 39-LIB34-031-Q1-E1-B12
gtgaccatgttactcccttccatttcacacgaggaaacagacacagcttctgtgcacacgatgtactggctccgccctttggtgctggcagggtttggggacatcacgctggagagcgttcccggcgcgagacgattcacactagcagattctgttccgtctctgcgctgtggcttacctgctggttttcttaactgttctcgtgcaatcagcaatgtgctaacctgcttttctctttttgtaaacattttgcattacaggctgcatttcttgccttactgtatagaagaagaaaaaaggctggtttcttattgcacattttaagcttttatacctgtatctcagaatggtaagattctgaaccagacagccagaaccgcaggtctgctgttaagggattttaaatagtgcatttttaacac

SEQ ID NO: 9154 - DNA, 409 bp, Bos taurus
  Clone ID: 39-LIB34-032-Q1-E1-B4
ggcaagcggaagtgcatcggtgagaccattgcccgcttggaggtctttctcttcttggccatcctgctgcatcaggtggaattctgtgtgaccccgggtgtgaaggtggacatgacccccgtgtacgggctgaccatgaagtacgcccgctgtgagcactttcaggcgcacatgcgctcttaggggacaggcagccctgtagcctagacagcccatgcgctcttgggggacagacagccctgtccctgtctgggcagccaggccaggggcctagcccaggggagcctaaaacccacagacattgtccggctgacttttttgctgtctgagctgtgggcaagcctgagggatcatacctgccccctaccctggacttgtccttcttcacagtgaccacagatagtggaca

SEQ ID NO: 9155 - DNA, 441 bp, Bos taurus
  Clone ID: 39-LIB34-033-Q1-E1-B12
cacaggaccgagactcgcgggtccacacacgcctctacactgagtcgtattattctggagatttgggcttcacgatacatcacatcttccagacgagcatcaggagcctgggctcagaggagcacactgcagcttgggacccactctgcagcaagttccacatcctggggacacacgcccacacagaactggggcacaggacgtatcttcagggcctggatactgaagccacctacgatgcagccatccacggaatttgtggtgcacagcgccacgatgacagccatcaaatggtggcctgaggacctgggaccgtcagccaaacacgccctggtccatgcccatctgatttgccctgtatcccggcaaggcatgcatgcgattactgtccccatccggagccgtgaggaagacatgccggtgccagggatgaccatatgg

SEQ ID NO: 9156 - DNA, 338 bp, Bos taurus
  Clone ID: 39-LIB34-035-Q1-E1-B12
aaaataaatagcttaaaaagaaagtgaagctccctattttcatagcagatgcattcacaacaaaagcatttcgagggaatccggctgctgtttgcctcctagaacatagactggatgaagacttgcatcaagaaaattgcaaacgagatgaatctctctgaaacggcttttatccgacagctatacccaactgacaactttacacagagttcctgctttggattaagatggattacaccacacaatgaggttcctctctgtggccacgctatcctggcttctgcaactgtgctgtttcacaaaatagaaaatgtgcatatcactctaaactttgtcac

SEQ ID NO: 9157 - DNA, 389 bp, Bos taurus
  Clone ID: 39-LIB34-035-Q1-E1-B4
gattccgacggcagcatgtctcacaggaagttctctgctcccaggcatgggtccctgggcttcctgcctcggaagcgcagcagccggcaccgcgggaaggtgaagagcttccccaaggatgactcttccaagcctgtgcacctcactgcctttcttggctacaaggctggcatgacccacattgtgagggaggtcgataggccagggtccaaggtgaacaagaaggaagtggtggaggctgtgaccatcgtggagactccgcccatggtgattgtgggcatcgtgggctacgtggaaacaccccgaggcctccggacctttaagaccatctttgctgagcatatcagcgacgagtgcaaaaggcgcttctacaagaactggcataagtc

SEQ ID NO: 9158 - DNA, 422 bp, Bos taurus
  Clone ID: 39-LIB34-038-Q1-E1-B4
ccataagcaaagtgctcctgacgctgtttcccaggagggtcaagcagaacatcctggccatgggcgagaagactggcatgaccaggaacccacacttctcccatgaaaactggatccctaccttcttcagtacccagtatttctggtttatcctgaaggtccgttggcagagactggaggacatgactgaacaagggggtctggccccaaactgtcctgtagtccgcctgtcaggagagaggtgcagcatctgggacttcatgcaaggcaacagacccttggtgctgaattttggaagttgtacctgaccttcatttattttcaaatttgaccaattcaagagacttattgaagattttggttccgtagcagattttctcatcatttacatcgaagaagcacatgcatcagatggctgggct

SEQ ID NO: 9159 - DNA, 368 bp, Bos taurus
  Clone ID: 39-LIB34-039-Q1-E1-B12
ggtccacgcacgcgtccgcaaagacatctgcggacgcgtgggatcaatgagtatgtgaagaagaaaactcatgggaaaagtgagaagctcttcaatgatcttgacgtgctcacaaattgaatcttgttgaattaggtcttctttaaagcccagtggaagacgccatttaatcctagccatacttagcgaatcagagttccacgtgagccatgaacgagagggtgattgtacccatgatgagccttgtacctggaaacccgttacgttccgggacgatgagctgggatgcacgctggtggagctcacatacaccagcaacgacagcgccttcttcatcctcaccgatgagggcaaaatgcacgacctgg

SEQ ID NO: 9160 - DNA, 424 bp, Bos taurus
  Clone ID: 39-LIB34-039-Q1-E1-B4
gtttgacaacctctatggctgccgggagtccctcatagatggcatcaagcgggccacagatgtcatgattgcgggcaaggtggcggtggttgcaggctatggcgacgtgggcaagggctgtgcccaggccctgaggggatttggggcccgcgtcatcatcacggagattgaccccatcaacgcacttcaagctgccatggagggctacgaggtgaccaccatggatgaggcctgtcaggagggcaacatctttgtcaccaccacgggctgtactgacatcattcttggccagcactttgaacagatgaaggatgatgccattgtgtgtaacattgggcactttgacgtggagatcgatgtcaagtggctgaacgagaacgctgtggagaaggtgaacatcaagccccaggtggatcgctacttg

SEQ ID NO: 9161 - DNA, 414 bp, Bos taurus
  Clone ID: 39-LIB34-041-Q1-E1-B12
actagttctagatcgcgagcggccgccctttttttttttttttttttttttttttttttttttttttttttttttttttttgtttattgagagagacatacaggttatgatgttgaatgcttgaggtatataagaagggatacctgcacactgaggaaaatctgtcatcttaagggttgtttattttgtttgtttattctggtatcttgacatttttaaaaggatattttatttacatcaaacttcactcaactacaatgacattccaattataatagatgacaaaccacgcctctatcactaggcacttttaaaagggagtttaggctttacagaacccttctgatgaaatcctacatctgatatcacatcatcccaccacccttgtcccactaaaattacccttcaggggaa

SEQ ID NO: 9162 - DNA, 428 bp, Bos taurus
  Clone ID: 39-LIB34-042-Q1-E1-B4
atctctccgcttcctccctttcctcaggcatcaaagcagagacaacgggaacctagttcaccaggctcgaggctggaggccccgccatgacatccctaaggccccttctgatgctggccctgctggcgtgggttgttgtggctgaccaagagtcctgcaagggccgctgcaccgagggcttcaacgccaccaggaagtgtcagtgtgacgagctctgttcttactaccagagctgctgtgccgacttcatggctgagtgcaagccccaagtgactcgtggggatgtgttccatctgccagaagatgagtacgggttccatgactacagcgacgcgcagaccgtcaacagcaacgtggaagcacagcccgagagcaccaccctggcccctgttctgcaggctcagaccctagagactcctgtccaggca

SEQ ID NO: 9163 - DNA, 378 bp, Bos taurus
  Clone ID: 39-LIB34-043-Q1-E1-B12
tacagatactgctcaatagacagaaagaaatccataggaaagtgatgtcacaaaacttcaccaattgccacactaagatccgccaggttgatgctcatgctactctgaatgacggtgtggtggtccaggtgatgggcttgctctctaagaacaaccaggctttgaggagattcatgcagacctttgtccttgctcctgagggctctgttgcaaataagttctatgttcacaatgatatcttcagataccaagatgaagtccttggtggctttatcactgaacctcatgaggaatctgaagaagatatagaggagcctgaagaaagacagcagacacctgaagtggttactgatgattctggaactttttatgatcaaa

SEQ ID NO: 9164 - DNA, 427 bp, Bos taurus
  Clone ID: 39-LIB34-043-Q1-E1-B4
tcgataggattccaagatgcaacatcaccaatcatagaagaactacttcactttcatgaccacacgctaataattgtcttcttaattagctcattagtactttacattatttcactaatactaacgacaaagctgacccatacaagcacgatagatgcacaagaagtagagacaatctgaaccattctgcccgccatcatcttaattctaattgctcttccttctttacgaattctatacataatagatgaaatcaataacccatctcttacagtaaaaaccataggacatcagtgatactgaagctatgagtatacagattatgaggacttaagcttcgactcctacataattccaacatcagaattaaagccaggggagctacgactattagaagtcgataatcgagttgtactaccaatagaaa

SEQ ID NO: 9165 - DNA, 408 bp, Bos taurus
  Clone ID: 39-LIB34-044-Q1-E1-B4
agtgaaaatacatgatgtaactgggagagattgccaagatgttgccaataagggggccaaagagagtggactttactttatcatacctctgaaagctaagcagcagttcttagtctactgtgaaattgatgggtctggaaatggatggactgtgtttcagaagaggcttgatggcagtctggatttcaagaaaaactggattcaatataaagaagggtttggacatctgtctcctactggaaacacagaattttggctgggaaatgagaagattcatttgataagcacacagtctaccatcccttatgtattaagaatacagttggaggactggaatggcagaaccagcactgcagattatgcttcattcaaggtgacaggtgaaaatgacaaataccgcctgacata

SEQ ID NO: 9166 - DNA, 389 bp, Bos taurus
  Clone ID: 39-LIB34-045-Q1-E1-B12
gggtccacgcacgcgtctgaattgatacatcagattccagaatctttctttactgttaaagaccaggaaaaccggaagctgaatattcagttctttcaagagttgggactcaaaaatgtggtcattagcagatttttgactactgcatctaatatttttcataatcctattgagaagaataagcaggtgataaagattctccaagagagttatctaaatttaggtgggtccaagccaacatgaaagtttggcttccaaaattgttaagccaaaacccatttagtttgttaaattcttctgcagctataaaggaaacactataatttttccagaagcacggtttcacaaactttgaaattctccagcttctctccaaactcaaaggattt

SEQ ID NO: 9167 - DNA, 193 bp, Bos taurus
  Clone ID: 39-LIB34-046-Q1-E1-B4
gttctagatcgcgagcggccgcccttttttttttttttttttaagctttaaacttttttattgaatttaaacatccacatttttgccagtcctgttctacatttctgcttaacagtattgaccataagaaaaattcacgtttatacgacctggtttgcctattgaaccatcattgacaatggaaatactttct

SEQ ID NO: 9168 - DNA, 432 bp, Bos taurus
  Clone ID: 39-LIB34-047-Q1-E1-B12
ggctactctatggaatacctgtcacggcactggctcttcagccctttcaaacttgtgttgtccgaggagatgacgagtctgctggtggtgcactggtgcggactgctgctcgacctctcagccggtttcctgctcttctttgatgcctcaagacccatcggcttcgtcttcgtgtcctacttccactgcatgaattcccagcttttcagcattggcatgttcccctacgtcatgctggccagcagccctctcttctgctctcctgaatggcctcggaagctggtagctcactgcccgaaaaagctgcaagagctgctgcccctcaggactgcccctcagcccagcacttcctgtatgtataagaggagccgggccagaggcagtcagaagccagggctgcgccacaagctgagcactgccttcaccctgctc

SEQ ID NO: 9169 - DNA, 336 bp, Bos taurus
  Clone ID: 39-LIB34-048-Q1-E1-B4
actagttctagatcgcgaccggccgcccttttttttttttttttagtattaacttccttttcataatttactggaactggggggaaaaaagtataacaaaatgtatacagtttagtaattgtacaaaacatcagtttagcaagatgatatgtgttacagtcaccaaaatgaggacccaaaatatttttcactgccacttccataaaaaattcagataaataagaagtcactggatgaaaagtcacaacagaaacaatttaaacttttatataacaacagaaaatgtcagtcttccccagcaataaagcagacaccaccattcaggctctccatgct

SEQ ID NO: 9170 - DNA, 368 bp, Bos taurus
  Clone ID: 39-LIB34-049-Q1-E1-B4
aaagagtggctgagtttctgtatcaagtcctccttgacagtatacgtctgaagaacacaccgtcattcttaatcgcttgtaataagcaagacattacaatggcaaaatcagcagagttaattcatcagcagcttgaaaaagaaatcaatactttacgggttacccgttctgctggtccgagcacactggacatgttccagcactgccgctgcttagctggggaagaaaagctgagaatttgaattctcacagttgcccctcaaagtagagttcctggagtgcatcgccaacggtggaagaggggatggtggctctgctgacatccacgacttggaaaagttggcggcgaaaatcgcctgagggagaga

SEQ ID NO: 9171 - DNA, 434 bp, Bos taurus
  unsure (344),(376): unsure at all n locations; Clone ID: 39-LIB34-050-Q1-E1-B12
tccgtaggcacccacgcctccgcaactatgaactgaatgacatcctctcccagctgggcattaggaaaatatttgccaacgctgacttgtcaggaatcacagggaccgcggacctggtagtctcccaggtggtccacggcgctgcgctggacgtggacgaggagggcacggaaggagctgctgccacgggaatcagcatggaaagaacgatcttgagaatcattgtgcgtgtcaacaggcccttcctgattgccatagttctcaaagacacccagagcatcatctttttggggaaagtcaccaaccccagtgaagcctagagctccgctctgagttgtgggtcncctccctaaggagcaaggtgcgcaagtcctgngtgcagcctgggccctgggcactgaggattcaccctgcctgtccccacctgctcacct

SEQ ID NO: 9172 - DNA, 417 bp, Bos taurus
  Clone ID: 39-LIB34-050-Q1-E1-B4
cacccacgcgctccgggccagcggcatggtctcgctgcggcccttgacacggtacacggcgcccagtgcttccgagcagctcgccgagcaggccaggccgtacagcgtatcggtggggacggccaccacggcgcctgcgcgcagctcggccacggcggcccggagcgcctcggtccagccgccgcgctccgggtttgcggcccgcccggccccgctccccgggagccgcaacagccgggcccccggcgtcgggcttggtgagcgaaggaggcgcccgctccgggctgagcccgccggtccctcgctcaaccccatgctggcagccaccacggccctcagccccctgcacggacgtgccggagacatccgcccaggcccgcttccgggaggaagtgacgcgtccagtcatcttccggt

SEQ ID NO: 9173 - DNA, 231 bp, Bos taurus
  Clone ID: 39-LIB34-051-Q1-E1-B4
taagaagcaaaatagaaaaattacaatcggatgtctcaactcagatggaatactgccgcaccccgtgtactgttacttgcaatattcctgtggtgtctggcaaagaatgtgaggaaatcatcaggaatggaggtgaaacatctgaaatgtacctcattcagcctgaggattctagcaaaccatatagagtatactgtgatatgaaaacggaaaaaggaggatggacagtaa

SEQ ID NO: 9174 - DNA, 241 bp, Bos taurus
  Clone ID: 39-LIB34-054-Q1-E1-B4
ggggccatgccgaagctacatccagctctgggcatttgatgctgtcaaggggaagtgcgtccgcttcagctatgggggctgcaagggcaatggtaacaaattttactcggagaaggagtgtaaggagtactgtggcattcctggtgaaggtaggaggccccacaacgccgggcggggctgaggggccgccagaatcctggttggggagccctggtagggatctggagagctgagttctgga

SEQ ID NO: 9175 - DNA, 144 bp, Bos taurus
  unsure (132),(139),(141),(143): unsure at all n locations; Clone ID: 39-LIB34-055-Q1-E1-B12
agagtatactgtgatatggtttgctagaatcctcaggctgaatgaggtacatttcagatgtttcacctccattcctgatgatttcctcacattctttgcctacccatccttacatcaggcatcccaccacanacataananana

SEQ ID NO: 9176 - DNA, 352 bp, Bos taurus
  Clone ID: 39-LIB34-055-Q1-E1-B4
agcccacaaaactttggcacaatgaagtgggtgacttttatttctcttctccttctcttcagctctgcttattccaggggtgtgtttcgtcgatatacacacaagagtgagattgctcatcggtttaaagatttgggagaagaacattttacaggcctggtactgattgccttttctcagtatctccagcagtgtccatttgatgagcatgtaaaattagtgaacgaactaactgagtttgcaaaaacatgtgttgctgatgagtcccatgccggctgtgaaaagtcacttcacactctctttggagatgaattgtgtaaagttgcatcccttcgtgaaacctatggtgaca

SEQ ID NO: 9177 - DNA, 393 bp, Bos taurus
  Clone ID: 39-LIB34-056-Q1-E1-B4
cccgggtcgacccaaacgtccaggctggaatggggctgcccggctccccgaggcagtgggtcctgctgctgctggggctgctgctcccccccgccgcccctttctggctcttcaatgtgctgttccccccgcacaccacgcccaaggccgagctcagtaaccacacacggcccgtcatcctcgtgcccggctgcctggggaatcagctggaagccaagctggataaaccgagtgtggtgaactggatgtgctaccgcaagacggaggactttttcaccatctggctagatctcaacatgttcctgccccttggggtagactgctggatcgacaacaccagggttgtgtacaatcgcagctctgggcgggtgtccaatgcccccggtgtacaga

SEQ ID NO: 9178 - DNA, 224 bp, Bos taurus
  Clone ID: 39-LIB34-057-Q1-E1-B12
cggacgcgtggggcgtgacccacccgccatgctccccccagcgctcgtcttgctgttggggtttctctgccacgttgctatcgcaggacgaacctgccccaagccagatgagctaccgttttccacggtggttccactgaaacggacctatgagcccggggagcagatagtcttctcctgccagccgggctacgtgtcccggggagggatccggcggtttacat

SEQ ID NO: 9179 - DNA, 224 bp, Bos taurus
  Clone ID: 39-LIB34-057-Q1-E1-B4
agggtttggaactgatggacctgcatctataagatgtttaggaggggaatggtctcgtccgcaagattgcataagcacaaattgtgttaacttgcccacctttgaggatgctgtactcacagatcaggagaaggatttctataggtcaggagaacaagtggcttttaagtgtctatcatattatcagttggatggatctaatactatacagtgtattaagagca

SEQ ID NO: 9180 - DNA, 225 bp, Bos taurus
  Clone ID: 39-LIB34-058-Q1-E1-B4
gttgggttcctgtgtcgtcttggaggtgactcggcgtgattgaatttgcggcatcttcgcattcactcacaggtcaaaatgcagatcttcgtgaaaaccctgaccggcaagaccatcaccctggaggtggagcccagtgacaccatcgagaacgtgaaggccaagatccaggataaggaaggcattccccctgaccagcagaggctcatctttgccggcaagcag

SEQ ID NO: 9181 - DNA, 209 bp, Bos taurus
  Clone ID: 39-LIB34-059-Q1-E1-B4
cagaagcttcacactgagaggcaggcagagaacatcacacacagctgaaaggaaactcagaggagggaatcgccaagaaaagtggccatggagctaagcccaaacttttccgtggaaacctgggttctcctggctatcagcctgatgctcctctatctatatggaacttattcacagtggacctgtttaacgaagctgggggcttcctg

SEQ ID NO: 9182 - DNA, 242 bp, Bos taurus
  Clone ID: 39-LIB34-060-Q1-E1-B4
gaagttaccaagctagtgacagatctcacaaaagtccacaaggaatgctgccatggtgacctacttgaatgcgcagatgacagggcagatcttgccaagtacatatgtgataatcaagatacaatctccagtaaactgaaggaatgctgtgataagcctttgttggaaaaatcccactgcattgctgaggtagaaaaagatgccatacctgaaaacctgcccccattaactgctgactttgc

SEQ ID NO: 9183 - DNA, 404 bp, Bos taurus
  Clone ID: 39-LIB34-061-Q1-E1-B12
ctccgggaagcggctcaggatccactgcccacacgccgctctcgcaggcagacatgaggacagagagaacttccttcctcctggctctggggctcctggtgtctgggttctgctccagggtccactgcctcccagagaatgtgaccccagaagaacagcacaaagggacgtctgtggatggccactcattagcctccagcaacactgacttcgccttcagcctctacaagcagttggctttgaaggaccccaataagaatgtcatcttctcccctctgagcatctccatagccttggccttcctgtccctgggggctcatgaccacactgtgacagagatcctggaaggtctcaagttcaacctcacagagacccccgagacagaaatccaccagggcttccaa

SEQ ID NO: 9184 - DNA, 425 bp, Bos taurus
  Clone ID: 39-LIB34-061-Q1-E1-B4
acgcgtccacaataccaaacccctcctgttcgtatgatccgtaataattaccgccgtactactactactctcgctccctgtattagcagccggcatcacaatgctattaacagaccggaacctaaatacaaccttcttcgacccggcaggaggaggagaccctattctatatcaacacttattctgattctttggacaccccgaagtctatattttaatcttacctgggtttggaataatctctcatatcgtgacctactactcaggaaaaaaagaaccattcggatatatgggaatagtttgggctataatgtcaatcggatttctaggtttcatcgtatgagcccaccatatattcactgtcggaatagacgtcgacacacgaacctaacttaaaatcagccactataattattgctattcca

SEQ ID NO: 9185 - DNA, 191 bp, Bos taurus
  unsure (58): unsure at all n locations; Clone ID: 39-LIB34-062-Q1-E1-B4
gcggaggcgtggggcttttaggttctgtagctggtcgcaatggcaagcaaaggagggnacatcgtgcttgggctcctgttcctggctgtcctctgccaactcggtcacagcctgcagtgctacagctgtattaaccaagttaactgcacttcaatcgtcaattgttcacataatcaagatgcttgtctctt

SEQ ID NO: 9186 - DNA, 378 bp, Bos taurus
  Clone ID: 39-LIB34-063-Q1-E1-B4
atttgaggaaattggaaaattccatctcaagagcaaaaaccttcttgggggcaaaagcaacctctgggctcctgtgtgcccacgcctccgccatcactgcctacgccctgtcgctgatcgaagcccacgaggacctgcggagagctgcccacagcaacctgatggccatggccatggacatcagtgataagctgtactgaggctcagtcaccacttctccaagcaacgtcctgtcacccactctggctccacacagcccagcagaccccattccccagtctccggccctctggattgaaaccacagcctatggcctgctacacctgctgctatgggagggcaaggctgagttggccgaacaagctgcatcctggctta

SEQ ID NO: 9187 - DNA, 145 bp, Bos taurus
  Clone ID: 39-LIB34-064-Q1-E1-B12
aaactttggaaaaagaaagtgggggactttaattcccctcccccttcccttaagaccggctaattcaaggggtgtgttccgccaaaatacacccaaaattagaattgcccaccggttaaaaaatttggaagaaaacaattttaaa

SEQ ID NO: 9188 - DNA, 302 bp, Bos taurus
  Clone ID: 39-LIB34-064-Q1-E1-B4
ttaacataaggatgtttaaacaatggctaaacatcctatgactctcttcataaacatatcaactatcaaggttatgaagagagtcatatgatgtttaggcattgtttaaaactagttctggagagctggaagtggggaatgaaggggtcataaataaaactagattgtctatatgtttataattttttatgtggggtgataaatatatggggtttcattatactgctctctctactgttgtatatgttttaatttttccataataaaaatctttttaccagaaaaaaaaataccgtgaactc

SEQ ID NO: 9189 - DNA, 218 bp, Bos taurus
  Clone ID: 39-LIB34-065-Q1-E1-B4
gccgggtccgggtttgagtcgctggagcagtgcttggcaaaacatctgccactcgcagaactgcaggaggtcaaacgccttctctatggcaaagagaccaggaagctcgacctgcccggcgctgctctcgaggccgcctccagaggggacttcgagctgcagggctatgcgttcgaggccgccgcggagcagcataggaggccccggactgtgcgtgt

SEQ ID NO: 9190 - DNA, 203 bp, Bos taurus
  Clone ID: 39-LIB34-066-Q1-E1-B12
cttcctgacatgggcaggctacactctcgtaaaagattatccaaagcagctggagaaggaatttgggagccctgatggggtctgccttcattctgtggatgcagcctttacctgtcctggatcttctcagctctacatcatggcaggccagaagctgtggaggctggacctgaacttaggagctcaagccacgtggacagagc

SEQ ID NO: 9191 - DNA, 263 bp, Bos taurus
  Clone ID: 39-LIB34-066-Q1-E1-B4
ggcgtgggaggaagatggactcggtggagaagggggccgccacctccgtctccaacccgcgggggcgaccctctcggggccggccgccgaagctacagcgcaactcccgatgcggccagggccgaggggtggagaagccgccgcatatggcggccctcatcctggcccggggcggcagcaagggcatccccctgaagaacattaagcacctgccgggggtctcgctcattggctgggtcctgcgtgcgggcctggactcgggg

SEQ ID NO: 9192 - DNA, 239 bp, Bos taurus
  Clone ID: 39-LIB34-067-Q1-E1-B4
ggcagggaattcgatattgctggctgcactctctgtcctctcagcctgtcagcaaagttattttgctatgcaggtaggaaaggcgagatcaaaatacaaagttacgcccccatcagtctctgggtcgccagattttgagagaatatttcgtgcacacaggcaaaactgtgtggagttttacccaatattcataatcacattgtggatggctggatggtatttcaaccaagtggggttcc

SEQ ID NO: 9193 - DNA, 218 bp, Bos taurus
  Clone ID: 39-LIB34-068-Q1-E1-B4
gcccagacaactttggcacaatgaagtgggtgacctttatttctcttctccttctcttcaactctgcttattccattggtgtgtttcctccacatatacacaagtgtgtgattgctcaccggtttaaagatttgggagatgtacattttaggggcctggtactgattgccttttctcagtatctccaccagtgtcgatttgatgagcatgtccaatta

SEQ ID NO: 9194 - DNA, 223 bp, Bos taurus
  unsure (205): unsure at all n locations; Clone ID: 39-LIB34-069-Q1-E1-B4
aaagaaaatcttcaccagcgatgcggacttctcaggaatcacagatgaccacaagctggcagtttcccacgtgatccacaaggctgtgctcgacgtgggcgaggagggcacggaaggagctgctgtcacggctgtcgtaatggctacctcatcactcttgcacacgctaactgtcagtttcaacaggcccatttctgactttccnatattcctgcaaagaaga

SEQ ID NO: 9195 - DNA, 254 bp, Bos taurus
  Clone ID: 39-LIB34-070-Q1-E1-B12
tcgagccacgcgtccgctccaaaaatatattactatgtttgccaaagaaaagaacctcctgaaatacatacaatttaagacaattgtatccagtgtaaataagcgtcccgatttccaaaccactggccaatgggatgttatcactgaaaaggatggtaaaaaggaatcagctgtctttgatgccgtaatgatttgttctggacgatcatgtgtaccccaacatacctaaagagtccttttccagggaataaaaa

SEQ ID NO: 9196 - DNA, 229 bp, Bos taurus
  Clone ID: 39-LIB34-070-Q1-E1-B4
ccagtacgggacgacatgaaactatggaaggagcaccggagaccagcaaggcctgtcctatggacccttcaccacgatgggagagcaatggtaccggttgcgccagactctgaaccagcggatgctgaagccagccgaggctgcgctctacacggatgctctgaacgaggtgatcaatgacttcatggatcaactgaaacagctgcgggcagagagtgcctcgggggac

SEQ ID NO: 9197 - DNA, 416 bp, Bos taurus
  Clone ID: 39-LIB34-071-Q1-E1-B4
aaaaccctagaggacgcaactatagcactgcagactccagtactagcctgtccagagcagcaagtgagaggaaacaagccagcattgtaagaggacatgcttctcctccctctctccgtgctgctcctgctcacacagccctggagatccctgggagcagaaatgacaaccttttctcagaaaatactggccaatgcctgtaccctggttatgtgtagccccctggagagtggcttgcctggtcatgatggacaagatgggagagaatgtccccatggagagaagggggatccaggttcaccaggacctgcaggacgagcaggaaggcctggatgggttggccctattgggccgaaaggagacaatggctttgttggagaacctggaccaaagggagacactgggccacgtgggcc

SEQ ID NO: 9198 - DNA, 160 bp, Bos taurus
  Clone ID: 39-LIB34-072-Q1-E1-B4
ccacgcgtccagagaaacaaatcacgaaacatactgcacttgttgagctgttgcaacacaagcccaatgcaacagacgaacaactgataaccgtcatggtgaactttgtggcttttgcagacaagtgctgtgcagctgatgacaaagaagcctgccttgc

SEQ ID NO: 9199 - DNA, 416 bp, Bos taurus
  Clone ID: 39-LIB34-073-Q1-E1-B4
acaaaaagttggaagtcttcaacactgaaaactacagaatattgttgaaaaaaagtaaagcaaacctaaataaacaggacattccaagtttatggcatgagcaacttaatattatcttagatgaacacaccccaaattaatctacaggtttaatgcatactctgtcaaaatcccatctgaattttttgcagaaattgagaaataatcttcaaatttatatggaaatgcaagggactcagatggccaaaagatatttaaaaagaagaaaagatttgattacttacatttcctgattttgaagcttactcccagctatattatctaaaatagtatattgctggaataaatgaataattaaatagaatagaattgggagtacagaaataatttacatttgtggtgcactgatttttgac

SEQ ID NO: 9200 - DNA, 437 bp, Bos taurus
  unsure (280): unsure at all n locations; Clone ID: 39-LIB34-074-Q1-E1-B4
gggccgagccacgcgtccacaaaactttggcacaatgaagtgggtgacttttatttctcttctccttctcttcagctctgcttattccaggggtgtgtttcgtcgagatacacacaagagtgagattgctcatcggtttaaagatttgggagaagaacattttaaaggcctggtactgattgccttttctcagtatctccagcagtgtccatttgatgagcatgtaaaattagtgaacgaactaactgagtttgcaaaaacatgtgttgctgatgagtcncatgccggctgtgaaaagtcacttcacactctctttggagatgaattgtgtaaagttgcatcccttcgtgaaacctatggtgacatggctgactgctgtgagaaacaagagcctgaaagaaatgaatgcttcctgagccacaaagatgatagcccag

SEQ ID NO: 9201 - DNA, 391 bp, Bos taurus
  Clone ID: 39-LIB34-075-Q1-E1-B12
gtaatatttccctgtttttagtttattcatttattataacctaataagaacttgggttgaaataattcttagccagtaaaaatgtactgcctatttggtatattattctaacttggctagaataatttgaaacaagtttgaagttaacaaatatggaggttggatttatactcaaaattcttcttgctctttttttttttggctgcaccgtaagccttgaaggatcttagttcaccaaccacggattaaacccaagccctctacattgtaagcgaggagtttcagccactggaccgccagggaagtccccatagccaagcttttttaacttaaaaagtcacacactgttagtttaaagctaaaaaaaaaaatcacccctgaaagacctcta

SEQ ID NO: 9202 - DNA, 423 bp, Bos taurus
  Clone ID: 39-LIB34-078-Q1-E1-B4
aagcccctatataaagtcgacataggcaccccactccagtactcttgcctgcaaaaccccatggatggaggagcctgataggctgcagtccatgggatcgtgaagagtcagacatgatggagtgacttcactttcacttttcactttcaagcattggagaaggaaatggcaacccactccagtgttcttgcctggagaatcccagggatgggggagcctggtgggctgccgtctttggggtcgcacagagttggacacgactgaagtgacttagcagcagtatactttgaagatggtttgagcaaggaccaatggtacagattaaaggaattattttgttgcttaatactcctcagacactatgcagtacccattctaacacttgttaaatttaattccaacagaactcaaactttgggttgt

SEQ ID NO: 9203 - DNA, 396 bp, Bos taurus
  Clone ID: 39-LIB34-079-Q1-E1-B4
gttttggacaagacttaaatctacagaaaaaaggaagattacagaaaggtaactatggtgaagaaagtggccatcattggagcaggcatcagtggcctggcctccatcagaaactgcctagaagagggactggaacccacctgctttgagaagggtgaagacattgggggcctgtggaaattctcggaccatgtataggaaggcagggccagcatttatcggtcagtctttaccaactcttccaaagagatgacatgttttccagactttccatttcctgatgattttcctaactttatgcacaacagcaagctccaggaatatattactatgtttgccaaagaaaagaacctcctgaaatacatacaatttacgacaagtgtatccagtgtaaat

SEQ ID NO: 9204 - DNA, 427 bp, Bos taurus
  Clone ID: 39-LIB34-080-Q1-E1-B4
atccagctgaatgacacccacccttcacttgccatccctgagctgatgaggatttttgtggatattgaaaaactgccctggtccaaggcatgggagatcacccagaagaccttcgcctacaccaaccacacggtgctcccagaagccctggagcgctggcctgtagagctggtggagaagttgcttcctcgacatttgcaaatcatttacgagataaatcagaagcacttagctaaaattgctgccttgtttcctaaagatgtcgaccgtctgagaaggatgtctctgatagaagaggaacgaggcaaaaggatcaacatggcccatctctgcattgtgggctcccacgctgtgaacggcgtggctaaaatccactcggacatcgtgaagacccaagtaatcaaggactttagtgagctaaaaccag

SEQ ID NO: 9205 - DNA, 296 bp, Bos taurus
  unsure (138): unsure at all n locations; Clone ID: 39-LIB34-081-Q1-E1-B12
ttgaataaaagtccgcggccattcggggataaatggcccaggcggtattgtaccggcccgtcggttccctttgaacacgttggcttggctaagcttcggaaaattgctgtctgacccaggtacaataccgtacctcanagaccctaggcaactgaccgtcaatgttactgtcagcaagatacctgaggccattatgcggccggtctgggaactgtccaaggccaattcacactttgccactgggttctagcaccatatggtacactcctacattaacattgataccattttcctgt

SEQ ID NO: 9206 - DNA, 440 bp, Bos taurus
  Clone ID: 39-LIB34-082-Q1-E1-B4
caatagtgaacataaaggtttttcacatagctgttcatatcatgaacctaagaataacagcatgaagtttggggtgccaggcatagtttttcatgtttgatgttgagttattctagttttctaacccaacattccttgttgaggccattaaatttaaccacttgttcactgtcccttctcacagtcacacttgttcatcagcatgtcccagccatagtgacagagcttttttcccctccatacagggctgctccctgccgcccttcccgttttgttttgccagcctcagaatgtcttggccctgggctgaacttttgttcccagtatcagctcatggtttcaggatcaaagttgtccttgttggagattggtggtgactttcctggatttgcacagttaaattcctggttttcctttatcttctgttcacacagacaaat

SEQ ID NO: 9207 - DNA, 414 bp, Bos taurus
  Clone ID: 39-LIB34-083-Q1-E1-B4
gggtcgagcacgcgtccgaaagaacagtaaggactctaatacattgaccaagaacatagtggaactaatgagaggggattttgccaaagctaacagtaagtattacagttagtgcacacaataagaacaacagagatcagaaatagataggatgtcttgttgtagcaactgtgattttattccaaggtactttaagtagaaacacgtatctttatgatatccctgaattttaaggaggggccttgttttagtcatttttatcatgtaaaacaaggtatcttagcattagtttaggtcacaaagtcagaattttggactgaagactagaatctaagtgtgttcttttttaagagtatattctgcaaataagatgagcccaacattttgagtagatgtatctgtttctgccttaca

SEQ ID NO: 9208 - DNA, 433 bp, Bos taurus
  unsure (129),(265),(297): unsure at all n locations; Clone ID: 39-LIB34-084-Q1-E1-B12
aattgtatctcatatgaaatgtatatcagttgctaatgggaatttctacatatatgcttacagaagcaatttatttaaataatgctgtaggtagtgtacataccaactagttgttaagctactatgcanggagaaggtgaacaaagtaatttatttctgattgagcccgtttagtcataatacacacagtggggtgtttggttcataaaagagttgttttctgtggttattgttgggagtatccataattgtggaaggggtatangaagagttatgtgtagttagttgtgacctctnacagtttgagagtttcccatcagacatgatcaatataccaatgtttggcaagttgagtgagagagggttatcgttcctatctgatgaaagaaaatccaaataaagcccacctagaaatagatattttattatatat

SEQ ID NO: 9209 - DNA, 404 bp, Bos taurus
  unsure (332): unsure at all n locations; Clone ID: 39-LIB34-084-Q1-E1-B4
aaagaatctaagggccaggggcgctgagcccgagaaccggacctcggcagcagagccgagaaagccgagcgccgcgggaaccggccggcagccgaagccactcaggcacctactcgtctgcccagtcgattggcgcacgcagagtggccctcaggcccctgcccgggcccagtccctccccgggacccccatggcccgggccgcagccctccggccgttgagattgtcgccgccgacgctgcctctactgccgttgctgctgctcctgctccgggaaaccggagcccaggatgtgcgagttcaggtcgccgctgaggtgcggggcaacctgngggacacggtagagctgccgtgccacctgctgccttcagcgcctgaaatccgagtgtcccaggtgacgtggc

SEQ ID NO: 9210 - DNA, 404 bp, Bos taurus
  Clone ID: 39-LIB34-085-Q1-E1-B4
aagccagaagctgcacgggcgcctggaggaggtgggcgtccgggcccaggaccgcctggataagatacgccagcagctagaggaggtgcacgccaaggtcgaggagcagggcaaccagatgcgcctgcaggccgaggcattccaggcccgcctcaggagctggttcgagcccctggtggaagacatgcagcgccagtgggctgggctggtggagaaggtgcagttggctctgcgccccagccccacctctccgcccagtgagaatcattgagcgcctgggcatcgccctggggggcccccctactcccaccccgagtctctggtgcccccagcctgcaggaggccctgccgctgccccagctgtcctcctggtgggcccctagctaataaagatttctcaagct

SEQ ID NO: 9211 - DNA, 452 bp, Bos taurus
  Clone ID: 39-LIB34-086-Q1-E1-B4
gcggaagcggcagaggcagcgggctcggaggcagcggttgggctcgcggcgagcggacggggtcgagtcagtgcgttcgcgcgagttggaatcgtagcctcttaaaatggcagatgatttggacttcgagacaggagatgcaggggcctcagccaccttcccgatgcagtgctcagcattacgtaagaatggcttcgtggtgctcaaaggccggccatgttagattgtggagatgtcaacttctaagaccggcaagcacggccatgccaaggtccatctggttggtattgacatcttcactgggaagaaatacgaagatatctgcccatcaactcataatatggatgtccccaacatcaaaaggaacgattttcagctgattggcatccaggatggatacctatcactcctccaagacagcggggaggtgcgagaggacctccgtctgcctg

SEQ ID NO: 9212 - DNA, 426 bp, Bos taurus
  Clone ID: 40-BOVMS1-001-Q1-E1-B8
gtcacagtcagagttcctcagaagaactcctaaagaaccacgctggctttcttactcatccagtaatggaaggctcagagatcagccacaagaccaagaaaaatgacccttgcacgctaaaggtctcaaaagagaaactctgccagaagaatctcttggatcaagaaagttccttccaatacacgggctaagtgtggggcaaagggtacatggaaagccttttacactgcaatactgctactagctttcaaagtgactttccacagattcaaatatctcattctgtccatctgacacacttccttctgtaatttgccttaacgggaaggaaaagccattgttgaccgctctactatcattgaggcaacagctagcaccttgctttgtattctggactaaaaactcaataaagacactatggctctt

SEQ ID NO: 9213 - DNA, 416 bp, Bos taurus
  Clone ID: 40-BOVMS1-002-Q1-E1-B8
acgcagataactacaccccagccaatccactcaacacaccccctcacatcaaacccgagtgatacttcttatttgcatacgcaatcttacgatcaatccccaacaaactaggaggagtactagccctagccttctctatcctaattcttgctctaatccccctactacacacctccaaacaacgaagcataatattccgaccactcagccaatgcctattctgagccctagtagcagacctactgacactcacatgaattggaggacaaccagtcgaacacccatatatcaccatcggacaactagcatctgtcctatactttctcctcatcctagtgctaataccaacggccggcacaatcgaaaacagattactaaaatgaagacagaatttagaaaaaaaaagggcggccgct

SEQ ID NO: 9214 - DNA, 363 bp, Bos taurus
  Clone ID: 40-BOVMS1-003-Q1-E1-B8
ctcaaactcagactcattcttaacctttcccaaatgattcacatggactaatctttctatctttctgatctgtaaatacttaaaaaaaagagtagttttgtatcaacctaaatgagtcgaagttcaaaaataatacatttcagtcttttcataattgttgacctaagaagattacacattttctagtgacatgtacatactgtatatagccggattaacggttataaagttttgtaccatttattttatgacattttacactgtaactattgaaactaacggttggtaggagaaagtttcttatggaacgaataccctgctcaacacttaatcaatctttgtgcctcaacatactgttgatgt

SEQ ID NO: 9215 - DNA, 348 bp, Bos taurus
  unsure (327): unsure at all n locations; Clone ID: 40-BOVMS1-004-Q1-E1-B12
aatgatcttatcaatattcttgaccctttttatcatctttcaactaaaagtttcaaaacacaacttttatcacaatccagaactgacaccaacaaaaatattaaaacaaaacaccccttgagaaacaaaatgaacgaaaatttatttacctcttttattacccctgtaattttaggtctccctctcgtaacccttatcgtactattcccaagcctactattcccaacatcaaaccgactagtaagcaatcgctttgtaaccctccaacaatgaatacttcaacttgtatcaaaacaaataatgagtatccacaattctaaaggacanacatgaacattaatattaata

SEQ ID NO: 9216 - DNA, 385 bp, Bos taurus
  unsure (307): unsure at all n locations; Clone ID: 40-BOVMS1-005-Q1-E1-B8
atgcgacgtcatagctcttctatagtgtcacctaaattcaattcactggccgtcgttttacaacgtcgtgactgggaaaaccctggcgttacccaacttaatcgccttgcagcacatccccctttcgccagctggcgtaatagcgaagaggcccgcaccgatcgcccttcccaacagttgcgcagcctgaatggcgaatgggacgcgccctgtagcggcgcattaagcgcggcgggtgtggtggttacgcgcagcgtgaccgctacacttgccagcgccctagcgcccgctcctttcgctttcttcncttcctttctcgccacgttcgccggctttccccgtcaagctctaaatcgggggctccctttaaggttccgatttagtg

SEQ ID NO: 9217 - DNA, 452 bp, Bos taurus
  unsure (8): unsure at all n locations; Clone ID: 40-BOVMS1-006-Q1-E1-B8
gggtccgnccacgcgtccgaaaatagaaaaaaaaaaaaaaaaaaaaaaaaaaaaaaaaaaaaaaaaaaaaaaaaaaaaaaaaaaaaaaaaaaaaaaaaaaaaaaaaaaaaaaaaaaaaaaaaaaaaaaaaaaaaaaaaaaaaaaagggggggccccccaaaaggttcaaacctaacttacccttgaatgcaaattaaaaccccttcaaaagtgccaccaaatttaaatccacgggcctacttttaaaaacttcataacgggaaaaacccgggatttaccaaactaaacccccttgaaaaaaacccccttttcccaaccgggaaaaaaaccaaaaaggcccaaaccattcccccttccaaaaatttccccacccaaaatggcaaagggaaccccccctttaccggcaaataaaccccggaggttttgggggtaacccacactttaaccgcaaa

SEQ ID NO: 9218 - DNA, 363 bp, Bos taurus
  Clone ID: 40-BOVMS1-008-Q1-E1-B12
aagttatagatcgcgagcggccgcccttttttttttttttttggaatgcaacaactttattgaaagaaaagtgcaatgtaacttatcgaaagcttaaaagggagaacttaaaacacctccccttaagcgcaggaccaagtgcagagtggactctttctggatgttgtagtcagacagggtgcggccatcttccagctgtttcccggcaaagatcagcctctgctggtctggggggatgccctctttgtcttggatcttggccttgacgttctcgatggtgtcactgggctccacctccagggtgatggtcttgccggtcaaggtcttcacgaagatctgcatcccacctctgaggcggaggac

SEQ ID NO: 9219 - DNA, 473 bp, Bos taurus
  Clone ID: 40-BOVMS1-009-Q1-E1-B8
caaaacccatatgaatgatactcagaaaaaatccattggaattttcattcagctgctcagtatatttgtaaattttacattcattacatgtctgctttatttagatttgctttgcagttttgtttagataaatatttttacgaaaaccgcaaaacactgttacaaagtattattcattgaatgtaattcatgaaacaatctatttttacttctctgagaaataacttgtttttgatacatttccataaagtgctttggacatgagagaatattttgatgtttttatagaactgattgttaaggtaacaggtatagtattttaggacactttacaggtagcttttgcttcttcatcgaaacatagtcctggaaaattccctgggaagcagaacaagaacaaaccatccattttgtgtaacagtaaagcctcagctactcattctcaccatcagatggtatttttctataagctg

SEQ ID NO: 9220 - DNA, 293 bp, Bos taurus
  Clone ID: 40-BOVMS1-010-Q1-E1-B8
ggacgccatcaagaagaagatgcagatgctcaagctcgacaaggagaacgccttggatcgagcggagcaggcggaggccgataagaaggcagcggaggacaggagcaagcagctggaagatgagctggtgtcgctgcaaaagaaactcaaggccaccgaagatgaactggacaaatactccgaggctctcaaagatgcccaggagaagctggagctggcggagaaaaaggccaccgacgctgaagccgacgtagcttctctgaacagacgcatccagctggttgaggaagagt

SEQ ID NO: 9221 - DNA, 299 bp, Bos taurus
  unsure (259): unsure at all n locations; Clone ID: 40-BOVMS1-012-Q1-E1-B12
atgcgacgtcatagctcttctatagtgtcacctaaattcaattcactggccgtcgttttacaacgtcgtgactgggaaaaccctggcgttacccaacttaatcgccttgcagcacatccccctttcgccagctggcgtaatagcgaagaggcccgcaccgatcgcccttcccaacagttgcgcagcctgaatggcgaatgggacgcgccctgtagcggcgcattaagcgcggcgggtgtggtggttacgcgcagcgtgnacgctacacttgccagcgccctagccgccgctcctttcgc

SEQ ID NO: 9222 - DNA, 421 bp, Bos taurus
  Clone ID: 40-BOVMS1-012-Q1-E1-B6
cctgtccctcaccttttgtatttaattttaaagtcaatgtactgcaaggaagctggatgcaagatagatcctatattcaactgtactgttatttaagatgtaataaagcagtttgacatgaggaaaaaaaaaaaaaaaaaaaaaaaaaaaaaaaaaaaaaaaaaaaaaaaaaaaaaaaaaaaaaaaaaaaaaaaaaaaaaaaaaaaaaaaaaaaaaaaaaaaaaaaaaaaaaaaaaaaaaaaaaaaaaaaaagggggggccccccaaaaggttcaaagctaagttacgcgtgaaggcaactttaaaccccttcaaaagggtcaccaaaattaaattcaagggccgtcttttaaaaacgtcttaatgggaaaaacccggggtttaccaaattaaacccccttgaaaaaaaaccccttttccc

SEQ ID NO: 9223 - DNA, 214 bp, Bos taurus
  Clone ID: 40-BOVMS1-013-Q1-E1-B8
atgcgacgtcatagctcttctatagtgtcacctaaattcaattcactggccgtcgttttacaacgtcgtgactgggaaaaccctggcgttacccaacttaatcgccttgcagcacatccccctttcgccagctggcgtaatagcgaagaggcccgcaccgattcgcccttccaaaaatttgcccagcctgaatggcgaatgggacgcgccctgt

SEQ ID NO: 9224 - DNA, 463 bp, Bos taurus
  Clone ID: 40-BOVMS1-014-Q1-E1-B12
gtgccagaaacccttaagaaaaagcggaagaatttcgcagagcttaagatcaagcgactgagaaagaagtttgcccaaaagatgcttcgaaaggcaaggaggaagcttatctatgaaaaagctaagcattaccacaaggaatacaggcagatgtacagaactgaaattcgaatggctaggatggcacgaaaagccggtaacttctatgtacccgcggaacccaaattggcgtttgtcatcaggatcagaggtatcaatggtgtgagcccaaaggttcgaaaggtgctgcagctccttcgcctccggcagatcttcaacggcacctttgtgaagctcaacaaggcgtcaattaacatgctgagaattgtggagccatacattgcatgggggtacccaaatctgaagtctgtaaatgaattgatttacaagcgtggttacggcaaaatcaacaaaaagcgaattg

SEQ ID NO: 9225 - DNA, 464 bp, Bos taurus
  Clone ID: 40-BOVMS1-014-Q1-E1-B8
gatttctttacttttgattattttaacagataaagtaatggtgctgggtaatacacataagaccaatcttttgttattagatcagtactgttcttaataactttcttctgaatgttcttgaaaatgttccctttatactgtcccgactttaagaataaaacatgaatcttcaacattgcaagctgttctctaacactctttagcacataacatatgctgattttgctttcataactatttttacattggttatgttttcccctgtatattcaagattgtacgtacaactgttctatcatatactattagttaaaataagtaaactgctcaaaaatagacccagttttttagcaacactgtgatagagtgatgttaatacaggttaatattatttacctcagattttaccatgtgtttacgtacccagccagcttaaaaaatttttaagaattcaccataaacta

SEQ ID NO: 9226 - DNA, 432 bp, Bos taurus
  Clone ID: 40-BOVMS1-017-Q1-E1-B8
cgcgtccgttttatttttttttttttttgttctttttttttatttttttttttttttttttttttttttttttttttttttttttgtttttttttttttgtttttttttttttttttttccccaaaaggggtaaaggccccccgaaaaaccccaaacgaggggggaaaaaaacttccggggcaaaaaaaacccccaaaggggcaaaaggggccagggccaaaggggccaattcaaccccaccgcggagaaaaaaaagttttcaaaaaaaaacccaaggaacccggcaaaacctaggccccaaaaatgacccaaagaccaaaaaaaaggttggggccaacccaaaacaagggaaaccccccaaaaaaaaccaaaccccttaaaaaaaaaaccccgggggcccaaatttgagaaggccaaagaaaccaaagcgg

SEQ ID NO: 9227 - DNA, 412 bp, Bos taurus
  unsure (376): unsure at all n locations; Clone ID: 40-BOVMS1-020-Q1-E1-B12
cactgatgcagataaggaacagtggaaagcggttcacaaacaagtggttgacagtgcttatgaggtgatcaaactgaaaggctacacatcctgggccattggactgtcagtggccgatttggcagaaagtataatgaagaatcttaggcgggtgcatccgatttccaccatgattaagggtctctatggaataaaagaggatgtcttccttagtgttccttgcatcttgggacagaatggaatctcagacgttgtgaaagtgactctgactcatgaagaagaggcctgtttgaagaagagtgcagatacactttgggggatccagaaagaactgcagttttaaagtcttctaatgttgtatcacttcactgtctangctacacaggattttagttggaggttgtaattcata

SEQ ID NO: 9228 - DNA, 421 bp, Bos taurus
  Clone ID: 40-BOVMS1-020-Q1-E1-B8
gttctagatcgcgagcggccgcccttttttttttttttttttttttttagggtataaaaatttattacacatacagaatattaccactaacaaatgcagacaggcgaggacaccacggtacgttctagatcgcgagcggccgcccttttttttttttttttatgttgagtcatttattgtaagataatttacaaatatcttgctgtctttagtaatctgaacaatggaccaataaattcttctgacaaggacagcagtaagctaaaaacagaatcagcttgctgaattcttctttacagagccgcagcaccagagatgatttctatcagctccttggtgatgacagcttggcgggtgcgattgaatgtcagagtcaacttgtcaatcatttcagaagcattcttgctggcgttgtccaagg

SEQ ID NO: 9229 - DNA, 365 bp, Bos taurus
  unsure (287): unsure at all n locations; Clone ID: 40-BOVMS1-022-Q1-E1-B8
atgcgacgtcatagctcttctatagtgtcacctaaattcaattcactggccgtcgttttacaacgtcgtgactgggaaaaccctggcgttacccaacttaatcgccttgcagcacatccccctttcgccagctggcgtaatagcgaagaggcccgcaccgatcgcccttcccaacagttgcgcagcctgaatggcgaatgggacgcgccctgtagcggcgcattaagcgcggcgggtgtggtggttacgcgcagcgtgaccgctacacttgccagcgccctagcgcncgctcctttcgctttcttcccttcctttctcgccacgttcgccggctttccccgtcaagctctaaatcgggggctccc

SEQ ID NO: 9230 - DNA, 355 bp, Bos taurus
  Clone ID: 40-LIB188-001-Q1-E1-B12
acttcctggacaagattgatgtcatcaagcaggatgactacgtgcccagcgaccaggatctgctccgctgccgtgtcctgacttctggaatctttgagaccaagttccaggtggacaaagtcaacttccacatgtttgacgtgggcggccagcgcgatgaacgccgcaaatggatccaatgcttcaatgatgtgactgccatcatcttcgtggttgccagcagcagctacaacatggtcattcgggaggacaaccagaccaaccgcctgcaggaggctctgaacctcttcaagagcatctggaataacagatggctgcgcaccatctctgtgattctgttcctcaacaagcaaga

SEQ ID NO: 9231 - DNA, 429 bp, Bos taurus
  Clone ID: 40-LIB188-001-Q1-E1-B8
acatatgtgtgatttggcaaaaccaactttaacatgtatcttagaattacagaactttagaaatacagaaagggtcacaatcggacaccacaaattatccagcatgtttgttatgaattatttctcctccttcgatttcaatttgctcatatagccactttcgatcacagcggcattcggcaccacatttggtagaaccgcaggcaggacaagcatagaaacagcctaagcagtcttcatcgaggcagtcacagaggtccattccactgaaaatcaggagaccctggctatcgtagaccttactctttgccgggatcacctgtctgtctgaaccagctgttgcatttttggtaagccttcttttttctcttttaccagtttctggagcaaattcagtttgctttcctggatttgcaaattgtaatgacc

SEQ ID NO: 9232 - DNA, 388 bp, Bos taurus
  Clone ID: 40-LIB188-002-Q1-E1-B12
acagcctcagccaagtcccgttctccaagtcgacgattatctcgagtccgaatgttcactgttctcttactctgctctctctggccaaccacaaactgaaaattgtagtgtgcgagctgagcccggcggattctccggctgagggtcagtcccgagtcagcgtccaggtcaccgaccagtcccgcagctcgcaggctctgctgtgcctctctggcatattcctcctgctccgtccccacagggatgaccaccacctggaacggggacagccatagtggccatttccccccacagctctctgccagcactcccaacatcctttccacggaaccgagcacagcgcgatgaatgaagactggacgctctagggcccccaactgccccttgt

SEQ ID NO: 9233 - DNA, 385 bp, Bos taurus; identical to SEQ ID NO: 722
  Clone ID: 40-LIB188-002-Q1-E1-B8

SEQ ID NO: 9234 - DNA, 266 bp, Bos taurus
  Clone ID: 40-LIB188-003-Q1-E1-B8
catgctaacgtacgccatggcggccggatactttttctagaactcagatctaattttcaacatgtccacttcactgcgcgagaccatgattctaatcaggaccttgtcgcgagtgcccttgcccttcatggagtcatacagtctgtcagcaaaatacaggggcttattctgaatgcactgaaccagattcagaaaggcattttccaggtctcctttgacctccttcttgatgctctccagcatgtcgtaagggctgtagctcttgt

SEQ ID NO: 9235 - DNA, 360 bp, Bos taurus
  Clone ID: 40-LIB188-004-Q1-E1-B12
accggcctgaggggaggccctgggggccctggaggtggtggccagagacattaccgggggcacacggactgtgttcgatgcctggctgttcaccctgatggtgtgcgtgtagcctcaggacagacagccggcgtggataaagatggaaagcccctgcagcctgtggttcacgtctgggactccgagacgctgctgaagctgcaggagatcggactgggggccttcgagcggggtgtgggggccctggccttttcagttgtggatcaaggcgctttcctctgtgtggtggatgattccaacgagcacatgctgtcggtgtgggactgcagccggggcacgaagctggctgagatcaagagt

SEQ ID NO: 9236 - DNA, 230 bp, Bos taurus
  Clone ID: 40-LIB188-004-Q1-E1-B8
accattgtcagtggcttaaaaaaaaacaaaaaaaccaccagaaaggcagaagaaacccaatcctatgaaaaccctccgactctgttgccaggagtgcagggcgccagcctctcagtcggacttctccttctccttcatgtgcaagaagacgacgctgaagatgaagagcccgagcatcatggagaaggcgctggcgtagtaggggtaggccgaggggatgaagcgctcgt

SEQ ID NO: 9237 - DNA, 267 bp, Bos taurus
  Clone ID: 40-LIB188-005-Q1-E1-B8
acgatgagtacggcccctccatcgtccaccgcaaatgcttctaggcggactgttagctgcgttacaccctttttcttgacaaaacctaacttgcgcagaaaacgagatgagattggcatggctttatttgttttttttttgtcttttttgattttttttttttttggcgcttgactcaggatttaaaaactggaacggtgaaggtgacagcagtcggttggatcgagcattcccaaagttctacagtgtggccgaggacttgattgt

SEQ ID NO: 9238 - DNA, 416 bp, Bos taurus
  Clone ID: 40-LIB188-006-Q1-E1-B12
gcgatgggcgcgggatactcacctaacctcaccttcctttgctaacaccctttcagcgagtgttttcttcctctgcagaggaaaaacaaattggatttgaaaaatattctcaagtttcatagctgaaatttggggcaaatgtgtccagaccagctagcattctctataaatatcaacaaaagcaggcttggggattctgtgctttgggtccaaggatcctggcaagaaacacatgttgagattcctctagttcagaatttccagggggtggaggtagagccacctcaactgtcttcagcctcagctggctcaattgccaggcttagtggcaactgcccctgccatctcgaagcccatttttcacatttgccctctgctgtgccctcttgccagcttctgtctttggctacagcact

SEQ ID NO: 9239 - DNA, 392 bp, Bos taurus
  Clone ID: 40-LIB188-006-Q1-E1-B8
catgctacctaccgccatcggcccgggataccaagagatcatgaacgtcaagctggccctggacatcgagatcgccacctaccgcaagctgctggagggcgaggaaagccggttgaccggagatggagtgggagccgtgaacatctctgtggtcagttccacgggtggctctggtagcctgctgacctttggggggaccatgggcaacaacgccctgagattctccagcggtggagggcctgggaccctcaaggcctactccatgaggaccacatccgccacaagcaggagcccccgcaaatgagccctgggtgtggggagatacataccccctcctcccatagtcacaaggagacccccaaccctggtcccaacctcatcccaagaactgc

SEQ ID NO: 9240 - DNA, 396 bp, Bos taurus
  Clone ID: 40-LIB188-007-Q1-E1-B8
gccactgggcccgggatacatggtaagaagggccggcggatccgggaattgactgctgtggttcagaagagatttggcttccctgaaggcagtgtatagctttatgctgaaaaggtagccacaagaggactgtgtgccattgcccaggcagagtctctgcgttacaaactcctaggaggccttgctgtgcggagggcctgctatggtgtgctgcggttcatcatggagggtggggccaaaggctgcgaggtcgtggtgtctgggaaacttcgaggacagagggctaaatccatgaagtttgtggatggcctcatgatccacagtggggaccctgttaactactatgtggacaccgccgtgcgccatgtgctgctcagacagggtgtgctgggcatc

SEQ ID NO: 9241 - DNA, 404 bp, Bos taurus
  Clone ID: 40-LIB188-008-Q1-E1-B12
gccatgggcccgggatacttgttatggctcctacaagggaactggcaaaccaagtagccaaagacttcaaagatgtaactaggaaactcagtgtggcgtgtttttatggtggaacatcatatcaaagccaaattaatcatattcgaaatggtattgacatcttggttgggaccccaggtcgtatcaaagaccatctgcagagcggccgcttagatctttctaaactgcgccacgttgtgcttgatgaagtggatcaaatgttagatttaggttttgctgaacaagttgaagacattctccatgagtcctacaaaactgattctgaagacaatcctcagactttgcttttttctgcaacttgcccacagtgggtatacaaagttgcaaaaaaatatatgaaatcc

SEQ ID NO: 9242 - DNA, 457 bp, Bos taurus
  Clone ID: 40-LIB188-008-Q1-E1-B8
catgaacccgagcgccatggcggcgggatacttggtgaaaagggccggcggatccgggaattgactgctgtggttcagaagagatttggcttccctgaaggcagtgtagagctttatgctgaaaaggtagccacaagaggactgtgtgccattgcccaggcagagtctctgcgttacaaactcctaggaggccttgctgtgcggagggcctgctatggtgtgctgcggttcatcatggagagtggggccaaaggctgcgaggtcgtggtgtctgggaaacttcgaggacagagggctaaatccatgaagtttgtggatggcctcatgatccacagtggggaccctgttaactactatgtggacaccgccgtgcgccatgtgctgctcagacagggtgtgctgggcatcaaggtaaagatcatgctgccttgggacccgactggtaagattggcccta

SEQ ID NO: 9243 - DNA, 416 bp, Bos taurus
  Clone ID: 40-LIB188-009-Q1-E1-B8
acttgctgatgctctgtttggaggcccgggtggtctccacgttgcgggtgatggtgctgccgtctgccttccagaccacggtcacgctacccgggtagaagtcgctgatgagacacaccagggtggccttgttgccgttgagctcctccgtggagggcgggaacagggtgaccgagggtggggacttgggctgacccaggacggtcagtgtggtgccgctgccgaaaacatctgtgttaccagtgtgataagatgcacagaaataatctgcctcgtcctcagcctggagcgagctgatggtcagggtggctgtgttcccagacttggagccggagaatcggtcggggacccccgcggctcgattggtcgtacaagtccctgcaggcctggaaggatcacaagctgcacattgacca

SEQ ID NO: 9244 - DNA, 428 bp, Bos taurus
  Clone ID: 40-LIB188-010-Q1-E1-B8
acccccttttgtagctggatgagaactgtggggtcctgatccctctgcatcttcgctgggaaatttcccatcccttggaaatatcccttagaaaaaccttcatgtcccctaaggagaccactgacattgccaagttgaaaaatcccatagattgtaatcctgcaacctcgctggactctcagcctctgagcagtggtgggttcagtgttaaatgtgataaatactgtattttgtattgtttaaatggcatctcccacaaaatgtgaaaatggtcccggagaaggcagcttcctgtatgcagtgtgcttttaaaaaaaacaaaaaaaacaagtaacaactccttttgagaaacaatttctactttgaaatcatatcaatgaaaagatgtgtatgcacttataattttccaataaagacatgtaccatct

SEQ ID NO: 9245 - DNA, 418 bp, Bos taurus
  unsure (296),(318): unsure at all n locations; Clone ID: 40-LIB188-012-Q1-E1-B8
acttcgatgctctggattgccttccagaagatggggacccctttcccaaccctgaggactgtgcaccgagacgctgccgctatgatgggcaaaccgcagtgttcgggaccaattttcaggagaagctgagccaccagcactacctcctggtgggtgctggcgctgttggctgcgagctgctcaaaagctttgccctgatgggcctgggggccggggacggtggaggcgtgactgttgccgacatggaccatgtggagctctccaacctcagccggcaattcctcttcaggtcccangacattcataggaaaaaggcanaggtggctgcagagggcactcgccgcctgaatgcagacttgcaggttaccccactcaacctccagctggatcccactacagaggacatctttggggatga

SEQ ID NO: 9246 - DNA, 419 bp, Bos taurus
  Clone ID: 40-LIB188-013-Q1-E1-B8
accttcaggttaacaacgcacatccagaggccagctagctgagtggaaagtgttaatcgctcgccgggggcgggcacccacgatggtcagcagacgccctctctgctcgccgggggcaggcacccacgatggtcagcagagcccctctcagcctgacctggacaatgagcggcttccgagaagccaaaagctgttcatggctgagggctcgcttccttcaaatatttcaggggacaaaagacccgcgcggtggcacattttcagtaaccctggaaggcacgtcagcacagcacaaggtgcatcccatacggatctgtgaccgacatgcagtcctcaataaccagatgttacttcatgaccggccagcacacggacatgtgtagtaccgtgccttgtttttgacaactctcctggtcgtc

SEQ ID NO: 9247 - DNA, 424 bp, Bos taurus
  Clone ID: 40-LIB188-014-Q1-E1-B12
cggataccaaaatcaaaaaatggccaacctttcgcagctaatggagaatgaagtattcatggcctttgcctcctacacgacaattgtgctttcaaaaatgatgtttatgagcactgcaactgcattctatagactgacaagaaaggtttttgccaacccagaagactgcgcgggcttcggcaaaggagaaaatgccaagaagtatcttcggacagatgacagggtggaacgtgttcgaagagcccacttgaatgaccttgaaaacatcgtgccatttcttggtattggccttctgtattccttgagtgattcagacctctctaaagccaacctgcacttcagactctttgtccgaacaccaatctaacaaacgaatgcctatttgacaaccctttcccagccaaatcccgctttggcttttttc

SEQ ID NO: 9248 - DNA, 368 bp, Bos taurus
  Clone ID: 40-LIB188-014-Q1-E1-B8
acagcgccgaatctaccttcgaggggatcctcaaaaacccaagagcagagtctttgaacagcaggtccctctggccgggtggagagccaaaagggctggaagctccgagacttgttttttccaaatttctcctgcgccttgctgagaagcttccagatcaagtcttccttgccatccacacttcgggccacgacagcatgagaagggacctgggccaggtggcactccttgaacgcatccactggcgcccgactgttgttcaggcagagaagctcatactggtccctgtcagccttctctggcaagttctcaaacactgtcgtctctttaacaaaagccacgtctccagccccgtcctgcagacactt

SEQ ID NO: 9249 - DNA, 431 bp, Bos taurus
  Clone ID: 40-LIB188-016-Q1-E1-B12
actgtccctgtgggtcgtgtggagactggtgttctcaaacctggcatggtggtcacctttgctccagtcaatgtaacaactgaagtgaagtctgtagaaatgcaccatgaagcattgagtgaagcccttcctggggacaatgtgggctttaatgtcaaaaacgtgtctgtcaaagatgtccgtcgtggcaatgtggctggtgacagcaaaaatgatccacccatggaagctgctggcttcacagctcaggtgattattttgaaccatccaggccaaatcagtgctggatatgcacctgtgctggattgtcacacagctcacattgcttgcaagtttgctgagctgaaggagaagattgatcgtcgttctgggaaaaagctggaagatggccctaaattcttgaaatctggtgacgctgccatcgttgatat

SEQ ID NO: 9250 - DNA, 449 bp, Bos taurus
  Clone ID: 40-LIB188-016-Q1-E1-B8
catgatcccgtacgccatggcggccggatactattcatactgcgactcccatggtgcacagtctcacctggtaaatccatggttctcctagacccttttaagactgacattgagcttttaaagagcccacggaactgcatttcatgtgctggaaaccaggttccctcggagacgtgtgaaaccccacaaataaggcaaataaaggaatcattttctttctatggcaacttgctgggaaaacaaggaggcctggggagattctggattccccaagagctcagttggtaaagaatccacctgcagtgcatgagaccctggttcaattcctgggttgggggagattctgccttgaataatgtcagatccctgggtcagacatcatgaaagggggaaggagcagattgaaaatttttttcacaaactgcctttctgagcactgtgacctaact

SEQ ID NO: 9251 - DNA, 364 bp, Bos taurus
  Clone ID: 40-LIB188-018-Q1-E1-B12
actggagtgaggtgccattgccttctcccatatctattcacaagcctgcctaaatcattgacttctagccacctttgggatgccaatgcccacccacccttaccaggccgcacaggagagaaaacacttaccacaggaggtccgggtaaggaacaaggaactaacaagctcccaccaaccaggattctgcagaggtcaacaagaggtcagcaagagatgggagactgcagtccagaggtcctagcaacttccagcgagcagcaaagacccagcatagtcaaaacgaattcaatgttaccaagaccaaataaataaacggacagaagttcttggaacacatgactgaggttacgggtgaggcagt

SEQ ID NO: 9252 - DNA, 450 bp, Bos taurus
  unsure (401),(434): unsure at all n locations; Clone ID: 40-LIB188-018-Q1-E1-B8
acaccagggacgtgtggtgtgccgtgggacctgaggagcagaagaagtgccagcagtggagccagcagagcggccagaacgtgacctgtgccacggcgtccaccactgacgactgcatcgtcctggtgctgaaaggggaagcagatgccctgaacttggatggaggatatatctacactgcgggcaagtgtggcctggtgcctgtcctggcagagaaccggaaatcctccaaacacagtagcctagattgtgtgctgagaccaacggaagggtactgaaattgaaatggtgatttaaaaactcccaaaagcaaaactccaagaccagatggtttcacaggcaaattctattaaatatttagagaatacctatccttctgaaaattttccaaaaaatttcanaggaaggaacactccccaaaattattctgtgangggcctcacatcctga

SEQ ID NO: 9253 - DNA, 402 bp, Bos taurus
  Clone ID: 40-LIB188-019-Q1-E1-B8
actcctggttctgccgctcggtgtcagctcgcacgtcactcagctgggcttcgataccactgatcagcgcctggatctgcgccagctgggctccgaagcgagcctccgtttccgccagtgtgccttccaaggcggctttcatgctgagctgagactgcagctcgatctccagaccctggagggtgcgccgcaggtcggtgacctccgtcttgctgatctgcagctgctccgtgtggccagcgacctccctgttcagctcctcggtctggctgatgaaccaggcctcagcatccttccggttcttctcagcaatgacctcatattggcttctcatgtcactcaggatcttggctaggtcgatgcccggagcagaatccacctccagactgacctggccaccca

SEQ ID NO: 9254 - DNA, 408 bp, Bos taurus
  Clone ID: 40-LIB188-020-Q1-E1-B8
accttgaccattgtcctcagtctagacagaaggtctagtccctaccatagggaagctgaggggtagcaggagacccactgagacccaatcccaacactgaaacctgccaggctcccctttactcctcctcaggtccttccagcgggaggacctgcaagggcaagcccaccttggcttgattgcctggcaactgagaccctgctctggggaagggaagatgtcataggaagccctgcacagggctggggaggtggggcccatctctgagcaatcagagtaagaggaaagaatgtatgtgcctgatggagaaagggatcggcatgctgggaagtgagggacttatctggggtgctccttcctcctccgtttgtggtcacagacaggaagtcacaggatggcgccatcctt

SEQ ID NO: 9255 - DNA, 400 bp, Bos taurus
  Clone ID: 40-LIB188-021-Q1-E1-B8
acatttctaatttgtaacatacaaccatagtctgcaaaactattctgtgtatcactgacgcacatcccaaactgtttagttccagtctgtatacttcttcgaatcatcaatctgtatcttggctcaaatacatgaagagggcaaggcacagtgggataggccatagtgcaaacaaatattggaacattcttggtcaagtgtgagagttcagcagtttcttcatcatatattttttttctctcagacagctcatcaggcagatacttcactattaaatcttccaacagctgtgtgacacagtaccggctggggcatggcaggcggctctggcttcccacccttctgttcagagatgggggtggtgggcagtatttcatctttgggttccacaatgctcacg

SEQ ID NO: 9256 - DNA, 430 bp, Bos taurus
  Clone ID: 40-LIB188-023-Q1-E1-B12
ccatggcggcgggatacctgcccgagcggccgctcgaactggacacgttggctttgtttttaaaaatggaaaaatcacatccattgtgaaagacagttctgcagctagaaatggtcttctcacggaacataacatctgtgaggtcaacggacagaacgtcatcggactgaaggactctcagatcgcagacatattgtccacagctggaaatatagttactattacaatcatgcctgcttttatctttgaacacattattaaacggatggcgccaagcattatgaaaagcttgatggattacaccattcctgaggtttagaagtcacggcacagtggaaacttcccagaagttctcccgtttacgtctcgggcaactgacctttctattatgcacctgaagctttctaggagccagcgagcatatgctgca

SEQ ID NO: 9257 - DNA, 377 bp, Bos taurus
  Clone ID: 40-LIB188-023-Q1-E1-B8
catggccgccggatacctggtcataagtgacctgctcttctcagctctctggaccttcctgtggttcgttggcttctgcttcctcaccaatcagtgggcggccaccaagaagaacgatgtgcatgtagaagccgactcagcccgggcggccatcaccttcagcttcttctccatcttctcctggtgcgtgctggccttcctggcctaccagcgctacaaggctggagtggacgaattcatccagaactacgtggaccccactccggacccgagcacggcctacgcctcctacccaggcgtgcctgcggacacctaccagcagccgcccttcacccagaacgccgagagcaccgagggctaccagccgccccctgtgt

SEQ ID NO: 9258 - DNA, 368 bp, Bos taurus
  Clone ID: 40-LIB188-024-Q1-E1-B8
actgcagacacaactacggggtcggtgagagtttcactgtgcagcggcgagtggcacctatagtgactgtgtatcctgcaaagacccagcccctgcagcaccacaacctcctggtctgctctgtgaacggtttctacccaggcaacattgaagtcaggtggttccggaatggccatgaagaggaggctggggtgatctccacaggcctgatccagaatggagactggaccttccagaccatggtgatgcttgaaacagttcctcagagtggagaggtctacacctgccaagtggagcaccccagccagacaagccctatcacagtataatggagggcacggtctgactctgctcagagcaagatgatg

SEQ ID NO: 9259 - DNA, 404 bp, Bos taurus
  Clone ID: 40-LIB188-025-Q1-E1-B8
actgtcagactgcgcggggccagtgcacatctcaggcgaatgcagaactgcgtctgggtttagaaaggcagcaatcgttacattttggcttttattctagatgcttaacttacttaaggcgacagttcaagcgtagtaagtgaaggtagataaaatgtaatgacaatcgataagtctcttgcagctacacacactgtctaataatgcttacatggaatgaaaccagtgttacttagctggtgttacacacacatagaactgaagaaaagtaattctaaatgcactatggtgacagtaaaaatgcaaatacagcacagaactaagcactgcttgatatcaaggtgatggttctaacagagctgagcctggagcaatcattctactcacaaggctgtgaaagcatc

SEQ ID NO: 9260 - DNA, 403 bp, Bos taurus
  Clone ID: 40-LIB188-026-Q1-E1-B12
acatgtcatctgactcaggctgcccatttctctgccactccacggcgatgtagtctgggtagaagctggtgaccatgcaggtgaggctgaccgtgcttttgctgagctcttcctggggtggggccaggacatacacctgcggctcccgggccggccctttggtcctggagatggtcctcacgatgggggccgggaggccttcgttgtggaccttgcacttgaactcctttcctccagtccagtcctggtgctggatgcgcagggcgctgaccacgcggtaggtgctgttgaactgctcctctctcggcttcgtcgtggctgtgtttacctccacgtcgtccacgaaccaggagaacttcacctcggggtcatcgtggcccacgtccaccaccacacacgtgac

SEQ ID NO: 9261 - DNA, 317 bp, Bos taurus
  Clone ID: 40-LIB188-027-Q1-E1-B12
actcctaagtctcgctgcggccgtgctgctggcggctctggatctcggcgatctccgcccggaggcgctcgatctcttccttctccgaggcaatctgtcggcgcaggaactgctccatggctaggagctcctcctgctcagtcaggatctcattctcctgggcaagaagaatatttatgacttcctcgttttcattcatttcttctttggaaacatcctcttttgaaagactggctatttcttgggcaatcttggtttcacattcttgtcttttagcttctctcagttttctcttgagggctgtcagaattctttgt

SEQ ID NO: 9262 - DNA, 364 bp, Bos taurus
  Clone ID: 40-LIB188-027-Q1-E1-B8
accactacatgggcggtttctacgggggctgcaatgaagccctgatgaagcttgagctggtccatcaggggcccatggccgtcgcctttgaagtctacgacgacttcctccactaccgcaagggcgtctaccaccacacggggctgcgagaccctttcaaccccttcgagctgaccaatcatgctgtgctgctggtgggctatggcactgacgcggcctctggactggattactggattgttaaaaacagctggggcaccagctggggtgagaacggttacttccgcatccgcagaggaaccgacgagtgtgcgatcgaaagcatagcgctggcggccaccccgattcctaagttgtagggtgt

SEQ ID NO: 9263 - DNA, 279 bp, Bos taurus
  Clone ID: 40-LIB188-028-Q1-E1-B8
accgcgaggtcagcgccctgcccatccagcaccaggactggactggaggaaaggagttcaagtgcaaggtcaacaacaaaggcctctcggcccccatcgggaggatcatctccaggagcaaagggccggcccgggagccgcaggtgtatgtcctggacccacccaaggaagagctcagcaaaagcaggctcagcgtcacctgcatggtcaccggcttctacccacaagatgtagccgtggagtggcagagaaaccggcacactgaatcggtggacaagt

SEQ ID NO: 9264 - DNA, 173 bp, Bos taurus
  Clone ID: 40-LIB2809-001-Q1-E1-B12
gggatacaggtcaatcgcgctgtgcatcagcactccatccgtgatggagaacgcacagatgtggttcaacatgacgtcgttgggctcagggagcatacccggttgacatgaaatgcgcgtgtccttgtttatgactacttgggggatatgtggtgggaggataggaggcgctt

SEQ ID NO: 9265 - DNA, 191 bp, Bos taurus
  Clone ID: 40-LIB2809-002-Q1-E1-B8
actgttggcttttctggagctgagttggagaatcttgtgaaccaggctgcattaaaggcagctgttgatggaaaagaaatggttactatgaaggaactagagttttccaaagataaaatcctaatgggccctgagcgtaaaagtgtgggaattgataacaaaaacaaaacgatcacagcgtatcatgaatc

SEQ ID NO: 9266 - DNA, 474 bp, Bos taurus
  Clone ID: 40-LIB2809-003-Q1-E1-B8
acagtattctttaaaattttctttttaaattgaaagccaacaactctgcctttatgatgctaagctcatgttcttatttcttctcctatcttctttctcttctgttcccattatccttccctttgttttgtccctgtcaccttcctttctccttctcctcattgccccccaggcaagcaggtggtcagtcattggtgggtttccagcttccaaagcctagacaaccctgctgtagtctcaaactagtggtctttgccccggctgaccctttccttgagctgtctgagctttaaggtggatggctcaagctagagatatgacagaatcttctgggaagggccttgatgatcttcagtccagacttttgctaaatgaaatggaaaaataactttattttggcaccaaactgaaaaaacaggtcaattctcaggggagagagtcagcatgcatggtgtgattgataaataggatgag

SEQ ID NO: 9267 - DNA, 436 bp, Bos taurus
  Clone ID: 40-LIB2809-006-Q1-E1-B12
cggatactctaagtcaggaaatattaagacgaccaatagttgcctgtgaacttggcagactttacaacaaagatgcagtcattgaatttttattggacaaatcttccgaaaaggctcttgggaaggcagcctctcacattaaaagcattaagaatgtgacagaactgaggctctctgacaaccccgcctgggaaggcgataaaggaaacactaaaggtgacaagcatgatgacctccagcgggcacgtttcatctgccctgtcgtgggcttggaaatgaacggccgacacaggttttgcttcctccggtgcagtggttgcgtgttttctgagcgagccctaaaagagatcaaagcagaagtttgtcacacgtgtggggctgccttccaagaggatgacgtcatcgtgctcaatggcaccaaggaagacgtggaagt

SEQ ID NO: 9268 - DNA, 404 bp, Bos taurus
  Clone ID: 40-LIB2809-006-Q1-E1-B8
acagcagaaaggcctgaatgggcatatctctctggggatagggcactgctttctggggaacaggcaggactttggactgagaaagggacagcacggactgaggaggaaacatgacagttggaggaagaggctggtgaggctggtgcatccaagactggagcagaggcagaggaaggtgcagattttcaacatcagtgagagtcaggctctggctttcagtaaagggctcaactggatatttagggaagggcatttctttgtgcttaggagccatagcctccttcactttggagactcccattacttcaggctgaaggaaaggcggcaccaccacaggggtttgagtaagaggagggatgttttgtgggacgctgttagggatgggcccagggaagggatagact

SEQ ID NO: 9269 - DNA, 464 bp, Bos taurus
  Clone ID: 40-LIB2809-007-Q1-E1-B8
tgctccagaagccatggccgggcgatactacctcggaatgatgcagtggatcattagaaaggttggatgggtaatgctagtgactatgggaacatctcctgttgaatctgtagtagcttctggcaatatatttattggacaaaccgagtctcctctgctggtccgaccgtatttaccatacgtcaccaagtctgaactccacgcgatcatgaccgctgggttctctaccattgctggaagtgtcttaggtgcatacatctcttttggggtttcatcctctcacttgttaactgcttcagttatgtctgcacctgcggcattggctatttctaaacttttttggcctgagacagaaacacctaaaataaacctcaagaatgccatgaaaatggaaagtggtgattcaaggaatctcctagaagctgcaacacagggagcatcctcatccatttccctggtggcga

SEQ ID NO: 9270 - DNA, 415 bp, Bos taurus
  unsure (388): unsure at all n locations; Clone ID: 40-LIB2809-008-Q1-E1-B8
acccaactcatctgtgatcctatggatatagccctccaggctcctttgttcatggaattctcaaggtaagaatactagagtgggttgccatgccctcctccaggggattttcccaacccagtgatcaagcctgagtctcctgcattggtagaggggttccttaccactagcaccacctgggaagccccatttgttttctgatttttgcgaattaaatcagaatattggatgaagggaaaaatgatgtttctgatactagccacatttaccgagggcttacttcgcaattcaaaatggctcagacggtaaaccgtctgtctacagtgcgagagacctgggttcgactcctgggttgggaaaatcctctgcagaaggaaatgttgcctgnaaaatcccatgaccagaggagcctggt

SEQ ID NO: 9271 - DNA, 372 bp, Bos taurus
  unsure (279): unsure at all n locations; Clone ID: 40-LIB2809-009-Q1-E1-B8
cgtatgtgtatgatacataaggttatgtattaattgtagccgcgttctaacgacaatatgtacaagcctaattgtgtagcatctggcttactgaagcagaccctatcatctctctcgtaaactgccgtcagagtcggtttggttggacgaaccttctgagtttctggtaacgccgtcccgcacccggaaatggtcagcgaaccaatcagcagggtcatcgctagccagatcctctacgccggacgcatcgtggccggcatcaccggcgccagaggtgcngttgctggcgcctatatcgccgacatcaccgatggggaagatcgggctcgcgacttcgggctcatgagcgcctggttcggcgtgggtatggtg

SEQ ID NO: 9272 - DNA, 363 bp, Bos taurus
  Clone ID: 40-LIB2809-010-Q1-E1-B12
cagcagaaaggcatgaatgggcatatctctctggggatagggcactgctttctggggaacaggcaggactttggactgagaaagggacagcacggactgaggaggaaacatgacagttggaggaagaggctggtgaggctggtgcatccaagactggagcagaggcagaggaaggtgcagattttcaacatcagtgagagtcaggctctggctttcagtaaagggctcaactggatatttagggaagggcatttctttgtgcttaggagccatagcctccttcactttggagactcccattacttcaggctgaaggaaaggcggcaccaccacaggggtttgagtaagaggagggatgttttg

SEQ ID NO: 9273 - DNA, 300 bp, Bos taurus
  Clone ID: 40-LIB2809-011-Q1-E1-B8
gcatgatccggtagcgcatgggcgcgggatacagtggcaaactcacaagggagaagagtttccatccatgtcagagtccaggaatcctgatgaagaaggtttgtttactgtgagagcttcagtgatcatcagggacacctctatgaagaatgtgtcctgctgcatccggaacctccttcttggccatgagaaacaaatcgaggtttccataccagcctccttcttcccaaggctgactccctggatggtggctgcggctgtcatcatggtggtcttaggacttctcacacctgggtccac

SEQ ID NO: 9274 - DNA, 426 bp, Bos taurus
  Clone ID: 40-LIB2809-012-Q1-E1-B12
acaaagaagaaaaacgaggtagccacggggcagaggagttccaggaacagaaagaggacagaagcagcaaagacagcaggtgttcacaacttctcacagagccactgatccagcttctcagaacagagtgctttatgggccaaccagtagttaattcctactttatccagaatcttcttgacacacataatgtcatcagtaagatcatcatccaggaacttgtcacaggagatgttacagatgttgcttgagtgagggttctggtcgtctttgcaccaaattttattatttatctggaagagtccatattctgtgctgtcattgttttgtacctgcccgggcggccgctcgaacaagctggacgccaactgcatctctttccgccatttcaacatcagtggcctgcagctgtgcggcatgacacag

SEQ ID NO: 9275 - DNA, 121 bp, Bos taurus
  Clone ID: 40-LIB2809-012-Q1-E1-B8
gccatggcggcgggataccccagctggaaattgttcccaatagtgctgaggaacgacttcacagtatgaaagagggaatccatgcccagcagaaagaacctatgatacgagtgaatcagga

SEQ ID NO: 9276 - DNA, 405 bp, Bos taurus
  Clone ID: 40-LIB2809-013-Q1-E1-B8
acggctctgagcccagtctggccagccgtctccggaacctcagcagcccgctgggcctcatggctgccaaccaagaagcctgggaccacgggctggcctacctgccctttaacaacaagaagccgagcccctgtgagttcatcaacaccaccgcccgcgtgccctgtttcctggcgggagattttcgagcctcagagcagattctgctggccactgcccacaccctccttctccgggagcacaaccggctggccagagaactaaagaaactcaaccctcactggaatggagagaagctctaccaggaagcccggaaaatcctgggagccttcatacagatcatcacctttagggactacctacccattgtgctaggtagtgagatgcagaagtggatcccgccct

SEQ ID NO: 9277 - DNA, 434 bp, Bos taurus
  Clone ID: 40-LIB2809-014-Q1-E1-B8
acctcacatagggaataacctttgtcttaggttgaatccatggcttcatagctttctgatgctgataaacagtcttgagatactggggcaaggcgaatttctggtaacgctggctgatttttttcagaaaatttaggcgattcttttcttcttcagtcagtttagttttcttagtgaatacttctgttgattccatgtcaacggtcttctttgaattttcctcactggtggagagctgctctctgttcagagtgggagtaatgggaacagcatttctcttaacctgatcccatgggttcaaaacaattggaccttgatacagatactggagatactgggggaacttctgataaaactgattgatttcattcagtgctttctggtagtgcttatcgtccacagtaatcttaacttcctctgtggcaacttcagca

SEQ ID NO: 9278 - DNA, 246 bp, Bos taurus
  Clone ID: 40-LIB2809-015-Q1-E1-B8
actccttgaccatggcggccagcgacatctccctgctggacgcccagagtgcccccctgagagtgtatgtggaggagctgaagcccacccctgagggcgacctggagatcctgctgcagaaatgggagaatgatgagtgtgctcagaagaagatcattgcagaaaaaaccaagatccctgcggtgttcaagatcgatgccttgaacgagaacaaagtccttgtgctggacaccgactacaaaaagt

SEQ ID NO: 9279 - DNA, 247 bp, Bos taurus
  Clone ID: 40-LIB2809-018-Q1-E1-B12
ggtgtgtctccatatgcaccgcccgcctgacgaccatcacagttgtcgacactcatttcatatgtggcgatgtccgataggactattggcatactacgcgtttctccctgtatcctctctcatgctctctcctgttcagactttgccgcttaatgggaacctgtcggcctttctctcttcccgaaggcttggtgctttctcatctctcacactgtaggtacctcactccagtgtacgtcgtttcact

SEQ ID NO: 9280 - DNA, 369 bp, Bos taurus
  Clone ID: 40-LIB2809-019-Q1-E1-B8
gggataaagcaaaaaggcctgaatgggcatatctctctggggatagggcactgctttctggggaacaggcaggactttggactgagaaagggacagcacggactgaggaggaaacatgacagttggaggaagaggctggtgaggctggtgcatccaagactggagcagaggcagaggaaggtgcagattttcaacatcagtgagagtcaggctctggctttcagtaaagggctcaactggatatttagggaagggcatttctttgtgcttaggagccatagcctccttcactttggagactcgcattacttcaggctgaaggaaaggcggcaccatcacaggggtttgagtaagatgagggatgttttg

SEQ ID NO: 9281 - DNA, 336 bp, Bos taurus
  Clone ID: 40-LIB2809-021-Q1-E1-B12
gggatacatatcactgacagcacagtatatggactcgtccagataaatactaggatttggtgcatgtacgaccagttccctcactcacgcaacatctgtaacatctcctgtgatacgttcctgtatgatgatcttactgatgacattatgtgtgtcaagatgattctggatactgtaggaattaactactggatggcccatatagcactctgttctgataagctggatcagtggctctgtgataagttgtgaacacctgctgtctttgctgcttctgtcctctttctgttcctgtaactcctctgcatcgtggcgacctcattttgcgtctctgtc

SEQ ID NO: 9282 - DNA, 378 bp, Bos taurus
  Clone ID: 40-LIB2809-022-Q1-E1-B8
gccatgggcgcgggataccccagcaggaaattgttcccaatagtgctgaggaacgacttcacagtatgaaagagggaatccatgcccaacagaaagaacctatgataggagtgaatcagcttttcagacaattctaccagctggatgcctatccatctggtgcctggtattacgttccactaggcacacaatacactgatgccccatcattctctgacatccctaatcccattggctctgagaacagtgaaaagactactatgccactgtggtgaagagtcaagtgaattctgagggactccacagttatggtctttgatggttctgaaaattccatgctctacatgtcttttcatctatcatggtcaaacattctat

SEQ ID NO: 9283 - DNA, 381 bp, Bos taurus
  Clone ID: 40-LIB2809-023-Q1-E1-B8
cgccgtcggccgggatacaacagaaaggcctgaatgggcatatctctctggggatagggcactgctttctggggaacaggcaggactttggactgagaaagggacagcacggactgaggaggaaacatgacagttggaggaagaggctggtgaggctggtgcatccaagactggagcagaggcagaggaaggtgcagattttcaacatcagtgagagtcaggctctggctttcagtaaagggctcaactggatatttagggaagggcatttctttgtgcttaggagccatagcctccttcactttggagactcccattacttcaggctgaaggaaaggcggcaccaccacaggggtttgagtaagaggagggatgtttttt

SEQ ID NO: 9284 - DNA, 417 bp, Bos taurus
  Clone ID: 40-LIB2809-026-Q1-E1-B12
acattggaggccaagaccacttctacctggagactcactgcaccattgctatcccgaaaggcgaggaaggggagatggagctctttgtgtccacacagaatgccatgaaaacccagtcctttgttgcaaaaatgttgggggttccagtaaaccggattttggtccgagtgaagagaatgggaggaggctttggagggaaggagacccggagcaccctggtgtctgtggctgtggccctggctgcatacaagactggacacccggtgcgctgcatgctggatcgtaatgaggatatgctgataactggcggcagacaccccttcttggccagatacaaggttggcttcatgaagacagggacgattgtggctctagaggtggatcactacagcaatgccgggaacagccgggaactct

SEQ ID NO: 9285 - DNA, 163 bp, Bos taurus
  Clone ID: 40-LIB2809-028-Q1-E1-B12
cgtatgtgtatgatacataatgttatgtattaattgtagccgcgttctaacgaacataagttcaagcctaaattggttacaaccgggttaattgagcaaaacccaacaaccccccccttaaatggcgttaaaatccggttgggttggccaaacttccgaattt

SEQ ID NO: 9286 - DNA, 431 bp, Bos taurus
  Clone ID: 40-LIB2809-028-Q1-E1-B8
cgggataactggacctggaaagcagtggccatcggaatgaagtcagacttcactaccgctccggcagccaccaccctcacacagaagtgtttccttacattttggctgatgataagtggcacaagctctccttagccatcagtgcctcccacttgattttacatatcgactgtactaaaatatatgaaagagttgtggaaaagccttccacggacttgcccctgggcacttcattttggctgggacagagaaataatgcacatggatattttaagggtataatgcaagatgtgcaattacttgtcatgccccaaggatttattgctcagcgcccagatcttaatcgcacctgtccaacatgcaatgactttcacggactcgtgcagaaaatcatggaactgcaggacattttagccaaaacatcagccaag

SEQ ID NO: 9287 - DNA, 390 bp, Bos taurus
  Clone ID: 40-LIB2809-029-Q1-E1-B12
acaagctatttttttttttttttttttttttttgccttaaaatgtaatttattgaaaagaagaaagacaaaatctcagttaatgcacacaattatttgatatgatggcacttacaggagaagtgattcaaaggcttttaaaacattttccatacagaaatttaatgaagactttaattccctttgactcagtggcctttataccagcatgatactactggaatttaggtaacaagctgttaggacaatttcacttaaggatgttacactatctaaaatacagtagagaattcaagaagaaagagtgccttcaatttgagattgccctattctaaaacagcagttgaagcctttggatagaatggtttgacatgatagatgaaaagacatg

SEQ ID NO: 9288 - DNA, 393 bp, Bos taurus
  unsure (353): unsure at all n locations; Clone ID: 40-LIB2809-030-Q1-E1-B8
cgccatgggcccgggatacagcaaaaaggcctgaatgggcatatctctctggggatagggcactgctttctggggaacaggcaggactttggactgagaaagggacagcacggactgaggaggaaacatgacagttggaggaagaggctggtgaggctggtgcatccaagactggagcagaggcagaggaaggtgcagattttcaacatcagtgagagtcaggctctggctttcagtaaagggctcaactggatatttagggaagggcatttctttgtgcttaggagccatagcctccttcactctggagactcccattacttcaggctgaaggaaaggcggcaccaccacangggtttgagtaagaggagggatgttttgtgggaagctgtt

SEQ ID NO: 9289 - DNA, 408 bp, Bos taurus
  Clone ID: 40-LIB2809-031-Q1-E1-B12
acctctattacaagctctgcccctgctccttcccctcactgacatagcccctcttccctgaagctatgaacatgtgagatacttgtagacacgcaagcacctggcaagtttgctttcaagagcctgctaatgaatgaggaaagtcagtccaggccaggtgtcagagcccccaccatgagaaaaagaggaatacaaatgactgagggtattaaacaaggcaaagctcttcattttcgccaaaactagtcaggcctggagactacgtgatttgtttgaagacagaaccagcagagctgcagggtgactggaagccatcgccagagggaagaacacaagcttcaacgccagatgcccagctgagctctcagaacagccgagccaggaggacaggcaggagaaccaggggcc

SEQ ID NO: 9290 - DNA, 316 bp, Bos taurus
  Clone ID: 40-LIB3057-001-Q1-K1-B8
gccccacgaacgtgcggtgcgttatgggcgagggggcggccgcctttccggcggcgccccgtgtcccgggacgaagggctctccgcaccggacccctgtcccgactcgcggcgggggcgcgccgcgccgcgccccgggggacgcgggcgacggcccgccggcggctacggcggttgaccggctatacgaggcctaccgaggctgccgaggcgctgccgtatcgatccgcctgggcaggattctgacgtaaaggcgtccaagcataatcccacagatggtagtttcgacccattggctcctcatacgatcgcatgca

SEQ ID NO: 9291 - DNA, 344 bp, Bos taurus
  Clone ID: 40-LIB3057-004-Q1-K1-B8
gccgcgcgcgtcctccatggaggccggagaggagccgctgctgctggccgaactcaagcccgggcgcccccaccagtttgattggaagtcgagctgtgaaacgtggagcgttgccttctccccggatggttcctggtttgcctggtctcaaggacactgcattgtgaagctgatcccctggccgctggaggagcagttcatccctaaagggtttgaagccaaaagccgaagcagcaaaaatgagacaaaagggcgaggcagcccaaaggagaagacactggactgtgggcagattgtctggggcttggccttcagcccatggccttttccacccagcaagaaac

SEQ ID NO: 9292 - DNA, 396 bp, Bos taurus
  unsure (384): unsure at all n locations; Clone ID: 40-LIB3057-005-Q1-K1-B12
ggcctgacgggccagtacgttgaactgaatgcactgcaggaagagcttgaaccatttggtctggtcattctgggcttcccctgcaaccaatttggaaaacaagaaccaggagagaactcggagatcctagccaccctcaagtatgttcgaccaggtgggggcttcacccccaatttccaactgtttgagaaaggcgatgtgaatggggagaaagagcagaagttctacacgttcctgaagaactcctgtcctcctacctcggagctcctaggctcacctgaccgccttttctgggaacccatgaaggtccatgacatccggtggaactttgagaagttcctggtggggccagacggcatccccatcatgcgctggtaccaccgnaccacggtcaac

SEQ ID NO: 9293 - DNA, 431 bp, Bos taurus
  Clone ID: 40-LIB3057-005-Q1-K1-B8
cacccctgtacttatttgtcatgagtatattttcagagtttggacttaacattgagctaggaaggattaagtctttgaactgaatgtattttgcagtcctgctttggacaatagtaaatgtaggagcactgtagaagtcttacgaaagagggagtgaagggagaagattgacctgattctatactggttttttagacttgtaacatacatgacttggaataaaatctgtatgcacgggcattacccctcaggtcttaggaaataagtcctgaatgcatgtgcttaccaactaacactctggactttgtcctttgtgtgtgattatcccagcaccccacatttatcactgttccccactctgttgttcagcataaggaaatgtacagctatctgatgggtgagtgaaatagtagccgctgacatgtcatgag

SEQ ID NO: 9294 - DNA, 302 bp, Bos taurus
  Clone ID: 40-LIB3057-007-Q1-K1-B8
cggacgcgtgggttttggtgtggtcaggcctctggttgctagatttctgcctcgggggcgcattatttcccgcctggggatggcgacctacacctgcaacacctgccgggcggtgttggaagatgcggaggcgcagcgggtccactacaagacggactggcaccgctacaacctgaggcgcaaagtggccggcatggcccccgtcagcctcgagggcttccaggagcgggtgcgggcacagcgggccctggcggagccagagagcaaaggcgcggtcacctactgcaccgtttgcagtaaga

SEQ ID NO: 9295 - DNA, 330 bp, Bos taurus
  Clone ID: 40-LIB3057-008-Q1-K1-B12
gccccggtggcgggtggaggtcttcctcccgcgggggcccgggcacccggggggggggcggctgtggagactctggacgcgagccgggcccttcccgtggatcgccccaactgctgcgggcgtcgcggccgcacaaggggagcccggaaggcgccaacacgccgcggtcgctcgcatctctatgacaaccgggtctatcgtgaaatccgattgaagatcaccgagctgaaaagcttgcaagcatcgtagctgtctcataatctacttacaggggaaatcccagcacggattgtaaatataactcatctccacgaggtcgatatgtggcat

SEQ ID NO: 9296 - DNA, 364 bp, Bos taurus
  Clone ID: 40-LIB3057-009-Q1-K1-B12
ctttcaatagatcgcagcgagggagctgctctgctacgtacgaaaccccgacccggaagcaggtcgtctacgaatggtttagcaccaggcgccccacgaacgtgcggtgcgtgacgggcgagggggcggccgcctttccggccgcgccccgtgtcccgggacgaagggctctccgcaccggaccccggtcccgacgcgcggcgggggcgcgccgcgccgcgccccgggggacgcggtcgacggcccgtcggcggtgacggcgggggaccggctatccgaggccaaccgaggctcccgcggcgctgccgtatcgttccgcctgggcgggattctgacttagaggcgttcagtcataatcccacag

SEQ ID NO: 9297 - DNA, 302 bp, Bos taurus
  Clone ID: 40-LIB3057-010-Q1-K1-B8
attcaacgggaaagaactgaattagagcatcaaccctgatgaggctgttgcatgtggtgcagctatacgagccgccattttgtctggagacaaatctgaaaatgttcaagacttgctgctgttggatgtcactccactttcccttggaattgaaactgctggtggagccatgactgtcctcatcatgcgccatactaccatttctaccaagcagacgcacacttttactacgtactctgtcaaccagcctggtgtgctcattctattgtatgaaggtgagcgtgaaattttcaaggataaca

SEQ ID NO: 9298 - DNA, 419 bp, Bos taurus
  Clone ID: 40-LIB3057-011-Q1-K1-B12
atgcatgcacgcacgcgtgggcggacgcgtgggcaatttaccaattatgaccagatgttatccgagagagcacgtgccaatggcaccataccccagctgtccaaaaaggcctccgttatggaataattctttttattatctccgaagtactattctttaccggatttttctgagctttctaccactcaagcctcgcccccacccctgaactaggcggctgctgacccccaacaggcattcacccactaaaccccctagaagtcccactgctcaacacctctgtcctattggcttccggagtttctattacctgagcccatcatagtttaatagaaggggaccgaaagcatatattacaagccctatttatcaccatcacattatgagtctacttcacactactacaagcctcagaatac

SEQ ID NO: 9299 - DNA, 416 bp, Bos taurus
  Clone ID: 40-LIB3057-011-Q1-K1-B8
tgttgagcttgtgcggactcgtgggttcttgctatcatcatcaccatgtacagcatacggtcttcgcagaaagcctggtcccgcctgctcctgctgctggtggtgtcaaatctactcttgtgccaaggtgtgggctgcacccccgtctgttctaatgggcctggcaactgccaggtatcccttcgagacctggatgaccgggcagtcatggtgtaccactacatccatgacctctgctcagcaatgttcgacgaattcgataaactgtatgcccagtgcacaaggttcattaccatggccctcaacggctgccatacctcctaccttactacccctgaagatattgaacaagcccaacagacccaccatgaagtccttatgagcttgattcttgggttgctgctctcctggaatga

SEQ ID NO: 9300 - DNA, 398 bp, Bos taurus
  Clone ID: 40-LIB3057-012-Q1-K1-B12
cgaatttgataaacggtatgcccagggcaaagggttcattaccatggccctcaacagctgccatacctcctcccttcctacccctgaagataaagaacaagcccaacagacccaccatgaagtccttatgagcttgattcttgggttgctgcgctcctggaatgaccctctgtatcacctagtcaccgaggtacggggtatgaaaggagccccagatgctatcctatcgagggccatagagattgaggaagaaaacaaacgacttctggaaggcatggagatgatatttggccaggtaattcctggagccaaagagactgagccctaccctgtgtggtcaggaactccgtccctgcaaactaaggatgaagatgcacgttatcccgtttttataacct

SEQ ID NO: 9301 - DNA, 438 bp, Bos taurus
  Clone ID: 40-LIB3057-012-Q1-K1-B8
cactgagtggttcttcggatcatgtctggtggctccgcggattataacagcagagaacatggcggcccagagggaatggaccccgatggtgtcatcgagagcaactggaatgagattgttgataactttgatgatatgaacttaaaggagtctcttcttcggggcatctatgcttatggttttgagaagccatcagctattcagcagagagctattattccatgtattaaagggtatgatgtgattgctcaagctcagtcaggtactggcaagacagccacatttgctatttccattctggaacagttggagaatgagttcaaggagacccaagcactagtattggcccccaccagagaactggctcaacagatccaaaaggtaattctggcacttggagattatatgggagcaacttgtcatgcctgcattggtgga

SEQ ID NO: 9302 - DNA, 376 bp, Bos taurus
  Clone ID: 40-LIB3057-013-Q1-K1-B8
ccactcatccggagccctccaacatgaacctcctttgtttcaaaacgataaagaaagccaccctgggcggcatttttaaatagtacactcgccttatcaattacttccacaccaacaatcttatctactatgaaatcaccattattcccatcaagaagcttctcaataaaatctcatactacatcacacatctaattaatcttattcaaatatacccttttaaaagtatctccatcaaactacacgaatattatagagatatcatacacaattaacatccttaagtctcatccctttatcattaaatcattgaagtacatcctaacactaataaaattctcaaacttctatactttaacaatttttccaaccttca

SEQ ID NO: 9303 - DNA, 308 bp, Bos taurus
  Clone ID: 40-LIB3057-014-Q1-K1-B8
taggcctgaagcccagtgccaagaaaagacgccggtttctcattaaagcccctgagggtgctgcaaggaaagacaagaatttgccaaacgtgattatcaatgagaagcggaacacccatgcagcagctcatcaggtgcaggtgcttccacatccattcacacaccatcaacaatttgaaaggaccatccagacccccgtaggatctacatggaacacccagagggccttccaaaagctgaccatgcccaaggttgtcaccaagccaggccatatcattaagcctatcaaagcagatgatgtgggccta

SEQ ID NO: 9304 - DNA, 394 bp, Bos taurus
  Clone ID: 40-LIB3057-016-Q1-K1-B8
cggacgcgtgggcttctctgagctttatagctttgtaatgcatgcttggctcgaatgggtttgccagggaatggatcattaagaaccatctcagaaatggataggatgaatgtgggcttagcagttgttgttgtagatgattctgcaattcaggagcttaaggtaagtgtcaatcttgcttgaatccctgcgcaggcagtggagcaggttataaaaagcggaataacgtgcatcttcatccttagtttgcagggacgggagtcctgaccacacagggtagggctcagtctctttggctccaggaataacctggccaaatatcatctgagctttatagctttgtaatgcatgcttggctctaatgggtttcatcttaaataaaaacagactctgt

SEQ ID NO: 9305 - DNA, 310 bp, Bos taurus
  Clone ID: 40-LIB3057-018-Q1-K1-B8
gccagggtgtggtctccacccccgtctgttccaatgggcctggcaactgccaggtgtcccgtcgagacctgtttgaccgggcagtcatggtgtcccactacatccatgacctctcctcggaaatgttcaacgaatttgataaacggtatgcccagggcaaagggttcattaccatggccctcaacagctgccatacctcctcccttcctacccctgaagataaagaacaagcccaacagacccaccatgaagtccttatgagcttgattcttgggttgctgcgctcctggaatgaccctttctatcacct

SEQ ID NO: 9306 - DNA, 362 bp, Bos taurus
  Clone ID: 40-LIB3057-019-Q1-K1-B12
ggccgctgaacatcctcgccccggcgcagcgggagccgcccgaggcagcttccccgtgacggagcctcagcctgcctggaagatgccgagactgtgcagcagtcgttcgggcgccctgctgctggccttgctgcttcaggcctccatggaagtgcgtggttggtgcctggagagcagccagtgtcaggacctcaccacggaaagtaacctgctggcgtgcatccgggcctgcaagcccgacctctccgccgagacgccggtgttccccggcaacggcgatgagcagccgctgactgagaacccccggaagtacgtcatgggccatttccgctgggaccgcttcggccgtcggaatggtagca

SEQ ID NO: 9307 - DNA, 287 bp, Bos taurus
  Clone ID: 40-LIB3057-019-Q1-K1-B8
gccgcgccctcgtgtcccgggactgaaggctcttcgcaccggaccccggtcccggctcgcggctgtggcgcgccgcgccgctctccggtggacgcgggcgactgcccgcctgcggtgacggcgggggaccggctatccgaggccaaccgatgctctcgtggtgctggcgtagcgttccgtctgggcgggattctgacttataggcgttcagtcataatcccacagatggtagcttcgccccattggctcctcagcctagcacatgcaccgaatgtctgaacctgcgg

SEQ ID NO: 9308 - DNA, 304 bp, Bos taurus
  Clone ID: 40-LIB3057-020-Q1-K1-B8
gttctagatcgcgagcggccgccctttttttttttttttttttctcattaaactttttgtaatgggtctcattttgtgttagagatttttggacaagttgctttcattaaaaagtactgattttaaaaactaataacttatactgtcacacactaatcatattgtccacaataacattctcctttccttatgaaggttttacgatatcattgctatcattaactagtcttttactattaaactttaactgcccattgatacatacatttctatacctgcaatttcatcaattactaatactttg

SEQ ID NO: 9309 - DNA, 427 bp, Bos taurus
  Clone ID: 40-LIB3057-022-Q1-K1-B8
cgcgagcggccgcccttttttttttttttttatgactgaactactataaatgcacaagggacggttcagacacggtgcttctgaagtatttcacccctccccaccaggcgcaagctgcatcaagggagagagtggactccccaacctctgctcaggcatcaggagacagaaggggccattactgctgagcgccggcggcagctggaacaggcatcccaagggggttggcagcagcaatcactggtgagcccgccagaggtccaaggggtgaaggggttggcactgaagaaatccctgacatcatattggcgctgctgactggcgtactgccccctggcatgctagatgagcccattcgagcctggtccttcacaacagtgtagaaataagggtgctccatggcctctcttgcagtgagccgtgattg

SEQ ID NO: 9310 - DNA, 217 bp, Bos taurus
  Clone ID: 40-LIB3057-023-Q1-K1-B8
gaagaacctggacagcaccactgtggccgtgcacggcgaggagatctactggaagtcctgctactgcaagaagtatgggcccaagggctacggctactggcagggctcggacaccctgagcatggacaagggggagtcgctcggcatcagacatgaggaggcctccggccacaggcccaccaccaaccccaacacgttcaagtttgcccagaaggtc

SEQ ID NO: 9311 - DNA, 383 bp, Bos taurus
  Clone ID: 40-LIB3057-025-Q1-K1-B8
gccgcgtcccgcaaggaacgcaccgtttcatctgccacctattccagctctaccacggacggttcattcaaaagcaaaggcaaaagaggatccatagattcagccgtcaaacaagtgcacatagatggcttggtggtattaaagattatcaaacattaccaggaagaaggacaaggaactgaggtggttcaaggagtgcttttgagccttgttgtacaacatcgacttgagattaccaactgatttcctttacctcagcacactgaagatgatgctgactttgatgaagtccaatatcagatggagatgatgcggagcctgcgccatgtaaacatctaccacctacacgtggtctggtaccagtccacatactatggctcgtt

SEQ ID NO: 9312 - DNA, 313 bp, Bos taurus
  Clone ID: 40-LIB3058-003-Q1-K1-B8
cggacgcgtgggtcgcgagcggccgccatttttttttttatttttttttttttttttattgtaacattttttgttattatttttattatttttttttttattttatttatatatttaaataactgaatgctttattatgtagattatgttataacagacgaataataactatattaattgcaaaaaaacggctacaaattctcatcttacatattaatagacataatctataatatgaaaaaaacgcagatgttattaaaataaggagcttaaccgttgcattaccacctatagcatttcattcacagaatat

SEQ ID NO: 9313 - DNA, 439 bp, Bos taurus
  unsure (19): unsure at all n locations; Clone ID: 40-LIB3058-004-Q1-K1-B8
cgtgaccgcgtgggcagtngtcttcgtcatagctgcatggcggacgactgtcgatcagttgctctcagtagtcacgaggctgtgagtatatcgacgcacgaggagacatgtctcagtctgttgaagagataacacatactctatataggacgatgacatattatgatgactggctgcacggttattaccatgtgtgacactatagacctgtgggtgctctcggacattgaggatcaaaacggaggcacatcaacagagctgttgagagacaccatggaccactaccggacttattacatgctagagcgcctgctgcacgcgcctcccatgctgctgtaccagctgattttgcagatccagacgtctcgacaggcgctgctcatagagaggtattatgcctttgacgaggcctttgtgcgggaggtgctggtcaaaaagc

SEQ ID NO: 9314 - DNA, 399 bp, Bos taurus
  unsure (361): unsure at all n locations; Clone ID: 40-LIB3058-006-Q1-K1-B8
ggccttcgagcaccaaggacgctagggtacttaaacttagtactgttctgtgatgactgggaaatgcagacttcagaaagctggctcttccagtttgaaaagtgaagcggacctaagacatcaccaggacaggagcggctcagtgttggcgttggacgctgtcgcccagccgtgccctccaccgggaccaccagtgcacatctggccagtgatcttccaggcgcatccaacctgcgttcaccatttctccaccccagttaggtgacctccaagaggcagcagtgtccttgaggccctgccttcggcatgttacaaagcctcagagcggaactctctgctgaggctctctgtggatgacctncttccatggtgaaaaagggggtcctgcacaccaagctt

SEQ ID NO: 9315 - DNA, 372 bp, Bos taurus
  Clone ID: 40-LIB3058-007-Q1-K1-B8
cggacgcgtgggcgaagaaattgttaaggaagtcagcacctatattaagaaaattggctacaaccccgacacagtagcatttgtgccaatttctggctggaatggtgacaacatgctagaaccaagtgctaatatgccatggttcaagggatggaaagtcacccgtaaggacggcaatgccagtggaaccaccctgcttgaagctctggattgcattctgccaccaactcgcccaactgacaaacccttgcgtttgcctctccaggatgtctataaaattggtggtattggtactgaccctgtgggtcgtgtggagactggtgttctcatacctggtatggtggtcacctttgctccagtctatgttacttc

SEQ ID NO: 9316 - DNA, 367 bp, Bos taurus
  Clone ID: 40-LIB3058-008-Q1-K1-B12
gcatccccgcgggctgggagacagcagcgatggcgtatcggtgtcagcgggacagctacgccagagagttcaccaccaccgtggtctactgccgtaccgcggagctgcacaccgaagaaagcaacggcgagaaggaagtgctgagcggtttccaagtggtactggaagacacgctgcttttccccgagggcggcggacagcctgatgaccgtggtacaatcaatgacatctctgtgctgagagtgactcgacggggcacccaggctgatcatttgacccagacgctgctgacccctgggactgaggttcacgtccggttggactgggaacggatgttcgaccacatgcagcagcattcatggcagca

SEQ ID NO: 9317 - DNA, 365 bp, Bos taurus
  Clone ID: 40-LIB3058-010-Q1-K1-B8
gagctcaacaccaccatcgtactgccctcccgcaacttctgggagctgctcatgaatgtgaagagggggacctacctccctcagacgtacatcatccaggaggagatggtggtcacggagcacgtcagcgactaggaggccctgggctccttcatctatcacctgtgcagcgggaaggacacctaccgcctgcggcgccgggccacccggaggcggatcaacaaacgagaggccaagaactgcaacgccatccgccactttgagaacaccttcgtggtggagacgctcatctgcggagtggtgtgaagccccgccctagccctccaggtcacgataacggcactcagaacaaggtcatctttcag

SEQ ID NO: 9318 - DNA, 436 bp, Bos taurus
  Clone ID: 40-LIB3058-011-Q1-K1-B8
cccacgcgtccggtatggaccacctcaaactcggaaaattcttaaagagatggaaacactagaccaccttacctgcctcctgagaaacctgtattcaggtcaagatgcaacagttagaactagacatagaccaacgcactggttccaaattgagaaaagagtacttcaaggcagtgtattgtcaccctgcttatgtaacttatatgcagagcacatcatgtgaaatgccaggttggatgaagcacaagttggagtcaagatttcagggagaaatatcagtaacctcagatatgcagaggacaccatccttatgatgaagaggaactaaagggcctcttgatgaaagtgaaaaaggagagcaaaaaagctggcttaaaactcaacattcaaaaagttaagatcatggcatccaaggccatcacttcatggcaaagag

SEQ ID NO: 9319 - DNA, 402 bp, Bos taurus
  Clone ID: 40-LIB3058-012-Q1-K1-B12
gttgtaacgacactgcgagtcaacgtgatgcaatatgattttacttttttcttttcaatcccactgtagtgagaaggccaccaaagtgcaggacatcaataacaacctgaaagaggccattgaaaccatcgtggccgtcatgagcaacctggtgccccctgtggagctggccaacccagagaaccagttcagagtggattacattctgagcgtgatgaacgtgccggactttgatttccctaccgaattctacgagcatgccaaggctctctgggaggatgaaggggtgcgtgcctgctatgagcgctccaacgagtaccagctgattgactgcgcccagtacttcctggacaagattgatgtcatcaagcaggatgactacgtgcccagcgaccaggatct

SEQ ID NO: 9320 - DNA, 433 bp, Bos taurus
  Clone ID: 40-LIB3058-013-Q1-K1-B8
gtagccagtgtctgcaaccagaccttatgaagtggtcacccccgagatgacgagcgtgacgagcccaggccagtggtgcagaagcaggcaggccccagccctgaggactgcgcagcaaagcaggagggggcagccagcggagggcctgatggttcttgcgactctagcttcagtagtggcatcagtgtcttcactccagccagcgcggagagggccccggtcaccctccacctggacgggatcgtgcaggtgctgaactgccacctcagcgacacggccatcggcatgatgaccaggatcgccgtcctcaagtggctctaccacctgtacatcaagacccctcgcaagatgtcgcggcacacggacagtctgttccctgtgctcctgcagacgctgtcggacgagtctgacgaggttatcctaaaggatctgg

SEQ ID NO: 9321 - DNA, 353 bp, Bos taurus
  Clone ID: 40-LIB3058-015-Q1-K1-B8
gccggcttctgtgacgaggtgaaggagatgcccatgaagaccctggtgcctgctgaggtggtctcagagaacgtcatccccgccctggggctggtggagcccatcaagaaggacccagcccctgcaaaggctgacatttactgcgaggtgtgcgagtttgtggtgaaggaggtggccaagctgattgacaacaacaggacggaggaagaaatacttcacgcgctggacaaagtgtgctcgaagctgcccacatccttagctgagcagtgccaggaggtggtggacacctacggcagctccatcctgtctatccttctggactaggcgagccccgagctggtgtgcagcatgct

SEQ ID NO: 9322 - DNA, 413 bp, Bos taurus
  Clone ID: 40-LIB3058-016-Q1-K1-B12
ggaccagctggcttctgtgcgctaggccgtgactaacttgcttagtgtggttgtcggaactcagcaggtatacctggaaccattaaatatgtttgtgccttaaaaggagaggagaaagtgtggttaagagagtgcagccatgaagttctgagccaggcaagtagccaggttgtcgggcagccacgtgtgaatccggagtagacggtgccttcggaggcaacgcgtgtgcgtgtgtgagcatgcgtgggtgtacatccctctcttgctccctcaccccgtcccgtcccgcccccaggtgtcatcgccattcctctgcataccccaccttcagtgcaaagatttcttaagtactggccccagtagcagaagctggttcctgctgtcagtgtaccttctgggtgctctttatttct

SEQ ID NO: 9323 - DNA, 441 bp, Bos taurus
  unsure (2): unsure at all n locations; Clone ID: 40-LIB3058-016-Q1-K1-B8
tncgggacggcaagatcacccgagtggagatgctggagatcatcgaggctatctacaaaatggtgggcacagtgatcatgatgaaaatgaatgaggatggcctcacgcccgagcaatgagtagacaagattttcagcaagatggataagaacaaagatgaccagattacactggatgaattcaaagaagctgccaagagcgaccctttcattgtactacttctgcagtgcgacattcagaaatgagcggaggtcaatgctatggactgcacaagagtatcaatgttacattcagtctgcagctattaacacacacacacacacacacacacacagatattgcttggactacctataaaaggacttgcttcctggggttggaaacacttgggtgcatgagaatgtcatttgctaatgaattttaaaaaacatatattctaaa

SEQ ID NO: 9324 - DNA, 425 bp, Bos taurus
  Clone ID: 40-LIB3058-017-Q1-K1-B12
acgctttaaaacatcattgctgctaaaaatagaatactgttacacttaacgaaaattgatgccactgttttgaaaatgagatcttgggccgtaaatgcagctgaactaaatataaatattagttcacaaatgaatgctgtcaaaggaatgagtaaagtaaaaaaacttaaccaatgacatttcatcctaaattatgtaatgtgatcaaacatgatcattcagaatttttatattttgctttgtacagaggttatgtattctgggtgttttatccattttttaaggaaacattctaaatctcacatatcgacactttgtagttattttatcagtaatgtatgaagtttctttaaattatatacttaacagcagcatagagaactggattgcttttgtatataagacttgagtccacctgaaatgtc

SEQ ID NO: 9325 - DNA, 465 bp, Bos taurus
  Clone ID: 40-LIB3058-019-Q1-K1-B8
gcgaagagctgactcaatggaaaagaccctgatgctgggagggattgaaggccggagaaggggatgacagaggatgagatggttggatggcatcaccaactcaatggacatgagcttgaataaattccgggatttagtgatggacagggaggcctgaggtgctgcagtccatggggtcgtaaagagtcagacacgactgagtgaactgaactgaactgattcttacaattgaatattttaattcaaagtaacaatacttatttgtattttcattttttttttttcaaaaatgaagtttaagatgattttttatagttcattagagatcttaaatacgtgttcctgagcaggtcgaaagacaagttatagactttcttctgaataaaatgaattataggggaatcttagattgctaacggacaatatatgttttattttttacctgtagatagattccttttcact

SEQ ID NO: 9326 - DNA, 430 bp, Bos taurus
  Clone ID: 40-LIB3058-020-Q1-K1-B12
gcgtcctcggacttggtccagcagcctgttaaaacatggtggattactatgaagttctaggtgtgcagagacacgcctgggccgaggatattaaaaaggcatatcggaaactggcactgaagtggcatccatataaaaatcctgagaacaaagaagaagcggagagaaaattcaagcaagtagctgaggcgtatgaggtgttgtcagatgctaagaaacgggacatctatgacagatatggcaaagaaggattaaacggtggcagtggaagtggaagtcacttcgacagtccgtttgagtttggcttcacattccgaaacccagaggacgtcttcagggaattttttggtggaagggacccattttcattcgacttcttcgaagacccgtttgaggacttctttggaaatcgaaggggcccccgcggaag

SEQ ID NO: 9327 - DNA, 325 bp, Bos taurus
  Clone ID: 40-LIB3058-020-Q1-K1-B8
ggcagcgacgcaggggccgcggccaccaccgcgcgggcagacggtgactcgtgggtcctgagtggcaccaaggcctggatcaccaacgcctgggaggcctcggccgtagtggtcttcgccagcaccgacagatccttgcataacaagggcatcagtgccttcctggtccccatgcccacacccggcctcacgctggggaagaaggaagacaagctgggcatccgggcctcgtccacggccaacctcatcttcgaggactgtcgcatccccaaggacagcctgctgggggagccggggctgggcttcaagatcgccatgcaaaccc

SEQ ID NO: 9328 - DNA, 455 bp, Bos taurus
  Clone ID: 40-LIB3058-021-Q1-K1-B8
ttttcctgcagcctgaaagtttttataagaaaaagacatcaaatgcctgctgctgccacccttttaaattgctatcttttgaaaagcaccagtatgtgttttagattgatttccctattttagggaaatgacagtcagtagtttcacttctgatggtataagcaaacaaataaaacatgtttataaaagttgtatcttgaaacactggtgttcaacagttagcagcttatgtggttcacccatgcagtttagtgttacaaattttatggttatctccagcagctatttctacagtacttgcacttaccttttgtctaaccctaactgaattatctgtttcacatggaggtatttatattcaaagtggtgattccctcccctagatgtatagggagagtcccaagcctgatgacggtggacagtttagtaatttatgtgcgatgctgaaatttgtg

SEQ ID NO: 9329 - DNA, 406 bp, Bos taurus
  Clone ID: 40-LIB3058-022-Q1-K1-B12
cggacgcgtgggcggactcatgaatgcttgctttgagtctagccaaccatatggtgaaatgtgacgctcggcatgggaaatacatggcctgctgcctgttgtaccgtggtgacgtggttcccaaagatgtcaatgctgccattgccaccatcaataccaagcgcagcatccagtttgtggactggtgccccactgtcttcaaggttgtgcattaactaccatcctcccactgtggtacctggtggcgacctggcctaagtacagcgagctgtgtgcatgctgagcaacaccacagccatcgctgaagcctgtgctcgcctggaccacatatttgacctgatgtatgccaagcgtgcctttgttcactggttcgtgtttgagggcatggatgaaggaaagttttctg

SEQ ID NO: 9330 - DNA, 420 bp, Bos taurus
  Clone ID: 40-LIB3058-023-Q1-K1-B8
cggagctgccccagcgggaggtgttctcgggcagcgacaccgacccagacatggcctggtgtaagagcctgcgggacaagggcatcttcctccaccttagcaatcagcacgaatttggccgcctcctggccacctcccggtacgacacagaccacctgcaccctgacctctggcagatcttcgacaaccccctggactggaaagagcagtatattcacgagaactacactcgggccctggaaggggaggggctcgtggaacagccctgcccagacgtgtactggttccctctcctgtccgagcaaatgtgcgatgagctggtggaggaaatggaacactacggccagtggtcaggaggccggcatgagggacctcttaaggggggctggctggaggctacgagaacgtgcccactgtgga

SEQ ID NO: 9331 - DNA, 404 bp, Bos taurus
  Clone ID: 40-LIB3058-024-Q1-K1-B12
cgccgcccggcttcgccccgccccgggcgcgctcccggtgcgctgcccaccttcaccacgggctcccggtgagccccgcccccacgcccggttccaggagagcctctgggacctcgctcccgccgtccggtgaaacgggaggacaatccatccagcccacagaggcaatccaagctgtctagaattcagggatcaaacgagggctacggaaaggaaagacgacctgacctaggagggccatgatattctatagaaccggacaaagttggtttccaaggaaacttgattccttggaactcggaaagctggttcttttcatatgcatttccaaaccatgagctccttcccaaagcctgcctggccgccagccacaataaagcccttccacacctctggaaaagaaa

SEQ ID NO: 9332 - DNA, 426 bp, Bos taurus
  Clone ID: 40-LIB3058-026-Q1-K1-B12
caatttattactgtcagagatttgtagacagtttcttattttcatattgaatcatgttacttttgtaattcaagtaagcagctgggttaattcatgatgtttgcccttttaataaaatataagggtagagttcattttgaatgcaagttgcctttattataaatttgagtttgtcttggttatataatatcttgcatgataacctagctagctttttagcatttgccatatttattaaaaattaactttttttgtaaaacattcatagcttaaacagtaccattttttttttaatgtaagtgagagattaagtgtgaatgcagaagcaactattgtctgccctattcaacttggtgcccgttaacagtgtttacactgttccttgtgcctgttaagatagttttagtttattggagcttttgttaa

SEQ ID NO: 9333 - DNA, 413 bp, Bos taurus
  Clone ID: 40-LIB3058-027-Q1-K1-B8
ttttgtcatgctcttgaaaatgtttgaccgtttgtagtatccaccggtgaagcctggggctctgttgcataaagcactatttttttggaaatgttactgtctgaaagcctcttccctccctttcccttctcctgtgttcttccttcatcctcgcctgactgatcaaccaggcagtagccatcaggagctgcagcgaggagcagggccctttccaagtagactctgggtgtcctcagccggtgggtgccctctggtccagcggctgccgtcgagtccctggcccacatctttaatgcttccagaccaggccacagcaaattctccaattcccaactccagtgcactaggaaggaggagccgagggggccaggggagcactcgcacagagcccgtggacccgcggccacagcagc

SEQ ID NO: 9334 - DNA, 273 bp, Bos taurus
  Clone ID: 40-LIB3058-028-Q1-K1-B8
gttctagatcgcgagcggccgcccttttttttttttttttttttcatttttggaaagaggtttaagatcataagtaggttattgtcacaacacatttcagaattgaagaaacaaacattttgactgtttaggaaaaacttttttttttttttttatcaattccctcatcattgaaagaacttgtacattttaaaatttccagtctcctaaggcacaatatttatttaatctgaatgccaacatcatcatcccccgctgtctatagctggaaca

SEQ ID NO: 9335 - DNA, 380 bp, Bos taurus
  Clone ID: 40-LIB3058-035-Q1-K1-B8
cggacgcatgggcacgagcggttgccctattttttttttttttttttttttttggtttgtttttttttttttttttttttttttttattttttttatttatttttttattttttttatttataataatattttcaaatttaaaaaatataattgtttaaaaattttttaaaaaaaattaaaaaaaaaaaaagaataattaaaaaaaaaaaaaaataggattaaaagaaagaaaagatgaaaaaaatacaggtgatgatcaaataggatttgggattaaaacaaatgcggttatttaaacgctaattattaaccaggcatgagtatataaagaggttccaaaataaaaattcaataagattgggaaaaaaaaaaatttttt

SEQ ID NO: 9336 - DNA, 426 bp, Bos taurus
  Clone ID: 40-LIB3058-038-Q1-K1-B12
atgacttttctccttccgcagagtttctgtttgcttgcagagtggcttcctggcttgctgccagcctgtgcatggtccacgcttatgagttcaggatctatggcaatgtgaataattcagatgtttacaataaaaaaaccacaccatgaataaatgaattcactaatgttaatgttaaacttcatgggaaaaaaatagtcctttgaatctttggtggttataaattaaagacctcgaattatgtgcaataaatagtaaataaagttacactgaatgacgttccttgctgtgcttgttgacttaattcagaaatcttaaagagggtaccaatagcagacactagatgtagaccatagacttccaaattttttcaagtcaaaattttaacaattacagtgcatttccgacccttaattggtaattctg

SEQ ID NO: 9337 - DNA, 432 bp, Bos taurus
  Clone ID: 40-LIB3058-038-Q1-K1-B8
ggaagtcagacatctacgtgtgcatgatttcctatgcacacaatgtggccgcgcagggcaagtacattgctatcgccagcaccacagtggagaccacagatcccgaaaaggaggttgagccggccctggagctgctggagcccattgaccagaagtttgtggccatcagtgacttgtacgagcccatcgatgatggttccgagagccaggtgttctgttcctgctcctacgatgccaccacacactttgagacaacctgcaacgacatcaaagacatctacaagcgcatggcaggctccgcctttgactttgagaacatgaagcgcaaacagaatgatgtctttggggaagctgaccagtgatggctgacccctagcccagcccctggtgccctctcccccaacctgtctgttctccctgaaggctggggag

SEQ ID NO: 9338 - DNA, 403 bp, Bos taurus
  Clone ID: 40-LIB3058-039-Q1-K1-B8
tgaagtctggtacctttaaccccacacttgcattttggggccctgttgagctgccgtagcatgtgctgggcacgtttcagtgccacgagtgttctgtgtgtgcgctgacccactgtcaacagtgaattacctccccaggaagagtggctgtatttgcaacagtttttcatctgctacctgctcttctatttagtccaagttgatgcattccatgtagtttgagtttgtggaagagatgcagctgaaggcaggacagaatttttttttaaggaatcaacactggccctgtagtcattagccagagctttacatagttattggctaaatatagtgaaactcttatcatgactgggattttgaagaagagaattaacagaaccaatggcagatgctctgaagtttt

SEQ ID NO: 9339 - DNA, 367 bp, Bos taurus
  Clone ID: 40-LIB3058-042-Q1-K1-B8
cggacgcgtgggttcccatctaccccgtctaacgcggacgccctgcacccctcagaacttcggaagggcaagaccttcccctcacttattgctgaaaccaagagcacaattcccactgagagaagaatctctgtgctgtaactaaaacgaatcgtgcattccttccgggaccattgtctttgttttctttttttgtttgttttgaatgaatttaaaaggaaatactataataaaaatgttaacaagaaggtaaaaaaaagtataagagaagtatagaaaattagaaacagagacagatgttgtcagtgttcttgaaaatttacttccagctatttcaatatttataaataacattgagagctaatag

SEQ ID NO: 9340 - DNA, 424 bp, Bos taurus
  Clone ID: 40-LIB3058-043-Q1-K1-B8
gacccacgcgtccgagggcgcatccatatttctatactttggtcgtctacaggcagaggtgcaggtgctggaggtgcacaacagcgacatctctgcgtatacctactagcggacactgatgatggagcagcgctcccagatgctgctgcagatgaagctgaccaagacagaccgggagcgagaggcccagcttgtcaaggaccgtcactcagccctgcagctggagagcctgtactctgactaggaggatgagtctgcagctgagactgacaagatccagatgacatggaccagggacaagtacatggacacggaaccctgggaccccagacacacgcctgacaacttccggtagctggtgcatattaagccggaccagtctaatgtgcggcgtatgcacacgggcgagaagctcaatgaagtt

SEQ ID NO: 9341 - DNA, 435 bp, Bos taurus
  Clone ID: 40-LIB3058-044-Q1-K1-B12
ggagctggccaacccagagaaccagttcttagtggattacattctgagcgtgatgaacgtgccggactttgatttccctcccgaattctacgagcatgccaaggctctctgggaggatgaaggggtgcgtgcctgctatgagcgctccaacgagtaccagctgattgactgcgcccagtacttcctggacaagattgatgtcatcaagcaggatgactacgtgcccagcgaccaggatctgctccgctgccgtgtcctgacttctggaatctttgagaccaagttccaggtggacaaagtcaacttccacatgtttgacgtgggcggccagcgcgatgaacgccgcaaatggatccaatgcttcaatgatgtgactgccatcatcttcgtggttgccagcagcagctacaacatggtcattcgggaggacaacca

SEQ ID NO: 9342 - DNA, 424 bp, Bos taurus
  unsure (391): unsure at all n locations; Clone ID: 40-LIB3058-046-Q1-K1-B12
ctcatccatggagatgtcaagagttccatcgtccttctggatgagagactgatgcccaaactgggggacttcggcctggcccgtctcagccggtttacaggggccaaccccggccagagcagtagtgtggcccggactcggacagtgcgcggcaccctggcctacctgcccgaggagtacgtgaagaccgggaggctggccgtagacaccgacaccttcagctttggcgtggtgctgctggagaccctggccggccagagggccgtgaggatgcatggcgcccagcccaagtatctgaaagacttggttgaagaggaggcggaagaggccggggtgaccctgaagggcactcagaccgcagtccaaggcgggccggccgcagacacgtggngccgcctagtcggccgccagatctacaagaagc

SEQ ID NO: 9343 - DNA, 430 bp, Bos taurus
  Clone ID: 40-LIB3058-049-Q1-K1-B8
gaaagaaggggccctcccagcacatagttacattcctttccctagtccatccccataatttattctaatttattaactttggcccaccctgtgtgagaaaggagccctgtcctctgcaacctcgcggtgtgccctggggctgtggaacagctaccctggccgggcctgcctgaccctggcaaccctggcacagcttgggaagggagagggcttgggtgtggcctcgttggaggttgatcttgtttttgtttcttgtctttgtgtccgctggtactggctgagagagaaatgacgtgtgaacaaagcagaaggaggtgggaaaatggatccaaatcccctgtgccctgcccaccctattccttcccattagtggtgggaaatccttatcttgcaaagtgaatgtgtccctttccccatcctctagtgtatt

SEQ ID NO: 9344 - DNA, 453 bp, Bos taurus
  Clone ID: 40-LIB3058-051-Q1-K1-B8
agcattacaaggtccccgacggagcaactgtggccctcgtgccctgcctcaccaagcacgtcctccgggaaagccaggactacgtgccgggagagagtctcggcacagggaccccgatgctggaggatgtggacgaggggggcatccggccctggcacctggtgaagcccagcgaggagccggagccgcccaggcctcggaggggcagccttcggggcggggagcgggagcgggccaaggccatcccggagatctacctgacacgcctgctgtccatgaaggggaccctgcagaagttcgtggatgacctgttccaggtgattctcagtaccaagccgccggtgccgctcgccataaaatacttcttcgacctgctggacgagcaggcccagcagcacggcatctcggaccaggacaccgtccacatctggaagaccaacagcttgcccctga

SEQ ID NO: 9345 - DNA, 419 bp, Bos taurus
  Clone ID: 40-LIB3058-054-Q1-K1-B12
gtagattcaacacaatccctatcaagctacccatggtatttttcatggaactagaacaaataacttcacaatttgtatggaaacacaaaagaccttgaatagccagagcaatcttgagaaagaagaatgaaactggaggaatcaatctgcctgactccagacgacacttgatgactacagtcatcaagatagtatggtactggcaaaaagacagatatactgatcactggaacaaaatagaaagcccagagataaatccacacatctatggactccttatctttgacaaaggaggcaaaaatatacaatggagaaaagacaatctctttaacaagtggtgctgggaaaactggtcaaccacctgtaaaagaataaaactagaacactttctaacaccatacacaaaaataaacaaaatg

SEQ ID NO: 9346 - DNA, 434 bp, Bos taurus
  Clone ID: 40-LIB3058-054-Q1-K1-B8
ggaccactgagctggagggattatagcttggcctgaataggaaacttaaagagggtggatgggagcagggttcaagattcaaagccggaatgtccttgctgctctgtccccatagccaaccccagactcctcagaaagaagaaatttctactcagaaaatagaaataatccaagaagcgaaccacttattgagacttgaggggtctcttagtggaaggggggaggggcgtgacgacaaaatccacttctcttctgtctttaccttgtctgtccctttccccagctcctttcctcctctgcccctttttgctggccacatcattctgctccttggtctgtcttccacctgaagtcctctccggctacaggcagccaggtgttcttctttctgtcagaagacacctgtgctgcagagtaccacagacaaatgggtc

SEQ ID NO: 9347 - DNA, 443 bp, Bos taurus
  Clone ID: 40-LIB3058-056-Q1-K1-B12
ctttaaaatgaaatagccaaaaacattctaagttaatcataattccctgcttcttttgatgatactggataactgacataatgtcctacttttaataatagtattgttctaaaaaatctgtgctttttaagaattagtgcctctggatatataaagaaaatatttcaaacaatacagaaaaacagacaacctcatcccctcaatggcaacccactccagtattcttgccttgagaattccatggacagaggagcctggtgggccacagtccatggggtcgcaaagagttggacacaactgagcaactaacacatcccctcaaaaggcaatacagttgttcatttgtgcatccttctagacaaaaattttatcacatactggcatatattatatgtgacttttctattataattatatctcatttgcttttttttattaataaa

SEQ ID NO: 9348 - DNA, 390 bp, Bos taurus
  Clone ID: 40-LIB3058-056-Q1-K1-B8
gaaacagttaatgtaatgtttctctgtaatatattaaaccttttgttttttgtctttacacatctgatatgttaggggaagaggttaacagattgaaatcatatgggtagagcatcactagaagaaaaggtttaatatattacagagaaacagttaatgtaatgttttttaaaatggcttttttgttctctgtgtggaaggcaaggcaggttgccagtgctaaatgatttaataatattgtaattctggatttctttggtggggggaagacgttttcttgttatctgtttttttgttttgttttgttttgtcttgaaaacaatagacatttgtagaatatgaggactaactcctaggagttgttttactctgtcaggtgactgaagtcac

SEQ ID NO: 9349 - DNA, 435 bp, Bos taurus
  Clone ID: 40-LIB3058-058-Q1-K1-B8
aaacgagccactacccggcctcccccgactcctgggtgtgaggcgggcaccccgggaaccgtgcatgtgcatgcagaccacagacattgctattttttttcccccctgcaaatttagtttgttaaagcctgttccataggaaggctgggatacccaggaaggaaacatttaagagctattttagaaagctccatgaacgttcacttgaaagtcagtagaaagtgatcctcaatctgacatcgggctacacctttctagttcgggctgtagagtcttaaaaagtgctttccacgggatgtggccgaaggcagcacgggaggcggtcggggtgacggggcacgaaggttataagcacagaggcggtgacatagttcacacactttagagggacggcttgtcacgctttgtttactctcttcattcgttgtgattcta

SEQ ID NO: 9350 - DNA, 289 bp, Bos taurus
  Clone ID: 40-LIB34-001-Q1-E1-B8
aactagcaacgtccccatccaagacataaccaagcgtttcctagacagtaccaggactgctccaacatgcccctcagcacctgcgctgccgatctttatcaggaactggaaccctaagatggaatgactatgacagacctgaagaatttaactttgcaagtgatgtactggaccactggactcaaatggagaaagaaggcaagagaagtccaaacccagccctgtggtgggtgaatgattaaggggatgaagtgaagtggagcttcagagagatgacagacttaaactg

SEQ ID NO: 9351 - DNA, 393 bp, Bos taurus
  unsure (355): unsure at all n locations; Clone ID: 40-LIB34-002-Q1-E1-B8
agtccatttctgaaacgtacgatctaaaaagtgtcctgggcgatgtgggcatcaccgaggtcttcagcgatagggctgacctctcagggatcaccaaggaacagcctctgaaggtgtccaaggctctccacaaggctgcactgaccatcgatgagaaagggacagaagctgtcgggtccacgtttctggaagccatccccatgtcccttcccccagacgtcgagttcaacagacccttcctctgcatcctctacgacagaaacaccaaatctcccctcttcgtgggaaaggtggtgaatcccacccaagcctaactgcctctcggagttcagccttcccctcccaggccaggtcnccccactccctccatggcattaaaggatgactgaccta

SEQ ID NO: 9352 - DNA, 417 bp, Bos taurus
  Clone ID: 40-LIB34-004-Q1-E1-B12
atcttccatccccagaccagccaagcctgtgagtgacaccccagacagaggaaccagagccatgcggagtctcagcggactgctgttgttactgactgcctgcctggcagtaaacgccagctccgtgcccacattgcccgatgacattcaagtgcaggagaacttcgacctgtctaggatctatgggaagtggttcaatgtggccgtgggctccacctgcccatggctgaagaggttcaaggagaagatgaccatgagcacagtggtgttgaaagccgggccgacgagcaaggagatcagcgtcaccaacactcacaggccggaaggtgtctgtgaatcgatctctggtacttatgagaaaacaagcactgatgggaagtttctctatcacaaagccaagtggaatatcaccatgga

SEQ ID NO: 9353 - DNA, 409 bp, Bos taurus
  Clone ID: 40-LIB34-004-Q1-E1-B8
ctttttctttgccaaactgaactgccgactctatcgaaaagccaataaatcctctgagttggtatcagccaaccgtctttttggagacaaatccattacattcaatgagacctaccaggacatcagtgaggtggtatatggggccaagctccagcccctggacttcaagggaaatgcagagcagtccagattgactatcaaccaatggatatccaataagactgaagggcgtatcactgatgtcattcccccacaagccatcaatgagttcactgtcctggtgctagtcaacaccatttacttcaagggcctgtggaagtcaaagttcagtcccgagaacacaaggaaggaactgttctacaaggctgatggggagtcatgttcagtactcatgatgttacaggaaagc

SEQ ID NO: 9354 - DNA, 411 bp, Bos taurus
  Clone ID: 40-LIB34-005-Q1-E1-B12
atttgatgtaattttattatgatactgtaatattgccattctgcatactttggcccttatgaatatcatgtcttacagaactgttaaagttgtgatgtgctttgggttgaattttctgttttatcagtttcagaaccattggagaactgtgaaaaaaaagtgaaggaagccttggatggggtttttagaacattgtttcagatggaacttctttttccaagccaagtttaaaattccatttatatttggggtattaactcattttgattttgatttatttcctgattttcacaaaaggaatgattcatttataaatcacagaagaacattacagtatctctgggatggtttaacacagtttaatggtttaatggagttttaaaatctttgagaacatttactcagtgaata

SEQ ID NO: 9355 - DNA, 413 bp, Bos taurus
  Clone ID: 40-LIB34-006-Q1-E1-B8
tttcttgcaacttcgaaaaatttaaaaccatgaaacatctattactgctacttttctgtgcttttatagttcaggcccaatttcctactgactatgacgagggacaagatgacagacctaaggtaggtttgggtgcccgcggtcatcggccctatgacaagaagaaggaagaggcccccagcctgagacctgtgccccctcccatcagcggaggtggctatcgggctcgtcccgccacagcaactgtgggccagaagaaagtggagagaaagccccctgacgctgatggctgcctgcacgcggacccggatctgggtgtgttgtgtcctacaggatgtaagttgcaagatactttggtaagacaggagagaccaatccgaaagagtatagaagatttacgtaatactgtggac

SEQ ID NO: 9356 - DNA, 399 bp, Bos taurus
  Clone ID: 40-LIB34-007-Q1-E1-B12
gtcttggctcccaactggctcccaattcctggtgaaactcctaaagggagactgttaaatcatgaaattaatcaccatccttttcctttgttccaggctgctaccaagtttaacccaagagtcttctcaagaaatcgactgcaacaaccaggatgtatttaaagctgtggacgctgctctgacaaaatacaacagtgaaaacaagagtggcaaccagtttgtattgtaccgcataaccgaggttgccagaatggataatcctgacacattttattccttgaagtaccaaatcaaggagggcgactgtccttttcaaagtaacaaaacttggcaggactgtgactacaaggactctgcacaagctgccacaggagagtgcacagcgaccgtggccaagag

SEQ ID NO: 9357 - DNA, 371 bp, Bos taurus
  Clone ID: 40-LIB34-007-Q1-E1-B8
agcgggtgcgcgggtcgcctctctgagttatccagttccagccttgtcgctgcggcgacacccgcattctccgtcgccatgactgaacagatgacccttcgtggcaccctcaagggccacaacggctgggtgacccagatcgctaccactccccagttcccggacatgatattgtccgcctctcgagataagccatcattatgtggaagctgaccagagatgagaccagctatggtatcccacagcgtgctcttcggggtcactcccactttgttagtgatgtggtcatttcctcagatggccaatttgccctctcaggctcctgggatggaacccttcgcctttgggatctcacaacgggcaccaccact

SEQ ID NO: 9358 - DNA, 397 bp, Bos taurus
  unsure (105): unsure at all n locations; Clone ID: 40-LIB34-008-Q1-E1-B8
cagaaaacacagagaaaatcagcatgagtactaccgggaaagttatcaggtgcaaagcagccatagtctggaagcctggtggatcattttccattgaggaggtanaagtggctccaccaaaggcaaaagaagttcgcataaagatggtggccacggcgctctgtgggactgagatgaaaatgttgaaagataaaaatcttcagcaccaacactaccctatcattatgggccatgaaagagctggaatagtcgagagtgtgggagaaggagtgagcacagtgaaagcaggagataaagttatcgcactctttctaccacagtgtggtgaatgcacctcttgccttaattctgcagacaatttttgtataaaactcaaacaggcagaaacccacctgat

SEQ ID NO: 9359 - DNA, 404 bp, Bos taurus
  Clone ID: 40-LIB34-010-Q1-E1-B12
gtcacaataccaaacccctctgttcgtatgatccgtaataattaccgccgtactactactactctcgctccctgtattagcagccggcatcacaatgctattaacagaccggaacctaaatacaaccttcttcgacccggcaggaggaggagaccctattctatatcaacacttattctgattctttggacaccccgaagtctatattttaatcttacctgggtttggaataatctctcatatcgtgacctactactcaggaaaaaaagaaccattcggatatatgggaatagtttgggctataatgtcaatcggatttctaggtttcatcgtatgagcccaccatatattcactgtcggaatagacgtcgacacacgagcctacttcacatcagccactaata

SEQ ID NO: 9360 - DNA, 391 bp, Bos taurus
  Clone ID: 40-LIB34-010-Q1-E2-B8
atttcagtaaaatcttgttatcatgtgaaatgactgcaattgtacagttatttgaacattctttggcattgcctttctttggaattggaagctgagaagtcccataatctgtccttcaagcaggagaaccaggacatctagtgatataacttattccaaatctaaacttctgaaaattaggggtggggagggcaatacatcctaatttgagtccaaaaacctgagagccaggagtcagatatctaatagaaggaaaaaaatgggtgtctcagttcaagagaagagagtaaaatgtgccctgactctgcttttttgttctattgggtggattggataatgctcacctgcactggttgggatcatgggttggatgatgctcgcttgcgttggt

SEQ ID NO: 9361 - DNA, 382 bp, Bos taurus
  Clone ID: 40-LIB34-011-Q1-E1-B8
gacccacgcgtacgaaatgagttgaatgagacaaggtttgaaactggaactactctgagatacacctgtcgtcctggctacaggataagttcaagaaagaactttcttatctgtgatggaacagacaattggaaatacaaagagttttgtgtcaaaaaacgatgtgaaaacccaggagaattacttaatgggcaagtgatagttaagacagattactcttttggatcagaaatagaattcagctgttcagaagggtatgtcttaattggctcagccaacagttattgtcagctacaagataaaggagttgtctggagtgatcctctcgcacaatgtataattgccaagtgtgaacctcctccaaacattagtaatgggagac

SEQ ID NO: 9362 - DNA, 416 bp, Bos taurus
  unsure (400): unsure at all n locations; Clone ID: 40-LIB34-012-Q1-E1-B8
gaacaaaagtcaaggattccggaaggcaatttcctgccattttgcggatgccaactgtcactacatagatgtggagggcaccagtcaagaaaacattgaaaaggaagttgttgatatagtcaggaaaaagtatggatttaaagacgtcactctgaaggatgtttggacatttcgagggcgtgttgtgaaaggagaaagaatcaacctttgaaatagccctttgctcaaactcttgtcaagaaaaccaaggtggaacaagatgtcagagaaaaatctttctcaatgagatgatgtaatcgtttctatccatgttaacaaaatccaagtgcacagatgcagcacttcactgcgcatgggtaattctgcagtatggtgggatgctttaatggatataaaatantaaaagtgaaatatta

SEQ ID NO: 9363 - DNA, 278 bp, Bos taurus
  Clone ID: 40-LIB34-013-Q1-E1-B8
aaaggaagtgcagcgacacagaagatgctcagtgcataaacggcaccatcgagattcccaaatgcttcaaggagcacagttcattagctttctggaaaacggatgcatctgacgtaaaaccatgctaaactggttttcacactgagtattacatgtcaagcttagatgtgtctgtctgagaatctgatggagacagaaaaataaacagactgaatttaccgtgtcaaaaatctggtcaaaaaagcttaggttgaaggaaaagctaaataacaaagaaa

SEQ ID NO: 9364 - DNA, 364 bp, Bos taurus
  Clone ID: 40-LIB34-014-Q1-E1-B8
gtccacgcacgcatccgaagcgaaagagtctagacctcaaggttttccggagcttatgaatgacaccttcctgccagcaccgtggggagaacacacacactacactcctgctctggtgcatgcggcacgcaggacgctgcttaacagagtttagggaaactcgggctgtccaggactttttcaccacctgtcgcgccccagaagcctgcagtcagcttaccctgcagcaaatgcgtcgcttccctctggattctgccatcaacgtctccgacatccttgtcgtactccatgcactgggcatggaggttaccatgatgcctgtcaatgggcccatcttcccagatccattaagagaccatcggga

SEQ ID NO: 9365 - DNA, 416 bp, Bos taurus
  Clone ID: 40-LIB34-016-Q1-E1-B8
ctaaaacttggggtggagtcagggttgtcccttgagcactgtcctagggagggacccttcctctcttcttagatcctagagattgagtaatttcagctacccacttttattttatttttttttttttctcatttatcagttaaggtactctcctagatttttaacagggacactctggaaacaacatcttcaattaaagtagcatttgttgttactgaattgctaactcatgtttgactcttttctgtccgatgaactgcagcatgacaggcttccctgcacttcacgatctcttgtagtttgctcagattcatgtccattgagtcggtgatgctatctatccatctcatcatctactgtccccctcatcttttgccttcattcattcgcatcagatacttttccaaggagtcagc

SEQ ID NO: 9366 - DNA, 386 bp, Bos taurus
  Clone ID: 40-LIB34-017-Q1-E1-B12
gcaccaagcgggccggagggaggttgtgtacagcagtgaggagcctgcagaggaacatggcgctgctctgggggctcctggcgctcatcctctcctgcctgtcaagcctgtgctcagcgttctctcctgtgagcaccatggagcccttggatctgcagctaatggacgggcaggcccagcagaagctgcccccactttccctcctcaagctggacaaccaggagccaggtggccagattgccccgaagaaggccccagaagactgcaagttgtccccaacccctgagcagacacgcaggctggcccgggccatgatgaccttcaccacagacctcttctccctggtggcccaaagctccaccaggcccaacctcatcctgtcacct

SEQ ID NO: 9367 - DNA, 408 bp, Bos taurus
  Clone ID: 40-LIB34-017-Q1-E1-B8
ggaaagccgctctggcagcgccggcgtgacccacccgccatgctccccccagcgctcgtcttgctgttggggtttctctgccacgttgctatcgcaggacgaacctgccccaagccagatgagctaccgttttccacggtggttccactgaaacggacctatgagcccggggagcatatagtcttctcctgccagccgggctacgtgtcccggggagggatccggcggtttacatgcccgctcacaggactctggcccatcaacacgctgaaatgcatgcccagagtatgtccttttgctgggatcttagaaaacggaacggtacgctatacaacgtttgagtatcccaacaccatcggcttttcttgccacacggggttttatctgaaaagagctagttctgcaaaa

SEQ ID NO: 9368 - DNA, 356 bp, Bos taurus
  Clone ID: 40-LIB34-019-Q1-E1-B12
accagggctgaggaggctccaggccagcagcagagaagccaagtgattctgccttggctgtgtccatagaatgcagaaccaggagctgtgatggtttcctctcatcaggccatgaactgtgtccgtcagtttccaaaggctgcccacaggccattttacagagtggtccacccggagtttatcttcttgcctttgacatgcattgcagaggaatgggttctgtgagggccctctctccatgcctgcccatctttcaggacgagcccgtggagtgggagacacctgacctttctcaagctgagatcgagcagaagatcaaggagtacaatggccagatcaacagcaacttgttcatg

SEQ ID NO: 9369 - DNA, 428 bp, Bos taurus
  Clone ID: 40-LIB34-022-Q1-E1-B12
cttcttcccgtccatagatgtagttcctccgggcaagtgcgcagtctctactcccgctcccccagggtccgcggccaccatggcgcattagaggcagcagtgcctgcggcagcatcggcctttgcagcggcggcagcagcaccaggctctgcagcggcaaccccccccagcggcttaagccatggcgcttttcacggcattcagcagcagccttgctgtaaccgacaaagacatcttcgaattaagcacattcctcgagttaagcaccaaaacctcgcaacatggccgagatgagctttctgagcagcgaggtgttagggggggacttcgtgtcccccttcgaccagttgggtttgggggctgaagagagcctaggtctcctagatgacaacctggaggttggcaagcacttcagacatcatgggttc

SEQ ID NO: 9370 - DNA, 409 bp, Bos taurus
  Clone ID: 40-LIB34-022-Q1-E1-B8
ctcgcgggtcgacacacgcctctagatcaagactgccgaccgccagtacatggagggcttcaatgacgaactggaggctttcaaagaccgcgtgcggggccgtgccaagctgcgcattgagaaggctatgaaggaatacgaggaagaggagcgcaagaagcggcttggccccggcggcctggaccccgtcgaggtctacgagtcccttcctgaggaacttcagaagtgctttgacgcgaaggatgtgcagatgctccaagatgccatcagcaagatggaccccacggatgcgaagtaccacatgcagcgctgcatcgactcaggcctctgggtcgccaactccaagtccagcgaggccaacgatggggacgatgccggtactggggacccccttgctggaagcacctcc

SEQ ID NO: 9371 - DNA, 398 bp, Bos taurus
  Clone ID: 40-LIB34-023-Q1-E1-B8
gtgcctctcacggttgggaggctttgagcaatcacatgtgaccggacaagcctgtcaggcaggctagagacccttcagaggagtttgtaggttgaaacactcctatcacagccaggaattattattaactggagctctaagttaactccttctccgaaagaggtggtgggggacagccccccatatagtcagaggtgtaggggagagcacaaagtagtaaagtaggcaggctctggttatgggggtagatgctcgaggatttccagggggactcctgaggctcgatcccgcctttgcgtatgtcgagcctccttcctcatgacctttgccacgggtggaggtcctcacgctggccccccggcaatggactggcacctaccaggctcctccgcccatgg

SEQ ID NO: 9372 - DNA, 415 bp, Bos taurus
  Clone ID: 40-LIB34-026-Q1-E1-B8
aaaatttggtgtctgatgctgatattcaacgctttaggaatgagtttgaaagaatctgcagaaaggaggtgaaaccattgggattgtcggtgatgagagatgtcaccatcacaaaatcagaatatgtgccaagtgagaaagtggtttccaaggtccaggatttccaagaagatgaggaactcttcagatactgcaccctccctgagattctgaaatatgtggagtgcttcactggacccaatattatggccatgcatacaatgctgataaacaaacctccagattctggaaagaagacatcccgtcatcccttgcaccaggatctgcactatttcgccttcaggcccagcaatagcatcgtttgtgcctggacagccatggagcacattgaccggaacaatggctgtctggttgt

SEQ ID NO: 9373 - DNA, 364 bp, Bos taurus
  Clone ID: 40-LIB34-027-Q1-E1-B8
gacttccaggaactgtctgggcattccactccgggagctatctcgctagtgcaaatgtctgccggccagaggttcgcctttgcaatatgcattctagaaataagtctcctgagagcggggcccactcccagctacgacccagcagaaagacaaggcacaccattgcccatagactgcacgatgagctcctggagtgagtggtcgaaatgtgacccttgcctcaaacaaatgtttcgttcaaggagcattgagatctttggacaatttaatgggcgaaagtgtgtggacgccgtgggagaccgacagcagtgtgtacccacagaaggctgcgaagaccccgaggagggctgtggcaacgatttcc

SEQ ID NO: 9374 - DNA, 409 bp, Bos taurus
  Clone ID: 40-LIB34-028-Q1-E1-B12
accacccactaataaaaattgtaaacaatgcattcatcgaccttccagccccatcaaacatttcatcatgatgaaatttcggttccctcctgggaatctgcctaatcctagaaatcctcacaggcctattcctagcaatacactacacatccgacacaacaacagcattctcctctgttacccatatctgccgagacgtgaactacggctgaatcatccgatacatacacgcaaacggagcttcaatgttttttatctgcttatatatgcacgtatgacgaggcttatattacgggtcttacacttttctagaaacatgaaatattggagtaatccttctgctcacagtaatagccacagcatttataggatacgtcctaccatgaggacaaatatcattctgaggagc

SEQ ID NO: 9375 - DNA, 303 bp, Bos taurus
  Clone ID: 40-LIB34-028-Q1-E1-B8
gatgaccccatggactgtagcactccaggcttccctgtccttcagtaattcttggagtttgctcaaactcatgtccgttgagtcagcgatgtcatccaaccatctcatcctcgagttgccccattctcctcctgccctcaatctttcccagcatcagggtcttttctaatgagttggctctttgcatcagctgactaaagtattaagtagattggaataggagtcatcatgatatactacttcacacaagctgggatggtgataaagtcggataataataggagttcttaaggatggtggaaa

SEQ ID NO: 9376 - DNA, 409 bp, Bos taurus
  Clone ID: 40-LIB34-029-Q1-E1-B8
caggaccggttcttcctccggaggccccaggacactcagtactactcccccttcagctcgttcccgagggggtcactcttcttcaatcccaagtcccgctttgcccggaacgtgatgcctttccccttgttggaacccttcaacttccacgatgtgtttcagcccttctacgacatgatccaccaggcccagcaggccatggacgcccacctgcagaggactccctaccacttccccacgatggaattcacagaaaacaacgaccgtactgtgtgtaaggagatccgccacaactccacgggatgcctgcggatgaaggaccagtgcgagaagtgccaggagatcctggaagtggactgttcggccagcaacccaactcagacgctgctgcgccagcagctgaacgcat

SEQ ID NO: 9377 - DNA, 119 bp, Bos taurus
  Clone ID: 40-LIB34-030-Q1-E1-B8
atgaaaactcagagcttattcatctgttttccttttctgttggtgttaaaccaacactctcactaaagaacgtaaatttctttaaatattttgcttcttttgtttgtgctacaattaat

SEQ ID NO: 9378 - DNA, 425 bp, Bos taurus
  Clone ID: 40-LIB34-031-Q1-E1-B8
caccagctcaccatggctcgggcattgagagtgccagttgcactgtggctgttgggcttgtgctggtctttggctaaagcccaccctctggctagagctcctgagcttgggcacggagttgaaggtgggaatgtggccaagccggatccagaagtgacggaacgctgctcggatggctggggctttgatgctaccaccctggatgagcatgggaacatgctgtttttaaaaggggagtttgtgtggaagggtcatgcctgggcccggcagttgatctcagagaggtggaaggatgcccccagtcccgtggatgctgcattccgctatgatcgtaacagtgtccttctgatcaagggggacaaattctgggtatatcctcctgagaagggggaggaatatccaaagttgctccaagagaagtttcc

SEQ ID NO: 9379 - DNA, 403 bp, Bos taurus
  unsure (298): unsure at all n locations; Clone ID: 40-LIB34-032-Q1-E1-B8
gtcccacggttgacccagaggagctcttcaggaagatctttggggagttctcatcctcctcttttggcgatttccagagtgtgttcaatcagcctcaggagtacatcatggacttgacgttcaatcaagctgccaagggcgtcaacaaggagttcaccgtgaacatcactgacacctgtgagcggtgtgatggcaaagggaacgagcccggcaccaaggttcagcactgccactactgcggcggctccggcatggaaaccataaacacaggcccttttgtgatgcgctccacgtgtcngaggtgtggtggccggggctccatcatcacgtctccctgtgtggtgtgcagaggagcaggacaggctaagcagaagaagaaggtggtgatccccgtgcctgccgg

SEQ ID NO: 9380 - DNA, 302 bp, Bos taurus
  Clone ID: 40-LIB34-033-Q1-E1-B8
gtctggtcttttgtagcaggacatctacagtggatggagtggcaccctcgggcacctgtcgccctggcgggcacggctgatggcaacacctggatctggaaggttcctactggtgactgcaagaccttccagggccccaactgcccggctacctgtggccgaatcctccctgattggaaacgagctctagttggctatgaagatggcaccatcaggatttgggatctgaaccagggaacctctatccacgtactaaaagggaccgagggtcatcaaggccccctgacctgtgtcgccaccac

SEQ ID NO: 9381 - DNA, 358 bp, Bos taurus
  Clone ID: 40-LIB34-034-Q1-E1-B8
atctgcactccacattacagaccggggaggattaggcccgctgtccgcgctctgttagcctgcgctgatcaggggcggtgtctggcggaccccgagagaactgggacatggtgcaccatttcaagtcatgatggcaataagtgtgccacttttcgtgaaaatgtgcttcgtatcttggagaatggtcattttgtctcctgtgtgaaaaaaacctcatacatggagtgcaccaaggggatctcgaatagtgggccagatgctgtcacgttggatgcgacgtttggcgtatgaggcacggctcaagcccaacaatctgaagcctgtggtggcaaaattccatgggacagaagacaaccca

SEQ ID NO: 9382 - DNA, 410 bp, Bos taurus
  Clone ID: 40-LIB34-036-Q1-E1-B8
cggacgcgtggggcttctcaactggtgggagaaaaccggaccatgaccatccacaacagcatgttcttcagcacatacgacagagacaacgacggctggtacgtgctgctgcttctctcctgctttcagtgccacggtcatgttgccgcctggagtcgttcatgacagcaaacatgactagtgactctcgtttcctgggtagttcctgtatgccagcactgtactaagctctctctgaagcacttcagctataaggtggccactgctgtcctcattttacacatgaagagtagcaagattaagtaatttacccaacattacataaccataaaaaatacaactgtaatttgagcacagttactttctaagtagtgagtactgagatagatttctgtatgtctatcatagac

SEQ ID NO: 9383 - DNA, 401 bp, Bos taurus
  Clone ID: 40-LIB34-037-Q1-E1-B12
actagattgcgagcggccgccctttttttttttttttttagagtcttttcattttttattaattgtagcacaaacaaaagaagcaaaatatttaaagaaatttacgttctttagtgagagtgttggtttaacaccaacagaaaaggaaaacagatgaataagctctgagttttcatttctcttttttcctcttactctcagggtaggctgagatgcctgtggttgtgtcgtgtttaggctaaggctgtttgagttgaaacaacaagttttggaccctccacagcaaagcaggcttctttgtcatcagctgcacagcacttgtctacaaaagccacaaaattctccatgacggttttcagttgttcctctgttgccttgggcctgtgtttcaacagctcaac

SEQ ID NO: 9384 - DNA, 426 bp, Bos taurus
  Clone ID: 40-LIB34-037-Q1-E1-B8
gatttaaaagcatggtcagtagctcgcctgagccagaaatttcccaaggctgagtttgtagaagttaccaagctagtgacagatctcacaaaagtccacaaggaatgctgccatggtgacctacttgaatgcgcagatgacagggcagatcttgccaagtacatatgtgataatcaagatacaatctccagtaaactgaaggaatgctgtgataagcctttgttggaaaaatcccactgcattgctgaggtagaaaaagatgccatacctgaaaacctgcccccattaactgctgactttgctgaagataaggatgtttgcaaaaactatcaggaagcaaaagatgccttcctgggctcgtttttgtatgaatattcaagaaggcatcctgaatatgctgtctcagtgctattgagacttgccaag

SEQ ID NO: 9385 - DNA, 378 bp, Bos taurus
  unsure (366): unsure at all n locations; Clone ID: 40-LIB34-038-Q1-E1-B12
caggaatggaggtgaaacatctgaaatgtacctcattcagcctgaggattctagcaaaccatatagagtatactgtgatatgaaaacggaaaaaggaggatggacagtaattcagaaccgtcaagatggtagtgttgactttggcaggaaatgggatccatataaacaaggatttggaaatattgcaaccaatgcagaagggaagaaatactgtggtgtaccaggtgagtattggctcggaaatgacagaattagccagcttaccaatatgggacccacaaagcttttgattgaaatggaggactggaaaggcgataaggtgacggcactctatgaaggatttactgtacagaatgaggccaacanatatcaactgtc

SEQ ID NO: 9386 - DNA, 423 bp, Bos taurus
  unsure (411): unsure at all n locations; Clone ID: 40-LIB34-038-Q1-E1-B8
cgctgaatgggaaccagacagcacagccatgctggaggcactgggctccctggtggctgccctctggaccacgctccgtcctggcattgtcctactgggggcctttgtctttctcctctttgctgatttcctcaaaaggcagcacccaaagaactacccaccagggcccctgcgcctgcccttcataggcaatttcttccacctggacttggggaaagggatcttggttcctcagcaggttgtgaagaaatatgggaacattattaggctagattttggtgtaattcatttcatcgttataactggattgccctatatcaaagaagcccttgtcaaccaggaacaaaactttgtaaaccgccccatgatacctcttcagaaacatatctttaacaataaaggcgtggtcangggtcaatggca

SEQ ID NO: 9387 - DNA, 435 bp, Bos taurus
  Clone ID: 40-LIB34-039-Q1-E1-B8
atgaagtgggtgacttttatttctcttctccttctcttcagctctgcttattccaggggtgtgtttcgtcgagatacacacaagagtgagattgctcatcggtttaaagatttgggagaagaacattttaaaggcctggtactgattgccttttctcagtatctccagcagtgtccatttgatgagcatgtaaaattagtgaacgaactaactgagtttgcaaaaacatgtgttgctgatgagtcccatgccggctgtgaaaagtcacttcacactctctttggagatgaattgtgtaaagttgcatcccttcgtgaaacctatggtgacatggctgactgctgtgagaaacaagagcctgaaagaaatgaatgcttcctgagccacaaagatgatagcccagacctccctaaattgaaaccagaccccaatact

SEQ ID NO: 9388 - DNA, 393 bp, Bos taurus
  Clone ID: 40-LIB34-040-Q1-E1-B8
gggactgggggcggagggcggcccgggggtggggaggccgctgcctccctgggcctgcccgggcggccgcctccgcgatgccgctgctcgtggacgggcggcgagtgcggctgccgcagtccgccggggacctggtccgagcccagccgcttctggaggaaagagccagacttctcagaggtcagtctgttcaacaagtgggaccccagggccttctgtatgttcagcagagagagcttgcagtgacctccccagaggatggctccgtctccattctgggttctgatgatgccaccacttgtcacattgtggtcctgaggcacacaggtgatggggctagcgtgcgtggacacactgcgacgggagtgacacgaagggctgaggtccccttgg

SEQ ID NO: 9389 - DNA, 413 bp, Bos taurus
  Clone ID: 40-LIB34-041-Q1-E1-B8
cttctcaagaagactgctctgtggtgttcactatcatctctgcacatttgaaacctcagactctcccagatgcacctcagcgctgtgtatcaccgcatacctctaagcgatgggaacagcattcctatcatcggacttggtacctactcggaacctaaatcgggtggaggacacactccttattcacaccttggactttatggttcagtcaagacctgtcagttcagcagcacctaccaccactcttccacctctctccacgtgtgaaacacagctcctcgaataacgcaccgaactccatgaccttgaacatgctgctttccacctggaacatcctttctcctgagctggttaatttttagtaaacctgcaagactcagctgaaggattcctctccttagaaaccacctcct

SEQ ID NO: 9390 - DNA, 417 bp, Bos taurus
  Clone ID: 40-LIB34-043-Q1-E1-B8
catttgtactaatctcagtgggtggtaccaaagtctttccaaggacatttggcctttccacctcctccctcccctctcactggctccctcccctccctcattgccacttgcagtgctggatattaggttgtgcaggcagaacctcacgccattcctctgcattggtgccgtggccgaagcccttcccccacttcccccttccccgccccctgctcttctgcgttgtggccaggggcagtgcgccatgcctgctaagtgtgaacttggcggtgagtcgtggcaaggaccagaatggatcgcagatgatcgttggccaactgttggcagaagaggaatccctgccttcctcaagaggaacacctaccccgtggctaatactggggtcggattttgatttccatttatttaatggatgtc

SEQ ID NO: 9391 - DNA, 411 bp, Bos taurus
  Clone ID: 40-LIB34-044-Q1-E1-B12
attttccattacttcatcaaaaccttgtttactgttctgccatccacaacaagatgatgagaaaagcataaacctggatgaaatctacaggccttgtttcctccctgttgctctttttcttttaacttatttggctgtactgggtcttagcggcagcacacagactctctagttgcaaaatttgaactcttagtagcagaatatgggatctagttccctgaccaaggatcaaacctgggccctctgcattgagagcacagagtcttagccaccgccagggaagtcacttcctcctgttttagatactggcttcaagcttgcttttcacagctgctaacaactgacaacagatttgaggtttcacgacctctcttcctgcaatttggacgggtcaaccaataaagcaaaact

SEQ ID NO: 9392 - DNA, 455 bp, Bos taurus
  Clone ID: 40-LIB34-044-Q1-E1-B8
taccgtactagaattcgccggccgacccacgcgatccactgaaagcatgagccaggctccctactgtgtcagaaatattcgttttggaactaagcttggatcagagctcaagctggaagacactctgtggacaggattaacagatgcgcatgtccaaatgccgatggcaattactgcagagaatcttgctgtaaaacatcaaataagcagagaagattgtgacagatacgccctgcaatcacagcataggtggaaaactgctaatgatgctggctactttgataatgagatggcaccagttgaggtgaagacaaggaaaggaaaacagacaatgcaagtagatgaacatcctcggccccaaacaaccatggagcagttaaataaacttcctccagtgttcaagagagaaggaaccgttactgcacggaatgcgtccggggtttccgatggtgctg

SEQ ID NO: 9393 - DNA, 320 bp, Bos taurus
  Clone ID: 40-LIB34-045-Q1-E1-B8
agatggattgcccgaactttctttgatggtcctgaaaagaattatgaaagaacaatggctatccttcaaattgaagctgaaaggctgaattacgattaaaggagctggaagtacgaagattaatgagagcaagaggtgatggcccctggtttcactatccaaccatcgataaggaacttattgatcattctccaaaagcaacccctgacaactaatcttttgtttctctaagtacaaagtatactgtctttaggtgaaaataaattactaaatatattctgtattttttctgtgtgataaatgaaagatcattttcaatg

SEQ ID NO: 9394 - DNA, 416 bp, Bos taurus
  Clone ID: 40-LIB34-046-Q1-E1-B12
ggcaggcagactgcctacgaatttgccaaacttaagtgcaagctggtcctgtgggatataaataagcatggacttgaggaaacagccaccgaatgcaagagactgggtgcaaaggctcatacctttgtggtagactgtagtaaccgagaagatatttacagctctgcaaagaaggtgaaggcagaagttggagatgttagtattttagtaaataatgctggtgtagtctacacatcagacttgttcgctacacaagaccctcagattgaaaagacttttgaagttaatatccttgcacatttctggactacaaaggcatttcttcctgagatgatgaagaataatcatggccatattgtcactgtggcttcagcagctgggcatactggggtccccttcttactggcttactgttc

SEQ ID NO: 9395 - DNA, 442 bp, Bos taurus
  Clone ID: 40-LIB34-047-Q1-E1-B8
agaggcgaaggacgcggtttctggaggcgaagaacgcggttggccaatcgcaagccagaagatgaaggttctgtgggttgccgtggtggtcgcgcttctggcaggatgccaggcggatatggagggagagctggggcccgaggagcccctgactacccagcagccccgggggaaggacagccagccttgggagcaggcgctgggccgcttctgggattacctgcgctgggtgcagaccctgtctgaccaggtgcaggaggagctgctcaacacccaggtcattcaggaactgacggcgctgatggaggagaccatgaaggaggtgaaggcctacaaggaggagctggagggacagctaggccccatggcccaggagacacaggcccgcgtgtccaaggagctgcaggcagcccaggcccggctaggctcggacatggaggac

SEQ ID NO: 9396 - DNA, 399 bp, Bos taurus
  Clone ID: 40-LIB34-049-Q1-E1-B12
acggacgcgtgggcgctgactattctcaaccaaccataaagatattggtaccctttatctactatttggtgcttgggccggtatagtaggaacagctctaagccttctaattcgcgctgaattaggccaacccggaactctgctcggagacgaccaaatctacaacgtagttgtaaccgcacacgcatttgtaataatcttcttcatagtaataccaatcataattggaggattcggtaactgacttgttcccctaataattggtgctcccgatatagcatttccccgaataaataatataagcttctgactcctccctccctcattcctactactcctcgcatcctctatagttgaagctggggcaggaacaggctgaaccgtgtacctcccttagca

SEQ ID NO: 9397 - DNA, 425 bp, Bos taurus
  unsure (345): unsure at all n locations; Clone ID: 40-LIB34-049-Q1-E1-B8
accagtttttgaaatattaaacattactctgtttccaaaaagtactgtggactttttcacaaaatctgtaaagaagattaaagaaagtcgcctcacagataaacaaatgaatcgagtggatttacttcagctaatgattaactctcagaattccaaagaaattgacacccataaagctctgtctgacatagaactcgtggcccaaagtactatctttatttttggtggctatgagaccactagcagtactctttccttcattatatatgaattgaccactcaccctgatgtccagcagaagctgcaggaggaaattgatgcaactttccctaataaggcccctcncacctatgatgccctggtgcagatggagtatcttgacatggtggtgaatgagactctgagaatgtttccaattgctggga

SEQ ID NO: 9398 - DNA, 428 bp, Bos taurus
  unsure (399),(421): unsure at all n locations; Clone ID: 40-LIB34-050-Q1-E1-B8
gaaactatgagagaaaaagtactgacttcatctgccagacagagactcaggtgtgccagtattcaaaaatttggagaaagagctttaaaagcatggtcagtagctcgcctgagccagaaatttcccaaggctgagtttgtagaagttaccaagctagtgacagatctcacaaaagtccacaaggaatgctgccatggtgacctacttgaatgcgcagatgacagggcagatcttgccaagtacatatgtgataatcaagatacaatctccagtaaactgaaggaatgctgtgataagcctttgttggaaaaatcccactgcattgctgaggtagaaaaagatgccatacctgaaaacctgcccccattaactgctgactttgctgaagataaggatgtntgcaaaaactatcaggaagcanaagatgc

SEQ ID NO: 9399 - DNA, 224 bp, Bos taurus
  Clone ID: 40-LIB34-051-Q1-E1-B8
aagattcatgtgtatgaaaagcatgctaattggactttaactccattgaagtctctggactgtgacacactcgtggataacatatctgtggatcctgtgacaggggacctgtgggttggctgccaccccaatggcatgaaaatcttctcctatgacccagagaatcctcctggatcagaggtgctccaaatccagaatattttagcagaagaacccaaagttac

SEQ ID NO: 9400 - DNA, 234 bp, Bos taurus
  Clone ID: 40-LIB34-052-Q1-E1-B1
gacatccctacttttatgcaccagaactcctttactatgctaataaatataatggagtttttcaagaatgctgccaagctgaagataaaggtgcctgcctgctaccaaagattgaaactatgagagaaaaagtactgacttcatctgccagacagagactcaggtgtgccagtattcaaaaatttggagaaagagctttaaaagcatggtcagtagctcgcctgagccagaaat

SEQ ID NO: 9401 - DNA, 231 bp, Bos taurus
  Clone ID: 40-LIB34-052-Q1-E1-B12
tccaatacaacatcccgagcggctgtcctttgtttttttttttttttttatttatcaatatattgtttttttatggattatttatgtgttgtttattctctctaataacatcactacatttgtccacgagaactatgtaattcggaggacagctgttgaaaatggaattgcacacgtcacaaagttccaggtgacaaagcaatttgctgaagctgtgaacaaagcacgcaa

SEQ ID NO: 9402 - DNA, 237 bp, Bos taurus
  Clone ID: 40-LIB34-054-Q1-E1-B8
cagagccatgcggagtctcagcggactgctgttgttactgactgcctgcctggcggtaaacgccagctccgtgcccacattgcccgatgacattcaagtgcaggagaacttcgacctgtctaggatctatgggaagtggttcaatgtggccgtgggctccacctgcccatggctgaagaggttcaaggagaagatgaccatgagcacagtggtgttgaaagcggggccgacgagcaa

SEQ ID NO: 9403 - DNA, 348 bp, Bos taurus
  Clone ID: 40-LIB34-055-Q1-E1-B8
cgctgactattctcaaccaaccataaagatattggtaccctttatctactatttggtgcttgggccggtatagtaggaacagctctaagccttctaattcgcgctgaattaggccaacccggaactctgctcggagacgaccaaatctacaacgtagttgtaaccgcacacgcatttgtaataatcttcttcatagtaataccaatcataattggaggattcggtaactgacttgttcccctaataattggtgctcccgatatagcatttccccgaataaataatataagcttctgactcctccctccctcattcctactactcctcgcatcctctatagttgaagct

SEQ ID NO: 9404 - DNA, 296 bp, Bos taurus
  Clone ID: 40-LIB34-056-Q1-E1-B8
gagcagtagggatttaatggtaaaattgattgtgtagagttctggtatgtgtggattgtgggatgttcctatgaataaaattgctgttaagatatttatgtatgataatatttgcgtactctgctatgagcaatagggcaaatggtcttgctgcatattctacgttgaagcccgatactagctctgattctccttcagttatatcatatgcagctcggtttgtttctgctactgttgagataaatcatattactgctacaagccatgcttaggaggattaaccatatttgttcttg

SEQ ID NO: 9405 - DNA, 222 bp, Bos taurus
  Clone ID: 40-LIB34-057-Q1-E1-B8
agaagagcttcttaaatcagagagaaactttgagagaaacttccaaggcaaatttcccaaagaaaatgggcaccaagggaaaaattattaaatgcaaagcagctatcgcctgggaagcaaacaagcccctcagcattgaagaggttgaggtagctccccccaaggatcatgaagttcgaatccagataattgccactgctctgtgccattctgatgcccata

SEQ ID NO: 9406 - DNA, 220 bp, Bos taurus
  Clone ID: 40-LIB34-058-Q1-E1-B12
gggaagtcaataaacatcgaataactttgaccctgatggacttaatggatgtcagtacacctgatttactggaacatgtgtcaggtaccaacgagatcaaagtttcctgcatgttcatacctgatgggcgggtggctgtctctgcacaaattgtcagaaaaagattctgtgaatgtgattacattaacatccatgcagattttgaaactaagtgttcact

SEQ ID NO: 9407 - DNA, 207 bp, Bos taurus
  Clone ID: 40-LIB34-058-Q1-E1-B8
acaccatggggctcaggacagcgcggtgttgtcggtatggtgcgaacaagcggtggacgaagtctcgcgtgcgtcaaggtgtccaggacggctaaattcgcatctttgacttggggcgtacaaaggacaaagtgtataagttcccagtctgtggacacatggtgtcagacgactacgaccagctcgcctctgaagccctggaggctg

SEQ ID NO: 9408 - DNA, 197 bp, Bos taurus
  unsure (192): unsure at all n locations; Clone ID: 40-LIB34-059-Q1-E1-B8
accccacaaaactttggcacaatgaagtgggtgacttttatttctcttctccttctcttcagctctgcttattccaggggtgtgtttcgtcgagatacacacaagagtgagattgctcatcggtttaaagatttgggagaagaacattttaaaggcctggtactgattgccttttctcagtatctccagcangtgtc

SEQ ID NO: 9409 - DNA, 239 bp, Bos taurus
  Clone ID: 40-LIB34-060-Q1-E1-B8
cgccgctgatccttcctcgttggtcgccgcgtccttggctggcgtaaaaatggccacaaacttcctcatgcatgagaagatctggtttgacaagttcaaatacgatgatgcagaaaggaagttctatgagcagatgaatgggcccgtagctggctcctcacgccaggagaatggcgccagtgtgatcctccgtgacatcgcgcgagccagagaaaacatccagaagtctctggctggaa

SEQ ID NO: 9410 - DNA, 417 bp, Bos taurus
  Clone ID: 40-LIB34-061-Q1-E1-B8
acagaggtgaaacaggtaatggatcccaaaggccagagagtgaagcttaatgatggccacttcattcctgtcctgggatttggcactgctgaagctaaagaggttcctaagagtgaagctctggaagtcaccaaatttgctatagaggttgggttccgccatattgactgtgctcatgtgtaccaaaatgaagagcacgttggccaggccattcgaagcaagattgcagatggcactgtgaagagagaagacatattctacacttcaaagctttggtgcactttccttcgaccagagttggtcagaccagccttggaaaagtcactgaaaaatcttcacctggactaggttgatctccaaataatccattttcaactggctatgaagccaggggaggaattattgccaaaagatgaa

SEQ ID NO: 9411 - DNA, 390 bp, Bos taurus
  Clone ID: 40-LIB34-064-Q1-E1-B8
ctgctcccaaaacttgattcaaatttagatgcacattggcaccagtggaaggcaactcacaggaggttatatggcatgaatgaagaagaatggaggagagcaatgtgggagaagaataagaaaataattgacctgcataatcaggaatacagcgaagggaaacatggcttccgcatggcaatgaatgcctttggtgacatgaccaatgaagaatttaggcaagtgatgaatggttttcaaaatcacaagcataagaaggggaaactgtttcatgaacctctccttgttgacgtccccaaatctgtggattggactaagaaaggctatgtaactcctgttaagaatcaaggtcagtgtggttcctgttgggcgtttagtgccactggtgct

SEQ ID NO: 9412 - DNA, 200 bp, Bos taurus
  Clone ID: 40-LIB34-065-Q1-E1-B12
cgcaatcttacgatcaatccccaacaaactaggaggagtactagccctagccttctctatcctaattcttgctctaatccccctactacacacctccaaacaacgaagcataatattccgaccactcagccaatgcctattctgagccctagtagcagacctactgacactcacatgaattggaggacaaccagtcgaac

SEQ ID NO: 9413 - DNA, 256 bp, Bos taurus
  Clone ID: 40-LIB34-066-Q1-E1-B8
tctagatcgcgagcggccccttttttttttttttttttttttttttttttttttttttttttttttttttttttttatatttaataatatatgggaggaattgttgttttttgatttattattgagtatttgattttattgaaaaaaaagggggataaaaaaaaaaaggaggggaaaaagggtgaacttaagaaggaaaaaggctcaaaggaaaatcagagaggagatggagaaaaaaactgatggggggatttaa

SEQ ID NO: 9414 - DNA, 204 bp, Bos taurus
  Clone ID: 40-LIB34-067-Q1-E1-B12
gtgatatcagttggactcctgctataatgtgctgcctacgatttattcacttacacatagctaggggtttaactggcaagtgtcttatacaactcgtccctctaacattgtgcctcaagacacatactacgttgtcacatacatcaactaagtctaaacatcatgagctataggtgctctaatagggggacttgatcacagctt

SEQ ID NO: 9415 - DNA, 235 bp, Bos taurus
  Clone ID: 40-LIB34-067-Q1-E1-B8
cgaacaggaagaggacgaaaaaaataaccgtccgcgacgccgagccgagccggacccgcatccaccatgaacagcaaaggtcaatatccaacgcagccaacttaccccgtgcagcctcctgggaaccctgtgtaccctcagaccttgcatcttcctcaggctccaccctatactgatgctccacctgcctactcagagctctatcgtccaagctttgtgcacccaggggctgcca

SEQ ID NO: 9416 - DNA, 243 bp, Bos taurus
  Clone ID: 40-LIB34-069-Q1-E1-B12
acggtttttcaagaatgctgccaagctgaagataaaggtgcctgcctgctaccaaagattgaaactatgagagaaaaagtactgacttcatctgccagacagagactcaggtgtgccagtattcaaaaatttggagaaagagctttaaaagcatggtcagtagctcgcctgagccagaaatttcccaagggctgagtttgtagaagttaccaaaagctagtgacaggattctcacaaaagtca

SEQ ID NO: 9417 - DNA, 419 bp, Bos taurus
  Clone ID: 40-LIB34-071-Q1-E1-B12
cccgggccgacccacacgtcaacagaactttggcacaatgaagtgggtgacttttatttctcttctccttctcttcagctctgcttattccaggggtgtgtttcgtcgagatacacacaagagtgagattgctcatcggtttaaagatttgggagaagaacattttaaaggcctggtactgattgccttttctcagtatctccagcagtgtccatttgatgagcatgtaaaattagtgaacgaactaactgagtttgcaaaaacatgtgttgctgatgagtcccatgccggctgtgaaaagtcacttcacactctctttggagatgaattgtgtaaagttgcatcccttcgtgaaacctatggtgacatggctgactgctgtgagaaacaagagcctgatagaaatgaatgcttccgga

SEQ ID NO: 9418 - DNA, 397 bp, Bos taurus
  unsure (271): unsure at all n locations; Clone ID: 40-LIB34-074-Q1-E1-B8
acaccatggcggctgggaccctgtacacatatcctgaaaactggagggccttcaaggccctcattgccgctcagtacagcggggctcaggtccgcgtgctctccgcaccaccccacttccattttggccaaaccaaccgcacccccgaatttctccgtaaatttcctgctggcaaggttccagcctttgagggtgacgatggattctgtgtgttcgagagcaatgccattgcctactatgtgagcaacgaggagttgcggggaagtactcncgaggcagcagcacaggtggtgcagtgggtgagctttgctgatagcgacatagtgccaccggccagcacctgggtgttccctaccttaggcatcatgcaccacaacaagcaggccacagagaatgc

SEQ ID NO: 9419 - DNA, 364 bp, Bos taurus
  Clone ID: 40-LIB34-075-Q1-E1-B8
gtcgtattactttaaatattttgcttcttttgtttgtgctacaattaataaaaaatgaaaagactctaaaaaaaaaaaaaaaaaaaaaaaaaaaaaaaaaaaaaaaaaaaaaaaaaaaaaaaaaaaaaaaaaaaaaaaaaaaaaaaaaaaaaaaaaaaaaaaaaaaagggggggacgctcaaaaggataaaagttaacttaggcgtgaatgaaacgtcaaagctcttcaaaagtgtaaccaaaattaaattaaggggcggtcgtttaaaaaggtcttaaggggaaaaaccttggggtaaccaaattaaaccgctttgaagaaaatccccttttcgcaagcgggggtaaaaacaaaaaggcccaa

SEQ ID NO: 9420 - DNA, 336 bp, Bos taurus
  Clone ID: 40-LIB34-076-Q1-E1-B12
aatgagtcgtataacgtgtagcaaggctgttaattaatagagaaaccgtatttggatggagagcacacatctgttaaatagaatacctcaactttatgtttttctggagagaaataatagttttaagtttggtgtttttttttttaacctaattatctgaaagcaaataccaaaggctggtgatgtctgtatatggagcaaagggtcagtataatttttttcagtgttttttcttttaaccagctattttgcatttaaaatgaaaattgtaaatgtttgaaataaataagttccaaaatataaagtcaagtaagtttaaaaaaatagctttgtgat

SEQ ID NO: 9421 - DNA, 409 bp, Bos taurus
  unsure (382): unsure at all n locations; Clone ID: 40-LIB34-076-Q1-E1-B8
gttatggggataatacctagacgatgttgctagagaacttccctacttttatgcaccaggactcgtttactatgctgatacggatcatggagtttttcaagaatgctgccaagctgaagataaaggtgccgtgcctgctaccaaagattgatactatgatagaaaaggtactgacttcatctgccaggcagagactcaggtgtgtcagtattcagaactttggagactgagctttaagagcatggtcagtagctcgcctgagccagagatttcccacggctgagtttgtagatgttagcacgctagtgacagatctcatagcagtccacacggaatgctgccatggtgacctacttgattgctcagatgacagggcagatcntgctacgtacatatgtgatagtcagga

SEQ ID NO: 9422 - DNA, 301 bp, Bos taurus
  Clone ID: 40-LIB34-078-Q1-E1-B8
ctgaatttttatagcacttcttcaattagactttcacatagtatggaaaaaactcaaactgtatgtattaatataacttttgaccaagccagccctataacagttataggcagctggctccaagcagaagcacgtatgaactggaccagcactgaagctggcatcagttctctgaaggtctctgaactctggggaatgacattttttgcaagttcaagatgaccaggatctgagttattttgctaaactctgagagagtgagaacacataaattctttatcgtgttaaaaacatcatctaa

SEQ ID NO: 9423 - DNA, 394 bp, Bos taurus
  Clone ID: 40-LIB34-082-Q1-E1-B12
aggttatcgttgagacaaggacggtctgagtgtttaagatcgcatacctgtctcgcaagtactccgtacgtgaatgacctcatacggcaaacacggattgtggattctgcatggaccatcctcaacaagtttagaactgatatctatatttagacagaccacaggatgacgcattcatcatctgcgaaatcactgggcattgggctgtcactgtttgctgataccaccaatggcacatttctcagtgctaagctgggctcgaacactcacagccagggcgcaacgatgcagtcagactaccttggcaggaactgtgccatgctgctgcttgaatagatctaccggagtggatacgtggacacgaccatccaaaacctgagctctattactcatg

SEQ ID NO: 9424 - DNA, 439 bp, Bos taurus
  unsure (371): unsure at all n locations; Clone ID: 40-LIB34-082-Q1-E1-B8
attcaaaatccgaagccaagcaatccaccagctgaaggtcaatggggaagatccatacccacacaagttccatgtggacatctcgctcactcacttcatccaagaatacagtcacctgcagcctggggaccacctgactgacatcaccttaaaggtggcaggtaggatccatgccaaaagagcttctggaggaaagctcatcttctatgaccttcgaggagagggggtcaagttgcaagtcatggccaattccaggaattacaaatctgaagaagaatttattcgtattaacaacaaactgcgccggggagacataattggagtccagggcaatcctgggaaaaccaagaagggcgagctaagcgtcatcncctatgaaatcacactgctgtctccttgcctgcacatgttacctcatcttcacttcggcctcaaagac

SEQ ID NO: 9425 - DNA, 377 bp, Bos taurus
  Clone ID: 40-LIB34-083-Q1-E1-B8
aggaatcaatgaacaaatccccctataatagcaaatactaatagttttcatcatctgagaagcatttgcatctaaacgagaagtcttgactgtagacttaaccacgacaaatctagaatgattaaacggatgccctccaccatatcacacatttgaagaacccacctatgttaacctaaaataagaaaggaaggaatcgaaccccctactattggtttcaagccaacatcataacctctatgtctctctcaataaacaaaaaaaaaaataaaaaaaaaaataaaaaaaaaaaaaaaaaaaaaaaaaaaaaaaaaaaaaaaaaaaaaaaaaaaataaaaaaaaaaaaaaaaaaaaaaagggggggccccccaaaaggt

SEQ ID NO: 9426 - DNA, 434 bp, Bos taurus
  unsure (419): unsure at all n locations; Clone ID: 40-LIB34-084-Q1-E1-B8
gtgacaagccccagggtgcaaaaaaagattcaggaggagctggacacagtgattggcagggcgcggcggccccggctctctgacagaccccagctgcccatatttggagcgccttatacctctgaaacacttctcgagacactcctccttggctccttcacaatctcacacagattcacacgagacagcaatctgaacggcttttacatccccaaggggcgctgtgtctttgtgaaccagtggcagatcatccatgaccagaagctctgggaggatccatctgagttccggccagaacggtttctcactgctgatggcaccatcaacaaagtactgagtgagaaggtgattattttcggcttgggcaagcggaagtgcatcggtgagaacattgcccgcttggaggtctttctcttctntggcatcctgctgca

SEQ ID NO: 9427 - DNA, 332 bp, Bos taurus
  Clone ID: 40-LIB34-085-Q1-E1-B12
agctttgtgtgtcctacagaaatcattgctttcagtgacaaagccattgaatttcacaaggtgaacggcaaatttgtggcattgtcattggcccccaacttcagcaactgggcctggttaaccacaccgaggaaaaatggtggtttgggcaatatgaacatcacaccctggtcatatttgcccaaacagatttcccgacactacggtgtgctgttaaagggtcctgccctcacaatacgcggtctcttcatatttgaccccagcggtctcatcacgcatctgagtgttaatgatcccacagtgggccaaagcgtggaagacaccctcctctt

SEQ ID NO: 9428 - DNA, 491 bp, Bos taurus
  unsure (455): unsure at all n locations; Clone ID: 40-LIB34-086-Q1-E1-B8
gtcggagtccgggtggaccacaagtccgcagacttttccttagaacaccaaaaattgtctctggcaaagactataatgtgacagcaaactccatgctggttattatcacagctggggcacgtcagcaagagggagagagccgtctgaatttggtccagcgtaacgtgaacatctttaaattcatcattcctaatattgtaaaatacagcccaaattgcaagttgcttgttgtttccaatccagtcgatattttgacctatgtggcttggaagataagtggctttcccaaaaaccgtgttattggaagtggttgcaatctggattcagctcgcttccgttatctcatgggggagaggctgggagttcacccattaagctgccatgggtggatccttggggagcatggtgactctagtgtgcctgtatggagtggagtgaatgttgctggtgtctcnctgaagaatttacaccctgaattaggcactgatgca

SEQ ID NO: 9429 - DNA, 378 bp, Bos taurus
  Clone ID: 41-BOVMS1-002-Q1-E1-C2
atcaaaagaaaacctaacccgaaaaaaactatttattactatgctgatctcactacaactattcctaattataacctttaccgccatggaactaatcttattttatattcgatttgaagcaacactagtcccaacactcattattattacccgatgaggaaaccaaacagaacgcctaaacgccggactctatttcctattctatacactagctggctccctacccctattagtcgcactaatttatatccaaaacacagtaggatccctaaatttcctaatattacagtactgagtacaacctgttcataactcttgatctaatgtcttcatatgactagcatgtataatagctttcatagtaaaataccactatat

SEQ ID NO: 9430 - DNA, 436 bp, Bos taurus
  Clone ID: 41-BOVMS1-003-Q1-E1-C2
gggtcggcgcacgcgtccgaatttgaaaactcttccctctgacatcagcattgatgaaggaaaagttttaacagtagcctgcgcttttacgggtgagcctaccccggaaataacatggtctcgtggtggaagaacaattcacgatcaagaacagcgagggcgattccatattgaaaacacagatgacctgacgactctgatcatcatggacgtacggaaacaagatggtggactgtataccctgagtttaaggaatgaatttggatctgactctgctactgtgaatataaatattcgatccatttaagagggcctgtgctctcacactcagactcattcttaacctttcccaaatgattcacatggactaatctttctatctttctgatcttgtgatacttaaaaaaaagagtatttttgtatcaacctaaatgag

SEQ ID NO: 9431 - DNA, 448 bp, Bos taurus
  unsure (90),(403),(407): unsure at all n locations; Clone ID: 41-BOVMS1-004-Q1-E1-C2
tcttatcaatattcttgaccctttttatcatctttcaactaaaagtttcaaaacacaacttttatcacaatccagaactgacaccaacanaaatattaaaacaaaacaccccttgagaaacaaaatgaacgaaaatttatttacctcttttattacccctgtaattttaggtctccctctcgtaacccttatcgtactattcccaagcctactattcccaacatcaaaccgactagtaagcaatcgctttgtaaccctccaacaatgaatacttcaacttgtatcaaaacaaataatgagtatccacaattctaaaggacaaacatgaacattaatattaatatctctgatcctatttattggatcaacaaacctactaggcctaattacccattcattcacnacancaacacaactatcaataaacctaggcataaccaatcccctg

SEQ ID NO: 9432 - DNA, 427 bp, Bos taurus
  Clone ID: 41-BOVMS1-005-Q1-E1-C2
gttcatactggagagaaaccttacaaatgtgatgagtgtggcacagccttttctgcaaagtcaacccttttacgacatcagacagttcatactggagagaaaccttacaaatgtgatgagtgtggcaaggcctttcgtttaaagtcatacgttttaaatcatcagacagttcatactggagagaagccttacaaatgtgatgagtgtggcaaggccttttgtgtaaagtcaaagcttttaagtcatcatacacttcatactggagagaaaccttacaaatgtgatgagtgtggcgaggcctttcgtgtaaagtcaatccttttaagtcatcagacagttcatactggtgagaaaccttacaaatgtgatgagtgtggaaaagtcttcggtcaaaaaccacatcttcgacttcactggagaattcata

SEQ ID NO: 9433 - DNA, 388 bp, Bos taurus
  unsure (352): unsure at all n locations; Clone ID: 41-BOVMS1-007-Q1-E1-C10
agcaattctactaaaactaggggggtacggtatgctacgaatcacactaattctaaaccctatgaccgactttatagcatacccattcattatactctccctatgaggcataattataaccagctcaatctgcctccgtcaaacggacctaaaatcactcatcgcatactcctctgtaagccacatagcactcgttatcgtagccatccttatccagacaccttgaagctacataggagcaaccgcccttatgattgcccacggcctcacatcctccatacttttctgtctagcaaactcaaactacgaacgaatccacagccgaaccataattctagctcgaggcctacanacgctccttccactaataggcacctgatgactacta

SEQ ID NO: 9434 - DNA, 433 bp, Bos taurus
  Clone ID: 41-BOVMS1-007-Q1-E1-C2
gaaaagtattaatatataagaaattcggggaaaataagaacgagagacttttcaatcactttcattttataaattgccacctgtgaaaatgtttttgcacattacttgtatttttctttgtatatgaaataattttttgtactctgtaaaatatggagcccactgtaccttcagctaattgagactttacacagtggttcttttgtcactggattcttttaactttcatgaacgcactacatgccttgtattcactaaccatcttgaattacacatttcttaaccaacaatgaatacttcaacttgtatcaaaacaaaataaatgagtatccacaattctaaaggacaaacatgaacattaggattaatatctctgatcctatttattgcatcaacagtcctactaagcctaataccccattcagtcacacca

SEQ ID NO: 9435 - DNA, 383 bp, Bos taurus
  Clone ID: 41-BOVMS1-008-Q1-E1-C2
cccaagcatccgcaaagatgtccgtcgtggcaatgtggctggtgatagcaccaatgatccagccatggtagctgctggcgtcacagctcatgtgattattttgaaccatccaggccaaatcagtgctggatatgcacctgtgctggattgtcacacatctcacattgcttgcaagtttgctgagctgaatgagaagattgatcgtcgttctgggaaaaagctggaagatggccctacattcttgacatctggtgacgctgccatcgttgatatggttcctggcaagcccatgtgtgtcgagagcttctctgagtatcctcccctgggccgttttgctgtgcgtgacatcagacagacagtcactgtgggtgtcatcaaagcag

SEQ ID NO: 9436 - DNA, 416 bp, Bos taurus
  Clone ID: 41-BOVMS1-009-Q1-E1-C10
atgcgacgtcatagctcttctatagtgtcacctaaattcaattcactggccgtcgttttacaacgtcgtgactgggaaaaccctggcgttacccaacttaatcgccttgcagcacatccccctttcgccagctggcgtaatagcgaagaggcccgcaccgatcgcccttcccaacagttgcgcagcctgaatggcgaatgggacgcgccctgtagcggcgcattaagcgcggcgggtgtggtggttacgcgcagcgtgaccgctacacttgccagcgccctagcgcccgctcctttcgctttcttcccttcctttctcgccacgttcgccggctttccccgtcaagctctaaatcgggggctccctttaaggttccgatttagtgctttacggcacctcgaccccaaaaaacttga

SEQ ID NO: 9437 - DNA, 502 bp, Bos taurus
  unsure (471): unsure at all n locations; Clone ID: 41-BOVMS1-009-Q1-E1-C2
ggtccggttatccgggtcgaccgacgccttcgggccaacatctcacagcccagatctcaaaatgttaatgaacgacaaaacgttctcttttcttgtgaaatcagtggtgagccatcgcctgaaatcgaatggcttaaagacaacctgccaatttctatttcttcaaatatcagtgtaagtcgctccagaaatgtatattctcttgaaatccgaaatgcatcagtaagtgacagtgggaagtagacaattaaggccaaagatttccatggccagtgttcagctactgcttccttaacagtccttcgaattccacctaaaattgaagctcttcgctctgacatcagcattgatgaatgaaaagttttaacagtagcctgcgcttttacgggtgagcctaacccggaaataacatggtctcgtggtggaagaacacttcacgatcaagaacagcgatggcgattctatattgantacacagatgaactgacgactctgatcatca

SEQ ID NO: 9438 - DNA, 434 bp, Bos taurus
  Clone ID: 41-BOVMS1-010-Q1-E1-C2
cttgtgctacacaaggaaccggtctgtatgagggacttgactggctgtcaaatgagctttcaaaacgttaaatgaagctggatatctaaccaaggacatgtttgatagaattggtctaagcttgttacaacaaaattagtttgcatcttggttattaaacagtatctgggactggtttgggcagaatattactgcgtttaaacttattttgttgccaattattgtttaccaagtgtaatgttgccatttagcaatatgcttggttttaaagagattctccttaacttgggaaaaaaaaaagtgtcctcttttaattttacttcccttaagcctaaatgcctggacttagctaatgtgacaccttttaaataaatccattttgaatgttttttttttttgagcccacaggaataatgttttaaagttaccccttg

SEQ ID NO: 9439 - DNA, 437 bp, Bos taurus
  unsure (366),(369): unsure at all n locations; Clone ID: 41-BOVMS1-012-Q1-E1-C2
aaggaatcaaagtttaaggaaacaggagttatcaccccagaagagtttgtggcagctggagatcacttagtccaccactgtccaacatggcaatgggctacaggggaagaattgaaagtgaaggcttacctaccatcaggcaaacaatttttggtcaccaaaaatgttccatgctataagcggtgtaaacagatggaatattcagatgaattggaagctatcattgaagaagatgatggcgatgggggatgggtagatacttatcataatacaggtattgcaggaataaccgaagcagttaaggagattacactggaaagcaaggacagtataaaactccaagattgctcagctttatgtgaggangangaagaggaagatgaaggagaagctgcagatatggaagaatatgaagagagtggattgttgggaacaga

SEQ ID NO: 9440 - DNA, 424 bp, Bos taurus
  Clone ID: 41-BOVMS1-013-Q1-E1-C10
acagaaacccttaagacaaagcggaagaatttcgcagagcttaagatcaagcgactgagaaagaagtttgcccaaaagatgcttcgagaggcaaggaggaagcttatctatgaaaaagctaagcattaccacaaggaatacaggcagatgtacagaactgaaattcgaatggctaggatggcacgaaaagccggtaacttctatgtacccgcggaacccaaattggcgtttgtcatcaggatcagaggtatcaatggtgtgagcccaaaggttcgaaaggtgctgcagctccttcgcctccggcagatcttcaacggcacctttgtgaagctcaacaaggcgtcaattaacatgctgagaattgtggagccatacattgcatgggggtaaccaaatctgaagtctgtaaatgaattgatttaca

SEQ ID NO: 9441 - DNA, 362 bp, Bos taurus
  Clone ID: 41-BOVMS1-015-Q1-E1-C10
atgcgacgtcatagctcttctatagtgtcacctaaattcaattcactggccgtcgttttacaacgtcgtgactgggaaaaccctggcgttacccaacttaatcgccttgcagcacatccccctttcgccagctggcgtaatagcgaagaggcccgcaccgatcgcccttcccaacagttgcgcagcctgaatggcgaatgggacgcgccctgtagcggcgcattaagcgcggcgggtgtggtggttacgcgcagcgtgaccgctacacttgccagcgccctagcgcccgctcccttcgccttcttcccttcccttctcgccacgttcgccggctttcccccgtcaagctctaaatcgggggc

SEQ ID NO: 9442 - DNA, 309 bp, Bos taurus
  Clone ID: 41-BOVMS1-016-Q1-E1-C10
attgtatacctcattttgttaattttaaaacgaagccctgtggaaggaaatggaaaacttgaagcattaaactcagacgtactgttttgctgcgaaaaaaaaaaagagaaaaaaaaaagaaaaaaaaaaaaaaaaaaaaaaaaaaaaaaaaaaaaaaaaaaaaaaaaaaaaaaaaaaaaaaaaaaaaaaaaaaaaagggggggccgaccccaatcaaaaatttataagaacggggttttcaagcaaaaaggcaaaatgaaaaaccggaaaatttaaaacaatttggcagaaaattaacctgcaaaatta

SEQ ID NO: 9443 - DNA, 359 bp, Bos taurus
  unsure (35),(93),(119),(171),(287),(307),(319): unsure at all n locations; Clone ID: 41-BOVMS1-018-Q1-E1-C2
atgcgacgtcatagctcttccatagtgtcacctanattcaattcactggccgtcgttttacaacgtcgtgactgggaaaaccctggcgttacncaacttaatcgccttgcagcacatcnccctttcgccagctggcgtaatagcgaagaggcccgcaccgatcgcccttcncaacagttgcgcagcctgaatggcgaatgggacgcgccctgtagcggcgcattaagcgcggcgggtgtggtggttacgcgcagcgtgaccgctacacttgccagcgccctagcgcncgctcctttcgctttcttcncttcctttctcngcacgttcgccggctttccccgtcaagctctaaatcgggg

SEQ ID NO: 9444 - DNA, 393 bp, Bos taurus
  Clone ID: 41-BOVMS1-019-Q1-E1-C10
ccttgttctccgcttttcagtgttgttgtttgacgacgttgccctgctcacttcagcctccggaccgccatctccttgaacgctaccaccatgccgtcacttaacttgcagagctctgatggagagatattcgaagttgatgttgaaattgcacaacactctgtgaccatcaagactatgttggcaaatttgggaatggatgatgaaggagatgatgatccagtccccttgccaaatgttgatgcaccaatattgaaaaaggtcattcagtggtgcactcaccagacggatgatcctcctcctcctgaggaagatgagaaattcctaagacgactatatgatagagctgtctgggatcatgaaatcttgaaagttgaccaacggacactcttt

SEQ ID NO: 9445 - DNA, 353 bp, Bos taurus
  Clone ID: 41-BOVMS1-019-Q1-E1-C2
gcaggctgagatcgaggagctgagggccaccctggagcagacagagaggagcaggaagatcgcagagcaggagctcctggatgccagtgagcgtgtccagctcctgcacacccagaacaccagcctgatcaacaccaagaagaagctagagacagacatcactcaaatccagggagagatggaggacattatccaggaagctcgcaacgcagaagagaaagccaagaaggccatcactgatgcagccatgatggctgaggagctaaagaaggagcaggacaccagtgcccacctggagcggatgaagaagaacctggagcagacggtgaaggacctgcagcaacgcctggacg

SEQ ID NO: 9446 - DNA, 403 bp, Bos taurus
  unsure (307),(370): unsure at all n locations; Clone ID: 41-BOVMS1-021-Q1-E1-C10
atgcgacgtcatagctcttctatagtgtcacctaaattcaattcactggccgtcgttttacaacgtcgtgactgggaaaaccctggcgttacccaacttaatcgccttgcagcacatccccctttcgccagctggcgtaatagcgaagaggcccgcaccgatcgcccttcccaacagttgcgcagcctgaatggcgaatgggacgcgccctgtatcggcgcattaagcgcggcgggtgtggtggttacgcgcagcgtgaccgctacacttgccagcgccctagcgcccgctcctttcgctttcttcncttcctttctcgccacgttcgccggctttccccgtcaagctctaaatcgggggctccctttanggtttcgatttagtgctttacggcacctcgacc

SEQ ID NO: 9447 - DNA, 431 bp, Bos taurus
  Clone ID: 41-BOVMS1-022-Q1-E1-C2
gaacaccagcctgatcaacaccagacaggaagctagagacatacatcactcaaatccagtgagagatggatgacattacccaggaagctcgcaacgcatacgagacagccaacaacgccatcactgatgcagccatgatggctgatgagctaaagaaggatcatgacaccagtgcccacctggagcggatgaagaagaacctgtagcagacagtgaacgacctgtagcaccgcctggacgatgctgagcagctggccctgaagggacggaagaagcagatgcagaatctgcgcgccagggtacgtgaactggcacgagatattgagagtgcatagaaacgcactgttgaagctgtcaatggtctacgcacacacgatagacgagtgattgagctcacttaccagactgacgatgaccgcaagaacattctc

SEQ ID NO: 9448 - DNA, 449 bp, Bos taurus
  Clone ID: 41-LIB188-001-Q1-E1-C2
taccactgcacaacgtttatcgggaagatgctacactcgtcacaacaagtgaacatcactgtctaagagtccagctcgagcggcccctcatcgatgacagctgtggctataggcacctgttttgctgcagtggctattgttgcggccataataacctggttccgcctcaggagaaagccaatctcagttggagcatggcatacagggattccttgtgtcctggagatgaatgaagacactagatgcattgtctcagactccttccccacttcctgaggaatgctgctttgcagatactgagctgctttccgcactggcaaaccggtctcactgatgctgaaaatgatgctgccataactgaggctgagaacacagtcacctattcactcctctcgcacccggatgttgcagaggaagactcagagtccgattaccagaaatccctttag

SEQ ID NO: 9449 - DNA, 431 bp, Bos taurus
  Clone ID: 41-LIB188-002-Q1-E1-C2
accactgcacagcgtttatcgggaagatgctacactcgtcacaaccagtgaacatcactgtctaagagtccagctcgagcggcccctcatcgatgacagctgtggctataggcacctgttttgctgcagtggctattgttgcggccataataacctggttccgcctcaggagaaagccaatctcagttggagcatggcatacagggattccttgtgtcctggagatgaatgaagacactagatgcattgtctcagactccttccccacttcctgaggaatgctgctttgcagatactgagctgctttccgcactggcaaaccggtctcactgatgctgaaaatgatgctgccagaactgaggctgagaacacagtcacctattcactcctctcgcacccggatgttgcagaggaagactcagagtccgatt

SEQ ID NO: 9450 - DNA, 267 bp, Bos taurus
  Clone ID: 41-LIB188-003-Q1-E1-C10
tgatactgcgctgctggacctgcaaaataacaaaataactgagatcaaagatggagactttaagaacctgaagaaccttcatacactgattctcatcaacaacaaaattagcaaaatcagccctggggcatttgctcctttggtgaaattggcacgactttatctttccaagaatcaactgaaggaattgccagagaaaatgcccaaaactcttcaggagctgcgtgtccatgagaacgagattcacaaagtgcgaaagtctgtgtt

SEQ ID NO: 9451 - DNA, 397 bp, Bos taurus
  Clone ID: 41-LIB188-005-Q1-E1-C2
acacgcacgacagacactgggctgtcggacacttaatgggaaacaagagtgtggcagagtccccacatcttcatgaagaggatagcctgaatgagcagctgatggactatgcccagtgggaacaagctataaggaacttgctaagcctcctataaacaaagggggcccgaggccaccatatgcctccatgggagcccctgagcattcatcagcctgcctgggattcctaggacgtcagcaacttcaaagatacaggtcctcagcatgatcgaacgaacccccatctgaactgacaatgaccatggccacctccctcatagaatcagaacacaatccttaagaaactgcgttctatgggcatcagttctaccggatcatcaaaaaattttctttgtgc

SEQ ID NO: 9452 - DNA, 393 bp, Bos taurus
  Clone ID: 41-LIB188-006-Q1-E1-C2
ctcccgaccgacatgggcccgggatacatggatacagtcaaggagcgaatccgtttagctcgacagattgaaaaagcggagtatcggaacttccaggcttgtctgcacaactcttggatcgagcaggccgcggctgccctggagattgagctggaagaagaaatgtataggggaggaaaagttgatgagcaggaagagcgtcggagacaaaagcagatgaagatcctgaagaaggagctgcgccatttactttcgcagccgctgtttaaagatgacctgaaaaccaagtatcccactcagtcaggcaagctgcccctgctcacgtctgccccaagaaagggtgagtccgcgctgagctgcctttccaaacagaagaagaagaagaagaaaaag

SEQ ID NO: 9453 - DNA, 411 bp, Bos taurus
  unsure (388): unsure at all n locations; Clone ID: 41-LIB188-007-Q1-E1-C10
tgggcccgggatacgaacagacacagttttgttgactcttacgccttctggcacgaccttcagggtcttcttgacaccatcactgatgaagtggttgtagacggcagccttgacctccacctcgtggaggccgatcttcaggggcacaatgacgtaaggcaccgccaccgaggacctggctgggattgttatagtctgctggtggcgcttcttggcggtggccaggctacagaaggctggattgtagagcaattccaccctcaccttgagattttccgcctcccggtagttgtagaggatcgctcggatctccacttgctcgttgcgcaccaccgagtaggggagacgcaggtcgataaagaaatcctgcatcacagtgacctcatangggtcagccacacagatcccttc

SEQ ID NO: 9454 - DNA, 343 bp, Bos taurus
  Clone ID: 41-LIB188-007-Q1-E1-C2
ggacaccgtgccatgtttatgacactctcctggtcgtcataagccacccaacgggttgcccctgggggcataagggaactggcgggccacggaaccgttggttgggggccccttgaagaaattccaaatttccaaaaaaggcaaggatcccttcccccttggggaacgggctggaaattccctgcccctgagatggggggctccaaatctgtcctggaaaaggccagagtgtacctcctcccaaaagtggggataaccatcaccagcttatttgctggagcccccagcctcagcatgcagctcacagcgtagtcagcgttactgaatctgtcagaacttgcat

SEQ ID NO: 9455 - DNA, 413 bp, Bos taurus
  unsure (222),(396): unsure at all n locations; Clone ID: 41-LIB188-008-Q1-E1-C2
ggccgcgggatactggtcagactgggggaaccaccccaagattgaaacagcagcaatggatggaacccttcgggagacgctggttcaggacaacatccaatggcccacaggcctggccgtggattatcacaatgaacggctttactgggcggatgccaagctctcagtcatcggtagcatccggctcaacggcacagaccccatcgtggctgctgacagcanacgaggactgagtcacccttcagcattgatgtctttgaggattacatctatggcgtcacctacatcaataatcgtgtcttcaagatccataagttcgggcacagccccttgatcaacctgactgggggcctgagccatgcctccgatgtggtcctgtaccagaccaagtatgangagctgcagcagactgc

SEQ ID NO: 9456 - DNA, 423 bp, Bos taurus
  Clone ID: 41-LIB188-009-Q1-E1-C10
tggccgcgggatacgggctctcggccgaggtcaagaaccggctgcagtccaaatatgaccctcagaaggaggcggagctccgaagctggattgagggactcactggtctctccgttggcccagacttccagaagggtctgaaggatgggatcatattgtgcacactcatgaataagctgcagccaggctcagtccctaagatcaaccgctccatgcagaactggcaccagctagaaaacctctccaacttcatcaaggccatggtgagctacggcatgaatcctgttgacctgtttgaggccaacgacctgtttgaaagtgggaacttgactcaggtgcaggtgtctcttcttgccctggctgggaaggccaagacaaaggggttgcacagtggtgtggacattggcgtcaaatactcagaga

SEQ ID NO: 9457 - DNA, 387 bp, Bos taurus
  Clone ID: 41-LIB188-009-Q1-E1-C2
acagcgccgaatctaccttcgaggggatcctcaaaaacccaagagcagagtctttgaacagcaggtccctctggccgggtggagagccaaagagctggaagctccgagacttgttttttccaaatttctcctgcgccttgctgagaagcttccagatcaagtcttccttgccatccacacttcgggccacgacagcatgagaagggacctgggccaagtggcactccttgaacgcatccactggcgcccgactgttgttcaggcagagaagctcatactggtccctgtcagccttctctggcaagttctcaacactgtcgtctctttaacaaaagtcacgtctccagccccgtcctgcagacacttgaaggcaccagaataaccgaa

SEQ ID NO: 9458 - DNA, 318 bp, Bos taurus
  Clone ID: 41-LIB188-010-Q1-E1-C2
accggctggagcatcgtatgtggcactagcgtcacatgcttcagttcagaaagttcggttgtccgtaatagttcacctttgggttccacagtgctcacgtcatcaggcaatgcttcttagggacaatcataccaatctgttcctctggtaataagatcttaaactttatgggcactacagacggtctgactagcacatggcgcacagtcgtttgtaaatgctattttacatggtcccgattgtggattatgctggcaaccatagacgtcaaggctttatccctcagtcctcaatgtttcacagacaccaggacttctc

SEQ ID NO: 9459 - DNA, 371 bp, Bos taurus
  Clone ID: 41-LIB188-011-Q1-E1-C10
atgctgccgtacgccatggaggccggatactggttctgaggggccggctcgcagcgcagccaagtcatcgccctgtgacgacgccctgtccccatttgtagcacccagacatatctcggttttatgtatctgtttgtagtgttaggctgacatgtattaagctgggccagatgaattaagtccatctgttgtcttttggtgtttaaataatgagtccaatgacttaagtgtttggttgaaaaccttgcttctcttctaacacaaaggttaaattttgctcccttttcccatctctgggctgggcgttgctaaatgaccaagaggggaaaaaaaacatttttcaaggggcagctaagtccaaatggcaagag

SEQ ID NO: 9460 - DNA, 382 bp, Bos taurus
  Clone ID: 41-LIB188-012-Q1-E1-C2
acaagaataattaagtattttgcacataggaaatttgttgatgatccagtagaactgatgcccatagaacgcagtttcttaaggattttgttttgcttctttgagggatgcggccatcgtcattgtcagttcagctgggggttccttccttcatgctgaggacctgtgtctttgaaattgctgacgtcctctgaatcacatgcaggctggtgaatgctcacgggctcccatggaagcatctggtggcctcgggccacctttgcttgtaggacgcttagcaagttccttgtcacttcttcccactgggcatactcgctcagctgctccttcaggctctcctcatcatgaagttatggggaccctgccatactcttttttccca

SEQ ID NO: 9461 - DNA, 427 bp, Bos taurus
  Clone ID: 41-LIB188-013-Q1-E1-C10
actggtccggcaggaagctgcagcctttctcgagggcagccaggatctgctccttggtgctgttcttctccaggttccggtccaaatagcccaccagcttcttgcacacctcgcagaagccaccgtccttcctcggcatcacacggaccgtcgctgccggcagcccccggctggagcagaggtggagcatgctgcacaccagctcggggctcgcctcgtccagaaggatagacaggatggagctgccgtaggtgtccaccacctcctggcactgctcagctaaggatgtgggcagcttcgagcacactttgtccagcgcgtgaagtatttcttcctccgtcctgttgttgtcaatcagcttggccacctccttcaccacaaactcgcacacctcgcagtaaatgtcagcctttgcacgggctgggtc

SEQ ID NO: 9462 - DNA, 369 bp, Bos taurus
  Clone ID: 41-LIB188-013-Q1-E1-C2
actgagtgtcctggggcctccggaggaagaaccggtcctggaagagctcgtccatgatgctggacgcccgggtgaagctgtcctccatgacgtccatcacgtggctctgctcccggtcattctccatcagggaatcgatgcggtcaccgttgatccagaagtagaagggggagctctggtttaggaactcctcaagctggtggccaaccagtcccgatccgcttctgcacacccgcgcgtagaacttcatgcaggtctgcttgaggcatggcttacattcctcccaaagggctgtcatggtctcattgcacaccccctgggacgccttcagcttgttttcagaatccctggtgtcattcagggcgtcct

SEQ ID NO: 9463 - DNA, 397 bp, Bos taurus
  Clone ID: 41-LIB188-014-Q1-E1-C2
acatcacttaaatacatcttctgttgtggcaaatttgatttcaacacagttgaatctgtaaaaaccgaagctcgtttccaatgcaggacaaatatccacaatatttaaaactgcaagcaccatgcggttcatacaatcttgttattactgttaatttatcaactaatacaaactcaaaaatgcatccggccatcagcgccagcaatttcaaatgagaactaaaaaatacgcttccattttggtatttttgtcagtgcaacttaaatcctcttactgacctgcatgggagaaaaaaagtaataataaacaaaaacacccagatcttccctgtaactactatacaactgaaggggtggcggatggggtaacaccaccaataactcgcccgccatctcca

SEQ ID NO: 9464 - DNA, 440 bp, Bos taurus
  Clone ID: 41-LIB188-015-Q1-E1-C10
acagccggccagtgccatcctgtatgactactacaaccctgagcacaagtgttctgtgttttatggggcaccacgtaagagcaaactcttgtccacgttgtgctctgcggatgtctaccagtgtgctgaggggaagtgccctcgacagcgccgggccctggagcgtgggcagcaggacttggagggttaccggatgaaattcgcctgctactctccccgagtggactacggcttccaggttaaggttctccgagaagacagcagggctgctttccgcctctttgagacccgtatcacccaagtcctgcatttcaccaaggatgccagggccaccgctgatcagaccagaaacttcctggtccgagcctcttgccgccttcagttggaacctgggaaagaatatctgatcatgggtctggatggggccacttacgacctca

SEQ ID NO: 9465 - DNA, 95 bp, Bos taurus
  Clone ID: 41-LIB188-015-Q1-E1-C2
acttgttaggcaggccagcaggtctgaagtggttggggtctttgccactccggccccattcgttggcagcctggtcggccttcgaatcctctcgt

SEQ ID NO: 9466 - DNA, 417 bp, Bos taurus
  Clone ID: 41-LIB188-016-Q1-E1-C2
atgccccggacgccatagccgccggataccgtgcctagtttttgacactctcctggtcgtcatacgccacccgctggttgcccttggtggcataagggaactgctggtcacggaatctgtgggtggtggctccgtggaggaagtcacagatctcataataggcaaggatccctttctccttggtgaactggcctggaattcctggccctgagatgggggctcccacatctgtcttggaagaggccagagtgtagctcctcccaaaagtggggatacccatcaccagcttattggctggagcccccagcctcagcatgtagctcacagcgtagtcagcgttactgaatctgtcagaacttgcatcttcctggcctcgaaacaaggggctgtggtgtccgactgtctggcgccaggctc

SEQ ID NO: 9467 - DNA, 433 bp, Bos taurus
  Clone ID: 41-LIB188-017-Q1-E1-C10
ccatggacgccggatacttggtgaaaagggccggcggatccgggaattgactgctgtggttcagaagagatttggcttccctgaaggcagtgtagagctttatgctgaaaacgtagccacaagaggactgtgtgccattgcccaggcagagtctctgcgttacaaactcctaagaggccttgctgtgcggagggcctgctatggtgtgctgcggttcatcatggagagtggggccaaaggctgcgaggtcgtggtgtctgggaaacttcgaggacagagggctaaatccatgaagtttgtggatggcctcatgatccacagtggggaccctgttaactactatgtggacaccgccgtgcgccatgtgctgctcagacagggtgtgctgggcatcaaggtaaagatcatgctgccttgggacccgactggtaag

SEQ ID NO: 9468 - DNA, 341 bp, Bos taurus
  Clone ID: 41-LIB188-017-Q1-E1-C2
attttgggaaaaagggttatctaacgcagtcctctcagctctacctggagacctgcattccagctctgggggacgtcttttgcatcgcacagtcatacagggcagaacagtccagaacacgaaggcacctggctgaatacactcacgtggaagccgagtgtcctttcctgaccttcgaggagctcctgaaccgcctggaggacttggtgtgtgacgtggttgatagagtcctgaaatcacccgcaggaaacatagtgcgcgacctcaacccgaattttaagccccctaaacggcctttcaaacggatgaactattcagatgcgattgtgtggctgaaagaa

SEQ ID NO: 9469 - DNA, 243 bp, Bos taurus
  Clone ID: 41-LIB188-018-Q1-E1-C2
aaaggctgaattggcaaaaccccccggggaaaaggcactgctttctggggaacaagcaagacttttgactgaaaaaaggacaacaccgactgaagaagaaacattacaatttgaagaaaaagctggttaagctggtgcatccaagactggaacaaaagcaaaagaaagtgcaaaatttcaacatcaattaaaatcaagctctggctttcaattaaaggcccaactggatatttaaggaaaggc

SEQ ID NO: 9470 - DNA, 269 bp, Bos taurus
  Clone ID: 41-LIB188-019-Q1-E1-C10
acgatgagtccggcccctccatcgtccaccgcaaatgcttctaggcggactgttagctgcgttacaccctttttcttgacaaaacctaacttgcgcagaaaacgagatgagattggcatggctttatttgttttttttttttgtcttttttgattttttttttttttggcgcttgactcaggatttaaaaactggaacggtgaaggtgacagcagtcggttggatcgagcattcccaaagttctacagtgtggccgaggacttgattgt

SEQ ID NO: 9471 - DNA, 396 bp, Bos taurus
  Clone ID: 41-LIB188-019-Q1-E1-C2
cgccatgggcgcgggatacttggagacggtcccgcccagcatcagctcgcccccgggctgggctttcgggtccctgttcaggaagaaggagaagacgttcttgtccaccaacttctgctgcatcaggttgtcgaagacaggcagcacgttgttgacggagatgcgggggtaggccatgcccagaatgccgtcgaacttggccgcgatgaagaccacaccgggctgcttgatggcctccccgaaggtctgcctctgcaccgtgacgccacccgggctggatgaggatgggttacagggtacaagaatagttaagtattttgcacaaaggaaatttgttgatgatccagtagaactgatgcccatagaacgcagtttcttaaggattttgttttgctt

SEQ ID NO: 9472 - DNA, 392 bp, Bos taurus
  Clone ID: 41-LIB188-020-Q1-E1-C2
ttgtatccaaaatggcaaccaaaacctaagttttagaaaaaaaaaggttagttataaattgtacccccttccaaacaacaatatgttcaaccctaattgtgtaccatctggcttactgaagcagaccctatcatctctctcgtaaactgccgtcagagtcggtttggttggacgaaccttctgagtttctggtaacgccgtcccgcacccggaaatggtcagcgaaccaatcagcagggtcatcgctagccagatcctctacgccggacgcatcgtggccggcatcaccggcgccacaggtgcggttgctggcgcctatatcgccgacatcaccgatggggaagatcgggctcgccacttcgggctcatgatcgcttgtttcggcgtgggta

SEQ ID NO: 9473 - DNA, 368 bp, Bos taurus
  Clone ID: 41-LIB188-021-Q1-E1-C10
tggccgcgggatacccccttttgtagctggatgagaactgtggggtcctgatccctctgcatcttcgctgggaaatttcccatcccttggaaatatcccttagaaaaaccttcatgtcccctaaggagaccactgacattgccaagttgaaaaatcccatagattgtaatcctgcaacctcgctggactctcagcctctgagcagtgatgggttcagtgttaaatgtgataaatactgtattttgtattgtttaaatggcatctcccacaaaatgtgaaaatggtcccggagaaggcagcttcctgtatgcagtgtgcttttaaaaaaaaaaaaaaaaaacaagtaacaactccttttgagaaacaat

SEQ ID NO: 9474 - DNA, 91 bp, Bos taurus
  Clone ID: 41-LIB188-021-Q1-E1-C2
gccatggcggcgggatactccgtgtagattggcggctccatcctggcctcgctgtccaccttccagcagatgtggatcagcaagcaggagt

SEQ ID NO: 9475 - DNA, 451 bp, Bos taurus
  Clone ID: 41-LIB188-022-Q1-E1-C2
atgcgcccggaggccatgtaggccggatacacatgttactcgaacattcggccaaggggaacaagtaaagattaaaaaggctgatgctgagccaaccgtcttcctcttcaaaccatcctgatgagcaacttaagaacggaactgtccccgtcgtgtgcttggtgaatgatttctaccccaaagatatcaatgtcaagtggaaagtggatggggttactcagagcagcagcaacttccaaaacagtttcacagaccaggacagcaagaaaagcacctacagcctcagcagcatcctgacactgcccaactcagagtactttttgaaatcttctgcccttcatttaattaccaaatggcaaagtgccttaagtttatctaaccactactctattatttatagaatatgaatttgtaaaataagattggaaaaataaaatgcacagattcaaaa

SEQ ID NO: 9476 - DNA, 388 bp, Bos taurus
  Clone ID: 41-LIB188-023-Q1-E1-C2
catggcagcgcgatacgccccttgtccttgagcaggtaggacacactgtagagcctgctgcccacgtgtttcaccaggatctcttcacagggcgtccggggcccatgcacgcccaccagcagcatgttgttgcctgctttgctgcagtccaccgtgaagctgctcttctggcccatgtaggccttgctcagccccacgcctttggccagcaccttgctggcatcagtgggacccgggcctggggcactgtgctgggggatggtggcagtcttggtcagggagtccacaaacacagatgatgtctcatggaggctgtggttgctgacgaggcggtgacctgtgactctggccttgaaggggctgcccgcaatgtggtaggggccgccgt

SEQ ID NO: 9477 - DNA, 365 bp, Bos taurus
  Clone ID: 41-LIB188-024-Q1-E1-C10
ccttaaacagagggtctgtgattccctgaatagtctctctggcgttacttatcactttagcagcccaggcgccccccggtcccctttgggcagcgtcatagtttcggcgggcatggaagtatttgtctgcacccttgtagttggcttctttcatgtcttggtaagctctccacatgtctttagccccttgaccagcttccttgaggaatgtcccccatccctggctgctgatgcccatgatcaggaagcagaaaatgatgcccgtggaaaggttcatcctgtggccgtgccctcctgctgaagctcctggtgaagctgagctgccaactgcccgggcgggcgctcgaacctgctcttctgcatgg

SEQ ID NO: 9478 - DNA, 413 bp, Bos taurus
  unsure (374): unsure at all n locations; Clone ID: 41-LIB188-024-Q1-E1-C2
acttgtcctctgactcaggctgcccatttctctgccactccacggcgatgtagtctgggtagaagctggtgaccatgcaggtgaggctgaccgtgcttttgctgagctcttcctggggtggggccaggacatacacctgcggctcccgggccggccctttggtcctggagatggtcctcacgatgggggccgggaggccttcgttgtggaccttgcacttgaactcctttcctccagtccagtcctggtgctggatgcgcaaggcgctgaccacgcggtaggtgctgttgaactgctcctctctcggcttcgtcgtggctgtgtttacctccacgtcgtccacgaaccaggagaacttcacctcggggtcatcngtggccacgtccaacatcacacacgtgacctcgggcgtt

SEQ ID NO: 9479 - DNA, 211 bp, Bos taurus
  Clone ID: 41-LIB188-025-Q1-E1-C10
ggcccgggacacacctgacaggcattcaggctcagcttgatctccacctggctggtctgggaccccacccacatgtagacctcttggccattgtctaagagcatgatgtcatcgtctgccaggtcatcttggcagaaatcagagcacttctcagtcactgcgaagtagcccttctcattggagcatcggaagagccgcgtgtgcttcatgt

SEQ ID NO: 9480 - DNA, 399 bp, Bos taurus
  unsure (299): unsure at all n locations; Clone ID: 41-LIB188-025-Q1-E1-C2
gggcgcgggacaccttagcaacgtattgcacacacttaattaacacaggttccaatcagagtagaatgtcaaagcacataggataatcaactctaccgcatcctgtgggtggtttcacattcaccatcccccttacaaaagccacacttggaacctcacttttggatttatttacatgattggctttctctgtggatggagcttttgtaacctcatcatgaacttggtaagctgtcaaagtggactgaacgcctctgagccaaacagcactttcagccatccgcctaatgcatactgcngcttctctctgccagctctaactcacgcccagtgctgtcattgccatgcgccaagcgcagatgccctatttggtataagcatcaatgactgtaattgctg

SEQ ID NO: 9481 - DNA, 253 bp, Bos taurus
  Clone ID: 41-LIB188-026-Q1-E1-C2
atggccgcggcatacaagcaggtcatgggagcctttgtggagggcaatgcatgtgactccctgacggaccacggaaatcacttcttctccaccaaagaccgtgacaacgacgagagcccctctaactgtgccgcgcagttccagggggcctggtggtatcacagctgccactcctccaacctgaacggccgctacctcaggggcccgcacacgagctacgccaacggcatcaactggaagtcgtggggccggt

SEQ ID NO: 9482 - DNA, 423 bp, Bos taurus
  Clone ID: 41-LIB188-027-Q1-E1-C2
ccgaccgccaagggcgcgggatacaaaaaccttacataaattaaaaggatgaataaatttacaggtgtgaatgcaaactgtttccaactcaaggcaagtaaccagaacagtgctctggtgggaaatcttcagtaagaaaggaaagcaggtcctacggcttggaccttcccaaccccgtgtaagaccggccaagacagaaatgacaactgtttcaaggactcttgccagcctctagagaaatcctggaatatgcagctctgacacattaataccctgcacagactgagagactcagtctcccagattcttatcaagccattggatttctcttccataaacattctcacctcagctcgaggtgagagagccgcatataactaggggtttaaatcaaagatatgcacagggtaataaacatatacc

SEQ ID NO: 9483 - DNA, 413 bp, Bos taurus
  Clone ID: 41-LIB188-028-Q1-E1-C10
gccataggcccgggatactttgtattttttcagtctgagaagctgttccagataacccaggtaacgctcagagggcacatcttccttttgaatgtgcttctgctcaacactattgggaacaatttcctcacttgacgaaatgctttcagcttccatttgcttaatatcttccatggcttgatcctcagttgattcactcccaatatccttgctcagttcattgaccttctcctttccaaacacttctggaaaaggtgccacaaaaaacctgagtaaattttcattgaggacttcttgagggagtccttggtgcttgataggatgtttaggcctggcaagagcaacagccacaagacaggttaggatgagaagtttcatggttgtcaagatcttgaacccaagactgggaagaa

SEQ ID NO: 9484 - DNA, 389 bp, Bos taurus
  Clone ID: 41-LIB188-028-Q1-E1-C2
gccatgagcgcgggatagacgctattttttttatttttttttttttttggattacaaggtggtttattgagttagtggcatgcgagcaagttcttcccgtgatcagcaaacgcaggcattagtgcgtttcagaggagttcagaggaaggagaggctggaggggtcaggaggacctcgaggtcagggcctggtcatctggcgacgtgcagagctctctaaaggggcctgaagctcatctcaggggcaagtgggtgcagacgccccgatacttgcaaaagcaactttcacgcctcactcctcctggctcttccggcggtattgctgcagtgctttctctgccacattctccatgaagttaggactggagacttcctgcgggaacgtcactg

SEQ ID NO: 9485 - DNA, 441 bp, Bos taurus
  unsure (79),(348),(366),(404): unsure at all n locations; Clone ID: 41-LIB2809-001-Q1-E1-C2
tggccgccggatacagcagaaaagcctgaatgggcatatctctctggggatagggcactgctttctggggaacaggcangactttggactgagaaagggacagcacggactgaggaggaaacatgacagttggaggaagaggctggtgaggctggtgcatccaagactggagcagaggcagaggaaggtgcagattttcaacatcagtgagagtcaggctctggctttcagtaaagggctcaactggatatttagggaagggcatttctttgtgcttaggagccatagcctccttcactttggagactcccattacttcaggctgaaggaaaggcggcaccaccacangggtttgagtaagaaganggatgttttggtgggaggctgttatggatgggcccagngaagggatagactagagactgtgtctgggcaaagggg

SEQ ID NO: 9486 - DNA, 437 bp, Bos taurus
  Clone ID: 41-LIB2809-002-Q1-E1-C10
atgggcgcgggatacctggtgagattgtggaaagcctttcaagcagtgaggaatctattacacgcatcaataagaaaattgagaagtttcagagtgaggaacagcagcaaacagaggatgaactccaggataaaatccacccctttgcccagacacagtctctagtctatcccttccctgggcccatccctaacagcctcccacaaaacatccctcctcttactcaaacccctgtggtggtgccgcctttccttcagcctgaagtaatgggagtctccaaagtgaaggaggctatggctcctaagcacaaagaaatgcccttccctaaatatccagttgagccctttactgaaagccagagcctgactctcactgatgttgaaaatctgcaccttcctctgcctttgctccagtcttggatgcaccagcctcaccag

SEQ ID NO: 9487 - DNA, 359 bp, Bos taurus
  Clone ID: 41-LIB2809-002-Q1-E1-C2
acaacatagccatttgcaatttttaaatgttatactccatttatagttattatagaatattggctacatgccctgtgccatgcaaaatatacttgtagcttgttgattttatacatgattctcaatttcagttcaaatttgtagtgatcatatttgtaagagaatacaactttcagaatcttcaacttgattaaattcaattaaatttacatcacccaattgatatcaaaatccaaagttgttatcatagattaggttacattaatttttttttgtatgaaaaaaaattctgtaaaataaaaagcagatccaggagaaaaagactctttactacttgaaatcaaatttgtagctaacat

SEQ ID NO: 9488 - DNA, 377 bp, Bos taurus
  Clone ID: 41-LIB2809-007-Q1-E1-C10
acttcatcatcaggaacagctgcccaaatcaacgtgattccaccatctccgtggaagagaatggggtgtcagcagaaagccggttctcagttcagatgttcaagtttgctggaaattatgacctagttttcctgcattgtgaggtttctctctgtgatttcattaaagaagagtgccaaccgtcttgctcaagaagtcaactccgcagtgaaggggtggctattgatccagcccgagttctagatctgggacccatcactcgcaaaggtgcccagtctcttggtgtcatgagtggaacacccaacactgcagggttcctggtggcctggcccctggttctcctgcctgtcctcctggctgggctgttctgagagctc

SEQ ID NO: 9489 - DNA, 473 bp, Bos taurus
  Clone ID: 41-LIB2809-007-Q1-E1-C2
tggccgcgggatacagcagaaaggactgaatgggcatatctctctggggatagggcactgctttctggggaacaggcaggactttggacggagaaagggacagcacggactgaggaggaaacatgacagttggaggaagaggctggtgaggctggtgcatccaagactggagcagaggcagaggaaggtgcagattttcaagcttttttttttttttttttttttttttttttttaatagtgccttaaaatgtaatttattgaaaagaagaaagacaaaatctcagttaatgcacacaattatttgatatgatggcacttacaggagaagtgattcaaaggcttttaaaacattttccatacagaaatttaatgaagactttaattccctttgactcagtggcctttataccagcatgatactactggaatttaggtaacaagctgttaggacaatttcacttaaggatgtta

SEQ ID NO: 9490 - DNA, 365 bp, Bos taurus
  Clone ID: 41-LIB2809-008-Q1-E1-C2
acaactagatttggagttgatattaatagaaattattccaaaattattcttaggtcacaaataactactatcccacataaaaagggaaaaatcccacccaattaacgaaaaggtatcctgtgtatgtttccatggcaatgagtttatgcattctcagattttgtccggctagttatccaccctttatctgatgcatttattccatctctcagagagaaccatatagattcctgacggcatccatgacacgtggctcgtggtggacacacttcatggtagatactgctactataaaaatactcagaacttaagagaattccaagatgctttataaaaagcattagtcattcctcaaaactgccctt

SEQ ID NO: 9491 - DNA, 418 bp, Bos taurus
  Clone ID: 41-LIB2809-013-Q1-E1-C10
tcacaaacataaacagtcacaatatggagcttcagtttctgctaagcccgaactccccctgttttatactcccattgatctggtggacattagtgtggaaatggctggattgaagtttacaaatccttttggtcttgccagtgcaactccaactaccagttcgtcaatgattcgaagagcttttgaagctggatgggcctttgctctgaccaaaactttctctcttgataaggatatagtgacaaatgtttcacccagaatcatccgggggaccacctctggccccatgtatggccctggacaaagctctttcctgaatattgagctcatcagtgaaaaaacggctgcatattggtgtcaaagtgtcactgaactaaaagccgactttccagacaatattgtgattgctagcatcatg

SEQ ID NO: 9492 - DNA, 449 bp, Bos taurus
  unsure (56),(440): unsure at all n locations; Clone ID: 41-LIB2809-014-Q1-E1-C2
ccaaggcggcgggatacagcagaaaggcctgaatgggcatatctctctggggatanggcactgctttctggggaacaggcaggactttggactgagaaagggacagcacggactgaggaggaaacatgacagttggaggaagaggctggtgaggctggtgcatccaagactggagcagaggcagaggaaggtgcagattttcaacatcagtgagagtcaggctctggctttcagtaaagggctcaactggatatttagggaagggcatttctttgtgcttaggagccatagcctccttcactttggagactcccattacttcaggctgaaggaaaggcggcaccaccacaggggtttgagtaagaggagggatgttttgtgggaggctgttagggatgggcccagggaagggatagactagagactgtgtctgggcaaangggtggatt

SEQ ID NO: 9493 - DNA, 451 bp, Bos taurus
  Clone ID: 41-LIB2809-018-Q1-E1-C2
gccatggacgcgggatagctggtgagattgtggaaagcctttcaagcagtgaggaatctattacacgcatcaataagaaaattgagaagtttcagagtgaggaacagcagcaaacagaggatgaactccaggataaaatccacccctttgcccagacacagtctctagtctatcccttccctgggcccatccctaacagcctcccacaaaacatccctcctcttactcaaacccctgtggtggtgccgcctttccttcagcctgaagtaatgggagtctccaaagtgaacgaggctatggctcctaagcacaaagaaatgcccttccctaaatatccagttgagccctttactgaaagccagagcctgactctcactgatgttgaaaatctgcaccttcctctgcctctgctccagtcttggatgcaccagcctcaccagcctcttcctcc

SEQ ID NO: 9494 - DNA, 450 bp, Bos taurus
  Clone ID: 41-LIB2809-019-Q1-E1-C2
ctccagccgaaatgggcccgggatacggaggtatctactgctttttgtgtcaggactacatttatgacaaagacatagaaatcattgccaaagaggagcagcggaaagcttggaagatgcaaggtgtcggggagaagttttcaacatgggagccgaccaaacgggagctcgagttgctgaaacacaaccccaagcggcggaagatcacgtccaactgcactattggtctgcgcggcctcatcaacctggggaacacgtgcttcatgaactgcatcgtgcaggcgctcacgcacacgcccctgctgcgcgacttcttcctgtccgaccggcaccgctgtgagatgcagagccccagctcctgcctggtctgcgagatgtcctccctgttccaggagttccaatccggggaaccgttccccccacatcccatacaaactgctgcacctcgtg

SEQ ID NO: 9495 - DNA, 417 bp, Bos taurus
  Clone ID: 41-LIB2809-021-Q1-E1-C2
tgactaaacactgcacagaaagcaaatctgttttcaattttcttagcaattctgatataatattcactgtaatcaaaactgcctcagttcagttcagttcagtcactcagtcatgtccaactctttgtgaccccctggaccgcaacacaccatgactccctgtccatgaccaacacccgaagcttgctcaagctcatgtccattcagtgatgccatccaaccatctcatcctctgtcctcttctcctctcctgccttcaatctttcccagaatcagatcttttccaatgcatcagttcttcaaatcaggtggccaaagtattggagtttcagcaaaagtctttccagtgaatattcaggactgatttcttttacgattgactgaatacttatttatatctgactgcattataatata

SEQ ID NO: 9496 - DNA, 179 bp, Bos taurus
  Clone ID: 41-LIB2809-022-Q1-E1-C10
acaagcccaaccaacgtcttctttcttttctttcgcacttgattggctttactatgcaggaatcaacctattacatctggcatagaagtcccatgtaacccgagacgaggcacgagccagatctgtgaaaatcatactctctgttcaccgaaggcacacaactggccacaggaaacttt

SEQ ID NO: 9497 - DNA, 412 bp, Bos taurus
  Clone ID: 41-LIB2809-022-Q1-E1-C2
ggatatccagcaggcgattgttcccaatagtgctgacggacgacttcaccgtttgaaagagggaatccatgcgccgcagcaaggacctctgaggcggggtgactccgcttttcagacaattctaccagctggatgcctatccatctggtgcctggtattacgttccactaggcacacaatacactgatgccccatcattctctgacatccctaatcccattggctctgagaacagtgaaaagactactatgccactgtggtgaagagtcaagtgaattctgagggactccacagttatggtctttgatggttctgaaaatttcatgctctacatgtcgtttcatcgatcatgtcaaaccattctatccaaacggttcaactgctgttttagaatagggcaatctcaaattga

SEQ ID NO: 9498 - DNA, 407 bp, Bos taurus
  unsure (71),(93),(136): unsure at all n locations; Clone ID: 41-LIB2809-025-Q1-E1-C10
gcagccctccaaccgccaagggcccgggacacagcagaaaagccagaatgggcatatctctctggggatanggcactgctttctggggaacangcaggactttggactgagtaaaaggacagcacggactgatgangaaacatgacagttggacgaagatgctggtgaagctggtgcatccaagactggagcagatgcacacgaaggtgcagattttcaacatcagtgagagtcaggctctggctttcagtaaagggctcaactggatatttagggaagggcatttctttgtgcttaggagccatagcctccttcactttggagactcccattacttcaggctgaaggaaaggcggcaccaccacaggggtttgagtaagaggagggatgttttgtgggaggctgtt

SEQ ID NO: 9499 - DNA, 324 bp, Bos taurus
  Clone ID: 41-LIB2809-025-Q1-E1-C2
caaagacaacacagaatatggactcttccagataaataataaaatttggtgcaaagacgaccagaaccctcactcaagcaacatctgtaacatctcctgtgacaagttcctggatgatgatcttactgatgacattatgtgtgtcaagaagattctggataaagtaggaattaactactggttggcccataaagcactctgttctgagaagctggatcagtggctctgtgagaagttgtgaacacctgctgtctttgctgcttctgtcctctttctgttcctggaactcctctgccccgtggctacctcgttttgcttcattgt

SEQ ID NO: 9500 - DNA, 437 bp, Bos taurus
  Clone ID: 41-LIB2809-028-Q1-E1-C2
gggcccgggctactgtggatcgaaatagtggatgcggacgtaaccatcttcgccgccactgctgtagctcttgccatcaggatggaaggcaacactgttgataggtccgaagtgacccttgactcttccaaactcttcttcaaaggccaagtggaagaacctggcctcgaacttcccaatcctgatggaggtggtggttacatccatggcttcctgaccaccgcccagcaccacatgatcgtagttgggagagagggcagctgagttgacaggtcgttctgtcctgaaagtcttctggtgttcaagggttgtggagtcgaagagcttggcagtgttgtccttggatgcagtgacgaacatggtcatatccctggataactggatgtcattgatctgccgggagtgctccttaacattcaccaagaaaactcccagac

SEQ ID NO: 9501 - DNA, 411 bp, Bos taurus
  Clone ID: 41-LIB2809-030-Q1-E1-C10
acctggagaggaatctattacacgcatcaataagaaaattgagaagtttcagagtgaggaacagcagcaaacagaggatgaactccaggataaaatccacccctttgcccagacacagtctctagtctatcccttccctgggcccatccctaacagcctcccacaaaacatccctcctcttactcaaacccctgtggtggtgccgcctttccttcagcctgaagtaatgggagtctccaaagtgaaggaggctatggctcctaagcacaaagaaatgcccttccctaaatatccagttgagccctttactgaaagccagagcctgactctcactgatgttgaaaatctgcaccttcctctgcctctgctccagtcttggatgcaccagcctcaccagcctcttcctccaac

SEQ ID NO: 9502 - DNA, 406 bp, Bos taurus
  Clone ID: 41-LIB2809-030-Q1-E1-C2
cgcatgcccctaccgccaagggcccgggatacctcacatagggaataacctttgtcttaggttgaatccatggcttcatagctttctgatgctgataaacagtcttgagatactggggcaaggcgaatttctggtaacgctggctgatttttttcagaaaatttaggcgattcttttcttcttcagtcagtttagttttcttagtgaatacttctgttgattccatgtcaacggtcttctttgaattttcctcactggtggagagctgctctctgttcagagtgggagtaatgggaacagcatttctcttaacctgatcccatgggttcaaaacaattggaccttgatacagatactggagatactgggggaacttctgataaaactgattgatttcattcagtgc

SEQ ID NO: 9503 - DNA, 381 bp, Bos taurus
  unsure (243),(316),(351),(354): unsure at all n locations; Clone ID: 41-LIB2809-031-Q1-E1-C2
acagcagaaaggcctgaatgggcatatctctctggggatagggcactgctttctggggaacaggcaggactttggactgagaaagggacagcacggactgaggaggaaacatgacagttggaggaagaggctggtgaggctggtgcatccaagactggagcagaggcagaggaaggtgcagattttcaacatcagtgagagtcaggctctggctttcagtaaagggctcaactggatatttanggaagggcatttctttgtgcttaggagccatagcctccttcactttggagactcccattacttcaggctgaangaaaggcggcaccaccacaagggtttgagtaaganganggatgttttgtgggaagctgttatgga

SEQ ID NO: 9504 - DNA, 329 bp, Bos taurus
  Clone ID: 41-LIB3057-003-Q1-K1-C2
tcggtttagcaccaggcgccccacgaacgtgcggtgcgtgacgggcgagggggcggccggctttggggtcgcgccccgtgtcccgggacgaagggctctccgcaccggaccccggtcccgacgcgcggcgggggcgcgccgagccgcgccccgggggacgcgggcgacggcccgtcggcggggacggcggaggaccggctattcgagggcaaccgaggcttccgcggcgctgccgtatcgttccgtctgggcgggattctgacttaaaggcgttcagtcataatcccacatatggtagctttggcccattggctcgtcaggcaagcaca

SEQ ID NO: 9505 - DNA, 365 bp, Bos taurus
  unsure (153): unsure at all n locations; Clone ID: 41-LIB3057-004-Q1-K1-C10
gctggccggccccacgcgccagcctctggcctgatcccaccctccttctccagagccgctgcatcctcggcctctaagcagcctgcaggggacccctttcactctgctccccgaccaggcccgggactgtgtcgtggtgctggaccaggcctncccgcatagtgagcctgggcctgaggtttcctcctggaggcagcaccgtggggccctgtggcaggaggaagctgggggcatcttctccccagggtttacactccagatggacaacgtctctgtggaccctgacatcatgagtccccacgtccacctgccctgggacctcggcgaggccagccttacaggccgactcgagtcagccttccgtg

SEQ ID NO: 9506 - DNA, 396 bp, Bos taurus
  Clone ID: 41-LIB3057-005-Q1-K1-C2
cggacgcgtgggtaattgttggcgttaacaaaatggattccactgagccaccctatagccagaagagatacgaagaaattgttaaggaagtcagcacctatattaagaaaattggctacaaccccgacacagtagcatttgtgccaatttctggctggaatggtgacaacatgctagaaccaagtgctaatatgccatggttcaagggatggaaagtcacccgtaaggacggcaatgccagtggaaccaccctgcttgaagctctggattgcattctgccaccaactcgcccaactgacaaacccttgcgtttgcctctccaggatgtctataaaattggtggtattggtactggcccttggggtcgtgtggagactggtgttctcaaacctggca

SEQ ID NO: 9507 - DNA, 418 bp, Bos taurus
  unsure (17): unsure at all n locations; Clone ID: 41-LIB3057-006-Q1-K1-C10
gagaaatcacaagacanaactaaaattcttcttcagatccacagtcaactgccctgactacattctgcaaaaatccagaggacgaagagccatggattactacagaaaatatgcagctgtcattctggccattttgtctctgtttctgcaaattctccattcctttcctgatggagagtttacaatgcagggctgtcctgaatgcaagctaaaagaaaacaaatacttctccaagccagatgctccaatctatcagtgcatggggtgctgcttctccagggcataccccactccagcgaggtctaagaagacaatgttggtccccaagaacatcacctcggaagctacatgctgtgtggccaaagcatttaccaaggccacagtgatgggaaatgtcagagtggagaaccacaccgag

SEQ ID NO: 9508 - DNA, 245 bp, Bos taurus
  unsure (49): unsure at all n locations; Clone ID: 41-LIB3057-006-Q1-K1-C2
gaatttgcaatctgaactcaagtgaaataaactaaattgcctgaattgnactgtgtggagcttcactacaacaaattttaaccgtctccacaaagttcataaatggaaattggccaatactgactttttttttaatcccctggactcaggacagttaacttaattttcagaactggttaaaacttttgagtgctggttaataaaataaggtgcgtactctttgtggctttcctgataccaaactg

SEQ ID NO: 9509 - DNA, 426 bp, Bos taurus
  unsure (359),(408): unsure at all n locations; Clone ID: 41-LIB3057-007-Q1-K1-C2
atgtaaaatatagtttgcacagaaatgtatctcaaatagttcccatttgtgttttcgtccattagaggtcatttctatgtaaaaccatcaaaattgcctttatagatcatgtccatttgacggcctctaaacccttcagttcagacgtaaagcgtctgcctgcaatgcgggagacctgggttcaatccctgggttgggaagatcccctggagaaggaaatgacaacccactccagtattcttgcctggagaatcccatggatggaggagcctgaggggctacagtccacggggtcgcaaagagttggacatgactgagcgacttcactcattcactcaaacccttcagtgtggtacttnctgaagagggaaagcagaagatgctaatttttgatgtagaatatgacanaatgaatgattctgactc

SEQ ID NO: 9510 - DNA, 435 bp, Bos taurus
  unsure (365): unsure at all n locations; Clone ID: 41-LIB3057-010-Q1-K1-C2
tcgcggacgcgtggggccctggccaatgcttttcagcactgtgagcagtggatcgagtgctgctgctacaattcccggctgctcaacacagcaggaggctacccctacagcttttggattggccgaaacgaggagcagcacttctactggggcggctcgcagcctgggatccagcgctgtgcctgtggtctggaccggagctgcgtggaccccgctctgcactgtaactgtgacgccgaccagccccagtggagaaccgacaagggcctgctgacctttgtggaccatctgcctgtcactcaggtggtggtgggggacacgaaccgctccagttcggaagcccagttctttctgaggcctctgcngtgctacggcgaccgaaattcctggaacaccatcttcttccacacttgggctgcactacgctttcccccc

SEQ ID NO: 9511 - DNA, 367 bp, Bos taurus
  unsure (176): unsure at all n locations; Clone ID: 41-LIB3057-011-Q1-K1-C2
gaagactgcaaaaggcacctggaacagttctttgctcaaaaagataaaaagttttgggaagatggaattatgaagttgcctgaaaaatggcagaaagtagtggaacaaaacggtgaatacattgttcagttcagttcttggtgaaagtgaaaaatgtggtttttatttttgcttanaaatcataagaacttttgggccaaaccaatacataaaaggcataataaggtcctgttaaagaataaaaaatatctacatttcagaacaactccattttacctgagaagtcccacgtgatggacagtttatttgtagtctcttaatatacccaacacctttttctgttttttttccaacaccttttcattca

SEQ ID NO: 9512 - DNA, 318 bp, Bos taurus
  unsure (195): unsure at all n locations; Clone ID: 41-LIB3057-012-Q1-K1-C2
ggtctcctcaatgtaggcaaacatgctctatataactcgggtggctttttttttttttttttttttacttcatgggtgtggaaactttcatttatttttaaaaaattatttgtaagcaaataatttgcttacaaataatttttataataattatttattttggttgtgctgggtcttcgttgctgcacaggcttntctctagttgtggtgagtgggtgccactctccaactgcagtgtgcaggcctctcatggcagcggcttctcctgctgtggatcacaggctctggggctcgcaaggcttcgtagttgcagctctc

SEQ ID NO: 9513 - DNA, 133 bp, Bos taurus
  Clone ID: 41-LIB3057-013-Q1-K1-C2
gtggcggctccggcttggacctggtttaacccggccccctggaggagacctacattggcagcattcttccggagatccttaaaggccttgattaccttgacttggaacccaagatccaaccggacctcaaaac

SEQ ID NO: 9514 - DNA, 411 bp, Bos taurus
  unsure (136),(387): unsure at all n locations; Clone ID: 41-LIB3057-014-Q1-K1-C10
gtgggctgcgggaagtccacacggggcgtcatgtattataagttcaatggcgtcacgcaaaaatggcccggaacatgggcttccgacgcctatagccctcagggattaagacctgttgtttccacagaagcaccgnctatcatatttgccacaccaactaaactgagctccggtcccactgcatatgactatgctgggaaaaacacagttccagagctgcagaagtttttccagaaatctgacggtgtgcccatccacctgaaacgaggcctgcctgaccaaatgctttaccggaccaccatggcgctaacagtgggagggaccatctactgcctgatcgccctctacatggcatcacagcccagaaacaaatgagttaggctgcanaggacttgtttgcttgtcggcata

SEQ ID NO: 9515 - DNA, 315 bp, Bos taurus
  Clone ID: 41-LIB3057-014-Q1-K1-C2
cgaatggtttagcaccaggcgccccactaacgtgcggtgcgtgacgggcgagggggcggccgcctttccggccgcgccccgtgtcccgggacgaagggctctccgcaccggaccccggtcccgacgcgcggcgggggcgcgccgcgccgcgccccgggggacgcgggcgacggcccgccggcggggacggcggtggaccggctatccgaggccaaccgaggctcccgcggcgctgccgtatcgttccgcctgggcgggattctgacttagaggcgttcagtcataaatcccacagatggtagcttcggccccatt

SEQ ID NO: 9516 - DNA, 426 bp, Bos taurus
  Clone ID: 41-LIB3057-015-Q1-K1-C10
gttctagatcgcagcggccgcccttttttttttttttttttttttttttaacaatcaaggctttattcacttgttgcaacagcagcgcgggagaccagaaggcaggtgctggctccccttgttctgtttcctcctcctgtggaaaggcactgtcaaggtcagtgtgggtcggctggcggggatggggacgtctcactgcagagggggccccaaacaaaaggctcctgttgattcatggacttgcagcccccgggagcagggaaggatggaaagtactgagcaatgagtcagagtgcaggaaaagtgtcttcgagatccctcaggaaggacctctcggccaagagaccccgagaaggtgcctctgaatggggacaacctggctaggagtaagctgcacccaagagcacagctgtccagagggtcttc

SEQ ID NO: 9517 - DNA, 420 bp, Bos taurus
  unsure (301): unsure at all n locations; Clone ID: 41-LIB3057-016-Q1-K1-C2
gaagtgtgtttcttgaaatcatcaccaccatggacagcaaaggttcgtcgcagaaagggtcccgcctgctcctgctgctggtggtgtcaaatctactcttgtgccagggtgtggtctccacccccgtctgtcccaatgggcctggcaactgccaggtatcccttcgagacctgtttgaccgggcagtcatggtgtcccactacatccatgacctctcctcggaaatgttcaacgaatttgataaacggtatgcccagggcaaagggttcattaccatggccctcaacagctgccatacctnctcccttcctacccctgaagataaagaacaagcccaacagacccaccatgaagtccttatgagcttgattcttgggttgctgcgctcctggaatgaccctctgtatcacctagtcaccg

SEQ ID NO: 9518 - DNA, 376 bp, Bos taurus
  Clone ID: 41-LIB3057-020-Q1-K1-C2
tctagatcgcgagcggccgcccttttttttttttttttttttttttttttttgtttttgtttcaatttaactaatagctttatttaaataaaaaaacacataaacttctatactaaaaaaatacaaaacaaaacccacacatttccttgtgtaaagccatattgtatggtaactcaaatactgttcatcgcattgtaaaattaaacagttcaactatatacaaaatttaaacaatctttgacaaatttctacagctggatttataatacattttaactcaacaacttctggaaaatttacatggcaaaacataatctttaacacatttggttaaaaactttattatatgctaataacaatattacaacacaatatt

SEQ ID NO: 9519 - DNA, 369 bp, Bos taurus
  Clone ID: 41-LIB3057-021-Q1-K1-C10
tcgcaccaacccctcccgtggcccctaccactttcgagcccccagccgcatcttctggcggacagtgcgaggcatgctgtcccacaagaccaagcggggccaggctgctctggagcgcctcaaggtgtttgatgggatcccaccaccctatgacaagaaaaagcgaatggtggttcctgctgccctcaaggttgtgcgtctgaagcctactcgcaagtttgcctacctagggcgcctggctcatgaggttggctggaagtaccaggcagtaacggccaccctggaggagaagagaaaggagaaggccaagatccactatcggaaaaagaagcagctcatgaagctacagaagcaggccgaatagaacat

SEQ ID NO: 9520 - DNA, 427 bp, Bos taurus
  Clone ID: 41-LIB3057-024-Q1-K1-C10
tagacgtacgcgtcctgatcactagcggccgtccttgttattatcatccggcaggacattaaaatgtaagtatagtttatgttactctgctgttacataaggcataacattttcacaaggcttttttgggactacagtcaatgattagcaacatacaatagtggtccaactctctaaataacaatcactagacaaactggacaccctctcacatgtgcacaaatctgcatggaaaagtactaatgttttagactggactgtgtgcttttttccccctttctagtgtattaagaaatgacatgcactttaatttgccaaaagcaacggttgtattctggcagcaacatgctacttctattacatagtaaagtgaataccataactacaaaggcaggaggtgtaagtgagtttttattgtgaagggaag

SEQ ID NO: 9521 - DNA, 127 bp, Bos taurus
  Clone ID: 41-LIB3057-025-Q1-K1-C2
cggacgcgtggggatggttcttaatgatccattccctggcaaacttctctgagctttgtagctttgtaatgcatgcttggctctaatgggtttcatcttaaataaaaacagactctgtagcgatgtc

SEQ ID NO: 9522 - DNA, 394 bp, Bos taurus
  Clone ID: 41-LIB3058-002-Q1-K1-C2
gtgattggagctggagtggaggtaagctgagggccgtgaaaatgccgatcaataggatcgccctggggagccaccaggaggtgtaccacccgggcgccctcaaggcggcgttcgctgagttcatctccaccctcatcttcgtcttcgccggccagggctccggcatggccttcagcaagctgaccggcggcggcccgacgaccccggcgggcctgatcgcggcggcggtggcgcacgcgttcgcgctgttcgtggcggtgtcggtgggcgcgaacatctccggcgggcacgtgaacccggccgtgaccttcggcgccttcgtgggcggcaacatcaccctgttccgggggctcctgtactgggtggcgcagctgctggggtccaccgtggcgtg

SEQ ID NO: 9523 - DNA, 438 bp, Bos taurus
  Clone ID: 41-LIB3058-003-Q1-K1-C2
gcggcggcggcggcggcggctggagcggccggagcaagatgggtcaaagtcagagtggtggccacggtcctggaggcggcaagaaggacgataaggacaagaaaaagaaatatgaacctcctgtaccaactcgagttgggaaaaagaagaagaagacaaagggaccagatgctgccagcaaactgcccctggtgacgcctcacactcagtgccggttaaaactgctgaagctagagagaattaaagactatctcctcatggaggaggagttcattagaaaccaggagcagatgaagccgttagaagaaaagcacgaggaggagaggtcaaaggtggatgacctccgggggacgccgatgtcagtagggaccctggaagagatcatcgatgacaaccacgccatcgtgtccacgtctgtgggctcggagcactacgtca

SEQ ID NO: 9524 - DNA, 413 bp, Bos taurus
  unsure (214): unsure at all n locations; Clone ID: 41-LIB3058-004-Q1-K1-C2
gggaattctctggagaaaagatcagtaggcagagctctggggaatagagctcaaaggcaaagaaaatgctagttaatagtacattgttaatgttaaattgttacttgaaaagtttctacaatgcttaaaactgctaagtgtgctgaaggaaaaaagcaaaattggtttgctttgctacaagaaggggaagactgaaaagttaactgaaacctgnatatcagtctcttgaaagattgttagggacttgcatcaacagattaacatctttcactcctttgcaagcttcttaagtggtttatctgaaagtgtgcaatgttcatggactagttatagaaaagactttcagtaccctaattgtgggcttttaaagtattttaagaattggtacaagcttagatgccctcttctgggtt

SEQ ID NO: 9525 - DNA, 434 bp, Bos taurus
  unsure (392): unsure at all n locations; Clone ID: 41-LIB3058-006-Q1-K1-C2
agcaacttcccaaaaggcatgttactccgcttttttgttcacttctatgacatggaaattattgaagaagaagctttcttggcttggaaagaagatataacccaagagtttccagggaaaggcaaggctttgttccaggtaaatcttggagaaatttgttgtgctttttccattttaactggtattactttcatgaagtttttaaagtgagatataagcaaaatagccctggtaatattgcataccatgattttctaacttaaaatgaattctagccctgaggaaaatttttataatgtcaggggattccacagcatacatcagtacatcagtcacctggaaagtaattttcaaaggaagtttcaggtctgattgtagacattctgacttangtctgcgtgtggtatacaactcaggagaatctcgtactacta

SEQ ID NO: 9526 - DNA, 416 bp, Bos taurus
  Clone ID: 41-LIB3058-007-Q1-K1-C10
cagaagttggcagtgaggagagactgtctgaagggccggtaaaggcacaaatggcttttctcaaccaaagaaaccagactccggctaagaaagaggagttagtgtccagatatgatacacagtctgccaggggccttgagaagtcgcacagccgggaaaggagcagccaggagagtggagaggagaccaagagccaggagaactggccccaagagctgcaacgccatccggagggccaggaagcacccggagaaagtgaagaggatgccagccccgaggtggacaaacggcgctcgaggccaagacaccaccacgggaggagcaggcccgacaggtcctcccaggaggggaaatcctccctcgaggaggagtcacacgtgggcacgggcaactcagacgaaagagaagccccgcca

SEQ ID NO: 9527 - DNA, 425 bp, Bos taurus
  Clone ID: 41-LIB3058-009-Q1-K1-C10
agttacttgaatcctaaagttcatacagaaccacaaaagacactgaattgccaaagcaatctccagaaaaaaagaacaaagctggagacatcattttcccagacttaagactatacttcaaagctaatcaaaacagtatagtatgggaaaaatgaaaaatatacacatagaccaatgaaacacaataaagaactcagaaacaaacacacatgtgtgtgcttaatccttcagtcatgttttcaatttcatgaactatagcccaccaggctcctctggccgtggaagtttccaggcaatactggagtgggttgctatttcctactccaaggaaactcatgtacaaagaggcaagaacatacagtggagaaaagacagtctcttcaataagatggcttgggaaaactggaccgctacatgtaaaacag

SEQ ID NO: 9528 - DNA, 289 bp, Bos taurus
  Clone ID: 41-LIB3058-013-Q1-K1-C10
tgcctggaaaatcccagggacggggaagcctggagggctgctgtccattgggttgcacagagtcggacacaactgaagcgacttagcagcagtaggagcagcagtataatgttctcatggataaaactcttcctaataccattggctctatcagtattttccaattctgttggtatgtgatctacctgtagcttgaattgtacagaaagtaaattgtggcaaatggtttcaactaaggtgggagaaatcgggagtaattatgacacaaagcacttacttttatttcttg

SEQ ID NO: 9529 - DNA, 327 bp, Bos taurus
  Clone ID: 41-LIB3058-013-Q1-K1-C2
ctttaggtgtgacgctaacatcaagcatataacgagtacagcccatctagcacgctgatgcaggtgtactctgcactcttcactactgttacaaaggcattcacaggcctcaagccctggacaagatctgagcttcataaggcatctatgcaggctgccagctccgagagcaggatggagtccttggcagcatcatacgggtgctccttggacgggatctccagtacagccggaatggagcgctggtggtcgtcaagggcgtgccgtaccatctctgcaatgtactggttgataaggatgattcccatgtcatcccggtttataaac

SEQ ID NO: 9530 - DNA, 405 bp, Bos taurus
  Clone ID: 41-LIB3058-015-Q1-K1-C10
caggcgcgtagctggaaggagctgcgcggtgcatgccgagggcggcagtgaggggcggtctctggaccgggctggcgcgtgaggatcttgggcctgagacctagagggtccctgcagcaggacgcccctaagccagtgccccgcaggcatggagcacgacgacccggccgaagcgctgacggagctgcgcgagcggaggtcgtgcccgttggagctgctgcaggtggcggcgggctcgggcctagccgtctacgccgtgtgggcgctgctgctgcagcccagctgtcgacgcgtgccgctgcgcctgcaggtgccgtatgtcagcgcgagtgccaggcaagtggagcacgtgttgtcgatgctgacaagccgaacctggaagacagtggacctgggctctgggga

SEQ ID NO: 9531 - DNA, 443 bp, Bos taurus
  Clone ID: 41-LIB3058-018-Q1-K1-C10
gcagaaagttgctctaagaaaaattgtttgccttgcctttcctcttggtgcaaatgtaccgtgtatttctcaacgtggggtcctgcagttgtggcaagtggccccacatctgaaataagcaccgtaggaacggctgcttgttcctcctcacttctgtataatgtccagagggttgcagggtcataatctctcggctacctttgtttctagagtgacaatggatattctcatataaagactcccctcaagtaataactgcaaccagccagtattatttagtgctatgcctggttgtgatgggcagttctctttattttcagaaacttcaggaaatatcctcccattgcctattttggggatctctgttctcccagaagatggggcaagaagctaggactcttaatcttggggtgcttcttctcttgaccctgagccaccttaat

SEQ ID NO: 9532 - DNA, 420 bp, Bos taurus
  Clone ID: 41-LIB3058-019-Q1-K1-C10
ggactatttgcactccttggggaaggctcgaacagctcaggtccaaaaagatgctcggattggggaagcagaggccaaaagagatgccgggatccgggaggccaaagccaagcaggaaaaggtgtctgctcagtacctgagtgagattgagatggccaagccacagagggactacgagctgaagaaggccgcatacgacatcgaagtcaacacgcgccgagcacaggctgacctggcctaccaacttcaggtggccaagacgaaacagcagatcgaggagcagcgggtgcaagtgcaggtggtggagcgggcccagcaggtggcagtgcaggagcaggagatcgcccgccgggagaaggaactggaggcccgcgtgcgcaagccggcggaagccgagcgctacaaactggagcgcctggc

SEQ ID NO: 9533 - DNA, 470 bp, Bos taurus
  Clone ID: 41-LIB3058-019-Q1-K1-C2
ggaacactgacaacacgctgggcacggagattactgtggaagatcagcttgcacgtggcctgaagctgaccttcgattcatccttctcaccaaacactgggaaaaaaaatgctaaaatcaagacagggtacaagcgggaacatatcaacctgggctgcgatgtggattttgacatagctggtccttccatccggggcgctctggtgctgggttatgaaggttggctggctggctaccagatgaattttgagactgcaaagtctcgagtgactcagagcaactttgcagttggctacaagaccgatgagttccagcttcacactaatgtaaatgatggaacagagtttggtggctccatttatcagaaggtgaacaagaagttggagaccgctgttaatctggcctggaccgcaggaaacagcaacactcgcttcggaatagcagccaagtaccagattgaccctgatgcc

SEQ ID NO: 9534 - DNA, 425 bp, Bos taurus
  Clone ID: 41-LIB3058-023-Q1-K1-C2
gacgagttgaaacgtttggatgaggagctggaggatgcagagaagaatctgggggagagcgaaatccgagacgcgatgatggcaaaggcggagtacctctgccggataggcgacaaggaaggtgctctgacagcctttcgcaggacctatgacaaaaccgtggcgctgggtcaccgactggatattgtgttctatctccttagaattggtttattttacatggataatgacctcatcactcgaaatacagaaaaggccaaaagcttgatagaggaaggaggagattgggaccggaggaaccgcctaaaagtatatcaaggtctttattgtgtagctattcgtgatttcaaacaagcagctgaactcttcctttgaacacagtttttttttctaacatttacatcctatgaactcatggattataa

SEQ ID NO: 9535 - DNA, 224 bp, Bos taurus
  Clone ID: 41-LIB3058-026-Q1-K1-C2
ctttatttttttttttatactttttttttagtttattttttattttttttttttataaatttttattttattttctaattttttcaaatttataatttattatttatcatttttattaaataaatatataaaagttttttaatctatattaaaatatttaaattaataattttaaatatacaaaattttaaattattaaaaactttatcatattaattaataat

SEQ ID NO: 9536 - DNA, 405 bp, Bos taurus
  Clone ID: 41-LIB3058-027-Q1-K1-C10
gttctagatcgcgagcggccgcccttttttttttttttttcattaaaagtgtattactgtatttcaatactcaagaacagtgcatactttccttgagacccgtggtcacagctctcattgttgggtgtggccacgaatggaggtcactcagtcacaaccagctcaatgacgcagtgtgtgtgtcgagcaatttggagattttgtttctgaaattttctttttttttcttatcctctcatcattgaggctatgtattaatagacattatagtaaacccacgcgaaatattcagaattagaaggggattaaagagccacgtttgggcgttacgttgactattcctcattttcatcctaaggggggttgtgactccagtgtggggacttcgtgggggtctggtagaag

SEQ ID NO: 9537 - DNA, 389 bp, Bos taurus
  Clone ID: 41-LIB3058-029-Q1-K1-C10
ggaaaaaaagaaccattcggatatatgggaatagtttgggctataatgtcaatcggagttctaggtttcatcgtatgagcccaccatatattcactgtcggaatagacgtcgacacacgagcctacttcacatcagccactataattattgctattccaaccggggtaaaagtcttcagctgattggcaacacttcatggaggtaatatcaaatggtctcctgctataatgtgagccctaggctttattttcttatttacagtagggggtttaactggaattgtcttagccaactcttccctcgatattgttcttcacgacacatactacgttgtcgcacatttccactatgttttatcaataggagctgtatttgctattataggggg

SEQ ID NO: 9538 - DNA, 265 bp, Bos taurus
  Clone ID: 41-LIB3058-029-Q1-K1-C2
gtccccgctctccacacagggcgagctgtccaggtaggcgaaagccgtgctctggccggcaggggcctagacggccccggaggagccgggtgtgaagccgggcgtgcacggagcggagacccttcagctgccgggcctctagagctgcgtgcacggccttcgggtggtgcagatcgtggagggagaggcccagttcggtgtccagcgtactgaaagatggctctgcaagtggctgggctggcctttccctgtcgtctactgactg

SEQ ID NO: 9539 - DNA, 254 bp, Bos taurus
  Clone ID: 41-LIB3058-030-Q1-K1-C2
gcggccgctcacggggcggcggacgcattggcggcccagaagagacccttccagagagccaaggacctgtcctcgacgagcaccatggaccacgccaggcacggattacttcccagacacagagacacgtgcgtgctcgactccctcgggcgagtgttgggctcggacaggggagcgcccattcggggctgaggcggtgatggacacctcgcggccagaaccgcccgactatggctgcatggcccagaaggcgc

SEQ ID NO: 9540 - DNA, 428 bp, Bos taurus
  unsure (72): unsure at all n locations; Clone ID: 41-LIB3058-034-Q1-K1-C2
aagggaatggctacctactccagtattctggtttggagaattccatggactgtatagtccatggggtcgcanacagttggacacaactgagcaactttcactttcacttttggaaaccttcgaggggcattgctgaacagattctgtccagaacttaaggtggggaccagtttctgtcctggacaagaggccttgggtgttcacgacttgcagcctgcaagccccaagggctggtgaggggcatctggaagagggctctccgtgaccaggacggcacactgaaggggacctcccaagcacagtcaggaccagacccagcccttcagccaaacagaaggtctcaggaagagccctgggggtcctccatgcccccacactcagtgagagaatgtacctcacttcacagcatatgtgattcagcattgaat

SEQ ID NO: 9541 - DNA, 249 bp, Bos taurus
  Clone ID: 41-LIB3058-036-Q1-K1-C10
ggggaagtctgaggtttcaacggcgcttaggacattgaggagatggccgatactgaggccagaagggcgtaaggagtaacctcagctatggagacactgcggcaacagatgcaggattaaggtcaaaccatgatcgatcagatcatggatagaatggatgacatgagcaatcacattgatgatctggacaatagcatatcataactcaggacgtatgccgatgtggaagaactcgacagtgaatacaag

SEQ ID NO: 9542 - DNA, 348 bp, Bos taurus
  Clone ID: 41-LIB3058-036-Q1-K1-C2
ggagaggcatgctgggaaacgccatcatttggattttcaccaagttcctcattgacaagaacggctgtgtggtgaagcggtatggtcccatggaagagcccctggtgatagagaaggacctgccgtgctacctctagctccacaaggtgctgcccctacccaagcctgttgcctgtgttccgagaagccttcccccggtgcctatgacggtctgtctgaaaaccagcccctggtggggcagacctgagaacctggcgtgcactccttccggaggaaggtcccttggcctggctgcggcttggcaaccccacctctggctgccttgtgggaataaaatgtacaacacag

SEQ ID NO: 9543 - DNA, 446 bp, Bos taurus
  Clone ID: 41-LIB3058-037-Q1-K1-C2
cggctcgacccacgcgttcgcggcaagggcgaggtgtccgcccgcctggagttcaagcagcgggcccgctacctggcgtgagaagtacgagtgggatgtggccgaggcccgtaagatctggtgcttcggccctgatggcacgggccccaacatcctcacggacatcaccaagggtgtgcaatacctcaatgaaatcaaggacagtgtggtagctggcttccagtgggccaccaaagagggggcactgtgcgaggagaacatgcggggcgtgcgctttgacgtccatgatgtgacgctgcacgctgatgccatccaccgtgggggtggccagatcatccccacggctcggcgctgcctgtatgccagtgtgctgactgcccagccccggctcatggagcccatctatcttgtggagatccagtgttcagaacaagtgggtggtggca

SEQ ID NO: 9544 - DNA, 352 bp, Bos taurus
  unsure (79): unsure at all n locations; Clone ID: 41-LIB3058-040-Q1-K1-C2
acccacgcgtccggctgccgtccaccactgtccagaccactgtttagcgctgcggcctacccagcagcggcgagcgcanggtccaccgcagggtgtaccagatcccccagcggaggcggctgcagggcaaagacccccgctgggccaccatggccgacctgaagatgcacgctgtgaaggagatctgctatgaggtggccctggctgacttccgccacgggcgagctgagatcgaggccctggctgccctcaagatgcgggagctctgtcgcacgtacggcaagcctgaggggcctggggacgcctggagggccgaggaccgggacgtctgggacacggtgggcgaggaaga

SEQ ID NO: 9545 - DNA, 425 bp, Bos taurus
  Clone ID: 41-LIB3058-043-Q1-K1-C10
tcggtgaaagaggagagtgaaaaagttggcttaattctcaacattcagaaaactaagatcatggcagctgatcccattatttcatggcaaatagatggggatacaatggaaacagtgagagactttatgtttttgggctccaaaatcactgcagatggtgaatgcagccatgaaattaaatgactcttgcttcttggaagaaaagctatgaccgagctagacagcatattaaaaagcagaaacattactttaccaacaaaggtccatctattcaaagctattttctagtagtcatgtatggttgtgagagttggactataaagaaagctgagtgctgaagaactgatggttttgaactgcggtgttggagaagactctggagagtcccttgaactgcaaggagatccaaccagtcaatcctaaag

SEQ ID NO: 9546 - DNA, 190 bp, Bos taurus
  Clone ID: 41-LIB3058-044-Q1-K1-C2
cccgtttctgtgacctcttcctcatgttggcactttaaaacttcgcgtttcagccactgttttttgtttttaaccttctgatgtaaatgaagtttaaaagtcagaattctttattgtatggatggagtttgaaataaatatcggcaactcttaaaaaacaatataacaaaacaaaagcaaaaaaaaggga

SEQ ID NO: 9547 - DNA, 442 bp, Bos taurus
  Clone ID: 41-LIB3058-045-Q1-K1-C10
cagcaaggtaccactgtttctagaatattttctaaggtttatcatattgataccatagatttatgattgaagtgttattagtgctattatacttactaaattcctggtagtaataagtattacatacagatgatgtatggcattatttgtattgtgtatatgccaaatgtaatacttaacctcactgactagaaaatacagagattgtcatagtgaaaataagtcttggtcaattcagatgataatgtgaatctggtaaattctctattatataatatattttgtcctctatgcttgttttatatgacaatgcatgctgtttgctaagtaaaaaataataatgttataccaattttaaggttagaaaattttgcatatgtgctgcttgacattctgaaatgtattttgtggcataattatcttattcatatgcatttcacat

SEQ ID NO: 9548 - DNA, 196 bp, Bos taurus
  Clone ID: 41-LIB3058-046-Q1-K1-C2
gttggaacatagtggaaagaatggctattgttccttgctttacttaatcatacagtaagcagagacttggaaatgaatggaactgttactcttaagtcctatttacattgtctgtccccaaagattaaagtttatttcaaaaagttgtaaatactactttcacgttctgtggaaaagtacagggtagatttaaatt

SEQ ID NO: 9549 - DNA, 408 bp, Bos taurus
  Clone ID: 41-LIB3058-048-Q1-K1-C2
ctgagccgtcgccgccatgcccttctttttagccacaacacgctgaagctgcgcttcgcggccgaagatgagttccccgacctcagcggccacaacaaccacatggccaaggtgctgacccccgagctgtacgccgagctgcgcgctaagagcactccgagcggcttcacggtggacgacgtcatccagaccggcgtggacaacccaggccacccctatatcatgaccgtgggctgtgtggccggcgatgaggagtcgtacgacgtgttcaaagagctctttgaccccatcatcgaggaccggcacggaggctataagcccaccgacgagcacaagaccgacctcaaccccgacaacctgcagggcggcgacgaactggatcccaactacgtgctgagctcgccggtg

SEQ ID NO: 9550 - DNA, 414 bp, Bos taurus
  unsure (235): unsure at all n locations; Clone ID: 41-LIB3058-049-Q1-K1-C2
ctcagagggctgtgtccagctggccatatgtggaaaggctcagaaggacttgtttcctggcctggaaaaggttgagctcctgctggtgacctgcaggtcgtatcccctgcccctatgaccaacatgagctggagtttcctgaacgcggctggttggaagagatccacaaccactccacgttcgtgggcaaggtgtggctcacggtgctggtggtcttccgcatcgtgctcaccgncgtgggcggcgagtccatctactccgatgagcagaccaagttcacgtgcaacacgcggcaaccaggctgtgacaacgtctgctacgacgccttcgcacccctgtcccacgtgcgcttctgggtcttccagattgtggtcatctccacgccctctgtcatgtacctgggctacgctgtgc

SEQ ID NO: 9551 - DNA, 402 bp, Bos taurus
  Clone ID: 41-LIB3058-051-Q1-K1-C10
cgcgagcggccgccctttttttttttttttttttacattttattcacatttatttttcgcttttagtgtgctcacagaaaattagaacaccttaagcaggagtttaatagcaatttttgtaagcaaagttacattccatctctaagtcaaattggtcaaagcttctccagtatttacaaaacatgatagacaagatgctacacaaaaccattgcatctgaagattttttccttattctcaaagacgactggaaaagaaagcattgtctgctgtaatcaaaaacataccacagtataaacagtaaccattccacttatcacagcttggttgagtttaaaatttgtgtttaaaaggtccaagatgactgcagttttacaaaaatgggcagggtggaaagttgca

SEQ ID NO: 9552 - DNA, 439 bp, Bos taurus
  Clone ID: 41-LIB3058-052-Q1-K1-C10
gccgagcggaagcttcggcagtgctgttccatccgcaggtttgaaggaggccgaagccgggctcgcgccggaaccatgtttcgcaaccagtatgacaatgatgtcactgtttggagccctcagggcagaattcatcaaattgagtatgcaatggaagctgtcaaacaaggttcagccacagttggtctgaaatcaaaaactcatgcagtgttggttgcattgaagagagcacagtcagaacttgcagctcatcagaaaaaaattctccatgttgataaccatattggtatctcaattgcgggacttactgctgatgctcgactattatgtaattttatgcgccaggagtgtttggattccagatttgtatttgacagacctcttcctgtgtctcgtcttgtatctctaattggaagcaaaacccagataccaacacagc

SEQ ID NO: 9553 - DNA, 355 bp, Bos taurus
  Clone ID: 41-LIB3058-052-Q1-K1-C2
ggcggatagagaccatgcgagcgaccttttgtagccggggcggagctctgcaaccggggcgctggccgagccctggacgggcgtgtgcaggcgcggtgcccgcggtggccgggtctccggagatgggccgggggccggggctgagctggtgccgctgcccgcgtcgactgtagttgtcccgtcccgagggccggccgcgccccgcgcccttcgcgccctacgcgccctcgttaagcagcagaagttagtagttcactcccccgaatgtccttgtctgtgtacagtctttagaacatcgcaagtgtgtttgctcagctgtcggcaggagaagccggcgggcacggcactgtgcacg

SEQ ID NO: 9554 - DNA, 395 bp, Bos taurus
  Clone ID: 41-LIB3058-054-Q1-K1-C2
aaacatggcgcccaccatgctggtgctgcttgttccgccgtttcccgtagcccgaggacttctccggaactgttggaagcagctgcaggggaaacttctgcagagccgaccaggtttttccagtcctccatggggaccagcgttagcggtccaaggtccagctatattttcagaaccaacaaatgataccagtggaagtacggagacgtccagccttttggatagtatattttggatggcagctcctaaaaacaggcgcagcattgaagtgaaccggtgtaggagaagaaaccctcataagcttattaaagttaagaacaatatagacttttgtcctgagtgtggtcacctgaaacagaatcatgttctctgtggctattgctatgagaaggtgc

SEQ ID NO: 9555 - DNA, 328 bp, Bos taurus
  Clone ID: 41-LIB3058-056-Q1-K1-C2
atgagttctgcctgtgtaggctcccaggaatcctggagagggtggagaggtggggggcggaggctgattggcaaaggctgcctggaggaggaggtgacctgccccctgtgctctccagggctgtccccagacctacagtccatggagcagatccggcgtatcatgcggcccacagatgtgcctgaccagggcctgctctgtgacctgctgtggtctgaccctgacaaggacgtgcagggctggggtgagaatgaccgcggcgtctcctttacatttggagctggtatggtggccaagttcctgcacaagcgtgacctggacctcatct

SEQ ID NO: 9556 - DNA, 382 bp, Bos taurus
  Clone ID: 41-LIB3058-058-Q1-K1-C2
ctagttctagatcgcgagcggccgcccttttttttttttttttttttttttttttaaaaaccttattttctggttaattcgttttgccaaacaaacacagtgaaaactttagtctgactaattgtacagaaaatagaatttgtaaccagtagcaaacataacaggatagacctaagtccctggcaggctggatttccatcaacaggtcacctagatccccttgtagatggcctcctgggagggaagtcctaggaagctgaggcacagatctgccagtccccatcagaatcacaggctgcacctgggaaggaaaagcacaaaaaagtagaactgatgttacttggatctcttatcactacacacacaacaattgtctctgatt

SEQ ID NO: 9557 - DNA, 404 bp, Bos taurus
  Clone ID: 41-LIB34-001-Q1-E1-C10
aggtggtgcctaaacttaaaaaatttttttctgaattaggatgcattgtagacacaatgtctgtgcatggcatttaattactttatctctaagtctctctctccatattgaagtgaaatttatataacaaaattagccactttaacatgtaaaattcagtggtgattagcacatttacaatgctgtacaactatcacttctttttagttttgacagttttattcacccccaaaggaaaccccatatccactaagctctcactgcccattacaacctttccccaggacctggtaactactaatagacatttctgtatctctggatttaatatctcaatattttatataaagggaatgatacaatatgtgacctttggtgactggcttctttccctcagcatgata

SEQ ID NO: 9558 - DNA, 417 bp, Bos taurus
  Clone ID: 41-LIB34-002-Q1-E1-C10
atctacctggccgtccctggacagccaaccacatggctggaagtgagggaatttttggtgaggccaacttcagggtgttcttgtaaactcttatctgaggaggaactaatgctatttcagatcaaagcagtcttcctccctaagaaactacccaaggaacaatgatagagtcttcttcctcggctgtctgcagaaaagtgtcaatgaagcatcagcgagttccagttatgatccttcatagcaaggggacaatggcatcctggcccttctctaggctgtggagtatctctgatccaattctgttccaagtgaccttggttgctactctgttggccactgttcttggcagttgtggtattccacactatttagactttgcgtttccaataaatgagttgaatgacacaacgtttgaaa

SEQ ID NO: 9559 - DNA, 391 bp, Bos taurus
  Clone ID: 41-LIB34-002-Q1-E1-C2
ataaggaaattgatgaaattcggtatatcatatctctggccagaatgacagtgaagaagcatgagcacagtaagaggtctcagaagtagataacacctgagttttagtcaaccggtttatcaggttccattcctcaagacaacgttacagttctgagagatcatattattcatgctcacatggtctgcacacgactcttcctctcgtatcatcaagtggttacaggttctctggacaaacttcttcctgtggtcatatgtcaaaagggacctagcactataatgaccaatgatcattgggtgcatacattcacaatacattctgtagtcaacacacacattattcctgagcatggaaagtgtgtcatatctgaatttgaaccatgcattga

SEQ ID NO: 9560 - DNA, 404 bp, Bos taurus
  Clone ID: 41-LIB34-003-Q1-E1-C10
gatagaggagcctggaaggcagagcaactggacctcgcctaagctgtgtctctgactcatttctgactttaggcaagttcttccaatgggaaaaatggcgaagatgtttagtttcatccttgtcaccactgctctggtaatgggcaagggaagctcggctctggagaactgcctccaggagcaggcgcggctcagagcccaagttgtacctgctggagaacccggtcaagcaacaacaagtcaagatctcgcagcttttgcatgagaaacaagtccagctccttgataaaggagaggagaatagtgtcattgaccttggaggaaagaggcaatacgcagattgttcagagattttcaatgacgggtacaagcagagtggattttataaaatcaaacctctccag

SEQ ID NO: 9561 - DNA, 388 bp, Bos taurus
  Clone ID: 41-LIB34-003-Q1-E1-C2
cacaggtaatggcaacaggatcgcttgcagtcgatgggctcgcagctttcgggaggagtcaagtcagtgtgtacgcacaagttagtatcttcagcacacgtaaacgtgacactacttggagatacagacagcgtatgaatgagactcagaaagttatctctaggcatagcacatacaacacgtcgttcaggctcgaaggtcattacaggaccgacttagtaataccgacggtctctcagcttctaacaccggaatgcactggtctgacaatggttatcactgcggtgacgcgaacttcaattggaagcatacctttccttcgaggggtacacctacattatttctttcataccaacatcgatgagttcatcaccagtaggtcacacaa

SEQ ID NO: 9562 - DNA, 412 bp, Bos taurus
  unsure (224): unsure at all n locations; Clone ID: 41-LIB34-004-Q1-E1-C2
gttgaggatgagaaacttcagggcaagattaatgatgaagacaaacagaagattcttgacaagtgtaatgaaataatcaactggctggataagaaccagactgcagagaaggaagaatttgaacatcagcagaaggagctggaaaaagtctgcaaccccatcattaccaagctgtaccagagtgcaggaggcatgcctgggggaatgccaggaggaatgcctgngggcttccctggtggtggagctcctccatcaggtggtgcctcctctgggcccaccatttgagaggttgattaaaccaacccagcatagattgagcattgttccacacaggacatggaaggacccaaattgtaacaaattccgtggcagttacgaagttgagctgctatagtaaataaactgggcattc

SEQ ID NO: 9563 - DNA, 406 bp, Bos taurus
  Clone ID: 41-LIB34-005-Q1-E1-C2
ctttggcacaatgaagtgggtgacttttatttctcttctccttctcttcagctctgcttattccaggggtgtgtttcgtcgagatacacacaagagtgagattgctcatcggtttaaagatttgggagaagaacattttaaaggcctggtactgattgccttttctcagtatctccagcagtgtccatttgatgagcatgtaaaattagtgaacgaactaactgagtttgcaaaaacatgtgttgctgatgagtcccatgccggctgtgaaaagtcacttcacactctctttggagatgaattgtgtaaagttgcatcccttcgtgaaacctatggtgacatggctgactgctgtgagaaacaagagcctgaaagaaatgaatgcttcctgagccacaaagatgat

SEQ ID NO: 9564 - DNA, 398 bp, Bos taurus
  Clone ID: 41-LIB34-006-Q1-E1-C10
cagaagcttcacactgagaggtaggcagagagcagcacacacagctgaaaggaaactcagaggagggaatcaccaagaaagtggccatggagctaatcccaagcttttccatggaaacctgggttctcctgtctatcagcctggtgctcctttatctatatggaacttattcacacggactatttaagaagctgggagttcctgggccaagacctctgccttattttggaaatgttctgtcctactgaaagggtgtttgtgagtttgatgaagaatgttttaaaaagtatgggaaaatgtgggggatttttgaaggtaaacatcctctgttggttatcacagatccagatgtgatcaaaacagtactagtgaaagaatgttattctgtcttcacaaac

SEQ ID NO: 9565 - DNA, 414 bp, Bos taurus
  unsure (407): unsure at all n locations; Clone ID: 41-LIB34-006-Q1-E1-C2
ggttctgaaaccctagaggacgcaactgtgagtgtctctgtcctagcctctcaacttgctttcctgtgtccaatagcactgcagactccagtactagcctgtccagagcagcaagtgagaggaaacaagccagcattgtaagaggacatgcttctcctccctctctccgtgctgctcctgctcacacagccctggagatccctgggagcagaaatgacaaccttttctcagaaaatactggccaatgcctgtaccctggttatgtgtagccccctggagagtggcttgcctggtcatgatggacaagatgggagagaatgtccccatggagagaagggggatccaggttcaccaggacctgcaggacgagcaggaaggcctggatggggttggcctattgggccganaggagac

SEQ ID NO: 9566 - DNA, 360 bp, Bos taurus
  unsure (329)...(330): unsure at all n locations; Clone ID: 41-LIB34-007-Q1-E1-C2
tatgagagaaaaagtactgacttcatctgccagacagagactcaggtgtgccagtattcaaaaatttggagaaagagctttaaaagcatggtcagtagctcgcctgagccagaaatttcccaaggctgagtttgtagaagttaccaagctagtgacagatctcacaaaagtccacaaggaatgctgccatggtgacctacttgaatgcgcagatgacagggcagatcttgccaagtacatatgtgataatcaagatacaatctccagtaaactgaaggaatgctgtgataagcctttgttggaaaaatcccactgcattgctgaggtannaaaagatgccatacctgaaaaactggcccc

SEQ ID NO: 9567 - DNA, 404 bp, Bos taurus
  unsure (368): unsure at all n locations; Clone ID: 41-LIB34-008-Q1-E1-C10
attttacgctgtgtttggagccgaaattaatctaaaaggaatccctgtgtatagatttgttcttccatccaggatttttgcatctccacttcaaaatccagacaaccattgtttctgcacagaaaaaattatctccaagggttgcaccttatatggtgtgctagatattagcaaatgcaaagaaggaaaacctgtgtacatttcacttcctcattttctacatgcaagtcctgaaattgcagaacttattgaaggcttaagtccaaatgaagaggaacatagcacatacttagatgttgaacctataactggattcactttacaatttgcacaacggatgcagatcaatatactagttaagccagcanaaaatattgtagcattaaaggatctaaagcacaact

SEQ ID NO: 9568 - DNA, 368 bp, Bos taurus
  Clone ID: 41-LIB34-008-Q1-E1-C2
gtgagctgcctgagaccctctcctctggcccctctgaatccaggaaggatctggtgcagtaagagactctcccagcccagcgaggagcccaggatgtttctgaaggctgtggtcctgagcctggccctggtggctgtcaccggagccgaggcggaggtcaatgccgaccaggtggccaccgtgatttgggactacttcagccagctgggcaacaatgccaagaaggcggtggaacatatccagaagtctgagctcacccagcagctcaagaccctcttccaagataaacttggggaagtgagcacctacacggacgacctgcagaagaagctggtgccctttgccacggaactgcatgaacggctgac

SEQ ID NO: 9569 - DNA, 407 bp, Bos taurus
  Clone ID: 41-LIB34-009-Q1-E1-C10
ggcggcggctctggatccactgcccacaccccgctctcgcaggcagacatgaggacagagagaatgtcccccctcctggctctggggatcctggtggctgggctctgctccagggtccactgcctcccagagaatgtgaccccagaagaacagcacaaagtgacatctgtggatggccactcattagcctccagcaacactgacttcgccttcagcctctacaagcagttggctttgaaggaccccaataagaacgtcatcttctcccctctgagcatctccatagccttggccttcttgtccctgggggctcatggccccactgtgacagagatcctggaaggtctcaagttcaacctcacagagaaccccgagacagaaatccaccagggcttccagcacctcct

SEQ ID NO: 9570 - DNA, 413 bp, Bos taurus
  Clone ID: 41-LIB34-010-Q1-E2-C10
ggattccagatggacacaggcacatgaatggatatggatcgcatactttcaagctggttaatgcaaatggagaggcagtttattgcaaattccattataagactgatcagggcatcaaaaacctttctgttgaagatgcagcaagacttgcccacgaagatcctgactatggcctccgcgatcttttcaatgccattgccacaggcaactacccctcctggactttatacatccaggtcatgacatttagtgaggcagaaatttttccatttaatccatttgatcttaccaaggtttggcctcacggcgactatccccttattccagttggtaaattggtcttaaaccggaacccagttaattactttgctgaggttgaacagttggcttttgacccaagcaatatgccgccc

SEQ ID NO: 9571 - DNA, 394 bp, Bos taurus
  Clone ID: 41-LIB34-010-Q1-E2-C2
caaaagtctacaaggaatgctgccatggtgacctacttgaatgcgcagatgacagggcagatcttgccaagtacatatgtgataatcaagatacaatctccagtaaactgaaggaatgctgtgataagcctttgttggaaaaatcccactgcattgctgaggtagaaaaagatgccatacctgaaaacctgcccccattaactgctgactttgctgaagataaggatgtttgcaaaaactatcaggaagcaaaagatgccttcctgggctcgtttttgtatgaatattcaagaaggcatcctgaatatgctgtctcagtgctattgagacttgccaaggaatatgaagccacactggaggaatgctgtgccaaagatgattcacattcatgcta

SEQ ID NO: 9572 - DNA, 409 bp, Bos taurus
  unsure (278): unsure at all n locations; Clone ID: 41-LIB34-011-Q1-E1-C10
atagttctagatcgcgagcggccgcccgcgatctagaactacggacgcgtgggcggacgcgtgggagaaattcctaaagaagagaaggatcctggaatgggtggcatgggtggaatgggaagtggcatgggaggtggcatgttctaactcctagaatagtgctttgccattattaatgaactgtgagaggaagctcaaggcagtgttcctcaccaataacttcaggagaggtcagttgaaggagctgactgaagaaaaggctggctgatgtttaaganaataactataaccatcagttactggtttcagttgacaacatagaatgggttactgctgtcattgtccatgcctacagataatttattttgtatttttaaataaagacatttgtacattcctgataaatgag

SEQ ID NO: 9573 - DNA, 413 bp, Bos taurus
  unsure (373): unsure at all n locations; Clone ID: 41-LIB34-011-Q1-E1-C2
agtgtgttctgcggcgtcgttttctctacttggttggggcgtctctagcggtccgggccggagagcctttcccccgagtcatggcgacgaaggccgtctgcgtgctgaagggcgacggcccggtgcaaggcaccatccacttcgaggcaaagggagatacagtcgtggtaactggatccattacaggattgactgaaggtgatcatggattccacgtccatcagtttggagacaatacacaaggctgtaccagtgcaggtcctcactttaatcctctgtccaaaaaacacggtgggccaaaagatgaagagaggcatgttggagacctgggcaatgtgacagctgacaaaaacggtgttgccatcgtggatantgtagattctctgatttcactctcaggagaatattccatc

SEQ ID NO: 9574 - DNA, 382 bp, Bos taurus
  Clone ID: 41-LIB34-012-Q1-E1-C2
gggtccagccacgcgtccgacctcgagcagggagctggtggctcttccatccccagaccagccaagcctgtgagtgacaccccagacagaggaaccagagccatgcggagtctcagcggactgctgttgttactgactgcctgcctggcggtaaacgccagctccgtgcccacattgcccgatgacattcaagtgcaggagaacttcgacctgtctaggatctatgggaagtggttcaatgtggccgtgggctccacctgcccatggctgaagaggttcaaggagaagatgaccatgagcacagtggtgttgaaagcggggccgacgagcaaggagatcagcgtcaccaacactcacaggcggaaaggtgtctgtgaatcca

SEQ ID NO: 9575 - DNA, 412 bp, Bos taurus
  Clone ID: 41-LIB34-013-Q1-E1-C10
gacgcgtccgagaggaactgaagctgctggacaaattcatgaaagatgccgaggctttttacgcctctgaagttttagcgactgacttcatcgattctgaagctgccgtcaagcttatcaatgaatatgtgaataataaactcatgggagaattgagaagctcttcaatgatcttgacgtgctcataaatttaatcttgttgaattatatcttctttaaaacccactggaatacgccagttactcctaatcataattacgaatcagagttccacgtgagccatcaccagagggtgagtgtaatcatgatgacactttacctgcaaaccccttacttccgggatgacgagctgagctgcacgctcgtggagctcacgttcaccatcagtgacagtgccatcttcatcctcccc

SEQ ID NO: 9576 - DNA, 374 bp, Bos taurus
  Clone ID: 41-LIB34-013-Q1-E1-C2
agagcagggagctggtggctcttccatccccagaccagccaagcctgtgagtgacaccccagacagaggaaccagagccatgcggagtctcagcggactgctgttgttactgactgcctgcctggcggtaaacgccagctccgtgcccacattgcccgatgacattcaagtgcaggagaacttcgacctgtctaggatctatgggaagtggttcaatgtggccgtgggctccacctgcccatggctgaagaggttcaaggagaagatgaccatgagcacagtggtgttgaaagcggggccgacgagcaaggagatcagcgtcaccaacactcacatgcggaaaggtgtctgtgaatcgatctctggtacttatg

SEQ ID NO: 9577 - DNA, 421 bp, Bos taurus
  Clone ID: 41-LIB34-014-Q1-E1-C2
agaaggccgtgcggggagcgagcgctgctttcactttcccttctccgtgcccactcctcgctcctcgtgcggcgtaggcccctaccccggccatggccacgctcagggtcctgcccgaagcccaagccaaggtggatgtgttccgtgaagacctatgtactaagacagagaacctgctcgggagctattttcccaagaagatttctgagttggatgcatttttaaaggagccagatctcaatgaagccaacctgagcaatctgaaggccccattggacatcccagtgcctgatccagtcaaggagaaagagaaggaggagcggaggaaacagcaggagaaggaagacaaggatgaaaagaagaaaggggaagatgaagacaaaggtcctccatgtggcccagtgagctgcaatgagaagat

SEQ ID NO: 9578 - DNA, 399 bp, Bos taurus
  Clone ID: 41-LIB34-015-Q1-E1-C10
gggcattccactccgggagctatctcgctagtgcaaatgtctgccggccagaggttcgcctttgcaatatgcattctagaaataagtctcctgagagcggggcccactcccagctacgacccagcagaaagacaaggcacaccattgcccatagactgcaggatgagctcctggagtgagtggtcgaaatgtgacccttgcctcaaacaaatgtttcgttcaaggagcattgagatctttggacaatttaatgggcgaaagtgtgtggacgccgtgggagaccgacagcagtgtgtacccacagaggcctgcgaagaccccgaggagggctgtggcaacgatttccagtgcggtacaggcagatgcataaagaatcgacttctgtgttatgaagacaat

SEQ ID NO: 9579 - DNA, 326 bp, Bos taurus
  Clone ID: 41-LIB34-015-Q1-E1-C2
tggcaacccactccagtattcttgcctggagaatcccagggatggaggagcctggtgggctgccatctatggggtcgcacagagtcggatacgactgaagcgacttagcagcagcagcagcatatatacacacattcatttcatttgtctccttttcctttttaccgagtgtccctgcctttgctattgtcctctttctccttccactaatttatcactagaattaatttgaggtccaagctaagcccattccgaagttcaacctgtctccatcagaaccttttctgatactgacatgtctggttttgtggaagaattctgtctgt

SEQ ID NO: 9580 - DNA, 415 bp, Bos taurus
  Clone ID: 41-LIB34-016-Q1-E1-C2
tgggatgcatcatattaaagggtttggacatctgtctcctactggaaacacagaattttggctgggaaatgagaagattcatttgataagcacacagtctaccatcccttatgtattaagaatacagttggaggactggaatggcagaaccagcactgcagattatgcttcattcaaggtgacaggtgaaaatgacaaataccgcctgacatatgcttacttcattggtggagatgctggagatgcatttgatggctacgattttggcgatgattctagtgacaagtttttcacatcccataatggcatgcagttcagtacttgggacagtgacaatgataagtatgatggcaactgtgctgaacacgatggatctggttggtggatgaacaaatgtcacgctggccacctcaat

SEQ ID NO: 9581 - DNA, 383 bp, Bos taurus
  Clone ID: 41-LIB34-017-Q1-E1-C2
actagttctagatcgcgagcggccgctcgcggcacaaccttctctctctgcccactcctggcagacccctcgggagcaaagcgcaccagcgagcagcatggacctggctacccttcccctctggaggccatgaaaggacccagggaggagcttgtctacctgccctgcatttaccgaaacacgggcactgaagccccggattacctggccactgtggacgtcaaccccaagtctccccagtattcccaggtcatccaccggctgcccatgcccaacctgaaggacgaactgcatcactcgggatggaacacctgcagcagctgctttggggacagcaccaagtcccgcaccaatgctgttgctgcccagcctcatctcctccc

SEQ ID NO: 9582 - DNA, 414 bp, Bos taurus
  Clone ID: 41-LIB34-018-Q1-E1-C10
acacaaaactttggcacaatgaagtgggtgacttttatttctcttctccttctcttcagctctgcttattccaggggtgtgtttcgtcgagatacacacaagagtgagattgctcatcggtttaaagatttgggagaagaacattttaaaggcctggtactgattgccttttctcagtatctccagcagtgtccatttgatgagcatgtaaaattagtgaacgaactaactgagtttgcaaaaacatgtgttgctgatgagtcccatgccggctgtgaaaagtcacttcacactctctttggagatgaattgtgtaaagttgcatcccttcgtgaaacctatggtgacatggctgactgctgtgaaaaacaagaacctgaaagaaatgaatgcttcctgagccacaaagatgat

SEQ ID NO: 9583 - DNA, 266 bp, Bos taurus
  Clone ID: 41-LIB34-019-Q1-E1-C2
gttccctgagctatgcagtacgttctcattagttatctgttttgggcttccctagtggctcagatggtaaagaatctgtctgtaatgtgggagatcgagattcaatccctaggttgggaagattctgtgcagaaaggaatggcattccactccagtattcttgcctggagaatcctcatggacatatgagcctggcaagctgcagtccaaggagtctctaagagtcagacatgactgaacgactaacacaaccaattgtctgtttt

SEQ ID NO: 9584 - DNA, 401 bp, Bos taurus
  Clone ID: 41-LIB34-020-Q1-E1-C10
agaaaaagtactgacttcatctgccagacagagactcaggtgtgccagtattcaaaaatttggagaaagagctttaaaagcatggtcagtagctcgcctgagccagaaatttcccaaggctgagtttgtagaagttaccaagctagtgacagatctcacaaaagtccacaaggaatgctgccatggtgacctacttgaatgcgcagatgacagggcagatcttgccaagtacatatgtgataatcaagatacaatctccagtaaactgaaggaatgctgtgataagcctttgttggaaaaatcccactgcattgctgaggtagaaaaagatgccatacctgaaaacctgcccccattaactgctgactttgctgaagataaggatgtttgcaaaaactatc

SEQ ID NO: 9585 - DNA, 416 bp, Bos taurus
  Clone ID: 41-LIB34-020-Q1-E2-C10
tcgacccacgcctccgagaaaaagtactgacttcatctgccagacagagactcatgtgtgccagtattcaaaaatttggagaaagagctttaaaagcatggtcagtatctcgcctgagccagaaatttcgcaaggctgagtttgtagaagttaccaagctagtgacagatctcacaaaagtccacaaggaatgctgccatggtgacctacttgaatgcgcagatgacaaggcagattttgccaagtacataagtgaaaaacaagataccatctccaattaactgaaggaatgccgtgaaaaacctttgttggaaaaatcccactgcattgctgacgtagaaaaagatgccatacctgaaaacctgcccccattaactgctgactttgctgaagataaggatgtttgcaaaaactat

SEQ ID NO: 9586 - DNA, 425 bp, Bos taurus
  unsure (54): unsure at all n locations; Clone ID: 41-LIB34-020-Q1-E2-C2
gtcgccgcggtttcctgcttcaacagtgcttgaacggaacccggctgctcgtcnccccctaccccggccggccactcagagccagccctcgtcaccacttgacagcgccctccgaccggcccaaggtccccgccaccgctccagtgccgctcggccgtcgccgccaccaccaccaccaccgcccgttttcagccgcccaccatgacgaccgcatccccctcgcaggtgcgccagaactaccaccaggactcggaggccgccatcaaccgccagatcaacctggagctctacgcctcctatgtctacctgtccatgtcgtactattttgaccgtgatgatgtggctttgaagaactttgccaaatactttcttcaccaatctcatgaggagagggaacatgctgagagactgatgaagctgcagaa

SEQ ID NO: 9587 - DNA, 385 bp, Bos taurus
  Clone ID: 41-LIB34-021-Q1-E1-C2
gaacagtaaggactctaatacattgaccaagaacatagtggaactaatgagaggggattttgccaaagctaacaacaatgataatacatttaaacaaatatcagaagatctgagaagcagaattgagatcctgaggcgcaaagtcatagaacaagtacaacgtatcaacgttctgcagaaaaatgtcagggatcaactggtagatatgaaacgattggaggtggacattgatattaagatccgatcttgcaaagggtcatgcagtagagctttagaacataaggtagatctggaggactataaaaatcagcagaagcaacttgaacaggttattgccataaacctacttccctctagagacattcaatacttaccattgataaaa

SEQ ID NO: 9588 - DNA, 392 bp, Bos taurus
  Clone ID: 41-LIB34-023-Q1-E1-C2
tggcgggtgaaaaggctgagaagccagatactaaggagaaaaaacctgaagccaagaaggctgatgctggcaagaacgctaaaaatgtggaaaacgtgaagaaagttaacaaggggaatccccactgcagccgaaatcctgtcctggtcagaggaattggcagatattcccgatcagccatgtactccagaaaggccttgtacaagagaaagtattcagcagctaaatccaaggtcgaagagaaaaagaaggttcgtgttcttgctactgtcacaaaaccagttggtggagacaagaattgtggtacccgagtggtcaaacttcgcaaaatgcctaagtattaccctactgaatatgtccctcgaacactgttgagtcatggcacaaaaacc

SEQ ID NO: 9589 - DNA, 361 bp, Bos taurus
  Clone ID: 41-LIB34-027-Q1-E1-C10
tgataagccaggagctgcctgacgactgggacaagcagcctgtcaaagtgctggttgggaagaactttgaagaggttgcttttgatgagaaaaagaacgtctttgtaaagttcgatgccccgtggtgcggtcactgcaagcagctgggccccatctgggataagctgggagagacgtagaaggaccacgagaacatagtcatcgccaagatggactccacggccaacgaggtggaggcggtgaaagtgcacagcttccccacgctcaagttcttccccgccagcgccgacaggacggtcatcgactacaatggggagcggacactggatggttttaagaagttcctggaaagtggtggcca

SEQ ID NO: 9590 - DNA, 305 bp, Bos taurus
  Clone ID: 41-LIB34-027-Q1-E1-C2
gcagaattgagatcctgaggcgcaaagttatagaacaagtacaacgtatcaacgttctgcagaaaaatgtcagggatcaactggtagatatgaaacgattggaggtggacattgatattaagatccgatcttgcaaagggtcatgcagtagagctttagaacataaggtagatctggaggactataaaaatcagcagaagcaacttgaacaggttattgccataaacctacttccctctagagacattcaatacttaccattgataaaaatgagtacaattacaggccctgttcccagagagttc

SEQ ID NO: 9591 - DNA, 381 bp, Bos taurus
  Clone ID: 41-LIB34-029-Q1-E1-C2
gccaggcagtaccggctgatccctcacaacggttactgtgatggcaagtcagaaagaaacattttgtagcaacatggaaggtgtcctttcattaggaaacttcccattaaccttactcagcctccaactcttaggagtttagtttgcttcacctcccctccctgcccctcccgcccctcccctcccctctgtaaacaaaaaaaaaaacccttcagtatacgtaaaaaacatacatggggatcagtgaatctgcttgtactcaaatgtatgtcttctctggagttttctaaggaatcatttgaggcttaggattccagactttgacttattaaaatatgtatagttacccgttaaaaagaacgggggggcggcagcgggagt

SEQ ID NO: 9592 - DNA, 405 bp, Bos taurus
  Clone ID: 41-LIB34-030-Q1-E1-C2
aatttaactaggctgttcatttttgtttgagactataaagaaagctgagcactgaagaattgatggttttgaactgtggtgttggagaagactcttaagagtcccttggactgcaaggagatccaaccagtccatcttaaaggagatcagtcctaggtgttcattggaaggactgaagttgaagctgaaactccaatactttggccacctgatgcaaagagctgactcatttgaaaagaccctgaagctgggaaagattgagggcaggaggaaaaggggacaacagagggcgagatggttggatagcatcaccgactcaatggacataggtttgggtggactccgggagttggtgatggacagggaagcttggggttcatggggtctcagagagtcagacacgac

SEQ ID NO: 9593 - DNA, 403 bp, Bos taurus
  Clone ID: 41-LIB34-031-Q1-E1-C10
gaccgccaacatgccatccagactaaggaagacccggaaacttacgggccacgtgagccacggccacggccgcatcggcaaacaccggaaacacccgggaggccgaggtaatgctggtggcatgcatcatcacaggatcaacttcgacaaatatcacccaggatactttgggaaagttggtatgaggcattaccacttaaagaggaaccagagtttctgcccgactgtcaaccttgataaattgtggaccttggttagtgagcaaacacgagtaaatgctgccaagaacaagacaggagctgctcctatcattgatgtggtgcgatcaggttactacaaagttctggggaaaggaaagctcccaaagcagccctgtcatcgtgaacgccaaattcttcagcag

SEQ ID NO: 9594 - DNA, 418 bp, Bos taurus
  Clone ID: 41-LIB34-031-Q1-E1-C2
ggccatggaccgaaaccgagcttccgcgcgcttgactgtcttgctgcgacacctcggttgccgctcggccgggaccattatagctcaccacacttcgggggttggttctcttgccagtttccatcctcaacaattccagtatacccgggagaataatgttctaagcctagaacagagaaaattttatgaagaaaatggatttcttgtcattaaaaatttggtgtctgatgctgatattcaacgctttaggaatgagtttgaaagaatctgcagaaaggaggtgaaaccattgggattgtcggtgatgagagatgtcaccatcacaaaatcagaatatgtgccaagtgagaaagtggtttccaaggtccaggatttccaagaagatgaggaactcttcagatactgcaacctccctgag

SEQ ID NO: 9595 - DNA, 403 bp, Bos taurus
  Clone ID: 41-LIB34-032-Q1-E1-C2
caacaagctgagcaaggctgacatccacctggttgaacttctctactatgtggaagagctggaccctagccttttggccaacttccctctgctgaagggcctgaaagccagagtcagcagtctcccggctgtgaagaagtttctgcagcctggcagccataggaagcctcccatggatgagaaaaatttggaagaagcaaagaggattttcacgattaaatacagcaagcacggctgcccacgacatgcatgatcactcttctgaagttctccaacaatgaagtgctttacctaaatgtagatcttggctgttgtggaactaataaacattttcaaagtatagttgatgatttaattaaaatgcaaaattaatttcaaaacaatccattttgttttgatcacg

SEQ ID NO: 9596 - DNA, 373 bp, Bos taurus
  Clone ID: 41-LIB34-033-Q1-E1-C2
catcgatcagggagctggcggctcttccatccccacaccagccaagcctgtgagtgacaccccacacagaggaagcagatccatgctgagtctcagcggactgctgttgttactgactgcctgcctggcggtaaacgccagctccgtgccgacattgcccgatgacattcaagtgcaggacaacttcgacctgtcgaagatctattggaagtggttcaatgtggccgtgggctccacctgcccatggctgaagacgttcacggagaagatgaccatcagcacagtggcgttgaaagcggagccgacaatcaaggtgatcagcgtcaccagcactcacacgccttaaggtgtctgtgaatcgatctcgggtact

SEQ ID NO: 9597 - DNA, 412 bp, Bos taurus
  unsure (329): unsure at all n locations; Clone ID: 41-LIB34-035-Q1-E1-C10
acctcttttgttcatctccccctgagaagccattcctgtgtctgccaaactcctggggtcctgcctgttacctcccaatggagggatttttggggagtggtccccgtctggggggcccctccagccagtactccaggtctccctgtcccccacccccttccgttttgatagtataatctatttttaaacagggcttttcaataagggagagggaggtatctcttcctatatctgagatggggtgggtgggaaggaagggatttgggggatctccctgccacccccaagtgtttatttttgataccaaatgtgtattttcaactccctcncagccccccaattttcctgcgggcgggtacaaaggaccctttatgtgtccctggagttgggagggaggaacaagggacataaa

SEQ ID NO: 9598 - DNA, 398 bp, Bos taurus
  Clone ID: 41-LIB34-036-Q1-E1-C2
agtggatgagctgcctgaccgctgctacgcagagatcgcggatcccgacgcaggtggaccatgtggactttggtgagctgggtggccttagtgacacggctggtggttggaaaacagtgcccagacggtcaactctgccctgtggcctgctgcctggacccgaatggagccacctacagctgctgcaatcccgttcaggaccatcggccgtctgtgctgaaccagcgtctgggccgaccctgccaggccgatggccactgcgctcctggctactcctgcaacctcactgtctcaaggacctccagctgctgcgcgttcccagaggctgtgtcatgtgaggatggccgccactgttgcccccggagcttcaactgcaacgctgacgggcggtcctgctt

SEQ ID NO: 9599 - DNA, 448 bp, Bos taurus
  Clone ID: 41-LIB34-037-Q1-E1-C2
cccgggtctgcccacgcgtgccaacgcagcgatcggaacttaggagcaggtccgggctgaagtcgcctcccagatggcctccaggctgaccccgctgaccctcctgctgctgctgctgctggctggggacagagtcacctcagatatgatcgtcggcccagggaacttacaagaaggggaaagtgaaggagacagccagaaaggaggtattctcgatggtgagtccattcaaggcaacgaggactctcccaccttgccgataactaacctgaccgtcgtgccagccactgtcaccaagcccttcagccagcctgccactgaaccggtccaatcaactatccagcccactgctgagcccttctgcctggcgcccgtcacctcctgctctgactcggagatccgctcagcagaggcggtgctgggggaggctttgacagacttctccctg

SEQ ID NO: 9600 - DNA, 354 bp, Bos taurus
  unsure (291),(298): unsure at all n locations; Clone ID: 41-LIB34-039-Q1-E1-C10
aggacgcgtgggtgctacccgagacaactgctgcatcttagatgaaagatttggtagttattgcccaactacctgtggaattgcagatttcctgaataattaccaaaccagtgtagacaaagatctacgaactttggaaggcatcttatatcaggttgagaacaaaacatcagaagccagagagctggtcaaagcaatccaaatcagctataaccctgatcaaccatcaaagccaaataacatagagagtgctaccaagaattccaagagtatgatggaagacattatganatatganacactgataacaacacatgaatcaacaattcgatttttgcaagaaatatataactc

SEQ ID NO: 9601 - DNA, 436 bp, Bos taurus
  Clone ID: 41-LIB34-039-Q1-E1-C2
caattttaggagccatcaacttcattacaacaattatcaacataaagccccccgcaatgtcacaataccaaacccctctgttcgtatgatccgtaataattaccgccgtactactactactctcgctccctgtattagcagccggcatcacaatgctattaacagaccggaacctaaatacaaccttcttcgacccggcaggaggaggagaccctattctatatcaacacttattctgattctttggacaccccgaagtctatattttaatcttacctgcgtttggaataatctctcatatcgtgacctactactcaggaaaaaaagaaccattcggatatatgggaatagtttgggctataatgtcaatcggatttctaggtttcatcgtatgagcccaccatatattcactgtcggaatagacgtcgacacacg

SEQ ID NO: 9602 - DNA, 376 bp, Bos taurus
  Clone ID: 41-LIB34-040-Q1-E1-C10
gtcaacatgactgaaactgatcatatcaacactcatgaccccttctatcaacgctcagccaatagttataagacacaccttttgccacagactctgtttgacaccaacatctatatgctcagaaaacacccgcatgaaacttaaaatgaacgttctcattactaaccacagtttactacccctgtgccatttaagtcccactcacgtatgtctctagcagtatattcttaagccttactattcactgcatgataccaactatcactcaaacgcattggcaccctacagcatcttggaactcagcttgtatcaatggacatagtgagtaacaatatgtctcctagatacaccttggcattcatcgcagtaactctga

SEQ ID NO: 9603 - DNA, 173 bp, Bos taurus
  Clone ID: 41-LIB34-040-Q1-E1-C2
acgcgtccgctcacaaagccactcatcgccacatgccggaagggtgtcaccgcctgccacattgccctggctgcttacctctgtggcaaacccgatgtggccatctaacatggctcctggtttgaatggttgcaaccgggcccccccgggagagctggttttccaaggggaag

SEQ ID NO: 9604 - DNA, 410 bp, Bos taurus
  Clone ID: 41-LIB34-041-Q1-E1-C10
gtcaccaccacggtccgtgacgacaagggcacagagcaaagcatcactgtggcccaggatgagggcatccgccccaacaccaccatggagggcctggccaagctgaagcccgcctttaaggacgggggctctaccacggctggaaactctagccaggtgagtgatggggctgctgccattctgctggccaggaggtccaaggcagaagagttgggccttcccatccttggggtcctgaggtcctatgcagtggtcggggttccacctgacatcatgggcattggccccgcctatgccatccctgtggctttgcagaaagcagggctgaccgtggatgacgtggacatctttgagatcaacgaggcctttgctagtcaggctgtgtactgtgtggagaaactgaaactccc

SEQ ID NO: 9605 - DNA, 414 bp, Bos taurus
  Clone ID: 41-LIB34-043-Q1-E1-C10
acgcgagcggccgccctttttttttttttttttttttttagagtcttttcattttttattaattgtagcacaaacaaaagaagcaagatatttaaagaaatttacgttctttagtgagagtgttggtttaacaccaacagaaaaggaaaacagatgaataagctctgagttttcatttctcctttttcctcttactctcagggtacgctgagatgcctgtggttgtgtcgtgtttaggctaaggctgtttgagttgaaacaacaagttttggaccctccacagcaaagcaggcttctttgtcatcagctgcacagcacttgtctacaaaagccacaaaattctccatgacggttttcagttgttcctctgttgccttgggcttgtgtttcaacagctcaacaagtgcagtttgt

SEQ ID NO: 9606 - DNA, 339 bp, Bos taurus
  Clone ID: 41-LIB34-043-Q1-E1-C2
agaaacgtgggaaaactacaagtatggttttgggagacttgatggagaattttggttgggtttagaaaagatatactccatagtaatgcaatctaactatatcttacgaatcgagctagaagactggaaagacaagtattatactgaatactcttttcacttgggagatcacgaaaccaactatacactacatctagctgagatttctggcaatggccccaaggcatttccggaacacaaagacttgatgttttctacttgggattacaaagcaaaaggacatttcaactgtccaaaaagtaattcaggaggctggtggtaccatgatgtatgtgggga

SEQ ID NO: 9607 - DNA, 406 bp, Bos taurus
  Clone ID: 41-LIB34-045-Q1-E1-C10
ctgcaggagaaggaggtgatacaggacgtggtggcagaaaaatgaagaggatcctggttttcctccttgctgtagcctttgtgcatgctctagagagaggccgagattatgagaaagataaagtctgcaaggaccttgccagcctgggaagagatgacttcacatctttgtcaatggtcctatacagcagaaaatttcccagtggcacctttgaacagatcagccatcttgtgaatgaagttgtttccttaacagtaacctgctgtgcggaaggggccgatcctgactgctatgacaacaggacttcagcattgtctgacaagtcctgtgaaagcaactctccattcccagtgcaacctggaactcgtgagtgctgcacccatgagggccttgaaaagaagctctg

SEQ ID NO: 9608 - DNA, 413 bp, Bos taurus
  unsure (377),(400): unsure at all n locations; Clone ID: 41-LIB34-046-Q1-E1-C2
catttgatatattactgtactctggaatttgagcaaaaacttaatttccaggcttttaaaagcacaaattataaatgctgggaaagtaaaccagatttcagatcagtccttatgcacctcctccttcatctgcaactccccagggtgatgagcacagacgggtggaggcagcacggaaaacacagcctgcctctcagttcattcctcctcttcctcccaaaggctgaaggcagggccttcccagtcctcacagcctgcccttctccggcccctcccgacagggatggaggctttgattcccacggtgtggtggtgcagagcgcgcgttgtcactgcctggctttacgtaaaggaaatgcagtaggcttcctatgtanggttctgaaaaggcggcctgtangaagtcatgtatg

SEQ ID NO: 9609 - DNA, 415 bp, Bos taurus
  unsure (341): unsure at all n locations; Clone ID: 41-LIB34-047-Q1-E1-C10
ctttggacaccccgaagtctatattttaatcttacctgggtttggaataatctctcatatcgtgacctactactcaggaaaaaaagaaccattcggatatatgggaatagtttgggctataatgtcaatcggatttctaggtttcatcgtatgagcccaccatatattcactgtcggaatagacgtcgacacacgagcctacttcacatcagccactataattattgctattccaaccggggtaaaagtcttcagctgattggcaacacttcatggaggtaatatcaaatggtctcctgctataatgtgagccctaggctttattttcttatttacagtanggggtttaactggaattgtcttagccaactcttccctcgatattgttcttcacgacacatactacgttgtcgca

SEQ ID NO: 9610 - DNA, 411 bp, Bos taurus
  Clone ID: 41-LIB34-047-Q1-E1-C2
ttcacttgccagtttccatcctcaacaattccagtatacccgggagaataatgttctaagcctagaacagagaaaattttatgaagaaaatggatttcttgtcattaaaaatttggtgtctgatgctgatattcaacgctttaggaatgagtttgaaagaatctgcagaaaggaggtgaaaccattgggattgtcggtgatgagagatgtcaccatcacaaaatcagaatatgtgccaagtgagaaagtggtttccaaggtccaggatttccaagaagatgaggaactcttcagatactgcagcctccctgagattctgaaatatgtggagtgcttcactggacccaatattatgggcatgcatacaatgctgataaacagacctctagattctggaaagaagacatcccg

SEQ ID NO: 9611 - DNA, 427 bp, Bos taurus
  unsure (236): unsure at all n locations; Clone ID: 41-LIB34-048-Q1-E1-C2
tggggatggggaagaggactattgaacacagaattcaagaggaagccttatgtttggtggaagcattaaaaaaaaccaatggatctccttgtgatcctactttacttctgagctgtgctccctgcaatgtgatctgctccattattttccggaatcgttttgagtacaatgatgagagattgctaaccttgataaaatattttaatgaaaattcaaggcttgtaagcaccccctgngtagagctctacaatactttcccctctttactacattatttcccaggaagtcataatacaatatttaaaaacatgactgagcaaagaaagtttaattttggaggaaataaagaaacaccaagaatccctggacctcaatacccctcaagatttattgattaacttctgattaaaatggaaaagggaaaaca

SEQ ID NO: 9612 - DNA, 427 bp, Bos taurus
  Clone ID: 41-LIB34-050-Q1-E1-C10
ttcccgtatcgacccacgcgctccgcggacgcgtaagcaaaactttggcacaatgaagtgggtgacttttatttctcttctccttctcttcagctctgcttattccaggggtgtgtttcgtcgagatacacacaagagtttcgattgctcatcggtttaaagatttgggagaagaacattttaaaggcctggtactgattgccttttctcagtatctccagcagtgtccatttgatgagcatgtaaaattagtgaacgaactaactgagtttgcaaaaacatgtgttgctgatgagtcccatgccggctgtgaaaagtcacttcacactctctttggagatgaattgtgtaaagttgcatcccttcgtgaaacctatggtgacatggctgactgctgtgagaaacaagagcctgaaagaaatgaatg

SEQ ID NO: 9613 - DNA, 432 bp, Bos taurus
  unsure (408): unsure at all n locations; Clone ID: 41-LIB34-050-Q1-E1-C2
gattccgagtgggcctgaacaccctgcgcggctactacaaccagagcgaggccgggtctcacaccctccagtggatgtctggctgctacgtggggccggacgggcgtctcctccgcgggttcatgcagtacggctacgacggcagagattacctcgccctgaacgaggacctgcgctcctggaccgcggcggacacggaggctcagatcaccaagcgcaagtgggaggcggaaggttatgctgaggtacagaggaactacctggagggcgaatgcgtggagtggctccgcagacacctggagaatgggaaggacacgctgctgcgcgcagaccctccaaaggcacatgtgacccatcaccccatctctgaccgtgaggtcaccctgaggtgctgggccctgggcttcntacctgaggagatctcactgacct

SEQ ID NO: 9614 - DNA, 230 bp, Bos taurus
  Clone ID: 41-LIB34-051-Q1-E1-C2
aacacaggctacgattccaggataggcagtggcagaagagcattcggtagcgggtaccggagggatgatgactacagaggaggcggggaccgctatgaagacagatacgacagacgagatgaccggtcctggagttccagagatgattactctcgggatgattacaggcgggatgatagaggtccccctcaaagacccaaactgaacctaaagcctcggagtactcctaa

SEQ ID NO: 9615 - DNA, 240 bp, Bos taurus
  Clone ID: 41-LIB34-052-Q1-E1-C2
gacattccaggctcggagccccgggcccgccgacaccatgagttggtcctcgcaccctccgagtgtaatcttctacattctttcattgctttcttcagcatgcctggcatatgttgctacccgagacaactgctgcatcttagatgaaagatttggtagttattgcccaactacctgtggaattgcagatttcctgaataattaccaaaccagtgtagacaaagatctacgaactttgga

SEQ ID NO: 9616 - DNA, 241 bp, Bos taurus
  Clone ID: 41-LIB34-054-Q1-E1-C2
aaaaactttggcacaatgaagtgggtgacttttatttctcttctccttctcttcagctctgcttattccaggggtgtgtttcgtcgagatacacacaagagtgagattgctcatcggtttaaagatttgggagaagaacattttaaaggcctggtactgattgccttttctcagtatctccagcagtgtccatttgatgagcatgtaaaattagtgaacgaactaactgagtttgcaaaaa

SEQ ID NO: 9617 - DNA, 351 bp, Bos taurus
  Clone ID: 41-LIB34-055-Q1-E1-C10
ctacgaatggtttagcaccaggcgccccacgaacgtgcggtgcgtgacgggcgagggggcggccgcctttccggccgcgccccgtgtcccgggacgaagggctctccgcaccggaccccggtcccgacgcgcggcgggggcgcgccgcgccgcgccccgggggacgcgggcgacggcccgccggcggggacggcgggggaccggctatccgaggccaaccgaggctcccgcggcgctgccgtatcgttccgcctgggcgggattctgacttagaggcgttcagtcataatcccacagatggtagcttcgccccattggctcctcagccaagcacatacaccaaatgtctga

SEQ ID NO: 9618 - DNA, 223 bp, Bos taurus
  Clone ID: 41-LIB34-057-Q1-E1-C10
cccacccactaataaaaattgtaaacaatgcattcatcgaccttccagccccatcaaacatttcatcatgatgaaatttcggttccctcctgggaatctgcctaatcctacaaatcctcacaggcctattcctagcaatacactacacatccgacacaacaacagcattctcctctgttacccatatctgccgagacgtgaactacggctgaatcatccgata

SEQ ID NO: 9619 - DNA, 223 bp, Bos taurus
  Clone ID: 41-LIB34-057-Q1-E1-C2
gtacgggacgacatgaaactatggaaggagcaccgggaccagcaaggcctgtcctatggacccttcaccacgatgggagagcaatggtaccggttgcgccagactctgaaccagcggatgctgaagccagccgaggctgcgctctacacggatgctctgaacgaggtgatcaatgacttcatggatcaactgaaacagctgcgggcagagagtgcctcggggg

SEQ ID NO: 9620 - DNA, 222 bp, Bos taurus
  Clone ID: 41-LIB34-058-Q1-E1-C2
tccaaatgaaaatcctgttatcccaatgggcctctgctccgcccggtgttaccggtattgtaagaacaagccgtacccaaagtctcgcttctgtcgaggtgtccctgatgctaagattcgcatctttgacttggggcgtaagaaggccaaagtggatgagttcccactctgtggccacatggtgtcagatgagtatgagcagctctcctctgaagccctgga

SEQ ID NO: 9621 - DNA, 207 bp, Bos taurus
  unsure (189)...(190): unsure at all n locations; Clone ID: 41-LIB34-059-Q1-E1-C2
cgacagatagccgtaacttctgtgctgtgccagccgcatccctgagacaagatggtgaaggtcggagtgaacggattcggccgcatcgggcgcctggtcaccagggctgcttttaattctggcaaagtggacatcgtcgccatcaatgaccccttcattgaccttcactacatggtctacatgttccanngtatgattccacccacg

SEQ ID NO: 9622 - DNA, 441 bp, Bos taurus
  Clone ID: 41-LIB34-061-Q1-E1-C10
gcctgcctgtacgggccgtaattccggatcgccccacgcgcccgataaagtgggtagacttttatttctcttctccttctcttcagctctgcttattccaggggtgtgtttcgtcgagatacacacaagagtgagattgctcatcggtttaaagatttgggagaagaacattttaaaggcctggtactgattgccttttctcagtatctccagcagtgtccatttgatgagcatgtaaaattagtgaacgaactaactgagtttgcaaaaacatgtgttgctgatgagtcccatgccggctgtgaaaagtcacttcacactctctttggagatgaattgtgtaaagttgcatcccttcgtgaaacctatggtgacatggctgactgctgtgagaaacaagagcctgaaagaaatgaatgcttcctgagccacaaagatgat

SEQ ID NO: 9623 - DNA, 357 bp, Bos taurus
  Clone ID: 41-LIB34-061-Q1-E1-C2
actgtagttctgggttaggaggtctggttaacaaattgactcaagcccagacctttgactacagtgaaataccaaactttccagaaagtacagtgccaggtcatgctggtcgactggtgtttgggatcttgaatggcagagcctgtgtgatgatgcagggcaggttccacatgtatgaaggctatccgttttggaaggtgacattcccagtgagggttttccggcttctgggtgtggagaccctagtggtcaccaacgcagctggagggctcaaccccaactttgaggttggcgatatcatgctgatccgtgatcacatcaacctacctgggttcagtggtgagaaccctctcagag

SEQ ID NO: 9624 - DNA, 212 bp, Bos taurus
  Clone ID: 41-LIB34-062-Q1-E1-C10
aattgttctacaaaaaaacagtcagatagatgataaaacgagaaagtggcctccaagacctagaaaagatactcaatcccgtccttgatgaacaacaccagcaatgtcaacaagaagcctaagaaccatgacagaacattgccgctggcccatctctgagcttaaacagtttgcacaaaggttttgattgcacagagattctcagctaacag

SEQ ID NO: 9625 - DNA, 186 bp, Bos taurus
  Clone ID: 41-LIB34-062-Q1-E1-C2
aaggtggttgtgtgtgctaaatgactgacttcgaacctgtgtctagtatttgactaaacaagatttcccgtagactacggtgtgctgttagaaggtcctggcctcgcactacgcggtctcttcataattgaccccaacggagtcatcaagcatcttgatgttaatgatctcccaatcgggccgaag

SEQ ID NO: 9626 - DNA, 392 bp, Bos taurus
  Clone ID: 41-LIB34-063-Q1-E1-C2
caaatactaatagctaccaattatcatctatcaaatgaaaacctaacccgaaaaaaactatttattactatgctgatctcactacaactattcctaattataacctttaccgccatggaactaatcttattttatattctatttgaagcatcactagtctcaacactcattattattacccgatgaggaaaccacacagaacgcctaaacgccggactctatttcctattctatacactaactggctccctacccctattagtcgcactaatttatatccaaaacacagtaggattcctaaatttcctaatattacagtactgagtataacctgttgataactcctgatacaatgtcttcataggactagcatttataagtagctttcatag

SEQ ID NO: 9627 - DNA, 218 bp, Bos taurus
  Clone ID: 41-LIB34-065-Q1-E1-C2
aaaaacatgtggaaaggaaggcagaatcaagtacaagataatgaaaatgtagtaaacgagtactcctcacatctggaaaagcaccagttatatatagatgagactgtgaagaataatatcccaactaagcttcgtgtgctccgttcaattctggagaatttgagaagcaaaatacaaaaattagaatcggatgtctcaactcagatggaatactgccg

SEQ ID NO: 9628 - DNA, 206 bp, Bos taurus
  Clone ID: 41-LIB34-066-Q1-E1-C10
aggcaaccaacaatggatcccaaaggccagagagtgaagcttaatgatggccacttcattcctgtcctgggatttggaacctttgcacctcgagaggttcctaagagtgaagctctggaagtcaccaaatttgctatagaggctgggttccgccatattgacagtgctcatttgtaccaaaatgaagagcaggttggccaggccac

SEQ ID NO: 9629 - DNA, 238 bp, Bos taurus
  Clone ID: 41-LIB34-067-Q1-E1-C2
aaccagtccagagggattgcctcagaccacactatctccactcgctcagacctgtggaagattagcgaccatgatttccaatgggataggaaccgtcaccgctggaaaaaggagtatatgtcttctccctttgctgcttattggcctctggggctgtgtgacctgtcatcggagccctgtggaagacgtctgcacagccaaacctcgggacattcctgtgaatcccatgtgtatttac

SEQ ID NO: 9630 - DNA, 199 bp, Bos taurus
  Clone ID: 41-LIB34-068-Q1-E1-C10
atagcattcacagtatctcttgtaggactactaatataccgatcccacctaatatcctcccttctatgcttagaaggaataatgctatccctattcgttatagcagccctaacaatcctcaactcacattttacattagctagcataatacctattatcctactagtcttcgcagcctgtgaagcagccctaggtctaa

SEQ ID NO: 9631 - DNA, 219 bp, Bos taurus
  Clone ID: 41-LIB34-069-Q1-E1-C2
ctgaaaatgtttgttgctaatgtgattgaaaaccacaggaaagattggaatcctgctgaagcaagagacttcattgatgcttacctccaggagatagagaagcacaaaggcaatgctacttcgagtttcgatgacgaaaacctcatctgcagcaccctggacctcttcttggctggaacagagacaacttcaaccaccctggcgctgggggaattgctt

SEQ ID NO: 9632 - DNA, 245 bp, Bos taurus
  unsure (199),(230)...(232): unsure at all n locations; Clone ID: 41-LIB34-070-Q1-E1-C10
acgttcacatcagccactataattattgctattccaaccggggtaaaagtcttcagctgattggcaacacttcatggaggtaatatcaaatggtctcctgctataatgtgagccctaggctttattttcttatttacagtagggggtttaactggaattgtcttagccaactcttccctcgatattgttcttcacgacnacatactacgttgtcgcacaatttccaactnnntgttttatcaata

SEQ ID NO: 9633 - DNA, 206 bp, Bos taurus
  Clone ID: 41-LIB34-070-Q1-E1-C2
cattaaggaagaatacccaaatgcaaatcaagtagtctttgccagagttgattgtgatcagcactctgatatagcccagagatataggataagcaaatacccaaccctcaagttgtttcgtaatgggatgatgatgaagagagaatacaggggcagcgatagtgaagcactgagattacacaggcacaaaaatgacccatcaagac

SEQ ID NO: 9634 - DNA, 413 bp, Bos taurus
  Clone ID: 41-LIB34-071-Q1-E1-C2
aggattttgagctgtacttgggatatgaatatgtcactgctcttcagaatctaagagaaagtaaacccccggactcctcaaaggatgagtgcatggtgaagtggtgtgcaattggtcaccaggagaggacaaagtgtgatcggtggagtgggttcagcggcggggcaatagagtgtgaaacagcagagaacactgaagagtgcatcgccaagatcatgaaaggagaagctgatgccatgagcttggacggaggctacctctacatagcaggcaaatgtggcctggtgcctgtcctggcagagaactacaaaactgagggtgaaagttgcaagaacacaccagaaaaagggtatcttgctgtagctgtggttaaaacatcagatgctaatatcaactggaacaatctgaaagac

SEQ ID NO: 9635 - DNA, 263 bp, Bos taurus
  Clone ID: 41-LIB34-073-Q1-E1-C2
aaacctcgatgcattcatgggtgatgtcatctctctgcagaatgcatcagcacttgggagcattctcaacaatcgcctgccatgtcttgcgctaaccaccgacgcactcacgcgacatcgactccatatcatcgaccgtgactggaatgaattccgtcgtaggctgaccttcgatctgcaaaccttggcgaacgcgcatgctcaacagtgcgtagagggcagtggaagctccccgggtgaagcgtctggtctactctctacta

SEQ ID NO: 9636 - DNA, 436 bp, Bos taurus
  Clone ID: 41-LIB34-074-Q1-E1-C2
gggccgagccacgcgtccaagaaaggtacaggaaaggagtgtgttcccaacagcaatgaaagatactatggctatacaggggctttcaggtgtctggtggagaagggagacgtggcctttgtgaaggaccagactgtcatacagaacactgacggaaataataatgaagcatgggcaaaaaatctgaagaaggaaaattttgaagtactatgcaaagatggcaccaggaaacctgtgacagatgctgagaactgccacctggcccgaggcccgaatcatgctgtggtctcacggaaagataaggcaacttgtgtggagaaaatattaaacaaacagcaggatgattttggaaaatctgtaaccgactgcacgagcaatttttgtttattccaatcaaattccaaggaccttctgttcaaggatgacactaaatgtt

SEQ ID NO: 9637 - DNA, 409 bp, Bos taurus
  Clone ID: 41-LIB34-075-Q1-E1-C10
ccacgcgtcaaagcatatggtgtaaacgtcatagtaggagtacctcctcatgcccaaaatatctctatgaaccccatgttgctgttgactggacgtacctggaaaggagctatttttggtggcttcaaaagtaaagaatctgtccccaaacttgtgactgatttcatggctaagaagttttcactggatcagttaattacccatgttttaccacttgaaaaaataaacgaaggatttgacctgcttcgctctggaatgagtgtccgtaccatcctgacattttgagaccatacacacaccttcacttctggcagtcttctgcctcctctatcatctgaaacatcagccaaacatcatcaataattctgtccttcagaggtactaccaataaattgcacatgggagcttt

SEQ ID NO: 9638 - DNA, 447 bp, Bos taurus
  unsure (137): unsure at all n locations; Clone ID: 41-LIB34-075-Q1-E1-C2
gtccatacaccactctgatgtgaatcgtagtagggcaatagagtgtgaaacagcagagaacactgaagagtgcatcgccaagatcatgaaaggagaagctgatgccatgagcttggacggaggctacctctacatancaggcaaatgtggcctggtgcctgtcctggcagagaactacaaaactgagggtgaaagttgcaagaacacaccagaaaaagggtatcttgctgtagctgtggttaaaacatcagatgctaatatcaactggaacaatctgaaagacaagaagtcctgccacactgcagtagacagaaccgctggctggaacatccccatgggtttgctctacagcaagattaataactgtaaatttgatgaatttttcagcgcaagttgtgcacctggatctccgcgaaattccagtctctgtgctctgtgcattggctc

SEQ ID NO: 9639 - DNA, 346 bp, Bos taurus
  Clone ID: 41-LIB34-076-Q1-E1-C2
ccacgcgtccgcttcaaaatatgatggatgctgtgaaggggacgttgtgcagtgcatccgtggcaggagcaaggttatgagccatatttgttcaaaacaagattccatctccagcaaaatcaaagactgctgtgaaaagaaaataccagagcgtggagagtgtatcatttactccaataaagatgatagaccaaacgatttatctttaagagaagcaaaatttattgaaagtgacaatgtgtgtgagaaacgagatgctgaccaagcgaacttcatggctgagtttctttatgagtactcaaggagacatccagaactgtccaaacagaactgttaaaattgctaa

SEQ ID NO: 9640 - DNA, 419 bp, Bos taurus
  Clone ID: 41-LIB34-077-Q1-E1-C10
ccaagcccctgcctaaggaaatggaagagtttgtgcagagctctggagaaaatggtattgtggtgttttctttggggtcaatggtcagtaacgtgtcagaagacagagccaaggtgattgcatcagcctttgctcaaattccacaaaaggtgctatggagatatgatggcaaaaaaccagataccttaggacccaacacccggttgtataaatggcttccccagaatgaccttcttggccatccaaaaaccaaagcctttataactcacggtggaagcaatggtgtttatgaggccatctatcacgggatccctatggtgggcactcctttgtttgctgatcaagctgataacattgctcgaatgaaatccaagggaacagctgtcaggttggacttgggaacaatgtcaacaagagat

SEQ ID NO: 9641 - DNA, 410 bp, Bos taurus
  unsure (359): unsure at all n locations; Clone ID: 41-LIB34-078-Q1-E1-C2
tatcggcaccaaggagcagaagcagcagtgggttgctcccttcactagtggtgacaaaattggctgctttgccctcagtgaaccagggaacggcagcgacgcaggggccgcggccaccaccgcgcgggcagacggtgactcgtgggtcctgagtggcaccaaggcctggatcaccaacgcctgggaggcctcggccgtagtggtcttcgccagcaccgacagatccttgcataacaagggcatcagtgccttcctggtccccatgcccacacccggcctcacgctggggaagaaggaagacaagctgggcatccgggcctcgtccacggccaacctcatcttcgaggactgtcgcatcnccaaggacagcctgctgggggagccggggctgggcttcaagatcgccatgc

SEQ ID NO: 9642 - DNA, 426 bp, Bos taurus
  unsure (411): unsure at all n locations; Clone ID: 41-LIB34-079-Q1-E1-C2
gggcaagattacctcctagtcactaaagaggttggggagggaaatagcaggctccaggaaatagcaaacattcatgatacaatgcacctttgttcaacttagggacactcaagcagtcttctttgtctttcccccttagctgtatcagttagccaggatgcacagaaaaaggacacttgagctgtatatatgtgtgtgtgcacatgcgtgtgtgtctgtgtactgtcgtctaaaacgtatttaatgactttggaaaaatcttgggcaagattacctcctagttgttgctagaatgcaatgttgctttcttattaatatgtgtgtttaaattatttttatataccatggttcccttaactttacataatttcaacattttcccctaacacttcttgggaaaaaaaatcacanaataaacttttatag

SEQ ID NO: 9643 - DNA, 412 bp, Bos taurus
  Clone ID: 41-LIB34-080-Q1-E1-C10
acccacgcgtccgacctggtcctccgtctgaggggtggtatgcagatcttcgtgaagaccctgaccggcaagactatcaccctggaagtggagcccactgacaccatcgagaacgtgaaggccaagatccacgataaggaaggcattccccctgaccagcagaggctcatctttgccggcaagcagctggaagatggccgcactctttctgattacaacatccagaaagagtcgaccctgcacctggtccttcgtctgaggggtggctgttaattcttcagtcttctactcataatgttcaatgatgacatccttctgcactctagccatttaccccaatttaagtttagaaattaccactttcagtaatagctgaacctgttcaaaatattaatacaagttttgttgcatg

SEQ ID NO: 9644 - DNA, 442 bp, Bos taurus
  Clone ID: 41-LIB34-081-Q1-E1-C10
attctagggccgacccacgcgtccagccgccgggacacaggtgtcgtgaaaaccaccgttaaacctaagccaaaatgggaaaggagaagacccacatcaacatcgttgtcattgggcacgtagattcagggaagtctaccacgactggccatctgatctataaatgtggcgggatcgacaagagaacaattgaaaagttcgagaaggaggctgccgagatgggaaagggctccttcaaatatgcctgggtcttggacaaacttaaagctgaacgtgagcgtggtatcaccattgatatctccctgtggaaatttgagaccagcaagtactatgttaccatcattgatgccccaggacacagagacttcatcaaagacatgattacaggcacatcccaggctgactgtgctgtcctgatcgttgctgctggtgttggtgaatt

SEQ ID NO: 9645 - DNA, 407 bp, Bos taurus
  Clone ID: 41-LIB34-082-Q1-E1-C2
gttcgagctcatgtcctaccgcctcaacacgcacgtcaagcccttgatctggatcgagtccgtgattgaaaagcattcccacagccgcatcgagtacatgatcaaggccaagagccagttcaagcggcgatcaacagccaacaatgtggaaatccacatccctgtgcccaacgatgccgactcacccaagttcaagacgacagtggggagcgtcaagtgggtgcccgagaacagtgagatcgtttggtccatcaagtccttcccgggcggtaaggagtacctgatgcgggcccactttggcctgcccagcgtggaggcagaggacaaggagggcaagcccccgatcagcgtcaagttccagattccctacttcactacccctggcatccaggtgcgctacctgaaga

SEQ ID NO: 9646 - DNA, 409 bp, Bos taurus
  Clone ID: 41-LIB34-083-Q1-E1-C2
aggacacgtggggcaaagtttattttggaaatattctgatgtgtccatgacgatgtgtaaagaagttgtttcatacacgaatcttataacattactacaggaatcaatgtttgatgtccttcttgcacatgccattggaccctgtggtgaactgctatctgagatacttaaagtacctttagtgtatagcctccgtttcactcctggtttttcaattgagaaatatattgggggcctttcatttcgaccaatctaggtacctgttattatgtcagaattaagtgatcacatgacattcatggagatggtataaaatatgatatatgtactttactttgacctttggttccatacatttagtgacaagaactggaatccagtttacagtgaagtactacgaagacagact

SEQ ID NO: 9647 - DNA, 408 bp, Bos taurus
  Clone ID: 41-LIB34-084-Q1-E1-C10
attttctctttaaacttagcaggagtttcctcaattttaggagccatcaacttcattacaacaattatcaacataaagccccccgcaatgtcacaataccaaacccctctgttcgtatgatccgtaataattaccgccgtactactactactctcgctccctgtattaacagccggcatcacaatgctattaacagaccggaacctaaatacaatcttcttcgacccggcaggaggaggagaccctattcgatatcaacacttattctgattctttggacaccccgaagtctatattttaatcttacctgggtttggaataatctctcatatcgtgacctactactcatgaaaaaaagagacattcggatatatgggaatagtttggggcataatgtcaatcggattt

SEQ ID NO: 9648 - DNA, 330 bp, Bos taurus
  unsure (251): unsure at all n locations; Clone ID: 41-LIB34-084-Q1-E1-C2
acgaacgacgcggtttctggaggcgaataacgcggttggccaatcgcaagccataccatgaatgttctgtgagttgccgttgtggtcgcgcttctggcatgatgcacgcagatatggatggatagctggggcccgatgaacccctgactacgcagcagcaccgggggaatgacagccagccttgggatcaggcgctgggccgcttctgggattatctgcgctgggtgcagaccctgtctgaccaggtgcangatgagctgctcagcacgcaggtcattcaggaactgacggcgctgatggtggataccatgaaggaggtgatcgcctaca

SEQ ID NO: 9649 - DNA, 370 bp, Bos taurus
  unsure (291): unsure at all n locations; Clone ID: 41-LIB34-085-Q1-E1-C2
attccaggccgacccaggcgtcaaaagaatttaagaactgaaaatcatgaagaaagcattcagatactcagaactattatcgaagagaagaaattaaattttaatgcaggtttatctgtaaaatatacacctgttgaagcaattgaaaagaataaatgtgtagatttagaacattctgacaaaggaagcacctcaagtccttccaagttggctgctgaggctaagtttccatttacatattccaaagatgatatttacagactgttgtcgtcatattctgctaaacatganaaaatgtttctgcatgtaaaagggaaagttcaactaggaagatttgtgatgagaaatcgggatgtcatgctgcaaacaa

SEQ ID NO: 9650 - DNA, 378 bp, Bos taurus
  unsure (338): unsure at all n locations; Clone ID: 41-LIB34-086-Q1-E1-C10
gccacgcgtcagcccaagcgtccgtctagatcgcgagcggccgcccttttttttttttttttttatgtgttgtcatgcagatataggctgactaggagagtgaatacataggcttggattatagctactgcaaactctagaattgttagtaggattagaatggtgaatgtaattagagctgttgtagtgctaatgcttattagtgcaagtgtagctcctccgattaggtgaattaataggtgtcctgcagtgatgttagctgttaaccgcacggcgagggctataggttgaataaaaaggctgatagtttcaataattactagtattgggattagtanagtagccaacccttgtgttgattaaaatgttatcctttgt

SEQ ID NO: 9651 - DNA, 458 bp, Bos taurus
  Clone ID: 41-LIB34-086-Q1-E1-C2
ggaaagaaaagttctaggctatatacaactccgaaaaggtccaaatgtcgtaggtccatatggcctacttcaaaccatcgccgatgcaatcaaacttttcattaaagaaacactacgaaccgctacatcttcagcctcaatatttatcctagcacctatcatagctttaggcctagccttaaccatgtgaattcccctaccaataccctatcctcttatcaacataaacctaggagtcctatttatactagccatatcaagcctagccgtatactccattctctgatcaggctgagcttccaactcaaaatacgcactaatcggagccctacgagcagtaacacaaacaatctcatatgaagtaacgctagcaattatcctgttatcagtactcctaataagtgggttcctttacctctccacattaattactacacaagaacaaatatggttaatcc

SEQ ID NO: 9652 - DNA, 335 bp, Bos taurus
  Clone ID: 42-BOVMS1-002-Q1-E1-C6
acaacctaatcctacaaatcctcacaggcctattcctagcaatacactacacatccgacacaacaacagcattctcctctgttagatatatctgccgagacgttaaatacggctgaatcatccgatacatacacgcaacaggagcatcaatgtgttttatctgcttatatatgcacgtaggacgaggcttatattacgggtcttacacctttctagaaccatgacccattggagtaatccttctgctcacaataatagccacagcatttatacgatacgtcatatcatgaggataaatatcattctgaagagcatcagtcatcacgaacctctta

SEQ ID NO: 9653 - DNA, 269 bp, Bos taurus
  Clone ID: 42-BOVMS1-004-Q1-E1-C6
atgcgaagtcatagctcgtcaatcgtgtcacctaaattcaattcactggccgtcgttttataacgtcgtgtctgggaaaagcctggcgttacccatcttactcgccttgcagcacatccccctttcgccagatggcgtaataccgagaacgcccgcaccgatcgcccttcctaaaatttgcgcagcctgaatggcgactgggacgcgacctgtagcggcgcattaagcacggcgggtgtagtgggtacgctcatcgtgactgctacact

SEQ ID NO: 9654 - DNA, 424 bp, Bos taurus
  Clone ID: 42-BOVMS1-005-Q1-E1-C6
cagtggtaaatcatttacaaatggggccgaagcaggacccgaagcctaaattccaggagggtgagagagtgctgtgctttcatgggcctcttctttatgaagcaaagtgtgtaaaagttgccataaaggataaacaagtcaaatacttcatccattacagtggttggtacaattcattgggatgactgggttccagaaagcatagtacacaagtatgtggataccaacttacagaaacagacggaacatcagaaagccaatcacgagcattatgcagaggggaagatgcgaggtgctgctcctgaaaagaaaactgctgggctgcatcagaaaagatcctgacgtgaagacagcattgaacaaacagaagacacctggaaatgcaaatggtgacagcaccagctacaacactcaagctcctcgc

SEQ ID NO: 9655 - DNA, 454 bp, Bos taurus
  Clone ID: 42-BOVMS1-006-Q1-E1-C10
gccacacaagaaggttattattgaagaaactggtaatttgatacagactgttgatgtgcgggatagcactgctactgtggctgctgcagagtgtaatccagttaccctggcgagtgtaacagcgagcacaggcatgacaaataagaacacgagccaagatgaccttttgcccacaagtgatgtcccaaaagccaaagtattgataatagaagaaatcagtgatacttcagctcttcattctcatgtcaatttgaaaaaggatgtatgtcagtctttgagttagaagattcctacagaggtacacaaagcacctgctcagtttaacaggactgttcttcctccagttcctgcaaactcaattcaacttgaatctgatttcaaacaactgaaaagttccccagataagttgtaacagtacttgaagcaaattgaaccatccttgtatcccaagttg

SEQ ID NO: 9656 - DNA, 435 bp, Bos taurus
  Clone ID: 42-BOVMS1-007-Q1-E1-C6
aaaaattgtaaacaatgcattcatcgaccttccagccccatcaaacatttcatcatgatgaaatttcggttccctcctgggaatctgcctaatcctacaaatcctcacaggcctattcctagcaatacactacacatccgacacaacaacagcattctcctctgttacccatatctgccgagacgtgaactacggctgaatcatccgatacatacacgcaaacggagcttcaatgttttttatctgcttatatatgcacgtaggacgaggcttatattacgggtcttacacttttctagaaacatgaaatattggagtaatccttctgctcacagtaatagccacagcatttataggatacgtcctaccatgaggacaaatatcattctgaggagcaacagtcatcaccaacctcttatcagcaatcccatacat

SEQ ID NO: 9657 - DNA, 176 bp, Bos taurus
  Clone ID: 42-BOVMS1-008-Q1-E1-C10
atgcgacgtcatagctcttctatagtgtcacctaaattcaattcactggccgtcgttttacaacgtcgtgactgggaaaaccctggcgttacccaacttaatcgccttgcagcacatccccctttcgccaactggcgtaataccgaagaggcccgcaacgattggcccttccaaaa

SEQ ID NO: 9658 - DNA, 211 bp, Bos taurus
  Clone ID: 42-BOVMS1-008-Q1-E1-C6
gcattgatgtccgtcgtggtaatgtggctggtgacagcaaaaatgatacacccaaggttaactgctgacttcacagactcaggtgaatactattaatcatccaggccatagcagtgctgggtatgcacctgtgctagattatcatacatctcacattgcttgcaagtttgctgacattaatgagaagattgatcgtcattcggggaaaaag

SEQ ID NO: 9659 - DNA, 456 bp, Bos taurus
  Clone ID: 42-BOVMS1-010-Q1-E1-C10
gtcaactgccgcaagaagaagtgtggccacaccaacaacctgcgccccaagaagaaggtcaaataaagctcttccacctgcttctcctttgcccgcagggcggcctcctgcccaagccccgtggtcctgggcctcaataaagtttccctttcgttgactggagcagtaaaaaaaaaaaaaaaaaaaaaaaaaaaaaaaaaaaaaaaaaaaaaaaaaaaaaaaaaaaaaaaaaaaaaaaaaaaaaaaaaaaaaaaaaaaaaaaaaaaaaaaaaaaaaaaaaaaaaaaaaaaaaaaaaaaaagggggggccccccaaagggttcaaactttatttccccttaaatggaatttaaaaccccttcaaaaggtcccccaaatttaatttaaggggcctttttttaaaaagttctaaaggggaaaaacctggggtttcccaatttaaacccctttgagaaaa

SEQ ID NO: 9660 - DNA, 453 bp, Bos taurus
  Clone ID: 42-BOVMS1-010-Q1-E1-C6
ggtccggactcccgggtcgcacaacgcgtccgaatacaaaaaaaaaaaaaaaaaaaaaaaaaaaaaaaaaaaaaaaaaaaaaaaaaaaaaaaaaaaaaaaaaaaaaaaaaaaaaaaaaaaaaaaaaaaaaaaaaaaaagggcggccgctctaagggttcaaatcttagttccccttgaatgaaaattcgggggcgcctcccaagggtctccaaatttcatttccctggccgccgttttaaaaccccttcaaggggaaccccctgtcgtttcccaggttattctttttacagcacatccccgttaaaccccctgggttaacccctttaagcccctttccaataaccccccctttcacttgcggggctttaacggaaaatggccccccctttgtccctccccattatttcccccccttttaggggattggccccccctcttttcctggtttttaa

SEQ ID NO: 9661 - DNA, 264 bp, Bos taurus
  Clone ID: 42-BOVMS1-012-Q1-E1-C10
ggcgattccatattgaaaacacagatgacctgacgactctgatcatcatggacgtacggaaacaagatggtggactgtataccctgagtttagggaatgaatttggatctgactctgctactgtgaatataaatattcgatccatttaagagggcctgtgctctcacactcagactcattcttaacctttcccaaatgattcacatggactaatctttctatctttctgatctgtaaatacttaaaaaaaaagagtaattttgt

SEQ ID NO: 9662 - DNA, 439 bp, Bos taurus
  unsure (177): unsure at all n locations; Clone ID: 42-BOVMS1-012-Q1-E1-C8
gcttggactgtggtcctgagagcagtaagaagtatgctgaggctgttgctcgggctaagcagatcgtgtggaatggacctgtgggtgtatttgaatgggaagcttttgcccgaggaaccaaagcccttatggatgaggtggtgaaagccacttccaggggctgcatcaccatcatangtggtggagacactgctacttgctgtgccaaatggaacacagaggataaagtcagtcatgtgagcactgggggtggtgccagtttagagctcctggaaggtaaagtgcttcctggagtggatgctctcagcagtgtttagtacttttctgccttctggttcctgtgcatagcccctaagtcaacatagcactgtctgcatctccacttggcattagctaatgtcttcccctttgtcaagaatcagctagtagccaagggatg

SEQ ID NO: 9663 - DNA, 387 bp, Bos taurus
  Clone ID: 42-BOVMS1-013-Q1-E1-C6
tccggatacagctagctttcttgcagaagatattagtacaaactccaatggtccaaaacctgcataggttgcgctagatgatgacagagacgatcattttgcagaagctacagaggaagtttctctggacagtccacaaaaggaacctgagctcgcatcagaaccttctcttgcagtcacacctgtgactcccacaacactcattgcacccagacatgaatcaaagagtatgtctgctcctgtgatcattgatagatccagagatgatattgatgaagatgcaactggagatgtttttgatacagaaattggtgtatcagatccagagaaagttggtgaatgcatgaatgcttacatggcttacagagtaacgacaaagcacaagtg

SEQ ID NO: 9664 - DNA, 326 bp, Bos taurus
  Clone ID: 42-BOVMS1-014-Q1-E1-C10
cacgagggataaagtggagcggattcacaccacagacaagatcctgcctcacctgccatgcttggcagacctgggcgttgaagccatgcccctggaactcaaggccatcgaggtgctgcggcgtcaccgcaactaccgctggctgtcttctgaaatcgaggacgtgcagccggccaacacgattcccactagtggcccctgagctgcccgcggcttttggtgttgtttgggttgctaccaaccaggccacctttggcggagaatcctgtatagagtgaatgatagcctctattaaaacctgagatgacatcgtcaacggtccaata

SEQ ID NO: 9665 - DNA, 390 bp, Bos taurus
  Clone ID: 42-BOVMS1-018-Q1-E1-C6
aacatcctcatcaaaaccttccttctgttttttgtgctttcaaataactaatccgaatttccaaaaaattaacatttgaatttagctgtaattctcaactgacctttttccctgtactaacgtttggtttccctgtgtggcgtgttttctgagcgttcctactttcaagcatggaacgtgcaggtgatttggaaagtgtaggcagatctgagaaaacgagcctgttacagaagaacgtcatcacagcgaatacttttggaagcttaacaaaactaacccagctgtccttttatctttttttttaattaataattcctttgttttaattaatagcagcatagtttatgggtttggagacttgcatgagagtattttagcccccttatacgt

SEQ ID NO: 9666 - DNA, 410 bp, Bos taurus
  Clone ID: 42-BOVMS1-020-Q1-E1-C10
caaaaacgaaaagctgcatgcatctacagcaggcatggattgtttatgttgtatgatctcctttattaagtaagttcacttatagtatttctagaatttgattcattgccgtaatagagccatgtagggaatgcactgattgcatgttaattgtggcaggaatatcctaaatgtcattaaaatccttcaacatgatggatctacttatggtcgtttgttgacatgacaaattaaccttcttatagttacatctggaaatgagcatttgaaatagataatcctttaagccttgtggctaaatttttgtggcttttgtttaactttgaaaggttatatatgcactaaccttttttgatggctataattaggctttaattacagaaacaagatttcaaatgaaactgtctttg

SEQ ID NO: 9667 - DNA, 386 bp, Bos taurus; identical to SEQ ID NO: 3516
  unsure (370): unsure at all n locations; Clone ID: 42-BOVMS1-020-Q1-E1-C6

SEQ ID NO: 9668 - DNA, 443 bp, Bos taurus
  Clone ID: 42-BOVMS1-021-Q1-E1-C6
ctcttgtaggactactaatataccgatcccacctaatatcctcccttctatgcttagaaggaataatgctatccctattcgttatagcagccctaacaatccttaactcacattttacattagctagcataatacctattatcctactagtcttcgcagcctgtgaagcagccctaggtctatctctactagtaatagtatcaaatacatatggtactgattatgtacaaaacctcaacttactccaatgctaaaatacattattccagcaatcatacttatacccctaacctggttatcaaaaaataatataatttgggttaactccacagcacacagccttctaattagctttacaagcctcctcctcataaaccagtttggcgacaacagccttaatttttcactactatttttctccgactccctatccactccactac

SEQ ID NO: 9669 - DNA, 401 bp, Bos taurus
  unsure (371): unsure at all n locations; Clone ID: 42-BOVMS1-022-Q1-E1-C6
taaattcttgaaatctggtgacgctgccatcgttgatatggttcctggcaagcccatgtgtgtcgagagcttctctgattatcctcccctgggccgttttgctgtgcgtgacatgagacagacagtcgctgtgggtgtcatcaaagcagtggacaagaaggcagctggagctggcaaggtcaccaagtctgcccagaaagctcagaaggctaaatgaatattatccccaatacctgccaccccagtcttaatcagtggtggaagaacggtctcagaactgtttgtctcaattggccatttaagtttaatagtaaaagactggttaatgataacaatgcatcgtaaaaccttcagaaggaaaggagaatgtntttgtggaccatatgttttgtgtgtggcag

SEQ ID NO: 9670 - DNA, 409 bp, Bos taurus
  Clone ID: 42-BOVMS1-023-Q1-E1-C6
ccacgcgaccggtacatcactgaagtcacaattagtccatctctactgaacgctgccagagatgacattagcaagcttaggaatacactccgctttcttttgggaaatgtggctggtttcaacccagaaacagattccatccctgtcaacagcatgtatgtcatagaccagtacatgctacacttactgcaggatttggcaaacaagattaatgattcatataagcagtatgactttggaaaggttgttcggcttttacaagcatttttatacaaggaactctccaatttttatttcagcataatcaaagaacaggcttattggtgaaaatgcagatgatccaaaacgacgcccttgtcagactgcaatagctgaaatttggggtgtaatggttcgctcttttgctccc

SEQ ID NO: 9671 - DNA, 286 bp, Bos taurus
  Clone ID: 42-LIB188-001-Q1-E1-C10
acacatactcctcccactttcggccaaggaaccgaggtggagatcaaaaggtctgatgctgagccatccgtcttcctcttcaaaccatctgatgagcagctgaagaccggaactgtctctgtcgtgtgcttggtgaatgatttctaccccaaagatatcaatgtcaagtggaaagtggatggggttactcagagcagcagcaacttccaaaacagtttcacagaccaggacagcaagaaaagcacctacagcctcagcagcatcctgacactgcccagctcagagt

SEQ ID NO: 9672 - DNA, 418 bp, Bos taurus
  unsure (269): unsure at all n locations; Clone ID: 42-LIB188-001-Q1-E1-C6
acaagaatagttaagtattttgcacaaaggaaatttgttgatgatccagtagaactgatgcccatagaacgcagtttcttaaggattttgttttgcttctttgagggaggcggccatcgtcattgtcagttcagctgggggttccttccttcatgctgaggacctgtgtctttgaagttgctgacgtcctcggaatcccaggcaggctggtgaatgctcaggggctcccatggaggcatctggtggcctcgggccccctttgcttgtangaggcttagcaagttccttgtcgcttcttcccactgggcatactccctcagctgctccttcaggctctcctcctcatgaagttgtggggactctgccacactcttttttcccattaagtgtccgacagcccagtggttgccgcgcgtgt

SEQ ID NO: 9673 - DNA, 409 bp, Bos taurus
  Clone ID: 42-LIB188-003-Q1-E1-C6
gataccgaaggcacgccacagtccacatgtctcgaatgatcaacaaatacaagcgccggcggtttcagaaaaccaagaacctgttgacgggagagacagaagctgacccagaaatgatcaagagggccgaggactatgggcccgtggaggtgatctcccactggcaccccaacatcaccatcaacatcgtggacgatcacacgccgtgggtgaagggcagcgtaccgcctcccctagaccagtatgtgaagttcgacgctgtgagtggtgactactaccccatcatctacttcaacgactactgaaacctgcagaaggactactaccccatcaacgagagcctggcaaccctgcggcttcgcgtctcctttctgccactgtcgccctggcgctggcacctctacgccgc

SEQ ID NO: 9674 - DNA, 254 bp, Bos taurus
  Clone ID: 42-LIB188-004-Q1-E1-C10
acaactatattagagttttaagaccacagacttttattactcaaatcttattctgtgtatgttaaaatcagaaggttctgaacagctggttaggaaggtagccaagatgcaggaaagacgtctgggcctccttttcaagggcagccaactcttggaccgtaggagccaaaacatccacgtggcctttatagtttccaccaccaagagttcttttctggccgtaagtaactttcccatcaaattcatctactggt

SEQ ID NO: 9675 - DNA, 377 bp, Bos taurus
  Clone ID: 42-LIB188-004-Q1-E1-C6
actgaccctatgggtcgtgtggagactggtgttctcaaacctggcatggtggtcacctttgctccagtcaatgtaacaactgaagtgaagtctgtagaaatgcaccatgaagcattgagtgaagcccttcctggggacaatgtgggctttaatgtcaaaaacgtgtctgtcaaagatgtccgtcgtggcaatgtggctggtgacagcaaaaatgatccacccatggaagctgctggcttcacagctcaggtgattattttgaaccatccaggccaaatcagtgctggatatgcacctgtgctggattgtcacacagctcacattgcttgcaagtttgctgaactgaaagagaaaattgatcgtcgttctgggaaaag

SEQ ID NO: 9676 - DNA, 386 bp, Bos taurus
  Clone ID: 42-LIB188-005-Q1-E1-C6
acgagagctaggagctgctctatgcccgggcccagctggagctggaagtgagcaaggcccagcagctggctgaggtggaggtgaagaagttcaagcagatgacggaggccctggggcccagcaccatcagagacatggctgtggcagggccggagatgcaggtaaaattgctgcagagcctgggcctaaaatccaccctcatcaccgatggttccacgcccatcaacctcttcaacacagccttgggtttgctggggctcggggctgaggcccagcccccagccaagaagcccaccgggggacccagcgtccaagagggcttacttcccatctccactgctgcccccctaactcttggaaacaaccaggttgtgccttagctctgt

SEQ ID NO: 9677 - DNA, 309 bp, Bos taurus
  Clone ID: 42-LIB188-006-Q1-E1-C10
gcatgcacccgaacgccatgggcccgggatacttgtccactgactcaggctgcccatttctctgccactccacggcgatgtagtctgggtagaagctggtgaccatgcaggtgaggctgaccgtgcttttgctgagctcttcctggggtggggccaggacatacacctgcggctcccgggccggccctttgctcctggagatgatcctcacgatgggggccgagaggcctttgttgttgaccttgcacttgaactcctttcctccagtccagtcccggtgctggatgggcagggcgctgaccacgcggt

SEQ ID NO: 9678 - DNA, 380 bp, Bos taurus
  Clone ID: 42-LIB188-006-Q1-E1-C6
actcttttataccatgactgttgaagtgaaaggtccctatgaatacctcacgcttgaagaatacccactgatgatttttttcatggtgatgtgtattgtatatgtcctgtttggtgttctgtggctggcatggtctgcttgctattggagagatctcctgagaatccagttttggatcggtgctgtcatctttctgggaatgcttgagaaagccgtcttctatgcagaatttcaaaacatccgatacaaaggagaatctgtccagggtgccctaatccttgcagagctgctttctgcagttaaacgctcactggctcgaaccctggtcatcatagtcagtctgggatatggcatagtcaagcctcgccttggagtcactc

SEQ ID NO: 9679 - DNA, 353 bp, Bos taurus
  Clone ID: 42-LIB188-007-Q1-E1-C6
gccactgggcccgggatacaattacagatattaaaaaaaaaaaatttaacaagcaaggctagagtttgataaattccatcttgtgatccattcttgtgcattcttcacttcttgagtcactcccaaaatccatttgtattgtaactcctaaaggatgatttacaggtcagtatcaaaccaggccagctgattgctgtcgcccgggggcagcccatccatgaggtcctgggcatgccccagatctggcagcccgtcaactggatattcagcaccagggtggtggccgcccatctcatgttccatcatggggtccatccccaaggcgtcctggtcgtacgtggagacctcggcca

SEQ ID NO: 9680 - DNA, 402 bp, Bos taurus
  Clone ID: 42-LIB188-009-Q1-E1-C6
acacttacaggcaccacactcgcagacgccgcggccattgcagatctgtccattcacggccatgcaggaagtggtatccagagaacagtcacaggcgctgccggtgtagttagggttgcactcacacactcgacacttgcaaacaccatttcctccacatattaagccattggatctatcacagttgaaattatcacactcgcagaatttgccagaataaatttcatttgtattgtccctcttcctacacacacactgtccacagacacactctccattgttgctacagatttctgaactgttttctttcctgcagtaggcatccatgtcttcgctgttcacctcatctgtgctacattcacagtgtctcccgacacgtccctcgttgcacctgcaggcccc

SEQ ID NO: 9681 - DNA, 423 bp, Bos taurus
  Clone ID: 42-LIB188-010-Q1-E1-C10
acctcctttgggctggatgctactagctactaggaatgaaaaaatcggtagaggtggcacctgccctcaaggagcttatagtctgttggggaaggcagatctgtaatcagataattacaatgtgctatattaagtggctccggggctatagatacagaatgctggaggtaaacacaaaaagtaacaacaaaccctactgagggaaacaagaaaggcttcactgaggaagcagctttgaactgagtagaagtgaaagtgaagtcactcggttgtgtccgactctttgcgaccccatggattgtagcctgccaggcttctccatacatgggattttccaggcaagagtcgagaaagtagtaaggatttttattgtcaaaacaagtaagagatacaagcataacggaagacacgaataaattaatt

SEQ ID NO: 9682 - DNA, 422 bp, Bos taurus
  Clone ID: 42-LIB188-010-Q1-E1-C6
acaaaaaccttacataaattaaaaggatgaataaatttacaggtgtgaatgcaaactgtttccaactcaaggcaagtaaccagaacagtgctctggtgggaaatcttcagtaagaaaggaaagcaggtcctacggcttggaccttcccaaccccgtgtaagaccggccaagacagaaatgacaactgtttcaagaactcttgccagcctctagagaaatcctggaataggcagctctgacacattaataccctgcacagactgagagactcagtctcccagattcttatcaagccattggatttctcttccataaacattctcacctcagctcgaggtgagagccgcatataactaggggtttaaatcaaagatatgcacagggtattaaacatataccaaggtaagagttaacttgaatac

SEQ ID NO: 9683 - DNA, 402 bp, Bos taurus
  Clone ID: 42-LIB188-011-Q1-E1-C6
acatcaagatgtcaacagcgatcaagcggaacgagaacatggctaaagggctgcagaaggccctgctgcagcagcagccggaagatgacagcaagcgcgcccctcggccccaggacctgatccggctctatgacatcattctgcagaatttggtggaattgctccagcttcctggcttagaggaggatagagccttccagaaagagataggccttaaaactctggtctacaaggcttacaggtgtttcttcatcgctcagtcctacgtgctggtgaagaagtggaatgaagcccttgtcctgtatgacagggtcctgaaatacgcagacaaattgaattcggacgctggagccttcaagaacagcctcaaggacctgccggacgtgcaggagctcatcacac

SEQ ID NO: 9684 - DNA, 391 bp, Bos taurus
  Clone ID: 42-LIB188-012-Q1-E1-C10
acttggggtggcggatgatcttggacgcatcgatgaactgctcaccaccctccaagacatcaatgttgtattctcccagcctcacctggatgcggcagcagctcccacaaaggcaaggatcagcaggggatgcatggtgaagtccaaagtagtttttataccttaagttgtgcgtagaggataatagggggatgtagagtcatgcaaggtcagcagtccttgactctatcgaagccaggctttctttctgcaaacttaccatatgcaaaggctttaggtgatttacatcatcttctggccaagaggcctcttaacattttatgaccctttcttctgaataatggttagtcaattagagaacttattttctctaaaggtgattattctaaag

SEQ ID NO: 9685 - DNA, 235 bp, Bos taurus
  Clone ID: 42-LIB188-012-Q1-E1-C6
actttttagaccgttatgagcttgcttcgtttaacttcggcaaatgcgttctacaccattcccatgaatatagggcacatgccaaaacattgatgtaccggtatgtccacctacacgggcaactcttccttcatcgagagcagtacacagtttgtcatcgactgttacaatgggctgattgcaatggaatgtgcgctatgcttggatagatgtgtgattcagtcacaactggaac

SEQ ID NO: 9686 - DNA, 426 bp, Bos taurus
  Clone ID: 42-LIB188-014-Q1-E1-C10
actgtccaaactatggcactgtcacttaaaaaaatttttttaccactctatcttgtgccagatcttcacagctgtgacatggtttaaattccataatccatccccaaggggagcccacccaaagcaaaaatcaaatttatccatccattataagatgatccatccatagactatatcttaacctgatacagtcatcatattgtagtttttcgaagggcttgttctgcccaagagaagttcctccttacagctgattctgctgtctaccatttgcacgttggtgctgttttgggtgctacctcctgctggtgaggcttcgtaccaaaagaccttcctcctgatactgcgctgctggacctgcaaaacaacaaaataactgagatcaaagatggagactttaagaacctgaagaaccttcatacactg

SEQ ID NO: 9687 - DNA, 394 bp, Bos taurus
  Clone ID: 42-LIB188-014-Q1-E1-C6
acagccggccagtgccatcctgtatgactacgacaaccctgagcacaagtgttctgtgttttatggggcaccacgtaagagcaaactcttgtccacgttgtgctctgcggatgtctgccagtgtgctgaggggaagtgccctcgacagcgccgggccctggagcgtgggcagcaggacttggagggttaccggatgaaattcgcctgctactctccccgagtggactacggcttccacgttaaggttctccgagaagacagcagggctgctttccgcctctttgagacccgtatcacccaagtcctgcatttcaccaaggatgccagggccaccgctgatcagaccagaaacttcctggtccgagcctcctgccgccttcagttggaacctggg

SEQ ID NO: 9688 - DNA, 442 bp, Bos taurus
  Clone ID: 42-LIB188-016-Q1-E1-C10
acatccaagtgaacaaagcccctaagatgcggcgcaggacttacagagctcacggtcggatcaacccctacatgagctctccatgccacattgagatgatccttactgaaaaagaacagattgttcctaaaccagaagaggaggttgcacagaagaaaaagatatcccagaagaaactgaagaaacaaaaacttatggcccgggaataaatgccgcaaaaaataaatgcaaataaaagttaaaaaaaaaaaaaaaaaaaaaaaaaaaaaagcttgtacaagaatagttaagtattttgcacaaaggaaatttgttgatgatccagtagaactgatgcccatagaacgcagtttcttaaggattttgttttgcttctttgagggaggcggccatcgtcattgtcagttcagctgggggttccttccttcatgctgaggacctg

SEQ ID NO: 9689 - DNA, 465 bp, Bos taurus
  Clone ID: 42-LIB188-016-Q1-E1-C6
tggcggcgggatacatcgtgtaaataataaaaagccaagtaagagggctgaacttcaacctagcattttaatatcctctggacaaggcaagctagaaaatcaatcactttgcacacatgtaagagtagtgttccaaaataagtaggaagctgctatacttctaagcaggggaggaaaaaaacttccattttggtcttttttcttccagtaaattatactttcaattaacagcaataatggtatcataaaaaaatgctctgctttttaaattcctgaacttcaatacaaattaaaatagtagtattggagtcttttgggaggcaaacagctagcagctacattcatcagtgtaactgagcctctttatcgataacctggtccaggttgggtatagccctgaccaaagggaggacggctacgtgcatatgggttagacccacttgcaagaagggtcatggtatcact

SEQ ID NO: 9690 - DNA, 429 bp, Bos taurus
  Clone ID: 42-LIB188-017-Q1-E1-C6
gccatggcggcgggatacttatgatcggccagcccaccgggcactttgacaagcttgttgttgttcaaatgaagttccctcaaatgaggagtgttggccaaagagccattgtcaaccgcagagatgctgttgaaactcagtcccaacttagccaaattattcagtcctttcaggctagctgcatcaactttggtgattttgttgccatcgagatgtaattcagtaagggaaggaggaagaccttgagggatggtagttatatttgtgtcagcaatgcggatgtaggagagcttcttcattccctgaaaggctccattttcaatgcctgagctcttcagcgggttggtgccaagttctacgacgatcatctggttcaatccattgaacacagactttcgcactttggtgatctcgttctcatggacacgc

SEQ ID NO: 9691 - DNA, 422 bp, Bos taurus
  Clone ID: 42-LIB188-018-Q1-E1-C10
acttatgataggccagcccaccgggcactttgacaagcttgttgttgttcaaatgaagttccctcaaatgaggagtgttggccaaagagccattgtcaatcgcagagatgctgttgaaactcagtcccaacttagccaaattattcagtcctttcatgctagctgcatcaactttggtgattttgttgccatcgagatgtaattcagtaagggaaggatgaagaccttgagggatggtagttatatttgtgtcagcaatgcggatgtatgagagcttcttcattccctgaaaggctccattttcaatgcctgagctcttcagcgggttggtgccaagttctacgacgatcatctggttcaatccattgaacacagactttcgcactttggtgatctcgttctcatggacactcagctcctga

SEQ ID NO: 9692 - DNA, 279 bp, Bos taurus; identical to SEQ ID NO: 1659
  Clone ID: 42-LIB188-018-Q1-E1-C6

SEQ ID NO: 9693 - DNA, 430 bp, Bos taurus
  Clone ID: 42-LIB188-020-Q1-E1-C10
accaaaagaccttcctcctgatactgcgctgctggacctgcaaaacaacaaaataactgagatcaaagatggagactttaagaacctgaagaaccttcatacactgattctcatcaacaacaaaattagcaaaatcagccctggggcatttgctcctttggtgaaattggaacgactttatctttccaagaatcaactgaaggaattgccagagaaaatgcccaaaactcttcaggagctgcgtgtccatgagaacgagatcaccaaagtgcgaaagtctgtgttcaatggattgaaccagatgatcgtcgtagaacttggcaccaacccgctgaagagctcaggcattgaaaatggagcctttcagggaatgaagaagctctcctacatccgcattgctgacacaaatataactaccatccctcaaggt

SEQ ID NO: 9694 - DNA, 234 bp, Bos taurus
  Clone ID: 42-LIB188-020-Q1-E1-C6
acaattatatcttacttttaattaattgcgcttaaggccttaattaaatctggaggttcccttcttagagcagctcatactgacggaggtgcatgcgctggatgatgtcacggcagtcgttgaacacacggcggatgttctcggtgtccacagcgcaggtgaagtgagggtagcagtagtggcgcccgtctccactagcagtgctgattctcagaaattcatctcgaatgaagt

SEQ ID NO: 9695 - DNA, 416 bp, Bos taurus
  Clone ID: 42-LIB188-021-Q1-E1-C6
acactttgatgaagatgagctctggactgaggggacctaccggggggtgaacctgcgcatcatcgcagcccatgaaattggccatgccctggggctggggcactcccgatacacccaggccctcatggctcctgtctacgctggctaccggccctacttcaagctgcaccctgatgatgtggctgggatccaggctctctatggcaagaagagcccagagatagaggaggaggaggaggaagaagacacggcactcccgactatacccctagtgcccacagaacccagtcccatgccagacccctgcagcagtgacctggatgccgtgatgctagggccccgaggaaagacctacgccttcaagggaaactatgtgtggaccgtgacagattcaggattgggtcccttgttccaag

SEQ ID NO: 9696 - DNA, 285 bp, Bos taurus
  Clone ID: 42-LIB188-022-Q1-E1-C10
acagcgccgaatctaccttcgaggggatcctcaaaaacccaagagcagagtctttgaacagcaggtccctctggccgggtggagagccaaagagctggaagctccgagacttgttttttccaaatttctcctgcgccttgctgagaagcttccagatcaagtcttccttgccatccacacttcgggccacgacagcatgagaagggacctgggccaagtggcactccttgaacgcatccactggggcccgactgttgttcaggcagagaaactcatactggtccc

SEQ ID NO: 9697 - DNA, 402 bp, Bos taurus
  Clone ID: 42-LIB188-022-Q1-E1-C6
acggaattcagcagttctgacactgattacgtaagggttgctgctatcagccttgcccactgtgacttctccaaacccaaggaggaaccctagataaaatgccccaacactgtgatgagagcatccagatgttgccatgagaaaccggaaggcagatcttcacagaagccccaagggctcactcctgcccagtgttaggagacagggttgttgacagctcctgtctcactgcagcctctagcacttggtcagtcactctccgccttagcactttgttcactgtcctgtgtcagagctctgagctcgctctacccttttctgaaaaagtatgtgggctgaaggtggtttcattttttgttttttaattgtatatctttttgtatgagaaaaactatattttgt

SEQ ID NO: 9698 - DNA, 231 bp, Bos taurus
  Clone ID: 42-LIB188-023-Q1-E1-C10
tctaagccgtatggctttaggagagatccgcatctttctcattgtcgctctagtttcatcattcagtttatcgatcactctgtctcgtccattactcgatgaagtcgggatgcagtagagagatggcgagtggatgactgagcaggggcgtgtttacgcagatgcgaacgagaattttaatccgctacgctgttttcaaacgcagcgtggaacgcattgatcgcttaaatg

SEQ ID NO: 9699 - DNA, 353 bp, Bos taurus
  Clone ID: 42-LIB188-023-Q1-E1-C6
gtatgacacactgtatagcctgctgcccacgtgtttcaccaggatctcttcacagggcgtccggggcccatgcacgcccaccagcagcatgttgttgcctgctttgctgcagtccaccgtgaagctgctcttctggcccatgtatgccttgctcagccccacgcctttggccagcaccttgctggcatcagtgggacccgggcctggggcactgttctgggggatggtggcagtcctggtcatggagtccaaagacacagattatgtcccatggagggtgtggttgcctgacaggcggtgacctgtgactccggcctttaaggggctgcccgcactgtggtatgggccgccgt

SEQ ID NO: 9700 - DNA, 304 bp, Bos taurus
  Clone ID: 42-LIB188-024-Q1-E1-C6
ggcggccggatacatgagcaagatacagtcactcaagcccctccagggatgctgtggctaaattcttctctgccatctgtgttccctgtatttatacacaaccatactccatcctgtgtcaattgtgcaatgcggatggggagaactaatgtgcctgctcatctcgggagccatacttcggttacatctggtgccttcaagtgtctgcatgacggggcttgatacatggcttttgttaacgagacgaaattgtttgagaacttgccacgtaccgctgacagggaccagtatcagcttcactgcc

SEQ ID NO: 9701 - DNA, 422 bp, Bos taurus
  unsure (344)...(345): unsure at all n locations; Clone ID: 42-LIB188-025-Q1-E1-C6
acaaccaaatcctcagaattgaagaggaactgggcagcaaggccaagtttgccggcaggagcttcagaaacccgctcgccaagtaagctgtgggtgggcgagcccctgcagtcactcgttggctccttagacctgcatctgatgtcaccgagcagtgtgaggcccctgctgatgcccacaggggcctctggtagttacctgccctctcctcgtcctgtgacgtccccgctgcttccttagacctgctatagaagccatgcctgaccatctggagccctgctggaaaccctagctctgtaatcacgtactgataatgtagcatttgatatggaaaggctcaccannaaccaagcggttaaccgaagatcggccctaggtgagctcgccagcgacaactcccttggccttgagccacttcgcac

SEQ ID NO: 9702 - DNA, 292 bp, Bos taurus
  Clone ID: 42-LIB188-026-Q1-E1-C10
gccatgggcccgggataacaaatcaagtatgaggagctgcagacactggctgggaagcacggggatgaccttcgtcgcacgaagacggagatttctgagatgaaccggaacatcaaccgtctccaggctgagatcgagggtctcaaaggccagagggcttccctggaggctgccatcgctgacgctgagcagcgtggtgagatggctgttaaggatgctcaggccaagctggccgagctggaggccgctctgaggaacgccgagcaggacatggcgcggcagctgcgcgagt

SEQ ID NO: 9703 - DNA, 309 bp, Bos taurus
  Clone ID: 42-LIB188-026-Q1-E1-C6
gcgggatactgcaatattccgctgtggaaatcccgtctggacccatctcgcagccgaatatcgcctggatattgggagacccggcctcgctctggttgtaatgtccgcgcatggtgttcaggttctttcgatacagcagtgtgttttccttgcagattcgagtctcgtcatcccaagaatctggacactcgatctctatccactgtgcccgtggttctttcctcagatccggggcgtcgctgtcgaaccgcacgaactgcgtgtcttccacgtagccgacggtgatgacaccgtgctctccgtcgccgt

SEQ ID NO: 9704 - DNA, 432 bp, Bos taurus
  unsure (311): unsure at all n locations; Clone ID: 42-LIB2809-001-Q1-E1-C10
acatgtgtaggtgggggttgtctactgagtaaggaatactgtttttaaggttctaaagctaaattcaaatgatgcattaatgacccaaaaactcagatctgatggtgtctgaatttctaacagtccttgctttgtgggtatgctgacaacttatctggatgccttacatcttttctaaacagtgttgcctctgaacgtgctctgctccctccctgctccctctttggagcccctttgcaccccagagcctgcagaagtggctggtataaaagggggcctggctagagaatgatcagtgtagctgtttgcangattcctttctgggctttcattttggaactttgcttaaggctatttttcttaattgcccacatttgatggagggtagaaggaattttgaatgtatttgatttattattattattttttttt

SEQ ID NO: 9705 - DNA, 413 bp, Bos taurus
  Clone ID: 42-LIB2809-002-Q1-E1-C6
acctggtgagattgtggaaagcctttcaagcagtgaggaatctattacacgcatcaataagaaaattgagaagtttcagagtgaggaacagcagcaaacagaggatgaactccaggataaaatccacccctttgcccagacacagtctctagtctatcccttccctgggcccatccctaacagcctcccacaaaacatccctcctcttactcaaacccctgtggtggtgccgcctttccttcagcctgaagtaatgggagtctccaaagtgaaggaggctatggctcctaagcacaaagaaatgcccttccctaaatatccagttgagccctttactgaaagccagagcctgactctcactgatgttgaaaatctgcaccttcctctgcctctgctccagtcttggatgcaac

SEQ ID NO: 9706 - DNA, 480 bp, Bos taurus
  Clone ID: 42-LIB2809-003-Q1-E1-C6
acgaaagctgggtgtggagtgattcgtggctcagtatgggagaggatggtgtttaaagctaattaaaggtgtggttgagcagttttaaaccatatgtgggtgagacgtggccattggccatgagacaatggccaatgaagtggtgatatcactgaaagatgatgcctgaaaatgcctctaaagtggagagattctagataaaagaaagaagacaaccagcaacttgtggaatcaacaaattgaggttggaaagagccctttgcattttgtttaaaattctttcctctttcattctatctgacctcctcaccttctttactccccttgccaattgctcagatccaccctgtatgaatgacttagaaaatctgagacatgggccctaaagctctagggacaagtcagatgtttatcactgcctgagttcacctcattttcctctattatgatgttccctccaagttcctttatgggatttca

SEQ ID NO: 9707 - DNA, 412 bp, Bos taurus
  Clone ID: 42-LIB2809-004-Q1-E1-C6
acaacagaaaagcctgaatgggcatatctctctggggatagggcactgctttctggggaacaggcaggactttggactgagaaagggacagcacggactgaggaggaaacatgacagttggaggaagaggctggtgaggctggtgcatccaacactggagcataggcagaggaaggtgcagattttcaacatcagtgagagtcaggctctggctttcagtaaagggctcaactggatatttagggaagggcatttctttgtgcttaggatccatagcctccttcactttggagactcccattacttcaggctgaaggaaatgcggcaccaccacaggggtttgagtaagaggagggatgttttgtggcaggctgttatggatgggcccagggaacggatagactagagactg

SEQ ID NO: 9708 - DNA, 246 bp, Bos taurus
  Clone ID: 42-LIB2809-005-Q1-E1-C6
actttttgtagtcggtgtccagcacaaggactttgttctcattcaaggcatcgatcttgaacaccgcagggatcttggttttttctgcaatgatcttcttctgagcacactcaccgttctcccatttctgcagcaggatctccaggtcgccctcaggggtgggcttcagctcctccacatacactctcaggggggcactctgggcgtccagcagggagatgtcgctggccgccatggccaaggagt

SEQ ID NO: 9709 - DNA, 433 bp, Bos taurus
  Clone ID: 42-LIB2809-006-Q1-E1-C10
cggatacctcttttacaagctctgcccctgctccttcccctcactgacatagcccctcttccctgaagctatgaacatgtgagatacttgtagacacgcaagcacctggcaagtttgctttcaagagcctgctaatgaatgaggaaagtcagtccaggccaggtgtcagagcccccaccatgagaaaaagaggaatacaaaggactgagagtattaaacaaggcaaagctcttctttttctccaaaactagtcaggcctggagactacgtgatttgtttgaagacagaaccagcagagctgcagggtgactggaagccatcgccagagggaagaacacaagcttcaaggccagatgcccagctgagctctcagaacagcccagccaggaggacaggcaggagaaccaggggccaggccaacaaggaaccctgc

SEQ ID NO: 9710 - DNA, 254 bp, Bos taurus
  Clone ID: 42-LIB2809-008-Q1-E1-C6
cgccatccgcccgggatacagcagaaaggcctgactgggcatatctctctggggatagggcactgctttctggggaacaggcaggactttggactgagatcgggacagcacggactgatgaggatacatgacggtgggacgaatatgctggtgaggctggtgcatcgatgactggagcatacgcacaggaaggtgcatattttcaacatcccgttccagtcatgcgttggctttcactagacggctcacttgca

SEQ ID NO: 9711 - DNA, 386 bp, Bos taurus
  Clone ID: 42-LIB2809-009-Q1-E1-C10
acttgtaattgtgtaggtgggggttgtctactgagtaaggaatactgtttttaaggttctaaagctaaattcaaatgatgcattaatgacccaaaaactcagatctgatggtgtctgaatttctaacagtccttgctttgtgggtatgctgacaacttatctggatgccttacatcttttctaaacagtgttgcctctgaacgtgctctgctccctccctgctccctctttggagcccctttgcaccccagagcctgcagaagtggctggtataaaagggggcctggctagagaatgatcagtgtagctgtttgcaggattcctttctgggcttcattttggaaactttgcttagggctatttttcttaattgcccacatttgatg

SEQ ID NO: 9712 - DNA, 411 bp, Bos taurus
  Clone ID: 42-LIB2809-010-Q1-E1-C6
acagtgaaactgcgaatggctcattaaatcagttatggttcctttggtcgctcgctcctctcctacttggataactgtggtaattctagagctaatacatgccgacgggcgctgacccccttcgcgggggggatgcgtgcatttatcagatcaaaaccaacccggtcagcctcctcccggccccggccggggggcgggcgccggcggctttggtgactctagataacctcgggccgatcgcacgccccccgtatgaaacttctcatccttacctgtcttgtggctgttgctcttgccaggcctaaacatcctatcaagcaccaaggactccctcaagaagtcctcaatgaaaatttactcaggttttttgtggcaccttttccagaagtgtttggaaaggagaaggtcaat

SEQ ID NO: 9713 - DNA, 437 bp, Bos taurus
  unsure (406): unsure at all n locations; Clone ID: 42-LIB2809-011-Q1-E1-C6
acagcagaaaggcctgaatgggcatatctctctggggatagggcactgctttctggggaacaggcaggactttggactgagaaagggacagcacggactgaggaggaaacatgacagttggaggaagaggctggtgaggctggtgcatccaagactggagcagaggcagaggaaggtgcagattttcaacatcagtgagagtcaggctctggctttcagtaaagggctcaactggatatttagggaagggcatttctttgtgcttaggagtcatagcctccttcactttggagactcccattacttcaggctgaaggaaatgcggcaccaccacaggggtttgagtaagaggacggatgttttgtgggatgctgttagggatgggcccacggaagggatagactanagactgtttccgggcaaaggggtggatttta

SEQ ID NO: 9714 - DNA, 89 bp, Bos taurus
  Clone ID: 42-LIB2809-012-Q1-E1-C6
acattttgtagtcggtgtccagcacaaggactttgttctcattcaacgcatcgatcttgaacaccgcacggatcttcgttgtttctgca

SEQ ID NO: 9715 - DNA, 440 bp, Bos taurus
  Clone ID: 42-LIB2809-017-Q1-E1-C6
gccatgggcccgggatacagtattatttaaaattttctttttaaattgaaagccaacaactctgcctttatgatgctaagctcatgttcttatttcttctcctatcttctttctcttctgttcccattatccttccctttgttttgtccctgtcaccttcctttctccttctcctcattgccccccaggcaagcaggtggtcagtcattggtgggtttccagcttccaaagcctagacaaccctgctgtagtctcaaactagtggtctttgccccggctgaccctttccttgagctgtctgagctttaaggtggatggctcaagctagagatatgacagaatcttctgggaagggccttgatgatcttcagcccagacttttgctaaatgaaatggaaaaataactttatttttggcacaaactgaaaaaacaggtcaat

SEQ ID NO: 9716 - DNA, 395 bp, Bos taurus
  Clone ID: 42-LIB2809-018-Q1-E1-C10
cgccatggccgcaggataccctgaacccaaggacaccatccagccttgtgtacggtcatggtatagatcagatccacggaacacaattagaatagaaagataagttggttttgatcatcagttgtaaagcatgcatctgatgacctgtggaattaaaacgacgcccacaggcatttccacgcggtacgtgcatggtcagaggatcgaatctacagtgatcatccattagatttttttttttcctactgagaggaacatctcagaagacaaggatgcctttagtttagcctaagctctgtaacctccatctatccaattaacacaggaagaaatgttctcctcctttccatccttggagctcagcagtggcagagcatttggtattgtatattttc

SEQ ID NO: 9717 - DNA, 414 bp, Bos taurus
  Clone ID: 42-LIB2809-019-Q1-E1-C10
accccaaatggaaattgttcccaatagtgctgaggaacgacttcacagtatgaaagagggaatccatgcccaacagaaagaacctatgataggagtgaatcaggaactggcctacttctaccctgagaagagtcaagtgaattctgagggactccacagttatggtctttgatggttctgaaaattccatgctctacatgtcttttcatctatcatgtcaaaccattctatccaaaggcttcaactgctgttttagaatagggcaatctcaaattgaagacactctttcttcttgagttctctactgtattttagatagtgtaacatccttaagtgaaattgtccaaacaacttgttacctaaattccagtagtatcatgctggtataaagggcactgactcaaagggaaatta

SEQ ID NO: 9718 - DNA, 377 bp, Bos taurus
  Clone ID: 42-LIB2809-021-Q1-E1-C10
acctggagagattgtggaaagcctttcaagcagtgaggaatctattacacgcatcaataagaaaattgagaagtttcagagtgaggaacagcagcaaacagaggatgaactccaggataaaatccacccctttgcccagacacagtctctagtctatcccttccctgggcccatccctaacagcctcccacaaaacatccctcctcttactcaaacccctgtggtggtgccgcctttccttcagcctgaagtaatgggagtctccaaagtgaaggaggctatggctcctaagcacaaagaaatgcccttccctaaatatccagttgagccctttactgaaagccagagcctgactctcactgatgttgaaaatctgc

SEQ ID NO: 9719 - DNA, 425 bp, Bos taurus
  Clone ID: 42-LIB2809-021-Q1-E1-C6
acctggagagattgtggaaagcctttcaagcagtgaggaatctattacacgcatcaataagaaaattgagaagtttcagagtgaggaacagcagcaaacagaggatgaactccaggataaaatccacccctttgcccagacacagtctctagtctatcccttccctgggcccatccctaacagcctcccacaaaacatccctcctcttactcaaacccctgtggtggtgccgcctttccttcagcctgaagtaatgggagtctccaaagtgaaggaggctatggctcctaagcacaaagaaatgcccttccctaaatatccagttgagccctttactgaaagccagagcctgactctcactgatgttgaaaatctgcaccttcctctgcctctgctccagtcttggatgcaccagcctcaccagc

SEQ ID NO: 9720 - DNA, 424 bp, Bos taurus
  Clone ID: 42-LIB2809-027-Q1-E1-C6
ggataaaaagaaggggacctgacccacttcaaccagaagcttgaggggttcagcgtgcccaggtgctgggatgagtgcctgaagagctctgagtattacgctcggaagagtgaggtcgacaagttcaacaaggagaattgttggaaaaagagaggattgtgcataattcctaccaaatttggaataagcttcacagttccttttctaaatcaggcaggagccctgatccacgtatacacagatggctccgtgctggtgagccacgggggcacagagatgggccaaggccttcacaccaagatggtgcaggtggccagcaaagctctgaagatccccatctctaagatctatatcagcgagacgagcactaacacggtgcccaactcctctccgacggcggccccagtcgtttccccaagtgggg

SEQ ID NO: 9721 - DNA, 431 bp, Bos taurus
  Clone ID: 42-LIB2809-028-Q1-E1-C10
gggcccgggatacattaataaattaataaacttattaaaaatcaaaaaaaaaaaaaaaaaaataaaagcttgtgtaaggcgttttttttttttttttttttttttttttgtgttttttttttttttttttttttttttttttttttttttttttttttttttttttttttttttttgtacctccagggtcattttttctaaccacggtgattaaaaaatatttttttaataatttcttcccccattccccaatttttttttttaccacctttttgatttccccaacttttttccctttaaatttgccttttttaccctgctgtcagttaaactttttaacatccccttttcttcccccatttccgcatctttgggaaaggcccatttacccctggggggaaaattttttctttttttcccccgatttcccc

SEQ ID NO: 9722 - DNA, 413 bp, Bos taurus
  Clone ID: 42-LIB2809-028-Q1-E1-C6
gggatacactacaaaaatgttaattgagaaaagctgaaaagttttagtttactcaatatcacatgctagaagaaagtttgcatgagaaaacactgaagaggtaattttttaatccagatttcacaaactcatggtgcaaattgggtcccatagcttcctctagagtaataactgcttttcactgcttgttggctgcctgtgaaaatttgaaataactcaaaagctactaacaaaactagtcatatccacccatgctgttctggccaccatagccagccccgtaacagccgctcacagactggctctcaaggccactgtaagtggactgggttgacacccccatgccttgcatcatctggctgctatatgccccgttgctggcccctgttgtggaatttaagaaaagttctatg

SEQ ID NO: 9723 - DNA, 378 bp, Bos taurus
  Clone ID: 42-LIB2809-029-Q1-E1-C10
acagcggatcctcggcggcgctggaaagaattcgaagcttcagccctctcaaggagcccttaaccatccaagtcctgacggtgggcaatgccttccgacccaaaattaaatacacctattttgtgaagaagaagaaggaatctttcaacgccatccctactttctcggagtgggtcatcgaagagtggggcgagtgttccaagtcgtgtgggctgggtgtgcagagaaggctcgtggagtgccgggacatcaacggacagcccgcttcagagtgtgccaaggaagtgaagccggccagcaccagaccttgtgcggacctgccttgcccccgctggcagctgggggactggtcgccgtgttccaagacttgcgggaaag

SEQ ID NO: 9724 - DNA, 426 bp, Bos taurus
  unsure (41): unsure at all n locations; Clone ID: 42-LIB2809-029-Q1-E1-C6
acagcaaaaaggcctgaatgggcatatctctctggggatanggcactgctttctggggaacaagcacgactttgcgctgagaaagggacagcacggactgaagaagaaacttgtcctccaacttgggaaaaaagaaattaaaagccataaaggtcgccacccttgccgccctgttggccctggcccttccacaaaagctgaaaaaccccaatgtggacaacttgtcttccttttacaaaacgaggacaaaccaaacatgaagttcttcatcgttacctgccttttggctgttgcccttgcaaagaatacgatggaacatgtctcctccagtgaggaatccatcaactccaaggaaacatataaccacgaaaagaatatgggcattaatcccagcaaggagaacctttgctccacattctgcaagga

SEQ ID NO: 9725 - DNA, 397 bp, Bos taurus
  Clone ID: 42-LIB2809-030-Q1-E1-C6
acttgtaattgtgtaggtgggggttgtctactgagtaaggaatactgtttttaaggttctaaagctaaattcaaatgatgcattaatgacccaaaaactcagatctgatggtgtctgaatttctaacagtccttgctttgtgggtatgctgacaacttatctggatgccttacatcctttcctaaacagtgttgcctcctaaacgtgctcctggtcccctccctggctcccctcctttgggagccccctttggcacccaagaaccttgcaaaaattggtggtaaaaaaagggggctggctaaaaaatggttaattgaaccggttggaaggatcccttccggggctcaatttgggaaccttggctaagggcaattttcctaaattgccaaaatttgat

SEQ ID NO: 9726 - DNA, 399 bp, Bos taurus
  unsure (378): unsure at all n locations; Clone ID: 42-LIB2809-031-Q1-E1-C6
acagcagaaaggcctgaatgggcatatctctctggggatagggcactgctttctggggaacaggcaggactttggactgagaaagggacagcacggactgaggaggaaacatgacagttggaggaagaggctggtgaggctggtgcatccaagactggagcagaggcagaggaaggtgcagattttcaacatcagtgagagtcaggctctggctttcagtaaagggctcaactggatatttagggaagggcatttctttgtgcttaggagccatagcctccttcactttggagactcccattacttcaggctgaaggaaaggcggcaccaccacaggggtttgagtaagaggagggatgttttgtgggaagctgttanggatgggcccaagggaaagga

SEQ ID NO: 9727 - DNA, 404 bp, Bos taurus
  Clone ID: 42-LIB3057-001-Q1-K1-C10
ggagaatggagaccaaacctgtgattacctgtctcaaaaccctcctcatcatctactccttcgtcttctggatcactggggtgatcctgctggccgttggagtctggggcaaacttactctgggcacctacatctcccttatcgccgagaactccacaaatgctccctatgtgctcatcggcactggcaccaccatcgtcgtgtttggcctgtttggatgctttgccacatgccgtggtagcccatggatgctgaaactgtacgccatgtttctgtccttggtgtttctggctgagctcgtggctggcatttcagggttcgtgtttcgtcatgagatcaaggacaccttcctgaggacttacacagacgccatgcagaattacaatggcaacgacgagaggagc

SEQ ID NO: 9728 - DNA, 362 bp, Bos taurus
  unsure (301),(325): unsure at all n locations; Clone ID: 42-LIB3057-001-Q1-K1-C6
gcatattgccaatgacttgtttcttcaagaacagaaaaccctcggtgcagatgatatcatgttggcaaaggatcctgcgtctggcatctgtactcttctgtatgacagtgcacccagtggcaggtttggcaccatgacctacctctccaaagcagcggccacctatgtgcaggagttcctgccccacagcatctgtgccatgcagtgaggcctctaggcctggctgctgggagccttttgacagctggttcctgcctcgttgattatgcatggaactgaaatatgatgacctgatcactcncaccctgtccattgccaacccatncctcccaagaagagcaaatttttctgataaaataact

SEQ ID NO: 9729 - DNA, 355 bp, Bos taurus
  Clone ID: 42-LIB3057-003-Q1-K1-C10
atggagatgatatttggccaggttattcctggagccaaagagactgagccctaccgggtgtggtcaggactcccgtccctgcaaactaaggatgaagatgcacgttattccgctttttataacctgctccactgcctgcgcagggattcaagcaagattgacacttaccttaagctcctgaattgcagaatcatctacaacaacaactgctaagcccacattcatcctatccatttctgagatggttcttaatgatccattccctggcaaacttctctgagctttatagctttgtaatgcatgcttggctctaatgggtttcatcttaaataaaaacagactctgtagcgatgtc

SEQ ID NO: 9730 - DNA, 332 bp, Bos taurus
  Clone ID: 42-LIB3057-003-Q1-K1-C6
ggagagtcggtctggcgcgtgcccacctggcccggaaggccagcggagtctgccggggccacgagcatcagcccttgggcccgaggcctgccgccccgggagccccgggcagcgcggtggagctgctgggcaagtcctaccctcaggacgactacagcaacctgacccgcaaggtcctgtccaaggtgggccggaacctgcacaaccagccgcagcacccgctctggctgctcaaggagcgcgtgaagcagcacttctacgcgcagtacccgggccgcgcggggaccccgctcttcttcgtgtacgacgacctgtccccggtggtcaccacc

SEQ ID NO: 9731 - DNA, 417 bp, Bos taurus
  Clone ID: 42-LIB3057-005-Q1-K1-C10
cggacgcgtgggcggacgcgtgggcgcctgggccagacgcgcgatcgcaggctgagggtacgtggttgccggcccggtctccgcagtccccaccgagccccgaccctcctggccgccccctcgccttacctcgtcgccatgcgcctccgccgcctagcgctgttcccaggcctggcgctgctcctcgccgcggcccgcctcgctgctgcctccgatgtgctggaactcacggacgacaacttcgagagtcgcatcaccgacacgggctcttctggcctcatgctcgtcgagttcttcgccccctggtgtggacactgcaaaaagcttgccccagagtatgaagctgcagctaccagattaaaaggaatagtcccgttagcaaaggtggattgtactggcaacacgaacacctgtaat

SEQ ID NO: 9732 - DNA, 451 bp, Bos taurus
  Clone ID: 42-LIB3057-005-Q1-K1-C6
cggacgcgtgggaacgggtttgccgccgggacacaggtgtcgtgaaaaccaccgttaaacctaagccaaaatgggaaaggagaagacccacatcaacatcgttgtcattgggcacgtagattcagggaagtctaccacgactggccatctgatctataaatgtggcgggatcgacaagagaacaattgaaaagttcgagaaggaggctgccgagatgggaaagggctccttcaaatatgcctgggtcttggacaaacttaaagctgaacgtgagcgtggtatcaccattgatatctccctgcggaaatttgagaccagcatgtactatgttaccatcattgatgccccaggacacagagacttcatcacaaacatgattacaggcacatcccaggctgactgtgctgtcctgatcgatgctgctggtgttggtgaatctgaagccggtatc

SEQ ID NO: 9733 - DNA, 412 bp, Bos taurus
  Clone ID: 42-LIB3057-006-Q1-K1-C6
tgagagtgaacgtgcctgaggagtctcgtaatggggagacgagccccaggaccaaaagggcatgtatgaaagccgaggactcttctaaagttagtagtggaacacctatcaaaattgaagatccaaatcagtttgttcctttaaacaccaacccgaatgaggtactagaaaagagaaataagattcgagaacaaaatcgatatgacttgaaaacagcaggaccacagtctcagttgcttgctggaattgttgtggataagcctccttctaccatgcagtttgaagatgatgatcatgccccaccagctcctcccaaccccttcagtcatctcacagaaggagaacttgaatagtataatatgacattctaacttaatcagtatggtcttgatcaaaaccatgagctattttt

SEQ ID NO: 9734 - DNA, 419 bp, Bos taurus
  Clone ID: 42-LIB3057-007-Q1-K1-C10
gccgggtcgtgcctccggtgctgttactttgaagaaattagagtgctcaaagcaagcctacgctctgtatacattagcatgggataacaccacaggattctgatcctattgtgttggccttcgggatcggagtaatgattaacagggacagtcgggggcattcgtatttcatagtcagaggtgaaattcttggatttatgaaagacgaacaactgcgaaagcatttgccaaggatgttttcattaatcaagaacgaaagttgggggctcgaagacgatcagataccgtcctagtctcaaccataaacgatgccgaccagggatcagcggatgttgcttttaggactccgctggcaccttatgagaaatcaaagtctttgggttccggggggagtatggtcgcaaggctgaaacttaaag

SEQ ID NO: 9735 - DNA, 327 bp, Bos taurus
  Clone ID: 42-LIB3057-008-Q1-K1-C10
gttctagatcgcgagcggccgccctttttttttttttttttttttttttttttttgggctccagctccccaaccctgtccctttaggctgcatatttgttttagtgaccttgacattgctttcctcactgtccaaataccattaatttatttatttgagagtagggggagagtggaaagaggatggggtgttttgaaagcactttgcaacttatcagtatctgaaaatccccactgttgtggggagaagctttgaatgcactgaatagagtgccttctgagagaaatatgaggggagatgcgttcttttctataaataaagggaaaa

SEQ ID NO: 9736 - DNA, 345 bp, Bos taurus
  Clone ID: 42-LIB3057-008-Q1-K1-C6
attcggctcgagcgaagttgatttagacactaacaacaacggaacaaatgaaagcaccattgatgattagaaagaagatcccactgagccagtaccataaccaccaaactaggttcatatggcaaatctgtgtatccaagatgatcatgcaatgcatggggtatgcatagatacatactgaaattgtaaaacatgaaactttcaatgccttatataaactacggccttgacaagctccaaaacactacatatagtgtcacaccaatgacatggatcacattctgcataccagatctgagctaaacaattaccgactgaatatgcactgaacatagcgtcctaaaa

SEQ ID NO: 9737 - DNA, 424 bp, Bos taurus
  Clone ID: 42-LIB3057-009-Q1-K1-C10
cttgattcttgggttgctgcgctcctggaatgaccctctctatcacctagtcaccgaggtgcggggtatgaaaggagccccagatgctatcctatcgagggccatagagattgaggaagaaaacaaacgacttctggaaggcatggagatgatatttggccaggttattcctggagccaaagagactgagccctaccctgtgtggtcaggactcccgtccctgcaaactaaggatgaagatgcacgttattccgctttttataacctgctccactgcctgcgcagggattcaagcaagattgacacttaccttaagctcctgaattgcagaatcatctacaacaacaactgctaagcccacattcatcctatccatttctgagatggttcttaatgatccattccctggcaaacttctctgagc

SEQ ID NO: 9738 - DNA, 381 bp, Bos taurus
  Clone ID: 42-LIB3057-009-Q1-K1-C6
acgagcggccgcccttttttctttgcattttttttgagccagttcaaacggggcaaaaactgctttttgatgaaagcgagaagaggcctctactgaagataagacaccagattctcaaactgccaactagtcgtctgcccagtagctgacgacggaaaggtttgccaacccgttcgcccgtacacctgccccgtttcacgatgcaacctgcttctgcaaagtggtacgatcggagggactatgtcttcattgaattttgtgtcgaagacagtcaacatgttaatgtagatcctttaaaatcgaaacttacattcagttgtcttggaggaagtgataattgtaaacatttaaatgaaattgatctttgccactgtattgatc

SEQ ID NO: 9739 - DNA, 201 bp, Bos taurus
  Clone ID: 42-LIB3057-010-Q1-K1-C6
gacgcacgcgtgcgcggacacgtggggccctggccaatgcttttcagcactgtgagcagtggatctagttctgctgctacaattcccggctgctcaacacagcaagaggctacccctacagcttttggattggccgaaacgaggagcatcacttctactgtggcggctcgcaacctgggatccagcgctgtgccttgtgtc

SEQ ID NO: 9740 - DNA, 240 bp, Bos taurus
  Clone ID: 42-LIB3057-011-Q1-K1-C6
acggttagaggtctgccatgtgggcggagtggccttccgtggacaagatctattactgctgagccccaacttcgataggtcagcacggggctcatgatgccagatactccagcatcggctgaagaatcatgagtgcgaaagaccatatgtcacaaacgtggaagaccaaggggacctgatttccaaccatgaacaggttgccatgctgagccagctccccggaacccagtagagcaagtg

SEQ ID NO: 9741 - DNA, 397 bp, Bos taurus
  Clone ID: 42-LIB3057-012-Q1-K1-C10
tagatcgcgagcggccgccctttttttttttttttttttagaaaagtaccctttgatggagaagtaagacaagtgtatttacaatattcaattgttagatcatataatctgtgagacttttaaaagcagcagtattccaggaattacaatgtataaggggaaaagaaaaacattccaaataggtttctgttacagaaaatagatttgaacaatgccagaaacacttaaggctaagtagtattagaccttttcttccacctttatagcaataactgatgctttttttttttgggtcacagacagaagactaattttggaaaggaagaaacaatatgatgtacagtgttttctgtcagaaaacaagttatgtttaaaagtagagcctcatcaatggttc

SEQ ID NO: 9742 - DNA, 392 bp, Bos taurus
  unsure (85): unsure at all n locations; Clone ID: 42-LIB3057-012-Q1-K1-C6
tccctgttctacccactcttcctgttctagatcgcgatcttcctccctttttttttttatatttcatctacacagtattagtatntttattcaactataatcaaacatcaaaattaacacattattcaccaactccagaacagttttcttttttaaaccaaactttgattaatttaacaagcacatactttcatatactcataacctatttacctaacccatccctactactcatctaaatctccaatctctaacatcaaagcaatctcttctatcaatctatttccagtattactctctaaattaaccacaattaaactcttacacataatatccaattctataactctatctcaccactatttttattttctatatctaatatctacata

SEQ ID NO: 9743 - DNA, 268 bp, Bos taurus
  Clone ID: 42-LIB3057-014-Q1-K1-C6
ggagccaaaaacaaaatccaccccaaattggaacccgcctggaaaaaaatcaaagttctgcaggctcatagagacattatttggcgcatccggctctgcggcaggagcgctcaggcctcagtccagccctggaagcagaggtggcccctacagctcatccttggcctggccagctgcagcatcttcttcctcctcctcttccttctcatcttcatcctcctgatcctcattcttgtcttcgtcatcatctttgtctgcctcttcctac

SEQ ID NO: 9744 - DNA, 437 bp, Bos taurus
  Clone ID: 42-LIB3057-015-Q1-K1-C6
ctctgtatcacctagtcaccgaggtacggggtatgaaaggagccccagatgctgtcctgtcgagggccatagagattgaggaagaaaacaaacgacttctggaaggcatggagatgatatttggccaggtaattcctggagccaaagagactgagccctaccctgtgtggtcaggactcccgtccctgcaaactaaggatgaagatgcacgttattccgctttttataacctgctccactgcctgcgcagggattcaagcaagattgacacttaccttaagctcctgaattgcagaatcatctacaacaacaactgctaagcccacattcatcctatccatttctgagatggttcttaatgatccattccctggcaaacttctctgagctttatagctttgtaatgcatgcttggctctaatgggtttcatcttaaa

SEQ ID NO: 9745 - DNA, 420 bp, Bos taurus
  Clone ID: 42-LIB3057-016-Q1-K1-C10
cactaataaaaattgtaaacaatgcattcatcgaccttccagccccatcaaacgtttcgtcatgatgaaatttcggttccctcctgggaatctgcctaatcctacaaatcctcacaggcctattcctagcaatacactacacatccgacacaacaacagcattctcctctgttacccatatctgccgagacgtgaactacggctgaatcatccgatacatacacgcaaacggagcttcaatgttttttatctgcttatatatgcacgtaggacgaggcttatattacgggtcttacacttttctaggaacatgaaatattggagtaatccttctgctcacagtaatagccacagcatttataggatacgtcctaccatgaggacaaatatcattctgaggagcaacagtcatcaccaacc

SEQ ID NO: 9746 - DNA, 276 bp, Bos taurus
  Clone ID: 42-LIB3057-017-Q1-K1-C6
ctttcttttccttaatgctttaaactatttgctaatggtcgttgtactgggcttatttgggacagtggagccactcgcaccactgcaattcctgttcacgatggctatgttcttcagcaaggcattgtgaagtcccctcttgctggagactttatcactatgcagtgcagggaactcttccaagaaatgaatatagaactgattcctccatatatgattgcatcaaaagaagctgttcgtgaagggtcttcagcatactggaaaagaaaagagaag

SEQ ID NO: 9747 - DNA, 430 bp, Bos taurus
  Clone ID: 42-LIB3057-018-Q1-K1-C6
tcccggtcgcccacctccgcggacctgggccgacctgggtgccttgggaaaagagctaggaaagactgcaaggtgttgggtttttccggttttttttccccctcctctttactaccctctcctcctttgcacctttctttgtcttcacgcatacctctaatttctaaaggtctgcatattgtagaaatgaggtgttatgtgtttggtgttttttttttttttttttttttttatgttttctttttttttttttttttttctttattttttttttttatttttttttttttcttgttgtttttttcttttattttttttttttttttttttttttttttttttttttatttttttttttttttttttatttattttttttttttttttttttttttcttatcattttttattattttttttattttttttt

SEQ ID NO: 9748 - DNA, 439 bp, Bos taurus
  unsure (388): unsure at all n locations; Clone ID: 42-LIB3057-019-Q1-K1-C10
ggcgtctccagctgcttgtggctctggctctcgctttcctgctgggttcctgcgcttcctggcgctggggcatctcgacccgccgctcccctgccgctggtgatctggcatgggatgggagacagctgttgtaatcccttaagtatgggtgctattaaaaaaatggttgagaagaaaatacctggaattcacgtcttgtctttagagattgggaagactctcagagaggatgtggagaacagcttctttttgaatgtcaactcccaagtaacaacagtgtgtcagaatcttgctaaggatcctaaattgcagcaaggctacaatgctatgggattctcccagggaggccagtttctgcgggcagtggctcagagatgcccatcacctnccatggtcaacctcatctcagttgggggacaacatcaaagtggttttggac

SEQ ID NO: 9749 - DNA, 367 bp, Bos taurus
  Clone ID: 42-LIB3057-019-Q1-K1-C6
gtttgccgccgggacacaggtgtcgtgaaaaccaccgttaaacctaagccaaaatgggaaaggagaagacccacatcaacatcgttgtcattgggcacgtagattcagggaagtctaccacgactggccatctgatctataaatgtggcgggatcgacaagagaacaattgaaaagttcgagaaggaggctgccgagatgggaaagggctccttcaaatatgcctgggtcttggacaaacttaaagctgaacgtgagcgtggtatcaccattgatatctccctgtggaaatttgagaccagcaagtactatgttaccatcattgatgccccaggacacatgagactttcatttcaaaaacaatgatt

SEQ ID NO: 9750 - DNA, 423 bp, Bos taurus
  Clone ID: 42-LIB3057-020-Q1-K1-C10
aggaaatggacaggctgtttgaatgatcactaatagaatgaatgattgtgaagtatagtagcatggtattcattctgatggtgctctccagcttgccttgatgctgctgagctgtgtggttaagggagaagcttataagatgaagacgaagaaagaaatccgtcaagtggaaaagaagagccattcataacagtaaacggtcaaccaacgtggatcatgtgtttttactgccagtattgagaaattcatggaagttgtcagcaggaagtaaaaatttacagagaagggtgtatgtgtttgccgcttccacacattaatggcatgattttttttttttaacgcataaagaaaaaggaaaaaataccacccacattttaatttagcatgagccaatttacagagcatggaaattcactttcattc

SEQ ID NO: 9751 - DNA, 408 bp, Bos taurus
  Clone ID: 42-LIB3057-020-Q1-K1-C6
ccactcatacatctagatcactacctaccgctttctctttttttcatttttttaaaacattatgaacttgtcacattttaagatttggctcttttcaaactattttaatcatacactcatatttatctacatctatatataaaaataaacataaccctttccttattcatacactaaccaaatctctcacaatcttaattattccacccatttctgtttctccatttattataaattttgtactcctaatttaatgttatatacctacttatgtataacctatttttcaattacataccttcctttctcttttgcttattaaaccataaactccctccatttgttaaataactatattatagctccttaatatataattctacactttaaattatttttttactattt

SEQ ID NO: 9752 - DNA, 344 bp, Bos taurus
  Clone ID: 42-LIB3057-021-Q1-K1-C6
gccgggttgagaggagcgtggccttctcctctccccgccatggcgtgtgctcgtccactgatatcagtgtactccgaaaagggggagtcctctggcaaaaatgtcactttgcctgctgtgttcaaggctcccattcgacccgatattgttaactttgttcacaccaacttgcgcaaaaacaacagacagccctatgctgtcagtgaattagcaggtcatcaaaccagtgctgagtcttggggtaccggcagagctgtggctcgaattcccagggttcgaggtggcgggactcaccggtccggtcagggcgcttttggaaacatgtgtcgtgggggccggatgtt

SEQ ID NO: 9753 - DNA, 239 bp, Bos taurus
  Clone ID: 42-LIB3057-022-Q1-K1-C6
tccgtgttgagaggagcgtttccttcttctctccccgccatggcttgtgcgggtccagtgatatcagtgtactccgaaaagggggagtcctctgttcaaaaatgtcactttgcctgctgtgttcaaggctcccattcgacccgatattgttaactttgctcacacttactttcgcaacaacaacagacagccctatgctgtcagtgaattagcatgtcatcaaaccagttctgagtctt

SEQ ID NO: 9754 - DNA, 226 bp, Bos taurus
  Clone ID: 42-LIB3057-023-Q1-K1-C6
tctaaaaaataataagcctgatgtcccttgatgaaccgttcaattatagtaatagcaatgtgcgcgtagatgaaaccatcttatgcactgtagcttcagggtttttgttactagtttattcacttggaagaatgctttaaaatgtaagatctagcacattttgctttcctatttattgtttggccagctattccaattttgtactaatgtttctttaacaaagtac

SEQ ID NO: 9755 - DNA, 447 bp, Bos taurus
  Clone ID: 42-LIB3057-024-Q1-K1-C6
gagaaatagagacttgcaagctgataactaaagactgaagtatgaagtagaagcgttggaggagaagctagaacatcaatatgcacagagctacaagcaggtctcagtattagaagatgatttaagtcagactcgggccattaaggagcagttacataagtatgtaagagagctggaacaggccaatgatgacctggagcgagcaaaaagggcaacaatagtttcactggaagactttgaacaaaggctaaatcaagccattgaacgaaatgcatttttagaaagtgaacttgatgaaaaggaatctttgttggtctctgtgcagaggttaaaggatgaagcatgagatttaaggcatgaactagctgttcggtaaagacatcaggtagtaactagaaaatcagcttctaagttttcaacgctgtactgctataagatggattctgt

SEQ ID NO: 9756 - DNA, 299 bp, Bos taurus
  Clone ID: 42-LIB3057-025-Q1-K1-C10
gatcgctatcgctcgcccttttttccttttcccccttgccttataaaacgtacgggtatgttatattactctactgtcacatattgcataccatttccacactgcttttttttgactacagacactcatttcctacgtacactactggtccaactctctaaattacactcactagacatactggactcactctcacatctgctcaactcttccttcaaaagtactaattttctacactggactgtgtaccttttttccccatttctagtccattaagaaatgacatgcactttaatttg

SEQ ID NO: 9757 - DNA, 421 bp, Bos taurus
  Clone ID: 42-LIB3058-001-Q1-K1-C10
agcctccgctgcagcctggggcgaccacgtgaccaggtatggcccacgacatttacaacaaagtctacaggggctcctggaaagcttgtttttctgacaaaagagacagagtgggtaacacgcccttgcccctcccttctcccctgcttcgtcgaggctgaggtgcctggaaccacagcagccatgttgctaccatgagaaaatggccaagagaatctccaagacacgggcctgactgtcctgtgaccaagccaatgccggcagccaccctcctccaggattcttgtaaatacaaataaatgccccttgtttaagctacaaaaaaaaaaaaaaaaaaaaaaaaaaaaaaaaaaaaaaaaaaaaaaaaaaaaaaaaaaaaaaaaaaaaaaaaaaaaaaaaaaaaaaaaaaaaaaggggcggc

SEQ ID NO: 9758 - DNA, 407 bp, Bos taurus
  Clone ID: 42-LIB3058-001-Q1-K1-C6
cccacgcgtccgtgcagaccgcgagcggccgcccttttttttggtttcattttttttttttttttttcttgtttttttttattttttttttttttttttttttaaagggggaagtcattaacaaatccccaagggcaaaaaccatatcaggggggaccggggtatgggccaccaaggggcgggggccaggcccctggagagaagaccaaggggaggggaggagtgaccgggccatgaacagaaccaggctgggctggcttaggggctgcccagccccaggggcccctaccagggcccgtataaaggccctgggcacctaagccagaaccaagcaggcttaacggggggggctccaccagcaaaatggggaacctggggtgccaaaagggctattatttggggggccc

SEQ ID NO: 9759 - DNA, 447 bp, Bos taurus
  Clone ID: 42-LIB3058-004-Q1-K1-C6
gctctagatcgcgagcggacacccttggctttaccctaaatggctcagtgcctgagggtggggaccaagccctgcctagacacttgccttctttgccaagctaatctgtagggccggacctatgacctaaggacacactaatcgaactgcaaactatgagtcttctaccccaagaggtggctatggccaccccttctatgggcctgggtctcccaaacctaggggtcaggctccattaggttttgcctattcccgtctcttcctatccaaccactcaaattaacctttccttgcctgagaccagttgggagcactggagtgcagggaggagaggggaagggccatactgggctgccaggtgctagtctcctttgcactgagggccagatgatcaccatgagaggaggagggccatgggaaaccgagaactcactattcaagaagacc

SEQ ID NO: 9760 - DNA, 439 bp, Bos taurus
  Clone ID: 42-LIB3058-005-Q1-K1-C10
ggagcctgcagcctgggatcgtgatggtgaatctgacggatttgcagatgaggaagagagcggggaggagggcgaggaagaagatgaagaagaggggagggagccagggccagggcattgggggccagcgccctctgtgggcagcctccccgccctgagcggtcctcagggagggcacctactggagtctgagaccgtgggtgtcagtgtcccctgggacgatggcccaaggggcgcggcagccgacgcccccgtgactgccctggagaccgagtcccagaacagcactgaggcctcaggctcagaggaagagtctgatgctgctcccctggagacggaggaccaggtccctggccctctggggaccctcagcggagtggaggacacccttgatggtggcccatgccccagcctgaaggaagagctggaacgcgtgaat

SEQ ID NO: 9761 - DNA, 410 bp, Bos taurus
  Clone ID: 42-LIB3058-006-Q1-K1-C6
gagcttccactttgctgttaacctgtattgataaatcactgcccttctttggatctcagttttttatttatctgtgtggtgaagtcaggtcataccatagacgtgagagaaacctattgatatgtgaatgacaaagatgatagataagagctgaagctattgcatacagaatatccaactatgatctctgtgaataagcaatttgaacataaaaagctatggctgttcttgtttgtaatgtaaatatggtccattcttaaagtgaaattcagtctactgtaggttgaattggataaccatttacacaagagatggctttttcctttgcttaaataaacatttttggattacttctgaagaatgaaaaccaagagtatattttatccaggaaaatatactataagatgtgt

SEQ ID NO: 9762 - DNA, 411 bp, Bos taurus
  Clone ID: 42-LIB3058-007-Q1-K1-C6
cggacgcgtgggcggacgcgtgggtgacagggacgagtgggactgggttctcagtccctgccttactccctcgagtccctgggagccccttgggggtggggcatgtcaggtctgctgactggagtctgagggtctcagtggcccccggacctgtgctcccttatgagtctggctcaggcagggctcctgcccccagccctcccagctcactggaggccgcccacctttctcccccgaccccccacagagctgagctgctccaagaacgagaaggagctcgaagagctgctcctggaagccagtcaggaatctgggcaggagacactgtgacgctttagctccctgttacccgtcggtcttcgaagagctgaggccagagccatgagaatctgctcaccctcacccccagcc

SEQ ID NO: 9763 - DNA, 323 bp, Bos taurus
  Clone ID: 42-LIB3058-008-Q1-K1-C6
gttctagatcgcgagcggccacccttttttgatttttttacaatacttgttgggcgaatttgagccactttaaccctatcactatgattcccattttggtacatttctgaaatggggactttatggtgaaatattgtataaagcgttagtagcagcttaaaaataaaatattcaaaatcatttaaatcgtttaggacgcttaaattgtattatatgtgattaacattttacatgattgattgagctgttaatctggagagtgtgctagtattgaagtttgctgtgacggattagatatcctgatgagagtgatattgtgactg

SEQ ID NO: 9764 - DNA, 253 bp, Bos taurus
  Clone ID: 42-LIB3058-010-Q1-K1-C6
gtttaatgcagtgatctacactttggctcattaaatttttcagtgattacctttatgggagtttacgctgctggctttggtgcccttgaagattttaatagtgaccaaaatatatctgtgcagttaaggctcgcttttgactattggtattgaagcctgattttaagagaataataatcaaaaatacctcgtgaacttgctatgtgctctgtttctagttaaaatgtaataaagattatcttactgcacttgt

SEQ ID NO: 9765 - DNA, 352 bp, Bos taurus
  Clone ID: 42-LIB3058-011-Q1-K1-C6
cgctcagtcgtgttcgactcttagcgaccccatggactgcggtccaccagggtactccgtccatgggattttccaggctagagtactggagtggggtgccattgtcttctgcagaccgaaaactgagatactctggagtattaggatttgttacctctactgatttatcatatctctagtggatatgactattgtaaccgtagcattggaggatgccagcttgtttctagtgcaaatgcggccataagataaaaggcatagtaagacattctacaacgtcaaattggtgcattaaggctctatcacggaaatgcttcaaatgcatgacctaccatactttcagaataaatca

SEQ ID NO: 9766 - DNA, 407 bp, Bos taurus
  Clone ID: 42-LIB3058-012-Q1-K1-C10
cgtgacctgcatgaagaccgtgtcgctgcgcagcgaggagactgtgtcaggcctcaagggctacgtggccgctgggacctgcctcatgcaaggggaggaggtcacatgccgagggcggatcctgatcatggatgtgatcgaggtggtgcctgagcctggccagcctctgaccaagaacaagtttaaggtcctgtacgagaaggagcagaagggccccgtgaccgccctgtgccactgcaatggccacctggtgtcggccatcggtcagaagatcttcctgtggagcctgcgggccagcgagctgacgggcatggccttcatcgacacgcagctatacatccaccagatgatcagcgtcaagaacttcatcctggccgcggacgtcatgaagagcatctcgctgctgc

SEQ ID NO: 9767 - DNA, 381 bp, Bos taurus
  Clone ID: 42-LIB3058-012-Q1-K1-C6
caagaaaggaggctacggtagagacgctgacagagaccaagatccattgtgagactgacgagaaagacttgtatctgtactacttcctgatgcagtatccaggccgcaccttagtgtttgccaacagtatctcctgcatcaagcgcctctccgggctcctcaaagtcctggatatcatgccactgaccctgcatgcctgcatgcaccagaagcagaggcttagaaacctggagcagtttgcccatctggaggattgtgtgctcctggcgacagacgtggcagctcggggcctggatattccaaaagtccagcatgtcatccattaccaggtccctcgcacctcagagatttatgtccaccgaagtggtcggactgcccgtg

SEQ ID NO: 9768 - DNA, 433 bp, Bos taurus
  unsure (389): unsure at all n locations; Clone ID: 42-LIB3058-013-Q1-K1-C6
cccgtaatagaaaagagaaatcttcataatgaattataatctaattgattaatgtccccaaagaaatctgctttttactatatctttcagcactagagattgttttctgttcctgaaaatacattttctgctctttgattcttgctactattgtattatttcatgcattttttaaaagggcatttgaggggaggatgattcctatgagtgaaaaaaatgttttagcttagtctaagctacctgccttcaaaatagtgtagggaccaccatcatattatattttattttattttgttttttatctttaagcatttttctaatgatttgaagagataactatttacaaaaattatacatatcagtgattacaatttcttgctctcaccaantttttatattaagcaagatggcctgttccagcagggtcatattt

SEQ ID NO: 9769 - DNA, 327 bp, Bos taurus
  Clone ID: 42-LIB3058-014-Q1-K1-C6
tcggtagaacacagacgaaacctactgcattgacaatgaagcgctgtatgacatctgcttacgcacgcctgaaactgaccacccccactctacggggacctcaaccacctggtgtcggccaccatgagcggtgtcaccacctgcctgcgcttaccgggccagctcaatgccgacctgctcaagctggccgtgaacatggtgcccttcccacgcctgcacttcttcatgcccggcttagacccactgaccagccggggcagccagcattacagggcactgaccgttcctgagctgacccagcagatgttcgatgcctagaacattatg

SEQ ID NO: 9770 - DNA, 321 bp, Bos taurus
  unsure (295)...(296): unsure at all n locations; Clone ID: 42-LIB3058-015-Q1-K1-C6
cccgggcagaccccacagttgaaagtgaggatgctttcaagaatagaatggaagttaaggtgaagattcctgaagaattaaaaccatggcttgttgaggactgggacttagtcaccaggcagaagcaacttttccaactcccagccaagaaaaacgtggatactattttggaagaatacgccaactgcaaaagatcgcaaggcaatgttgacaacaaggagtatgcagttaatgaggtggtgggagggataaaagagtatttcaacgtgatgttgggcacccagctgctctacannattgagaggccccagtatgctgaaa

SEQ ID NO: 9771 - DNA, 425 bp, Bos taurus
  Clone ID: 42-LIB3058-018-Q1-K1-C6
accaaatgatctccgcgtccctgcgacacacacacacacacacacacacacataataccataccaacctgaaaccccgcatactaaagcaaagcgaattgcaaataggattaggctcactcgaaaatgtggctgggaagactgtttcatcctctgtggtaagagcagaactgcgttcacagccagcaagccaggccagtgttggttgagcacggagagccccacaccatcacctctccccaacaagggctagaccacaggtggcctctcggagacagccatttcactgacgaaggcgaataggggctttcccactgacctgcctgtgggttttcacattttaggggggtcaggagcagtgtaggagctggcacgtgtgattcctaggcccagcccagctgtatcaggggaagagctttatgaacg

SEQ ID NO: 9772 - DNA, 437 bp, Bos taurus
  Clone ID: 42-LIB3058-019-Q1-K1-C6
gtactagatgctgaagggtgaggttggggctatggccttggaggccacaaagccttattacaagtgtcttcctcaaatcatagattcatttataccttcaggcaaaataatccccgttatgcgcccctctctggtgcggcattctttgtgcctaactaccagcctttgagggcctggccttccccgcccgcggaggtctctgccagctcttcccttgctgggctgtggttggaggggactggtggggcagtattggccttctccaggatccagggaggttctctgagactgctctgttctccttttctcaagtgccttaatggtagggcaagctgttcagagtcggggagagcaagctggctgctctccagtcaagaggctcagtttttactgaagaatcaaaccatttattgactaatggcttttctactcttgac

SEQ ID NO: 9773 - DNA, 420 bp, Bos taurus
  Clone ID: 42-LIB3058-020-Q1-K1-C10
ggactatttgcactccttggggaaggctcgaacagctcaggtccaaaaagatgctcgggttggggaagcagaggccaaaagagatgccgggatccgggaggccaaagccaagcaggaaaaggtgtctgctcagtacctgagtgagattgagatggccaagccacagagggactacgagctgaagaaggccgcatacgacatcgaagtcaacacgcgccgagcacaggctgacctggcctaccaacttcaggtggccaatacgaaacagcagatcgaggagcagcgtgtgcaggtgcaggtggtggagcgggcccagcaggtggcagtgcatgagcaggagatcgcccgccgggagaaggaactggaggcccgagtgcgcaagccggctgaagccgagcgctacaaactggagcgcctggc

SEQ ID NO: 9774 - DNA, 473 bp, Bos taurus
  Clone ID: 42-LIB3058-022-Q1-K1-C6
ataactgacaatcaaaaatccacagaggaagcagctatgaaaaatgtcagtgtggataatgatctggaggttttggcatcgtctgccactgaatgtcctaggaatttaaacggtgcctacctgaaggaagggagcaatggacaagtggacatttccagtggttttgagaaccttaacttgaatgctgctctgcaacctgactaaataaatatagagattctggatgacgatcctactcccgggacgaaggtatatgaggttgtaaacgaagatccagagactgctttctgtacgcttgcaaataaggaggctttcaacaccgatgagtgttcagtccaacattgtttgtatcagttcactcgaaacgagaaacttcgggatgctaataaactgctttgtgaagtgtgcacgcggagacaatacagtggaccaaaggcatatatgaaaggcgaaaggaagcatatttacaccaa

SEQ ID NO: 9775 - DNA, 409 bp, Bos taurus
  Clone ID: 42-LIB3058-024-Q1-K1-C10
gccctggagaagcaattgcaggaactagaggacaagcagaacgccgacattagcgctatgcaggacacaatcaacaaattggaaaatgaattgagaaccacaaagagcgaaatggcaagatacctcaaggaataccaagacctcctcaatgtcaagatggctttggacattgagattgcagcttacaggaaactcttggaaggtgaggagacccggctcagtttcaccagtgtgggcagcctaaccaccggttacacccagagctcccaggtctttggccgatctgcctatggaggtttgcagaccagctcctatttgatgtctgcccgctccttcccgtcctactacaccatccacgtccaggaggagcagatagaggtggaggagaccatcgaggctgctaaagctg

SEQ ID NO: 9776 - DNA, 430 bp, Bos taurus
  Clone ID: 42-LIB3058-025-Q1-K1-C6
gacctggggagcctggtgtccctgggacggctagtgaggccccacctggagtcttacagaacactgctgtcacacaggtgtcaggggacagctttgcaatgtggctgttctgagctgtcctcacatcttaggagcaggcacttgttcgtggggctctcagggatgagggctcacccagggcttcctcccctcctgctctgtgtcttccaggcctttggagcagcagggctgagcagcaactacccactggctcagttcttcgctggggcccgagccctgcgctttgctgatggccctgatgaggtgcaccgagcagcagtggccaagatggagctgaagcaccacagttagacccgcaggagccagatcgtcctcaccaggcttgttgtgcccaaatgtgaaaggcctggtgtgtgtgctccgtgcaccc

SEQ ID NO: 9777 - DNA, 389 bp, Bos taurus
  Clone ID: 42-LIB3058-026-Q1-K1-C10
tgtatcattgccctgtggagggatggtgggacaggaaggaaagaaccggggatcacggtgactgggaactgacaagaaaggctgacaggcacaagctgcttaaacatggatatgcgaatgaggagatggaaggccaaggtgtgtattttcacgctcttaacatgaatgggggagagaaaaaaatggctcaggaagccattataatagttgtcagaagctgggtcttatgattgacatgcacactacttcttgctgcagggcactgtaccatctggatccagatacaaagtagattaggaaagctgaaggcctctcttagttctactggattcttatggagccctctgtggcctttgcttttatttgagtgctatgttacccttttaata

SEQ ID NO: 9778 - DNA, 416 bp, Bos taurus
  Clone ID: 42-LIB3058-027-Q1-K1-C6
ggaagtcagacatctacgtgtgcatgatctcctatgcacacaatgtggccgcgcagggcaagtacattgctatcgccagcaccacagtggagaccacagatcccgaaaaggaggttgagccggccctggagctgctggagcccattgaccagaagtttgtggccatcagtgacttgtacgagcccatcgatgatggttccgagagccaggtgttctgttcctgctcctacgatgccaccacacactttgagacaacctgcaacgacatcaaagacatctacaagcgcatggcaggctccgcctttgactttgagaacatgaagcgcaaacagaatgatgtctttggggaagctgaccagtgattgctgacccttaagccagcccttggtgccctctcccccaacctgtctgttctt

SEQ ID NO: 9779 - DNA, 278 bp, Bos taurus
  Clone ID: 42-LIB3058-028-Q1-K1-C6
gggttgtgttcgtttcgacgtccgcgttgatgcagctcaaaccaatggagagtaaccgcgagatgctgaacaaagtgctgacccggctgggggtcgccggccagtggcgcttcgaggatgttctgggactggaggaggagtctctgggctcggtgccagcgccggcctgcgcgctgctgctgctctttccgctcacggcgcagcatgagaacttcaggaaaaaacaaattgaagagctgaagggacaagaagtcagtcccaaggtgtacttcatgaag

SEQ ID NO: 9780 - DNA, 436 bp, Bos taurus
  Clone ID: 42-LIB3058-029-Q1-K1-C6
ggcgctgccccgggtgaacaactttggaagcgctaccgggccgccgtgccttgttcacctactgtcctgagcccggagggcaagtcttgctggccccagctcgtgcccgaactgagacgagaagaagcgcttcgaggaaggcaaagggcggtacctgcagatgaaggcgaagcggcagggccaggcggagactcaggcctagacgcctctcaggcctggaacaggcccacgccgcatcattagaaggaccccccggccagaaacccattcgtgttgacaactggggttgtgtgaagtgttcgtttcgcagtgttaacctctcccgaaaacctctacaccaaagctttatttatatcaccccagtgtaaacgctacacagtattgtcccaatgcccgcgcagtccctgtaaaccctgtggtgacctgggcacacact

SEQ ID NO: 9781 - DNA, 416 bp, Bos taurus
  Clone ID: 42-LIB3058-030-Q1-K1-C10
tcggccgaggtctcaagccgcaagagcatagaccagactcataaggttaggataaaacagaccataccagactaaagaaccgagctcatacagcttatatgtgctcacaccagtcgaatcaaactggaggtctgataacaaagacaacaggacactctcaaaatacttgcaaacgaagcaacacactgctaaataattatggctaaacaataactctaaatgaaaattaaaaagtatatataactaaataaacattagaacacaaagtatgtacgatgcaactaaagcagtatcgagagggaaatctatagcaccaaatgcttacatttaaaatgaggaaaggtgtaatataatttaaattatttcctccatatactagaaagcacaataaacccaaagcaagcataaggaatgaa

SEQ ID NO: 9782 - DNA, 343 bp, Bos taurus
  Clone ID: 42-LIB3058-030-Q1-K1-C6
ggcagctccaccctgcagctgctgtgggagccctggccccggctggcccagcacgagggcggcttcaagctgttctaccgcccagcaagcaaggcctccttcactggccccatcctgcttcccggagctgtctcctcctacaacctcagccagctcgaccccactgcgatgtacgaggtgaagctgctcgcctacaaccagcatggggatggcaatgctacagtccgcttcgtgtctctgcggggagcagcttataggacagccctgaacccaccatgtgtctgtcagaaggaggaggccatcaaccagacgtttacctcggtcatcgtcatcggcatccaca

SEQ ID NO: 9783 - DNA, 415 bp, Bos taurus
  Clone ID: 42-LIB3058-032-Q1-K1-C10
attttaaatagggaaagctccctacattataaagaatattggcaccatttattttatgcaaaggctaaaggttaacttttagaaatgatgaactactttcctatatgtgtttacttgtgcttcatgatatttctggatcattccagtcataaagacttattacatgtaatatttcctgctacctgtgaaatgatatattttaaagaatgtataaccaacaatccatttaatttttactagcatgtattggatttatttgtatttttatttatgaatgtatttttattgttttatgtcatctgttttattttttttagttcttttttttttttttgtttttttatttttttctatttttttgttatgttttttatttatttattttttttataattttgttttcttgtttattttt

SEQ ID NO: 9784 - DNA, 438 bp, Bos taurus
  Clone ID: 42-LIB3058-034-Q1-K1-C6
gacccattcattcgaaagggcctgttccgttatgcttttcgatagttattctgcttgatctgcatattacttggctaataaaacacaacatagtgaaataaaatttacaacagaaaataattaatatttttaaaaacataatgcacagatgtagtatcttttttttctcctgaggaacaaaagccccctaatcccagttgtcacacctttttttccccctttttctttaggccatccagtgaagagagagagactgaaatatctctgaaggattctacactagataactaggttgacatacctggaatataaagaacatttgataagtttgtaatggttttcatttgaaatatttagactgctgaaagttttaaatttttataaacataggttttgatgtttaaaacttggtttgaatgaaaatccccttatcttttg

SEQ ID NO: 9785 - DNA, 437 bp, Bos taurus
  Clone ID: 42-LIB3058-037-Q1-K1-C6
atgtctttgattatgattctcttaacatttgaaaattggacattaaacaacacaaatgatatgtaaaattggctagttcttgcatctgttgggatttttgaccaatgattccgttctttgcagaaacagatttggtgaattcgaatctcagtttgagtaacatatctgattgttctttctaggtggtgggagataatttgatttagtaatgttaccttggtgtgttaaagagttagttttaacatacaagttattctctcctggtgcagatcaaataactaaatgcaccagccattagctattctgttggtgaggttccatggaaaaggaaagggggaaagagtttgaaactcaaatagctcccaggtttcagtcttccctttttatgtttgggttttaatgttgggttaaaaaacaaaaagctgattggtctttat

SEQ ID NO: 9786 - DNA, 230 bp, Bos taurus
  Clone ID: 42-LIB3058-038-Q1-K1-C10
cggacgcgtgggcggactcgtggtgtattacactacacatccgacacaacgaagcataagattccgaccactcagccaatgcctattctgagccctagtagcagacctactgacactcacatgaattggaggacaaccagtcgaacacccatatatcaccatcggacaactagcatctgtcctatactttctcctcatcctagtgctaataccaacggccggcacaatcg

SEQ ID NO: 9787 - DNA, 430 bp, Bos taurus
  Clone ID: 42-LIB3058-038-Q1-K1-C6
cttacatcgaccgcctaagagtcgctctgtaagaagtaacaacctcttctctccggcatctgctcggcagccgcgaaacagcaactatgcgtgagtgcatctccatccacgttggccaggctggtgtccagatcggcaatgcctgctgggagctctactgcctggaacacggcattcagcccgatggccagatgccaagtgacaagactattgggggaggagacgactccttcaacaccttcttcagtgagacaggggctggcaagcatgtgcccagggcagtgtttgtagacctggaacccacagtcattgatgaggttcgcactggcacctaccgccagctcttccaccctgagcagctcatcacaggcaaagaagatgctgccaataactatgcccggggtcactacaccattggcaaggagatcat

SEQ ID NO: 9788 - DNA, 425 bp, Bos taurus
  unsure (390): unsure at all n locations; Clone ID: 42-LIB3058-039-Q1-K1-C10
gattgctgtgagtccacaattcgctttttctgctgtctgacccgctcggctccgcgatgccggtggaccttagcaagtggtccgggcctctgagcctgcaggaagtggatgagcggccgcagcacccgctgcaggtcaaatacggcggggcggaggtcgacgaactgggcaaagtgctgacacccacccaggttaaaaaccggcccaccagcattacatgggatggccttgatccaggtaaattgtacaccttggtcttgacagatccggatgctcccagcaggaaggaccccaaatacagggaatggcaccatttcctggtggtcaacatgaagggcaacaacatcagcagtggcacggttctctccgattatgtgggctctgggcctnccaagggcacaggcctgcaccgctatgtctggctg

SEQ ID NO: 9789 - DNA, 389 bp, Bos taurus
  Clone ID: 42-LIB3058-039-Q1-K1-C6
ggtctttgtctaatattgccaagaaatttaatgaaaagaacaaagaagataaaccatggtttgatttcagaaaatggtaccaagttatgaagaaagctattgatgagaaaaaacaaaagtgggaggaagccagggcaaagtttctgtggaaaggtgaaaagccactctactactcagccattgacaggccggtagtgtataaaagaagagaaatggtggtgagtcttcagaaacagtttagcacactggtggattcagcaccaaacgttgaaaaaaaaaagccttcaagttttcagttcaactggactgaagaggacagcgagaggccttgtttccatgggcatagcctccagggagtcctgcagcagaaaggccagtccctgacaacc

SEQ ID NO: 9790 - DNA, 405 bp, Bos taurus
  Clone ID: 42-LIB3058-040-Q1-K1-C6
cgtggagtggttttcagaggatttcctcgcgttcatggagacattatctccacccgagcaaaagaaaggcgggctctggtcctcaagcagcccgtcggtgtggccgcagtcatcaccccgtggaatttccccagtgccatgatcacacggaaggtgggggccgccctggcagccggctgcactgtggtggtgaaacctgccgaggacacgcccttctccgccctggccttagctgagcttgcaaaccaggctggaattcccccaggtgtgtacaatgtgattccttgctctcaaaagaaggccaaggaagtaggggaagcactttgtacagatcctctcgtatctaaaatttcctttactggttcgacagccactggaaaggtcctgttgcaccacgcagcaaac

SEQ ID NO: 9791 - DNA, 407 bp, Bos taurus
  Clone ID: 42-LIB3058-041-Q1-K1-C10
gaggaaacccttatcttcctgcttaaattgtgacctatctcaaagatatcctgagctggaataacattgaagttgagaaaatgacgatcacagatcaggtgaactgtcccgagtccatgtaaccaggctctaaagggagctgcattcactccatgttccttctcttgctttgcttttcccctataccgaccctcataaagacataccaaaccaccagagcaacctattacaaacctaccagaagggaaacgtggcagcagaagctaatggagaagaacccaaggcaagctggcccagacatttagccatgcaccattctgttaccttgcgagtctgataataaacttgctgctgacctgctgtgctcacagtagattctaaactggactaattattgggggggtttt

SEQ ID NO: 9792 - DNA, 422 bp, Bos taurus
  Clone ID: 42-LIB3058-041-Q1-K1-C6
cggacgcgtggggccgcgaaccctccatctgctactctcgggggtcctggtcctgaccgagacccgggcaggctcccactccctgaggtatttcagcaccgccgtgtcccggcccggcctcgaggagccccgctttatcatcgtcggctacgtggacgacacgcagttcgtgcggttcgacagcgactccccgaatccgagggcagaaccgcgggcgccgtggatggagcaggaggggccggagtattgggatgagcagacgcgaatagtcaaggacaccgcacagactttccgggcgaacctgaacaccgcactcggctactacaaccagagcgaggccgggtctcacaatatccaggcgatgtacggctgcgacgtggggtcggacgggagtttcctccgcgggtacagtcaggacgcct

SEQ ID NO: 9793 - DNA, 397 bp, Bos taurus
  Clone ID: 42-LIB3058-042-Q1-K1-C10
gtggatatctgccccctcgggttacagtgattataagtgatttaatgcacacttagcgttgtgcctagcgtttcatcatacagccagtttgtgaagcaggaggatatagtatcatcattttacagatgaggaaactgaggcaaaaagaggttcagaatttgccttacaaaaccaagagatgcttttagaagtcaggatagtggtttcctttagggaggagtgaggagggtagtaattgggaagaaacatgaagagtatcagggtactagaatgttctagtaacctgggtggtggttacaaagctctacttactttgagagaacttattaaggagtataggatgatttgtgccccttatgtatgttttatcaattttaaaaatgaaccggaaaggttg

SEQ ID NO: 9794 - DNA, 435 bp, Bos taurus
  unsure (355): unsure at all n locations; Clone ID: 42-LIB3058-043-Q1-K1-C6
gcggaaaacctccatcaagaagaacacgttgaaccccacgtacaacgaggcgctggtgttcgacgtggcccctgagagcgtggagaacgtggggctcagcatcgcggtggtggactacgactgcatcgggcacaacgaggtgatcggcgtgtgccgcgtgggtcccgacgccgccgacccccacggccgcgagcactgggccgagatgctggccaacccacgcaagcccgtggagcactggcatcagctggtggaggaaaagactttgaccagcttcacaagagcggccagcggcgcgatggagcgggccaggaagatactgcttcaaatatgaacatctgatcatttggccctntgcgagatgagagtgcatcatcctggtccgccattttgtagtcttgccctctgactttaggacctcatatggcggaccct

SEQ ID NO: 9795 - DNA, 435 bp, Bos taurus
  Clone ID: 42-LIB3058-044-Q1-K1-C10
cggacgcgtgggcgcggcgccagagccagtcgctgacttacgcgcggacgcggtgctgacggacgctggagcggacttgcggcgggaccagaggcgtgagagcagcagccatgtcagcggaactggagacctcagaggggttggatgagccagagaaaaagacctccggggtcccagagaaggaaaaccacaccaggatggcagacctttccgagctcctgaaggaagggaccaaggaatcacatgaccgggcggaaaacacccagtttgtcaaggacttcttgaaaggcaacatcaggaaggagctattcaagctggccaccaccgcgctgtacttcacctactccgccttggaggaggagatcgaccggaacaaggaccacccagcctttgcccccttgtacttccccacggagctacaccggaagaaagcgc

SEQ ID NO: 9796 - DNA, 438 bp, Bos taurus
  Clone ID: 42-LIB3058-046-Q1-K1-C10
ggctgttgtgtttccagttgccaggtcttgtatcatgacgtccgccttggagaactacatcaaccgaactgttgctgtcattacttctgatgggagaatgattgtgggaacactgaaaggttttgaccagaccattaatttgatactggatgaaagccatgaacgagtgttcagctcttcacagggagtagaacaagtggtactagggttatacatcgtaagaggcgacaatgttgcagtcattggagaaattgatgaagagacagattctgcacttgatttggggaatattcgagcagaacctttgaactctgtagcacactgaggaaaaactacatatttcagacagctgtaaatctttgtacagaaactgattattctgagattgatggtcagaatttttaggaatgtgtaattgtggattttgactccatgttg

SEQ ID NO: 9797 - DNA, 416 bp, Bos taurus
  Clone ID: 42-LIB3058-047-Q1-K1-C10
gaaggacgcggtttctggaggcgaagatcgcggttggccaatcgcaagccagaagatgaaggttctgtgggttgccgtggtggtcgcgcttctggcaggatgccaggcggatatggagggagagctggggcccgaggagcccctgactactcagcagccccgggggaaggacagccagccttgggagcaggcgctgggccgcttctgggattacctgcgctgggtgcagaccctgtctgaccaggtgcaggaggagctgctcaacacccaggtcattcaggaactgacggcgctgatggaggagaccatgaaggaggtgaaggcctacaaggaggagctggagggacagctaggccccatggcccaggagacacaggcccgcgtgtccaaggagctgcaggcagcccatgcccggc

SEQ ID NO: 9798 - DNA, 399 bp, Bos taurus
  unsure (339): unsure at all n locations; Clone ID: 42-LIB3058-048-Q1-K1-C10
ctgccgcggcacccggggccttgggcattttgcaggccagccgtgcccgcttggtggctgcttgctgtgcgcggctaggccccaggtggaggcttcccggctcctggacgtgcccacgggtcgactcgacgatatgggcccggggctggacgcctgcggccgggggagcggcctggcagaggggctacagcgcagaggtgaagactgaggacgagctgcgggtgcggtacctggaggaggagaaccgaggaattgtggtgcttggaataaacagagcctatgccaaaaattcattaagtaaaaatcttataaaaatgctttcaaaagctgtggatgctntaaaatctgataagaaagtacggacccatatagtcagaagtgaagtccctgggattatct

SEQ ID NO: 9799 - DNA, 432 bp, Bos taurus
  Clone ID: 42-LIB3058-048-Q1-K1-C6
ctcagtccagaagcatcgcagtaggtctagccacagagcgagcagcggaagggccttggcctgggttgcttgcgccggccggagctgaggtccttggggttctggaaggacttcccacactgggcgctgttgtgaacaagctgatggttgtagaggctggagcgcttgctgaagcacttgccacaggtgtgacaggtaaaggctggccgagcccaggattctggcaatgttggcgtcttttccggggacccagctggaggagaggttgggcccaagcctctgtgagcaagggaggccttcttgtcatcaacagtcccctcatctcccaaactctgactctgttcttggctttcctccttcttgcctcctggaggaaatgaggaagaatgatgggattcatcatgacagccctgacacagctgtctgttcagt

SEQ ID NO: 9800 - DNA, 423 bp, Bos taurus
  Clone ID: 42-LIB3058-049-Q1-K1-C10
ggaaaagcagaccatggtgaatccttgttgcagctcccagccgcccccagtgacggccggctccctctcctggaagcgttgcgcaggctgcgggggcaagattgcggaccgctttctgctgtatgccatggacagctactggcatagccggtgcctcaagtgctcctgctgccaggcgcagctgggcgacatcggcacgtcctgttacaccaagagcggcatgatcctttgcagaaacgactacattaggttatttgggaatagcggtgcttgcagcgcttgtggacagtctattcctgcgagtgaactcgtcatgagggcccaaggcaatgtgtatcatctgaagtgttttacatgctctacctgccggaatcgcctggtcccgggagatcggtttcactacatcaatggcagtttattttg

SEQ ID NO: 9801 - DNA, 165 bp, Bos taurus
  Clone ID: 42-LIB3058-052-Q1-K1-C6
gtgctatagagcttgctagcgattttttgctttcggaggacagctgtggcaccgggggggcctttctacacgctggaggcaccagacactcgctgtgggagtaggggggccccctatggcgattcccatgcgctcaatgattctcactgggccgaaaggtggggc

SEQ ID NO: 9802 - DNA, 401 bp, Bos taurus
  unsure (357): unsure at all n locations; Clone ID: 42-LIB3058-054-Q1-K1-C10
ggtggcttcgcctgggatggcagcatgctcatgttcaactggcacccggtgctcatggttacaggcatggtggtgctctacagcgctgcatcgctggtctaccgcctgccccagtcatgggtagggcccaggctgccctggaaatccggccacgcagccatgcacctgctggccttcctcctgactgtgctggggctgcacgcggtctttgaatttcacaaccacgcaaagatcccccacctctactccctgcacagctggctgggcatcaccaccgtcttcctcttcgcttgccagtggttcctgggcttctcagtcttcctgctgccctgggcatccatgtggctgcacagcctnctgaaacccatccacgtcttctttggagcctccattctctctct

SEQ ID NO: 9803 - DNA, 293 bp, Bos taurus
  Clone ID: 42-LIB3058-054-Q1-K1-C6
cttgaattttctgacaacagatcaagtctctggctgattttgcaaagttaatcagatacttgaaaagaacaatcccaggagctagaaatcaacctgtcattgccctagggggctcttatggtggcatgcttgcagcctggttcaggatgaagtatcctcatttggtggttggagctcttgcattctctgcccccatctggcagcataatgatctggtgccttgacacatatttatgattattgtttctactgattttagcctaatttgcccttatggtattattgagtttttt

SEQ ID NO: 9804 - DNA, 420 bp, Bos taurus
  Clone ID: 42-LIB3058-056-Q1-K1-C10
gggggtaacaccaccaataactcgcccgccatctccaaagcagggaagatctgggtgtttttctttattattacttcctttctcccctgcaggtcagtaagaggatttaagttgcactgactaatataccaaaatggaagcgtattttttagttctcatttgaaattgctggcactgctggccggatgcatttttgagtttgtattagttgataaattaacagtaataacatgattgtatgaaccgcatggtgcttgcaggtttaaatatagaggatatttgtcctgcattggaaacgtgctgttgcttttacagattcaactgtgttgaaatcaaatttgccacatcagatattgtttttatttcatgtacaataagggatcaatttcaaaccctgcttatgatgtgaaaatattataa

SEQ ID NO: 9805 - DNA, 429 bp, Bos taurus
  Clone ID: 42-LIB3058-056-Q1-K1-C6
atcatagccggctactgtgtagaaggcacgcttgccaagcatatcatgtctgaaccggaagaaatcactaccatgtccgggcagaagttacctctgaaaatgtctgttgattacatctctttctctgcgcacacggattaccagcaaaccagtgaatttatacgtgctttgaagccgcctcacgtgattttagtccatggagaacagaatgaaatggccagattgaaagcagccctgattcgagaatatgaagataatgatgaagttcacatagaggttcataatcctcggaatacagaggcagtgaccttgaacttcaagggagaaaaactggtgcaggtcattgggattttagcagacgaaaaaccagaacagggccagcgggtcttaggaatacttagtaaaagaaactttaaatatcacatactt

SEQ ID NO: 9806 - DNA, 452 bp, Bos taurus
  Clone ID: 42-LIB3058-058-Q1-K1-C10
gtggaacagcagcatagcctggtctcttggctacatgctcagcctgaccaaccagatcccagccgaaagccctctcatccgcctgcctatcaagccatctgccttcgtgggcaccctcgccttctttgcagcagtggccttgctgtgtctgtcatatctggtattacttgtgtgtgttgtttttgattttaattctcactattttgtttttctttgtattattttttacttttgtttattttttatttttgtatttttttttttttgtttattttttttgttctttttttttttttgttttttatttatttttatatatgtttatttttgtattattttctttttctttatttttatatatttttgtttgtttcttttttttattttctatttttattgttttattttttttttattttgttatttgatatttgatttttatattttttttt

SEQ ID NO: 9807 - DNA, 453 bp, Bos taurus
  Clone ID: 42-LIB3058-058-Q1-K1-C6
ctcccgaggaccaggaagtgttttcttctcaaagggcacttccactgatgaaaacaaagtggaaagaaagatgttcaggtagagagaagggaggcacctgtccctgttgccatcttgggagccaaatatattctctttggtgtacaaaaccgagaactcactccagtctccctagtaccactgaagagagaagaaaaaaaaaagaatgccagcaaaacaataagagcatttgcccaaatctacctattgcagctgggagaagggggtcaaagcaaggatctttctcccatagaaagagagcactgaccccgatggcgatggactatttaagccctaactcagccaaccttacttatagcataagggagcatagtgtttgtgtagacaaagggggcgcttggccttatacctcgttagagaagagaaacagggtgtagtcagcatcttcttact

SEQ ID NO: 9808 - DNA, 330 bp, Bos taurus
  Clone ID: 42-LIB34-001-Q1-E1-C6
aaaatcttagtgacatttatggttaacaaaacaaccccaggaccaatttttaaaaaataccacggtattaaataagaaggaaaggttaaggttatttaccgggaaatttaaaattttcccaagtccccaggaggaggaacacattgcggcctttggaaaataccttcagcacaatcatggcttgatgttaatcccggctttgaattaaccaggttttttaaaacttgcaattacatttatcctaatacagcactgattttgcagtagactgatttgtaattgctttcctttttccaatgaaataatctgtaaataaaaaagaagtggggg

SEQ ID NO: 9809 - DNA, 368 bp, Bos taurus
  Clone ID: 42-LIB34-002-Q1-E1-C6
agttggtgcccctttttgaaaaggctggtcccatttgggatctgcgtcttatgatggatccactgtctggtcagaacagagggtatgcatttatcaccttctgtggaaaggaagctgcacaggaagctgttaaactgtgtgacagctatgaaatccgccccggtaaacaccttggagtgtgcatttctgtggcaaacaacacgctttttgttggatcaattccgaagaataatactagataaaacattctggaataattcagtagagtcacagagggtttggtggacgttattctctagcatcaacgcgatgactacaagaagaatccggggttctgcttccttgactatgacgatcacaagtccgca

SEQ ID NO: 9810 - DNA, 420 bp, Bos taurus
  Clone ID: 42-LIB34-003-Q1-E1-C6
cccagctgcgactgggtgcaagtatgcctctgccaaacgcaaagtggaggaaatggaagtggacgacttctacgatgggatcaaacggctctataacgaagataacgcttccgaaagtgtgggttctgtgtgtggcactgatttatcacggcaagagggacaggcttctccttgtccacctctgcagcctgtttctgtcatgtagctgcaagagttaccttcaagtgcaaactaaggtagacgactcgggatgggagcatggaaaaccaggataggctacgtaaggtatatatcttttcaggctgatttgaaatgagccagaggaaaaaacccagttgatttgtatgactaattataattcaacaatatttaagcacttaaagaccaaaaagaaaaagtctaaagatcaaaagaaatttt

SEQ ID NO: 9811 - DNA, 416 bp, Bos taurus
  Clone ID: 42-LIB34-004-Q1-E1-C10
ggcgactatcctcttattccagttggtaaattggtcttaaaccggaacccagttaattactttgctgaggttgaacagttggcttttgacccaagcaacatgccgcccggcatcgagcccagccctgacaaaatgctccagggccgcctttttgcctatcctgacactcaccgccaccgcctgggacccaactatctccagatacctgtgaactgtccctaccgtgctcgagtggccaactaccagcgtgacggccccatgtgcatgatggacaatcagggtggggctccaaattactaccccaatagctttagtgctcccgagcatcagccttcctgccctggaacacaggacccacttctctggggatgtacagcgcttcaacagtgccaacgatgacaatgtcactcaggtgc

SEQ ID NO: 9812 - DNA, 354 bp, Bos taurus
  Clone ID: 42-LIB34-004-Q1-E1-C6
gcaccaggcgccccacgaacgtgcggtgcgtgacgggcgagggggcggccgcctttccggccgcgccccgtgtcccgggacgaagggctctccgcaccggaccccggtcccgatgcgcggcaggggcgcgccgcgccgcacgtcggcggacgcaggagacggaccgcctgcggggatggaggaggaccggctatccgacgccaaccgaggctcccgcggcgctgccgtatcgttccgcctgcgcgggattctgacgtataggcgttcagtcataatcccacagatggtagcttcgccccattggctcctcagccatgcacatacaccagatgtctgaggatgcggttcctctcg

SEQ ID NO: 9813 - DNA, 403 bp, Bos taurus
  unsure (346): unsure at all n locations; Clone ID: 42-LIB34-005-Q1-E1-C10
ctgccctgagcttaggccggtataaggccaccttgccagaccaagggaacctggatgaaaaagagagaggccaccatgtcctctcagaacccagagcgaaaacagagcctggtgggctgggactcccatctttctagaatcttcctattgctgctatttgtagtctcagcccaggggctcaccccaaatcctgaagcctgtctggtgttctcctcggtcaatggcagctccatctcctgccagccacctgcccaaatcccccacagcctcccagctgacaccatctttctggctgtggagttcttcaacctgactcagctgcctgccgacttcctccagggcgtcnctaacctccaggaactccacctttccagcaaccgactggaagacttctcccccaagt

SEQ ID NO: 9814 - DNA, 237 bp, Bos taurus
  Clone ID: 42-LIB34-005-Q1-E1-C6
cctgaatatgctgtctcagtgctattgagacttgccaaggaatatgaagccacactggaggaatgctgggccaaaagattattcaacagcaaggcaatccaaaatggttggcaaacctaagcaatctggggatgaacctcaaaatttaatcaaacaaaactgtgaccaattccaaaaaacttggaaattagggattcaaaattgcgcccaaattccgtaacacaaggaagttacccc

SEQ ID NO: 9815 - DNA, 277 bp, Bos taurus
  Clone ID: 42-LIB34-007-Q1-E1-C10
agttcgagatcgcgagcggccgcccttttttttttttttttttttttttttttttttgtttttttttttttttttttttttttttttttttttttgtgagtaagaagactttattaggctccagtacccagaggatgggttaacaaggccgcagttacagtttgaaaacctgcctgaaaaagcaagccccatggacacttagctccataggaaaacccccaggagcaactcaacgggactaggtccgacgggaagtggttcaaagtggctgtgggcg

SEQ ID NO: 9816 - DNA, 426 bp, Bos taurus
  Clone ID: 42-LIB34-007-Q1-E1-C6
caccagtaggaagtgaaagtttacaaccttctcttccacaaaagaagctctgacgaaagagatgcataaatcagttactctgacagtttcccaaagattcagaatctgctttgagtagctgctgttgccactgtcgacatctggtatttgaaaaaacagggtctgcaatcacctgacagtgtacagaaaagctcccctctttgtgtagctgacagggccttttgacggaggagaatgtcattgaatcttgacagtgacgtttgcctccagctgcctgacaggcagcaggtcagcagctcaaccccacagaagccagcaccaagtgaagctgaaaaaataaggccaaaatgtgaaaatgaccttcaaattaaatatatgaaattggatatattccccaagtcaatctacacaattgcatttccagca

SEQ ID NO: 9817 - DNA, 424 bp, Bos taurus
  Clone ID: 42-LIB34-008-Q1-E1-C6
cgtcaacatgactgacaatgatcttatcgatattcttgaccctttttatcatctttcaactaaaagtttcaaaacacaacttttatcacaatccagaactgacaccaacaaaaatattaaaacaaaacaccccttgagaaacaaaatgaacgaaaatttatttacctcttttattacccctgtaattttaggtctccctctcgtaacccttatcgtactattcccaagcctactattcccaacatcaaaccgactagtaagcaatcgctttgtaaccctccaacaatgaatacttcaacttgtatcaaaacacataatgagtatccacaattctaaaggacaaacatgaacattaatattaatatctctgatcctatttattggatcaacaaacctactaggcctattaccccattcattcaca

SEQ ID NO: 9818 - DNA, 383 bp, Bos taurus
  Clone ID: 42-LIB34-009-Q1-E1-C6
cggacgcgtgggcgacgccactgctctcatgaccgaccctaagttcatcacctggtccccggtgtgccgcaacgacgtctcctggaacttcgagaagttcctggtgggcccagacggtgtgcccgtgcgcaggtacagccgccgctttctgaccatcgacatcgagcctgacattgaaaccctgctgtcccagggggcctctgcctagggtgcccctcccacccttgctgcttggcggtcagcgctgctctccagggattttgcccatgaaggtgttccctctaaacctacgtggaggaatgcctgatgtccaggaaaatcccctgaggtgggcgctggtcctatccatcccagccctccctttcccagaccacagctcctca

SEQ ID NO: 9819 - DNA, 411 bp, Bos taurus
  Clone ID: 42-LIB34-010-Q1-E1-C10
agggattccagatggacacaggcacatgaatggatatggatcgcatactttcaagctggttaatgcaaatggagaggcagtttattgcaaattccattagaagactgatcagggcatcaaaaacctttctgttgaagatgcagcaagacttgcccacgaagatcctgactatggcctccgcgatcttttcaatgccattgccacaggcaactacccctcctggactttatacatccaggtcatgacatttagtgaggcagaaatttttccatttaatccatttgatcttaccaaggtttggcctcacagcgactatccccttattccagttggtaaattggtcttaaaccggaacccagttaattactttgctgaagttgaacacttggcttttgacccaagcaatatgcc

SEQ ID NO: 9820 - DNA, 421 bp, Bos taurus
  unsure (363),(375): unsure at all n locations; Clone ID: 42-LIB34-010-Q1-E2-C6
cgccgagcaggacaaacagcaaggtcacctacagccgcagaccccttccccagccccagtctgtagctgcctcgagcagggagctggtggctcttccatccccagaccagccaagcctgtgagtgacaccccagacagaggaaccagagccatgcggagtctcagcggactgctgttgttactgactgcctgcctggcggtaaacgccagctccgtgcccacattgcccgatgacattcaagtgcaggagaacttcgacctgtctaggatctatgggaagtggttcaatgtggccgtgggctccacctgcccatggctgaagaggttcaaggagaagatgaccatgagcacagtggtgttganagcggggccgancgagcaagagatcagcgtcaccaacactcacaggcggaaaggtgtc

SEQ ID NO: 9821 - DNA, 395 bp, Bos taurus
  Clone ID: 42-LIB34-011-Q1-E1-C6
aacaatgataagtatgatggcaactgtgctgaacaggatggatctggttggtggatgaacaaatgtcacgctggccacctcaatggagtttattatcaaggtggcacttactcaaaaacatctactcctaatggttatgataatggcattatttgggccacatggaaatcccggtggtattccatgaagaaaaccaccatgaagataatcccacttaacagacttgccatcggagaaggacagcagcaccaactggggggagccaaacaggctggagacgtataaaagaccatttcaaaagtgatttacttttttaaagaactttatctgaaaagaaaaagataatatttttcctatgggacaatgggacttgcaaagcctcacttcactttaaa

SEQ ID NO: 9822 - DNA, 412 bp, Bos taurus
  Clone ID: 42-LIB34-012-Q1-E1-C10
gtcatcaccaacctcttatcagcaatcccatacatcggcacaaatttagtcgaatgaatctgaggcggattctcagtagacaaagcaacccttacccgattcttcgctttccattttatccttccatttatcatcatagcaattgccatagtccacctactattcctccacgaaacaggctccaacaacccaacaggaatttcctcagacgtagacaaaatcccattccacccctactataccattaaggacatcttaggggccctcttactaattctagctctaatactactagtactattcgcacccgacctcctcggagacccagataactacaccccagccaatccactcaacacaccccctcacatcaaacccgagtgatacttcttatttgcatacgcaatcttac

SEQ ID NO: 9823 - DNA, 402 bp, Bos taurus
  Clone ID: 42-LIB34-012-Q1-E1-C6
acaggattgagggacccacaagtcaaccttgagacctttggcccagccggccctaccatgacaaaggagtatcaagatcttcagcatctggacaacgaggagaatgaccatcagcacagaaaaaggccactgcctcctcattcattcagtcggcgtctctgcaccggacccagcctcctcctggtctccatgggccttagcctcctgctgctagtcgttctatgtgtgatcggatcccagaactccaagctgcaggaggagctcagcgccctgagagagaccttcagcaacctcacagtgagcacagaggccaaggtcaaggccctgagcgttcagggaggaaatgtgggcagaaaagtgaagttcctggagtcccaactggagaaacagcagcaggaactg

SEQ ID NO: 9824 - DNA, 370 bp, Bos taurus
  Clone ID: 42-LIB34-013-Q1-E1-C6
aaacccactccaggtactcttgccttgaaaatcccatggacggaggagcttggtgcaggctactatccacggggtcacacagagtcgcacacgactgagcgacttcactttctttcaagtgtgattaattatgaagatgcaacaccacttagaatagtcatgtaagaaataaaaattaggaaatgaaatggttcacttacttgcctacattgtcaaagaaatccttgagtcctaacaatccatgtttagtctaaataatgactcatgaaaaaacagcctcttcatgctctgaccacaatttatgcagtggattgattgaaaagcaatgaggattaaataacacagttcatgaatacagtcctacagttac

SEQ ID NO: 9825 - DNA, 404 bp, Bos taurus
  Clone ID: 42-LIB34-014-Q1-E1-C10
aagtccctcctgcagacttggccacaagccttgggtcacatccatgtccatcaggagtgggtgtgattgctccacagtcccccaactaccagtgacacccagctcatgcccacagattccgcagtcagatggaggctgctggcttcaccatctcaggagccaatcaccccatctgccctgtgatgctgggtgacgctcggctggccttaaacatagcggatgacatgcttaagagaggcatctttgtcattgggttcagctaccctgtggtccccaaaggcaaggcccggatccgagtccagatctcagcagtgcacagtgaggaggacattgaccgctgtgtggaggccttcgtggaggtggggcgactgcacggcgcgctgccttgagttctgggtagtgac

SEQ ID NO: 9826 - DNA, 405 bp, Bos taurus
  Clone ID: 42-LIB34-014-Q1-E1-C6
agcagaagctgctaaaaaaagggtcactggtttccggctgagtctgggggttttggccttattgactgtcctaggtgccgtggggattttgaacagctttctggatgaatacctggacatcgatattgccaagaaactgaggcacttctaacatttcaccttcctttgtgcagatgcttatatatgcttccactctcaaggttagatggtgccacttgttccattaaaagaaataaaattctctctcttttttgaaatggctttatagaaacataccttttagatttcctgaaatttgctctgagggcaagtgtcctaacaccagtggatgtgtgctgagccctggttttagaagcacattctgaagtcatgactcctcatgtgggtagaaagcaacctgacctg

SEQ ID NO: 9827 - DNA, 403 bp, Bos taurus
  Clone ID: 42-LIB34-016-Q1-E1-C10
cttgacctctttgtgccttgatttcctcatttttaaaatggagatgatgatattaacacatcattgaccagagatgtattgggttgaccacaaagttctttcacatgtttctataagaacatatggaacaatctgaacaaagtttttggtcaacccaatattaatgcttccctgatggctcagtggtaaagaatctgcctgcagtgcaggagacacaagagacatgggtttgagccctgggtcaggaagctcccctgaaggaggaaatggcaacctactccagtattcttgcctggataatcccttagacagaggagcctggtaggctacagtccatcgggtcagatatgactgaacgactgagcacgcatgcatgtacacatatgcaatattaatgtcacat

SEQ ID NO: 9828 - DNA, 403 bp, Bos taurus
  unsure (400): unsure at all n locations; Clone ID: 42-LIB34-016-Q1-E1-C6
cggacgagctcagcgtcttctgcagctcccggaacctcacgcagctgcccgggggcctcccgcccggcactagggcgctctggctggacgggaacaacttctcctccatccctgcggctgccttccggaacctctcgggcctgggcttcctcaacctgcagggcagcgggctggccagcctggagccgcaggcgctgctgggcctgcgcggcctgtgccacctgcacctggagcacaatcgtctgcacgcgctggcggcgcacaccttcctgcacacgcccggcctggcctcgctcggcctcagcaacaacctgctcagccgcctggacgagggcctcttccggggcctggcgcacctctgggacctcaacctgggctggaacagcctgactgtgctgcncga

SEQ ID NO: 9829 - DNA, 401 bp, Bos taurus
  Clone ID: 42-LIB34-017-Q1-E1-C6
ctctgctgggtcagttatggcggccgtgaagaccctgaaccccaaggccgaggtggcccgagcccaggcggcgttggcggtcaacatcagcgcggcccgggggctgcaggacgtgctgaggaccaacttggggcctaagggcaccatgaagatgcttgtttctggtgctggagacatcaaactcactaaagatggaaatgtgctgcttcatgaaatgcaaattcagcacccaacagcctccttaatagccaaagtagcaacagcccaggatgacataactggtgatggcaccacttccaatgtcctcatcatcggagagctgctgaagcaggcggatctctacatttctgagggtcttcatcccagaataattacagaaggatttgaagctgcaaaggaaa

SEQ ID NO: 9830 - DNA, 407 bp, Bos taurus
  Clone ID: 42-LIB34-018-Q1-E1-C6
caccgttaaacctaagccaaaatgggaaaggagaagacccacatcaacatcgttgtcattgggcacgtagattcagggaagtctaccacgactggccatctgatctataaatgtggcgggatcgacaagagaacaattgaaaagttcgagaaggaggctgccgagatgggaaagggctccttcaaatatgcctgggtcttggacaaacttaaagctgaacgtgagcgtggtatcaccattgatatctccctgtggaaatttgagaccagcaagtactatgttaccatcattgatgccccaggacacagagacttcatcaaaaacatgattacaggcacatcccaggctgactgtgctgtcctgatcgttgctgctggtgttggtgaatttgaagccggtatctccaa

SEQ ID NO: 9831 - DNA, 401 bp, Bos taurus
  Clone ID: 42-LIB34-019-Q1-E1-C10
cagctgggtgcgcctcttgagtcagccctatccacgggagagatgttttccgtgagggacctctgcctgttcctgagtttggagggtgcaattaagacagaagatggtagtgatactcccagtggtgactttttaactgaacgacgaagggtgcgtggcccaagacttgtggaaagacagcagtctgcctgcaaagagacaggctggtccttctgctctgatgaagactggtatacaaaatgcccttctggctgcaggatgagatggttgattgatgaagtcgatcaagattttacaagcagcataactaaactaatagattcactatttaattatcagaagaacagtcatgactcgaatacattgaccatgaacatagtggaactaatgaaatgggaatt

SEQ ID NO: 9832 - DNA, 421 bp, Bos taurus
  Clone ID: 42-LIB34-019-Q1-E1-C6
gaagttttggggaaaatacctatacgaaattgctagaagatatccctacttttatgcaccagaactcctttactatgctaataaatataatggagtttttcaagaatgctgccaagctgaagataaaggtgcctgcctgctaccaaagattgaaactatgagagaaaaagtactgacttcatctgccagacagagactcaggtgtgccagtattcaaaaatttggagaaagagctttaaaagcatggtcagtagctcgcctgagccaaaaatttcccaaggctgagtttgtaaaagttaccaagctagtgacagatctcacaaaagtccacaaagaatgctgccatggtgacctacttgaatgcgcagatgacaaggcagatcttgccaagtacatatgtgataatcaagatacaatctcc

SEQ ID NO: 9833 - DNA, 413 bp, Bos taurus
  Clone ID: 42-LIB34-020-Q1-E2-C6
agccgagcaggacaaacagcaaggtcacctacagccgcagaccccttccccagccccagtctgtagctgcctcgagcagggagctggtggctcttccatccccagaccagccaagcctgtgagtgacaccccagacagaggaaccagagccatgcggagtctcagcggactgctgttgttactgactgcctgcctggcggtaaacgccagctccgtgcccacattgcccgatgacattcaagtgcaggagaacttcgacctgtctaggatctatgggaagtggttcaatgtggccgtgggctccacctgcccatggctgaagaggttcaaggagaagatgaccatgagcacagtggtgttgaaagcgggggcgacgagcagggagatcagcgtcaccaacactcacaggcgga

SEQ ID NO: 9834 - DNA, 216 bp, Bos taurus
  Clone ID: 42-LIB34-022-Q1-E1-C6
atcaaagtaacagtataaatgtgaaatgcaaatgacaagcctggaaaggtaaactgtgaatcttcatttctaacattgatccaagtttctatattgggtcaatatattgtatttatgtggtgtttaaaaagggtaacctacttacacgatgaggtttacatcacaaccaccatttcacatatgcactttttaacgcacaagtacggtcaactattc

SEQ ID NO: 9835 - DNA, 385 bp, Bos taurus
  Clone ID: 42-LIB34-023-Q1-E1-C6
aaagaaattaaaaatgccctcaaggaggtgaaacagataaagacccaaatagaacaaaccaatgaagagcgcaaattactgctcagctccctagaggaagccaagaagaagaaagaggacgccctgaatgacaccagggattctgaaaacaagctgaaggcgtcccagggggtgtgcaatgagaccatgacagccctttgggaggaatgtaagccctgcctcaagcagacctgcatgaagttctacgcgcgggtgtgcagaagcggatcgggactggttggccaccagcttgaggagttcctaaagcagagctccgccttctacttctggattaacggtgaccgcatcgattccctgatggagaatgaccgggagcagatccacg

SEQ ID NO: 9836 - DNA, 323 bp, Bos taurus
  Clone ID: 42-LIB34-024-Q1-E1-C10
ggtccacccacgcgaccgcaagacactgactctcatcgagacaccgaagaagaaaatggccataaccagggtcccaatattaggacttttcatcactgtcctgatcggcctacaggaatcgtgggggggtaaagagaatcatgtgatcatccaagctgagttctatctgaaacctgaggaatcacccgagtttatgtttgactttgatggtgatgagattttccacgtggatattgggaagaacgagacagtgtggcggcttccagagtttggacattttgccagctttgaggctcagggtgccctggccagtctggctgtga

SEQ ID NO: 9837 - DNA, 407 bp, Bos taurus
  Clone ID: 42-LIB34-024-Q1-E1-C6
ctcgcgggtcgacgcaagcgtctggtctaaatctatacaggagtgagattgctcatcggtttaaagatttgggagaagaacattttaaaggcctggtactgattgccttttctcagtatctccagcagtgtccatttgatgagcatgtaaaattagtgaacgaactaactgagtttgcaaaaacatgtgttgctgatgagtcccatgccggctgtgaaaagtcacttcacactctctttggagatgaattgtgtaaagttgcatcccttcgtgaaacctatggtgacatggctgactgctgtgagaaacaagagcctgaaagaaatgaatgcttcctgagccacaaagatgatagcccagacctccctaaattgaaaccagaccccaatactttgtgtgatgagttt

SEQ ID NO: 9838 - DNA, 413 bp, Bos taurus
  Clone ID: 42-LIB34-026-Q1-E1-C6
gagtaacattattgcttctattctataatagattagtccagtattggggctaggagttaatcatattaacattattgcttctattctataatagattagtccagtattggggctaggagttaatctattatagaatagaagcaataatgttaatatgagtaacaagaaaaattttctccttgcataagtctaagtcagtgcctgataatactctgaccactaacagtcaataaaaataatccaacaataaacaatttattgattatactgttaacccaacacaggagtgcatctaaggaaagattaaaagaagtaaaaggaactcggcaaacacaaaccccgcctgtttaccaaaaacatcacctccagcattcccagtattggaggcattgcctgcccagtgacaactgttt

SEQ ID NO: 9839 - DNA, 252 bp, Bos taurus
  Clone ID: 42-LIB34-028-Q1-E1-C10
aggccattacgtgcagacgtcagtgccatgttcaccaagtgttggagttaacaaaatggattccactgagccaccctatagccagaagagatacgaataaattgggggggaagtcagcacctacattaacaaaattggctacaaccccgacacagtatcatttgtgccaatttctggctggaatggggacaacatgctcgaaccaagtgctaatatgccacggctcaagggatgggaagtcacccataacga

SEQ ID NO: 9840 - DNA, 424 bp, Bos taurus
  Clone ID: 42-LIB34-029-Q1-E1-C6
cggacgcgtgggtcaacggacagctcgtcggtgccaagaagcccaagaataaaaaactcagcacctattttgggaaactgggattttatttccaacgtgaagatgtgaaggtagaaatcagcacggagaccatctccctgagtaggggctcccgaacatccgtcttgtcctggtctgacacggcccacgtgcttaatcagagggtgcttgtctctgtgaagaaagagaaaactgtgactgtcaccctggataaagagatgttcttctctgttttacttcatcgcgtttggaagaagcacccgatcaatgtcgactttttggggatctacatcccccccacaaacaagttttctcctaatgtgcacgggctgataggccagttcatgaatgagccaaagattcacgtcttcaatgagcaaccggg

SEQ ID NO: 9841 - DNA, 378 bp, Bos taurus
  Clone ID: 42-LIB34-030-Q1-E1-C6
ataattattgctattccaaccggggtaaaagtcttcagctgattggcaacacttcatggaggtaatatcaaatggtctcctgctataatgtgagccctaggctttattttcttatttacagtagggggtttaactggaattgtcttagccaactcttccctcgatattgttcttcacgacacatactacgttgtcgcacatttccactatgttttatcaataggagctgtatttgctattatagggggatttgttcattgattcccactattctcaggttatactctcaacgatacatgagccaaaatccacttcgcaattatatttgtacgtgtcaatataaacttcttcccacaacactttctaggactatctggc

SEQ ID NO: 9842 - DNA, 425 bp, Bos taurus
  Clone ID: 42-LIB34-031-Q1-E1-C6
gaaagtcccacccactaataaaaattgtaaacaatgcattcatcgaccttccagccccatcaaacatttcatcatgatgaaatttcggttccctcctgggaatctgcctaatcctacaaatcctcacaggcctattcctagcaatacactacacatccgacacaacaacagcattctcctctgttacccatatctgccgagacgtgaactacggctgaatcatccgatacatacacgcaaacggagcttcaatgttttttatctgcttatatatgcacgtaggacgaggcttatattacgggtcttacacttttctagaaacatgaaatattggagtaatccttctgctcacagtaatagccacagcatttataggatacgtcctaccatgaggacaaatatcattctgaggagcaacagtcatc

SEQ ID NO: 9843 - DNA, 368 bp, Bos taurus
  Clone ID: 42-LIB34-032-Q1-E1-C6
actagttctagatcgcgagcggccgcccttttttttttttttttttttttttttttttttttttattagttttttttgatttctttttttttaatttaatttaattttaaactttacataattgtattagttttgccaaatatcaaaatgaatctgccacaggtatacatgtgttccccatcctgaaccctcctcgctccaccctccccataccatccctctgggtcgtcccagtgcactagcctcaaacatccagtatcctgcattgaacctggactggcaactcgtttcttacatgatattttacatgtttcaatgccattctcccaaatcttcccaacctttccctctcccacagagtccataag

SEQ ID NO: 9844 - DNA, 409 bp, Bos taurus
  Clone ID: 42-LIB34-034-Q1-E1-C10
aaactatcaggaagcaaaagatgccttcctgggctcgtttttgtatgaatattcaagaaggcatcctgaatatgctgtctcagtgctattgagacttgccaaggaatatgaagccacactggaggaatgctgtgccaaagatgatccacatgcatgctattccacagtgtttgacaaacttaagcatcttgtggatgagcctcagaatttaatcaaacaaaactgtgaccaattcgaaaaacttggagagtatggattccaaaatgcgctcatagttcgttacaccaggaaagtaccccaagtgtcaactccaactctcgtggaggtttcaagaagcctaagaaaagtgggtactaggtgttgtacaaagccggaatcagaaagaatgccctgtactgaagactatctg

SEQ ID NO: 9845 - DNA, 194 bp, Bos taurus
  Clone ID: 42-LIB34-034-Q1-E1-C6
agagcctgtaaggcagagcagctggacctcgcctaagctgtgtctctgactcatttctgactttaagcaacttcttccaatgggaaaaatggcgaagatgtttagtttcatccttgtgaccactgctccggtaatgggcaggggaatctccggtctggacaaagggctccaggagtacgcgcagctcaaaggcc

SEQ ID NO: 9846 - DNA, 407 bp, Bos taurus
  Clone ID: 42-LIB34-035-Q1-E1-C6
aaccgctgactattctcaaccaaccataaagatattggtaccctttatctactatttggtgcttgggccggtatagtaggaacagctctaagccttctaattcgcgctgaattaggccaacccggaactctgctcggagacgaccaaatctacaacgtagttgtaaccgcacacgcatttgtaataatcttcttcatagtaataccaatcataattggaggattcggtaactgacttgttcccctaataattggtgctcccgatatagcatttccccgaataaataatataagcttctgactcctccctccctcattcctactactcctcgcatcctctatagttgaagctggggcaggaacaggctgaaccgtgtaccctcccttagcaggcaacctagcccatgc

SEQ ID NO: 9847 - DNA, 318 bp, Bos taurus
  Clone ID: 42-LIB34-036-Q1-E1-C10
gaaagatcatatggtgtctccagtcttgagtcatcccacctggccattcatcgcttccaacaggcgatctcatagagcgggttggccctcaattggagcctgcactggagggattcgaaggctgtagctgagggatttgctgtcaatgtctggagttgcataatgacctcagctgtccttgtgcatcggtcgctccagaaggtagaagtgcatctcctggttgagttactgcaagtgatatttttcacacttgatttagactatgtgtcgtgaaagatccatccgttcttgcacaccgtagctgccggattgctgttg

SEQ ID NO: 9848 - DNA, 411 bp, Bos taurus
  Clone ID: 42-LIB34-036-Q1-E1-C6
aatcgctgagcctgtcacctgtgttccaggagcggaaccagcaatgtcgtcctcagccatgccagacgtacctgccccactcaccaatttgcagtttaaatatactaagatcttcataaacaatgaatggcatagttcagtgagtggtaagaaatttccagtctttaatcctgcaactgaggagaaactctgtgaggtggaagaaggagataaggaggatgttgacaaagcagtgaaggctgcaagacaagcttttcagattggctctccatggcgtactatggatgcttcagagagaggacggctgttaaacaagttggctgacttaattgaaagagatcatctgctcctggcgacaatggaggcaatgaatggtggaaaactattttccaatgcatatctgatggattt

SEQ ID NO: 9849 - DNA, 411 bp, Bos taurus
  unsure (334): unsure at all n locations; Clone ID: 42-LIB34-037-Q1-E1-C10
cggacgcgtgggctcagtgccacggatgcgttctgggccaagtacacagcttgtgagtcagcgagaaatcctcgagaaaagctcaatgaatgtctggaaggaaactgcgctgaaggtgtggggatgaactaccgagggaacgtgagcgtcacccggtcaggcatcgagtgccagctgtggagaagtcgctacccacataagccagaaatcaactctaccacccacccgggggctgacctgcgggagaatttttgccgcaacccggatggcagcattactgggccctggtgctacaccacatccccgactctgcggagagaagagtgcagcgtcnccgtgtgcggccaggaccgagtcacagtggaggtgatcccccggtcaggaggctccactaccagtcagtcgcctcta

SEQ ID NO: 9850 - DNA, 281 bp, Bos taurus
  Clone ID: 42-LIB34-037-Q1-E1-C6
aagacgcgtgggttctcaatcaaccataaagatattggtaccctttatctacgatttggtgcttgggccggtatagtaggaacagctctaagccttctaattcgcgctgaatgaggccaacccggaactctgctcggagacgagcatatcgacaacgtagttgtaacctcacacgcatttgtaataatcttcttcatagtaatacgaagcatagttggaggattcggtaactgacttgttcccctactaattggtgctcctgatagagcatttccccgaat

SEQ ID NO: 9851 - DNA, 426 bp, Bos taurus
  unsure (362),(373),(398): unsure at all n locations; Clone ID: 42-LIB34-038-Q1-E1-C6
gacaatttccagcttttccaatcccctcatgggaaggacctgctgtttaaggactctgctgatgggtttttaaagattccttctaagatggattttgagctgtacttgggatatgaatatgtcactgctcttcagaatctaagagaaagtaaacccccggactcctcaaaggatgagtgcatggtgaagtggtgtgcaattggtcaccaggagaggacaaagtgtgatcggtggagtgggttcagcggcggggcaatagagtgtgaaacagcagagaacactgaagagtgcatcgccaagatcatgaaaggagaagctgatgccatgagcttggacggaggctacctctacatagcaggcanatgtggcctgntgcctgtcctggcagagaactacanaactgagggtgaaagttgcaagaacaca

SEQ ID NO: 9852 - DNA, 420 bp, Bos taurus
  Clone ID: 42-LIB34-040-Q1-E1-C6
gatgtcttcacgttctgtcatggcgctgaaggtggcgacggccgcgggcggcgctgtgaaggcagcgctcaggccggccctcctctggcgtccttgggaggttctaggttcccacgaggccccccggaggagcttctcacaacaaacaattcccccgtcggcgaagtatggtgggcggcacacggtgaccatgatcccgggagatggcattgggccagagctcatgctgcacgtcaagtcagtgttcaggcatgcatgtgtgcctgtggactttgaagaggtgcacgtgagctccaccgcggacgacgaggacatccgcaatgccatcatggccatccgtcggaaccgcgtagccctgaagggcaacattgaaacaaaccacaacctgcccccatcccacaaatcgcgaaacaacatcct

SEQ ID NO: 9853 - DNA, 419 bp, Bos taurus
  Clone ID: 42-LIB34-041-Q1-E1-C6
agaagttaccaagctagtgacagatctcacaaaagtccacaaggaatgctgccatggtgacctacttgaatgcgcagatgacagggcagatcttgccaagtacatatgtgataatcaagatacaatctccagtaaactgaaggaatgctgtgataagcctttgttggaaaaatcccactgcattgctgaggtagaaaaagatgccatacctgaaaacctgcccccattaactgctgactttgctgaagataaggatgtttgcaaaaactatcaggaagcaaaagatgccttcctgggctcgtttttgtatgaatattcaagaaggcatcctgaatatgctgtctcagtgctattgagacttgccaaggaatatgaagccacactggaggaatgctgtgccaaagatgatccacatgcat

SEQ ID NO: 9854 - DNA, 196 bp, Bos taurus
  Clone ID: 42-LIB34-042-Q1-E1-C6
ggtcgacccacgcaaccactgaagcggaggcgtggggcttttaggttctgtagctggtcgcaatggcaagcaaaggagggtacatcatgcttgggctcctgttcctgactgtcctctgccaactcggtcacagcctgcaggtgctacagctgtattaaccaacttaactgcacttcaatcgtcgattgctcacata

SEQ ID NO: 9855 - DNA, 421 bp, Bos taurus
  Clone ID: 42-LIB34-043-Q1-E1-C6
agtttcccaggagggtcaagcagaacatcctggccatgggcgagaagactggcatgaccaggaacccacacttctcccatgaaaactggatccctaccttcttcagtacccagtatttctggtttatcctgaaggtccgttggcagagactggaggacatgactgaacaagggggtctggccccaaactgtcctgtagtccgcctgtcaggagagaggtgcagcatctgggacttcatgcaaggcaacagacccttggtgctgaattttggaagttgtacctgaccttcatttattttcaaatttgaccaattcaagagacttattgaagattttggttccgtagcagattttctcatcatttacatcgaagaagcacatgcatcagatggctgggcttttaagaacaatgtggacatcaa

SEQ ID NO: 9856 - DNA, 418 bp, Bos taurus
  Clone ID: 42-LIB34-044-Q1-E1-C6
acgatctggtcgctctggtaccctccgctgcattctaatgccacgacacccagaaccacagtcaaggatctcctttcccatccctggaatctcatcctaaagggctcccgttatggaaatgtttgcacccttgctcctcttctgggcactgccagccccagcccaggtggccgcaggccctagcaaattccttcccatcatcagaggagtaacgtggtttggtcaagtcgtgaagacagcacagcgagtcgttagcaccgtcgaacacagagaagttcttctgaaggccacctgaatggagacacccctcaccgggcctctctgaatccgattcatcagatgtgcaacacgacctttgatcttgttgctgaacttcctgccagaatcagggctatctcctggcctacacgcttgttgg

SEQ ID NO: 9857 - DNA, 329 bp, Bos taurus
  Clone ID: 42-LIB34-046-Q1-E1-C10
agagcggctctggatccactgcccacatcccgctctcgcaggcagacatgagggcagagagaacttccttcctcctggccctggggctcctggtggctgggatccgcagtgtcgactgcctcgcagagaatgtggtggtgaaggaccagcacagaacggtggatggccacacgttagcctccagcaacaccgacttcgccttcagcctctacaagcagttggctttgaagaaccccaagaggaatgtcatcttatccccgctgactgtctccagacccttggccgtcctgtcgctgggggcccgtggcgccacgctgacagagatcctg

SEQ ID NO: 9858 - DNA, 401 bp, Bos taurus
  Clone ID: 42-LIB34-046-Q1-E1-C6
gctgggtgctcctcttgagtcagccctatccacggcagagatgttttccgtgagggacctctgcctggtcctgagtttggtgggtgcaattaagacagaagatggtagtgatcctcccagtggtgactttttaactgaaggaggaggggtgcgtggcccaagacttgtggaaagacagcaatctgcctgcaaagagacaggctggcccttctgctctgatgaagactggaatacaaaatgcccttctggctgcaggatgaaagggttgattgatgaagtcgatcaagattttacaagcagaataaataaactaagagattcactagttagttatcagaagaacagtaaggactctagtacattgaccaagaacatgagtggactaatgagaggggattttg

SEQ ID NO: 9859 - DNA, 409 bp, Bos taurus
  Clone ID: 42-LIB34-047-Q1-E1-C6
caaagacctggatcatggtgttttggtggttggctatggctttgaaggaacagattcaaataacaataaattctggattgtcaagaacagttggggtccagaatggggctggaatggctacgtgaaaatggccaaagaccagaacaaccattgtggaattgccacagcagccagctatccaactgtttgagctgatggatggtgatggtagaggacttgaggacagcctatctggaggaattttatcttaaaactgaccaaacccttactgtataagatcatacacttgaatcattgaggatccaagttgtgatttgaatgctgtgacatttttataagggtaaaatgttaccactactttaattactattataaatagctttataatgttgaagactcattgcttaac

SEQ ID NO: 9860 - DNA, 302 bp, Bos taurus
  Clone ID: 42-LIB34-048-Q1-E1-C10
cagcagatcccccaacggcaccatggccgccctgcgcagcactgtcaccctgcttgtgtgaatgggcagcctgctgtccatctccaactggtatcacatctaaagcacctggaacttgccccctgaccctttcacattgcacatcatcgggactcctttccagctggctatttgtcacgttccgaagaccttcaccagcttgacgtttaggtactggtcgatgttgacctggtacatgtgctctcagcgtgcagtggtcgtgcatctgtacaagcacttgacggacgtcctgcttgactaca

SEQ ID NO: 9861 - DNA, 288 bp, Bos taurus
  Clone ID: 42-LIB34-048-Q1-E1-C6
gacgcaagactctagaatgagtcgtattatgggtactaggtgttgtacaaagccggaatcagaaagaatgccctgtactgaagactatctgagcttgatcctgaaccggttgtgcgtgctgcatgagaagacaccagtgagtgaaaaagtcaccaagtgctgcacagagtcattggtgaacagacggccatgtttctctgctctgacacctgatgaaacatatgtacccaaagcctttgatgagaaattgttcagcttccatgcagatatatgcacacttcccgatac

SEQ ID NO: 9862 - DNA, 247 bp, Bos taurus
  Clone ID: 42-LIB34-049-Q1-E1-C10
agggatagttaggtatacatatatctgattcactctaaacagcagaaactattgagacactttaaagcacttatgcgccactttaatcaagaaatataactctaatacaatagtactagttaacatatatggtgagtagtgaaagttgcacagtcgtgtctgactctgtgaccccgtggactatatattccatgaaattctctaggcgataatactagagtggataaccgttcccttcaccagagga

SEQ ID NO: 9863 - DNA, 437 bp, Bos taurus
  Clone ID: 42-LIB34-049-Q1-E1-C6
aaatcaagatacaatctccagtaaactgaaggaatgctgtgataagcctttgttggaaaaatcccactgcattgctgaggtagaaaaagatgccatacctgaaaacctgcccccattaactgctgactttgctgaagataaggatgtttgcaaaaactatcaggaagcaaaagatgccttcctgggctcgtttttgtatgaatattcaagaaggcatcctgaatatgctgtctcagtgctattgagacttgccaaggaatatgaagccacactggaggaatgctgtgccaaagatgatccacatgcatgctattccacagtgtttgacaaacttaagcatcttgtggatgagcctcagaatttaatcaaacaaaactgtgaccaattcgaaaaacttggagagtatggattccaaaatgcgctcataattcgttaca

SEQ ID NO: 9864 - DNA, 429 bp, Bos taurus
  unsure (418): unsure at all n locations; Clone ID: 42-LIB34-050-Q1-E1-C6
caaggagctgcctgacgactgggacaagcagcctgtcaaagtgctggttgggaagaactttgaagaggttgcttttgatgagaaaaagaacgtctttgtagagttctatgccccgtggtgcggtcactgcaagcagctggcccccatctgggataagctgggagagacgtacaaggaccacgagaacatagtcatcgccaagatggactccacggccaacgaggtggaggcggtgaaagtgcacagcttccccacgctcaagttcttccccgccagcgccgacaggacggtcatcgactacaatggggagcggacactggatggttttaagaagttcctggagagtggtggccaggatggggccggagatgatgacgatctagaagatcttgaagaagcagaagagcctgatctggangaagatgatga

SEQ ID NO: 9865 - DNA, 242 bp, Bos taurus
  Clone ID: 42-LIB34-052-Q1-E1-C10
aaaaggtcattcagtggtgcactcaccacaaggatgatcctcctcctcctgaggatgatgagaacaaagaaaaacgaacagatgatatacctgtttgggatcaagaattcctgaaagttgaccaagggacactctttgaacttatattggcagcaaactatttagacatcaaaggtttgcttgatgttacctgcaagactgttgctaatatgatcaagggcactctttgaacttatattggc

SEQ ID NO: 9866 - DNA, 234 bp, Bos taurus
  Clone ID: 42-LIB34-054-Q1-E1-C6
ggcagcgccggcgtgacccacccgccatgctccccccagcgctcgtcttgctgttggggtttctctgccacgttgctatcgcaggacgaacctgccccaagccagatgagctaccgttttccacggtggttccactgaaacggacctatgagcccggggagcagatagtcttctcctgccagccgggctacgtgtcccggggagggatccggcggtttacatgcccgctcacag

SEQ ID NO: 9867 - DNA, 352 bp, Bos taurus
  Clone ID: 42-LIB34-055-Q1-E1-C6
ctcccacctccgcgatccacttctgggccgtcggagccggagttctcggagccggagttctcggagccagcatcgaccccacacctacacagccgcaggatggagcgcccgcagcccgacagcagcatgccccaggatttgtcagaggccctgaaggaggccaccaaggaggtgcacacccaggcggagaatgcagagttcatgaagaactttcagaagggtgagctgacccaagaaggttttaagctggtgatggcgtctttgtaccacatctatgtggccctggaggaggagatcgaacgcaacaaggagaaccccgtctacactcccctctacttcccagaggagctgc

SEQ ID NO: 9868 - DNA, 342 bp, Bos taurus
  Clone ID: 42-LIB34-056-Q1-E1-C10
attaagtctaaaacagtttacacctatattacacaattcaacaatttttactacagttaaagacatactaccaatatagtaattattaaaggaatagacataatttactataaaatttgccaaaatatggtaaaaaaaaacattggaaaagtcaatcttgactatggcttgtaacacaaatgctactaacaaaatagtgaaagaaatattactgtttttttttttaatccctgagaggtactagagatagaaagggggataatgttggttcactgatatctgagaacagaggtttcatactgagagagggatttcttaagtctcactatggatcggatatcc

SEQ ID NO: 9869 - DNA, 221 bp, Bos taurus
  Clone ID: 42-LIB34-057-Q1-E1-C6
acaaaagtccacaaggaatgctgccatggtgacctacttgaatgcgcagatgacagggcagatcttgccaagtacatatgtgataatcaagatacaatctccagtaaactgaaggaatgctgtgataagcctttgttggaaaaatcccactgcattgctgaggtagaaaaagatgccatacctgaaaacctgcccccattaactgctgactttgctgaaga

SEQ ID NO: 9870 - DNA, 224 bp, Bos taurus
  Clone ID: 42-LIB34-058-Q1-E1-C6
cacgcaaagactacgacactacgcctcctgtcgtgcgctggctcaacgagcagagatactatggaggtggttatggctccacgcaggccactttcatggtgttccaagccttggcccaataccagaaggatgttcctgatcacaaggagctgaacctggatgtgtccatccaactgcccagccgcaactctgcggtcaggcatcgtatcctctgggaatctgcc

SEQ ID NO: 9871 - DNA, 207 bp, Bos taurus
  unsure (177): unsure at all n locations; Clone ID: 42-LIB34-059-Q1-E1-C6
cggacgcgtgggcactgagaggcaggcagagaacatcacacacagctgaaaggaaactcagaggagggaatcgccaagaaaagtggccatggagctaatcccaaacttttccgtggaaacctgggttctcctggctatcagcctggtgctcctctatctatatggaacttattcacnatggactggtttaagaagctggggggttct

SEQ ID NO: 9872 - DNA, 364 bp, Bos taurus
  Clone ID: 42-LIB34-064-Q1-E1-C6
aagaatggctgccttctctccacagttaccttcgccattcactccaggattggggctgaaccctagagaacagctaagtcctggagatgcttgtggttgcttttacttagacccgtggtggtctgagagctggctgccctctgtcagttcagaaggggtgtggggccagcccgccaagctcctctgcccatggattctccaggaaaggtggattccttactgacggaactacaagggaagccccaaaaagttaccctgaaagtcgctcagcgagctctttgcgactccatggactgcagcccgccaagttcttctgttcatggaaacctccaggcaagaatactagagaagatggcgaaccgcg

SEQ ID NO: 9873 - DNA, 215 bp, Bos taurus
  Clone ID: 42-LIB34-065-Q1-E1-C6
atggatttgagactcgcggggcgccgggcgctcgtcacgggggcgggcaaaggcatcggtcgcagtattgtcaaggcgctacacgcggctggcgcccgagtggtggccgtgagccggacccaggccgacctggacagcctggtccgcgagcccttcctggaggtcaccaaggaggcatatgacatgtctttcaatgtgaaccttcgggcggtcat

SEQ ID NO: 9874 - DNA, 261 bp, Bos taurus
  Clone ID: 42-LIB34-066-Q1-E1-C6
cggacgcgtgggttggagccaaagttaccacggacccacttgccaaggacattacgatgagctgaagtcattaccggtactccaagcaatcgtgtgcaaaaggatggcctgatccttaccaaccgggggctaggaaccagctttgactttgctctgaatatcttcaatgtgctggatgacagcgaggtggacgaccatatgatggccccgctggttcgtaatgattagtgtggagatgcttgatcatgggtcaaagagaca

SEQ ID NO: 9875 - DNA, 205 bp, Bos taurus
  Clone ID: 42-LIB34-067-Q1-E1-C10
ggctgaagctagttaacatcagtgtcttggctcccaactggctcccaattcctggtgaaactcctaaagggagactgttaaatcatgaaattaatcaccatccttttcctttgttccaggctgctaccaagtttaacccaagagtcttctcaagaaatcgactgcaacaaccaggatgtatttaaagctgtggacgctgctctga

SEQ ID NO: 9876 - DNA, 234 bp, Bos taurus
  Clone ID: 42-LIB34-067-Q1-E1-C6
accttgactcgcgcggtgggccgcgccgctgcccgctgctctcgtagcccccagcagcccggggagcgcaccgccgccgccgccaacgccatgtctcggtccccgcgggccgcctctggctccccggcccggcccgctaccgtgctgggcaccatggagatggggcgccgcatggactcgcccgccagcgccgcggccgtgcgcgccttcctggagcgcggccacgctgagctg

SEQ ID NO: 9877 - DNA, 240 bp, Bos taurus
  unsure (190): unsure at all n locations; Clone ID: 42-LIB34-069-Q1-E1-C10
ggagttgctcagtttagcataaattataagaatgaatccaatcctgaggcttggcaaatcaatgtgtccttgaatattcgcccatcagcgggcaccggtgttatgttggccttggtttccgataacacagtgccctttgccttgtccttggtggattccgccactgaaaagcttcaggatatcctggtantcctgttgaaagtatgggtaataggtcccggatagaggccaaataagtcc

SEQ ID NO: 9878 - DNA, 211 bp, Bos taurus
  Clone ID: 42-LIB34-069-Q1-E1-C6
acaaaactttggcacaatgaagtgggtgacttttatttctcttctccttctcttcagctctgcttattccaggggtgtgtttcgtcgagatacacacaagagtgagattgctcatcggtttaaagatttgggagaagaacattttaaaggcctggtactgattgccttttctcagtatctccagcagtgtccatttgatgagcatgtaaaa

SEQ ID NO: 9879 - DNA, 161 bp, Bos taurus
  Clone ID: 42-LIB34-070-Q1-E1-C6
cccacccactaataaaaattgtaaacaatgcattcatcgaccttccagccccatcaaacatttcatcatgatgaaatttcggttccctcctgggaatctgcctaaccacaatctcaagccatccacatacatacaatcgcaacacacatctctctgtacca

SEQ ID NO: 9880 - DNA, 362 bp, Bos taurus
  Clone ID: 42-LIB34-071-Q1-E1-C10
acacaaaactttggcacaatgaagtgggtgacctttatgtctcttctccttctcttcagctctgcgtataccaggggtgtgtttcgtctagatacacacaagagtgagattgctcatcggtttaaagatttgggagaagaacattttataggcctgctactgattgccgtttctcagtatctccagcagtgtccacttgatgagcatgtagaattagtgaacgaactaactgagtttgcaaaaacatgtgttgctgatgagtcccatgccggctgtgaaaagtcacttcacactctcgttggagatgcattgtgtaaagttgcatcgcttcgtgaaacctatggtgacatggctgactgctg

SEQ ID NO: 9881 - DNA, 391 bp, Bos taurus
  Clone ID: 42-LIB34-071-Q1-E1-C6
attgataagcacacagtctaccatcccttatgtattaagaatacagttggaggactggaatggcagaaccagcactgcagattatgcttcattcaaggtgacaggtgaaaatgacaaataccgcctgacatatgcttacttcattggtggagatgctggagatgcatttgatggctacgattttggcgatgattctagtgacaagtttttcacatcccataatggcatgcagttcagtacttgggacagtgacaatgataagtatgatggcaactgtgctgaacaggatggatctggatggtggatgaacaaatgtcacgctggccacctcaatggagtttattatcaaggtggcacttactcaaaaacatctactcctaatggttatgat

SEQ ID NO: 9882 - DNA, 433 bp, Bos taurus
  Clone ID: 42-LIB34-075-Q1-E1-C6
aagtccaaatgtgcttaacatggaatttagacctgctgatgaagaagcctttgaagataattctgaggagtacataacaagagatctggaaggatctgatattgatactagacgcagggctgcttgtgatttagatcgacgattatgcaagttttttgacggacccgtgacaagaatcttctctggttatgttaattccatgttgcaggaatatgccacaaatccatctgtcaactgaaaacacaatgatgcagccatttacctgatgacatctttggcatctaaagcccaaacacacacgcaggggattacacaatcaaatgagcttgtacacctcactgaattcttcgtgaatcacattctcactgatttacaatcagccaatgtaaatgagtttcctgttcttaaagctgatggcatcaagtaacatatg

SEQ ID NO: 9883 - DNA, 353 bp, Bos taurus
  Clone ID: 42-LIB34-076-Q1-E1-C10
agtgagtcgtattatccgctgctcagactccgctctcgcacgcagccatgaggacagagagaacttccttcctcctggctctggggctcttgttgtctgggttctgggctacggtccactgcctcccatataatgtgggcccagaagaacagcacatagggacgtctgtggatggccactcattagcctccatcaacattgagttcgccttcagcctctacaatcagttggctttgaatgaccccattaagaatgtcatcttctcccctctgatcatctccataaccttggccttcctgtctctgggggctcattactatagtgtgacagagatcctgtatggtctcaagttc

SEQ ID NO: 9884 - DNA, 400 bp, Bos taurus
  Clone ID: 42-LIB34-076-Q1-E1-C6
ggtaggctggacagtgaaatattatgaatttgaagagaaggtcatcaacctgatcaagaacctagtagatgtccttaaggacttccattccaaatacattgtcggtgctactgattttgcttcccaactctcaagtcagattgaaccattgatacagaaaagtttgcaggagtatcttagcatccttgccaacgcagagggaagggggaaagagaagattacagagctttctaccagtgctcaggaagtaattaaaagctgggctgttgcagtgaaggaaataatttctgattaccaccagcagttcacatataaactacaggagttttcagaccagctctctgattactgtaaaaaattcatctctgagtctaaaagattgattgacctgtcaattcaa

SEQ ID NO: 9885 - DNA, 459 bp, Bos taurus
  unsure (386): unsure at all n locations; Clone ID: 42-LIB34-078-Q1-E1-C6
caactccctatagtagtgtcgtattatggcattaaacattcttgctattatttatcatggatttcctacatctctgaaattctgatattcaaaaccaaatgacaaagttgttaaatattgtactgtattaaacaacttggtctggtttatatcattttaagttgttttggaactgtaaaagtaaaaaagtgaagctccatcttgtgaatgtcattctttctaaaggaagtgtatctagtctgtggtttgaactacagtatcagacatacccagtctgtccactctggcagtggtcttgagtcacttcataaaacgtggagatacaccgcccagtccctgtgtggtgttcttctgggaggcttttttaatgccagggctacttctcncctaccttggtggtatcggcgcattgtaaattacattaaaacacacaactcactgtgattgatggagtgatat

SEQ ID NO: 9886 - DNA, 406 bp, Bos taurus
  Clone ID: 42-LIB34-079-Q1-E1-C10
ctacttgaatgcgcagatgacagggcagatcttgccaagtacatatgtgataatcaagatacaatctccagtaaactgaaggaatgctgtgataagcctttgttggaaaaatcccactgcattgctgaggtagaaaaagatgccatacctgaaaacctgcccccattaactgctgactttgctgaagataaggatgtttgcaaaaactatcaggaagcaaaagatgccttcctgggctcgtttttgtatgaatattcaagaaggcatcctgaatatgctgtctcagtgctattgagacttgccaaggaatatgaagccacactggaggaatgctgtgccaaagatgatccacatgcatgctattccacagtgtttgacaaacttaagcatcttgtggatgagcctc

SEQ ID NO: 9887 - DNA, 318 bp, Bos taurus
  Clone ID: 42-LIB34-082-Q1-E1-C10
gggtcgcgtcatctcgagaggccactctgacatgatatattccaactcaaatgatacatacatatacttccactcacgcggaaactatgagcctgcgcgaatgggaccggggggtgcctgggctgctacagtgatcactggtgccatacaatctattcagcgattcacaaaacctctgtttacgggtatgaccagtggccagggtcaggaggtaccgatggccaagcaagctgccaacggatgaggtcggagctggatagaacaaaccacttcagacttgctggcttactctacaagttctgggctggctctctcact

SEQ ID NO: 9888 - DNA, 425 bp, Bos taurus
  Clone ID: 42-LIB34-082-Q1-E1-C6
aaaagctgtgatcccaaaggccctctcatgatgtacatttccaaaatggtgccgacctctgacaaaggtcggttctatgctttcggccgggtcttctcagggctggtgtctactggcctgaaggtccgcatcatgggacccaactatactcctgggaagaaggaggacctgtacctgaagccgatccagaggacaatcctgatgatgggccgttacgtggagcccatcgaggatgtgccttgtggcaacattgtgggcctggtgggcgtggaccagttcctggtgaagactggcaccatcaccacctttgagcatgcccacaacatgcgggtgatgaagttcagtgtgagccctgttgtcagggttgctgtggaggccaagaacccggccgacctgcccaagctggtggaaggtctgaagcggct

SEQ ID NO: 9889 - DNA, 404 bp, Bos taurus
  Clone ID: 42-LIB34-083-Q1-E1-C10
agcggacgcgtgggtttttttttttttttttttatatcacaatcaatagatttaccaacaaccgggagctgcaactgcctctttgaatgggggtggggtgggggagtagggtaagaagaggctgggaaaatgaccccaaagtcaaagagaaacaggaaaaagaggggaggagtggggagacagacaactacgttgtcttccctagatcaattttcttctggatggctcgagctgagtggtagatgagagagtcgatgagtccggccactgtgaacatgcccccgatgatggcgcacacgccggtcaggaagtgtgtgaaggacctgtgcttctctgtcaacttcaccatcatgggcgagagctcgtacagcacgaagacgccgggaagcccctgatcgcccatc

SEQ ID NO: 9890 - DNA, 396 bp, Bos taurus
  Clone ID: 42-LIB34-083-Q1-E1-C6
agaccggggcctccccaagaactcgttcaacatctccaacctgctggtgctgcacctgtcgcacaacaggatcagcagcgtgcccgccatcagcagcaggctggagcacctgtacctcaacaacaacagcatcgagaaaatcaatgggacccaaatttgccccaacaatatagtcgccttccatgacttctcctcggatctggagcacgtgccgcacctccgctacctgcggctggatgggaactacctgaagccgcccatcccgctggacctcatgatgtgcttccgcctgctgcagtccgtggtcatctaggccctcctgtgcccctggagctcctccgggcgcgctgaacgtggaggcccaagccgccggttgccacagcttgtttgctctgt

SEQ ID NO: 9891 - DNA, 397 bp, Bos taurus
  Clone ID: 42-LIB34-085-Q1-E1-C10
agagggactgcaggcctatatccgcaagcatgtccagctgtcccatgcattcgaggcattggtgcgccaggacacccgctttgaaatctgtgcagaagtcattctgggactggtctgtttccggctaaagggttccaacaaactgaacgaagctcttctggaaagcataaacagtgccaaaaaaatccacttggtcccttgttccctgagagaccggttcgtgctgcgcttcgccatctgctcacgcacagtggagctggcccacgtacagctggcctgggagcacatccaggagatggcggccacagtgttaagagcacagggggaggaaaaggcagagatcaaaaattgaaattatctgaagactgggatgagaggaaactgtatcagcccaact

SEQ ID NO: 9892 - DNA, 412 bp, Bos taurus
  unsure (375): unsure at all n locations; Clone ID: 42-LIB34-085-Q1-E1-C6
aggggaaagcatgtggatttatgcctcagcttgagaatggctatagccagccctctgtccctccctatcgacatggagtttcagtggtgttaagttgcagaaatgcatatacaatgattggaaatactacaattacatgtattgatggaatatggactgagcttcctaagtgtgttgcaacaaaccaacttaagaggtgtgaaaaaccacggttttatacaagaagccagttaagttcacatatgtatgaatttaatcacaatgccagagtaagttacaagtgtgctgggaagagtacatacatacagacagtctgcatcgacgggaagtgggaccctgaaccagactgcctaggaaaaaagaagccactgtgcncgcctcctcctcagattcctaacgctcagaacatgct

SEQ ID NO: 9893 - DNA, 411 bp, Bos taurus
  Clone ID: 43-BOVMS1-002-Q1-E1-C4
gagaagtctgcccagccaactggccacccgagtctcctacaatcaagccccatccaactgcttccagagaatattgtgagaaggtaaatcagtagaccgtcccgtgcacacctgcagcttcccacaccagaaaagagccacagtgggaactcacttgtagcttttcaaagattagtatttatagcaggcaaaaaaaaccgaacccaatgatgcttaaattcataaatagtactacgctaaatgttttggttttgtaatgttggccaaagcttttaaaatgttttcagttactaatgtaatgagtccaaggcaaagtgtggatggatggctagtttctacaaagtgtgtgtgtggatgacctgtttcttggatcaggtcttcaatgggaaaaggaaacagatctttttcctc

SEQ ID NO: 9894 - DNA, 374 bp, Bos taurus
  Clone ID: 43-BOVMS1-003-Q1-E1-C12
accctgcaaggcaagtccaaactcctccaaaatggccaccaaaatccaattcacgggccgtcgtttaacaacgtcttgactgggaaaacccgggcgttacccaacttaatcgccttgcagcacatccccctttcgccagctggcgtaatagcgaagaggcccgcaccgatcgcccttcccaacagttgcgcagcctgaatggcgaatgggacgcgccctgtagcggcgcattaagcgcggcgggtgtggtggttacgcgcagcgtgaccgctacacttgccagcgccctagcgcccgctcctttcgctttcttcccttcctttctcgccacgttcgccgggtttccccgttaagctctaaatccgggggctccc

SEQ ID NO: 9895 - DNA, 297 bp, Bos taurus
  unsure (287): unsure at all n locations; Clone ID: 43-BOVMS1-004-Q1-E1-C4
atgcgacgtcatagctcttcaatagtgtcacctaaattcaattcactggccgtcgttttacaacgtcgtgactgggaaaaccctggcgttacccaacttaatcgccttgcagcacatccccctttcgccagctggcgtaatagcgaagaggcccgcaccgatcgcccttcccaacagttgcgcagcctgaatggcgaatgggacgcgccctgtagcggcgcattaagcactgcgggtgtggtggttacgctcagcgtgaccgctacacttgccagcgccctagcgcncgctcccttc

SEQ ID NO: 9896 - DNA, 137 bp, Bos taurus
  Clone ID: 43-BOVMS1-005-Q1-E1-C12
gtcggcccgcccatccgcccaaaatcaaaccgacgagtatgcaatcgctttgtaaccctccaacaatgaatacgtcatcttgtatcaaagcacataaggagtagctacaattcgtaatgacaatcatgagtattctg

SEQ ID NO: 9897 - DNA, 391 bp, Bos taurus
  Clone ID: 43-BOVMS1-005-Q1-E1-C4
taaaacgacaagcagcacagaagaatgcaatggtatgtttccattgtagacagcctggccatgggattgcagattgccctgctgcccttgagaatcaagaaatgggcactggaatatgttacaggtgtggatccacagagcacgaaataaccaagtgcaaggctaaagtatacccagctcttggtgaatttccttttgcaaaatgttttgtttgtggggaaatggggcatctgtccagatcttgtcctgataatcccaaaggactcgatgctgatggtggtggctgcagactgtgtggctctgtggaacatatgaagaaagattgtcacgaaagtcagaactcagatcgagtggtcacagttggtcgctgggcacagggaatgagtgcaga

SEQ ID NO: 9898 - DNA, 431 bp, Bos taurus
  Clone ID: 43-BOVMS1-007-Q1-E1-C12
ggtccggttctaacgggtcgaccgacccgtccgcacaaccatgtctcccatgagcaaacagagctcttcctattcagatagagacactactgaagaagaatccgaatccctggatgacatggatttcctcacaaggcaaaagaaattgcaagccgaagccaaaatggcccttgccatggccaaaccaatggccaaaatgcaagtagaagtggaaaaacagaacaggaaaaagtctcccgtcgctgatctcctgccacacttgcctcatataagtgaatgcttgatgaaaagaagtttaaagcccactgacctgagagacatgactcttgggcagctacaagtgatagtcaatgatctccatttccagatagaaagcttgaatgaagagctgggtcagctgctccttatccgagatgagctgcacacggagc

SEQ ID NO: 9899 - DNA, 427 bp, Bos taurus
  Clone ID: 43-BOVMS1-007-Q1-E1-C4
cagaacaccagcctgatcaacaccaagaagaagctagagacagacatcactcaaatccagggagagatggaggacattatccaggaagctcgcaacgcagaagagaaagccaagaaggccatcactgatgcagccatgatggctgaggagctaaagaaggagcaggacaccagtgcccacctggagcggatgaagaagaacctggagcagacggtgaaggacctgcagcaccgcctggacgaagctgagcagctggccctgaagggcgggaagaagcagatccagaagctggaggccagggtacgtgaactggaaggagaagttgagagtgaacagaaacgcaatgttgaagctgtcaagggtctacgcaaacacgagagaagagtgaaggagctcacttaccagactgaggaggaccgcaagaaca

SEQ ID NO: 9900 - DNA, 461 bp, Bos taurus
  unsure (379): unsure at all n locations; Clone ID: 43-BOVMS1-008-Q1-E1-C4
acggactagacacccctagaatcagctgcatcaggtaacaatactcaggctttctggtgatgacatcaagatggtgttgctcagaagaaccaggattcctgtttgtagtttgtggatcatctcattaataatcctggagtttttagttcctttcctccatgtcggagttgacctgtgaaaatctcttcaatgcctcatgtaaaataatcaccctttttgaaattttttcctgtttattgcagcaacagactttgttgactttttggagaggggagtttgaaagttgtaagatgttatggaatgtcacccatgtcctgttggaaataactatttttggaaagtctcttttaaagctggatacaagttagctttgcggtangggagtgatcatttcctaatcaaaagtcataaagctactctttactgcctttaaaaagttttatagtttgcttttcacattt

SEQ ID NO: 9901 - DNA, 479 bp, Bos taurus
  Clone ID: 43-BOVMS1-009-Q1-E1-C4
tcggctcaatacaggttatgataaacctatttggatactagtaaagaattcttgctgttcagcatttaatatgtgcttataatttgtaccaattgacctttcctgaaatcatgcagtattgagtcatgtcattaaatctgtttccatgccagaatcttaccaatatgtaataaatttagaaagactaggtgccaaaatacccagcacaatacttgtatatttttagtatcatatagaacaaatcccaggaactatgaacactctggaccttatgtggtttattccttgcatcatttcaaacatagaaaataaggcctatgaggtttgtttgctcacaatatgtttacatctcccacattcataccagtatccatcagatttgctccctttttaattaaccaagtcttacagtgattatttaatatctttctataaatctcattttatgttgtagaaggccttcattttgaaaatctaca

SEQ ID NO: 9902 - DNA, 414 bp, Bos taurus
  Clone ID: 43-BOVMS1-012-Q1-E1-C4
gcggcttccagtgcccgagagtattacagggttcgcccgactcacagtttcagaatggcttcggttgttgcctttccttggcgtactcgcactacttggctaccttgcagttcgtccattcctcccgaagaaaaagcaacagaaggatagcttgattaatcttaaaatacaaaaggaaaatcccaaagtggtgaatgaaataaacatcgaagatttgtgccttactaaagcagcttattgtaggtgttggcgttctaagacgtttcctgcctgtgatggttcacataataaacacaatgaattgacaggagataatgtgggtccactaatactgaagaagaaagaagtgtaatagtaatgaattaggatggaattcaattctgtgctgtaaaaagttagaacaatatttttgca

SEQ ID NO: 9903 - DNA, 340 bp, Bos taurus
  Clone ID: 43-BOVMS1-013-Q1-E1-C12
accaacgcgtcggccgaaagggatccgcactcagtcaccctcagattctgtccttgctgcggaggcaggcccgggtttgttgcacgtggacctgcataccccttgcatgtgggagcaggatgatggagtcaggagggacctggctccaggcagctgtggacgagggagcatgcactccagacacttcaactctccagcccactgctgcaaggtctgcgcgtgggactgtggggtcccggtgcggcccacggagttacgagggcaaatatattaattttatctttaaagaatgagtaacaatatcaaaaacacactttttataaaaaagggcggccgctct

SEQ ID NO: 9904 - DNA, 368 bp, Bos taurus
  Clone ID: 43-BOVMS1-013-Q1-E1-C4
tgaacattactattattatcactgatctaatttattggatcatcatgcctacgatgcatattaccccaatcatgctctccaccaatatatgtatcattaaacctaggcgtatccatctgcctgtgagcaagacccgtgattacaggattgctcaccacagcgatctcatcacgtgcccatttcttaccacatggaacacccattccagaaatcgctgtactagtgtttagtgaaactatcaaccattttagtccacctatagccatcgacgtgcagttaccagctaacatcactgccagactcctattagatcacctactcagatgagctaaacttgcactacatcagctctagcactacaacagctc

SEQ ID NO: 9905 - DNA, 314 bp, Bos taurus
  Clone ID: 43-BOVMS1-016-Q1-E1-C12
cggtcggtataccgggtcgagcacgcgtccgcttctaattccagttccaaccagagttccaaccaatgggctccagactctgggttctggccaatgaaaaacctcccttacagtctcctcttctttttccccaagctccgcccaccatcgggagctctggctaatggagctcacctggagctgttgctttttctctactcaaagcaacaaataaaagcaatggtggccttagaaaaaaaaaaaaaaaataaaacatgaaaaaaaagaaaaaatgtagaaaaaataataaacattaaaattaaaaaaaagaaaaa

SEQ ID NO: 9906 - DNA, 317 bp, Bos taurus
  Clone ID: 43-BOVMS1-017-Q1-E1-C4
cacgcgtccgggataacctctagtatcctagctgtgggacttacgcgaatactcagttcttaattcccaactcacggtagtacagcaaggtcgcacggaaatgtacaggatttcagcaactttgaatatgtggagtttgcaataccagatagtatacttgcagaccatctcgtttacacagtaagagatcactgtggtcaccatctggctagtgattcccttgtagatgcacaattggttaacactttcccagaatccgctaaacgtgctgcacttggttacgcaacaaagtgtgggcttccatacatagaagtgct

SEQ ID NO: 9907 - DNA, 416 bp, Bos taurus
  Clone ID: 43-BOVMS1-019-Q1-E1-C12
attttccgacagactatccttttaaaccaccaaagattgctttcacaacaaaaatttaccatccaaacataaacagtaatggaagtatttgtcttgatatcctgaggtcacaatggtcaccagctctgactgtgtcaaaagttttattgtccatatgttctctgctttgtgaccctaatccagatgatcccttagtaccagatattgctcaaatctataaatcagacaaagaaaaatacaacagacacgcaagagaatggactcagaaatatgcaatgtaaaatcaaaaaaaatttcatatataccagagtactgtaaaatctaggtttttttcaacattagcagtaaattgagcactgtttactgtttcattgtaccatgaaatcctgatttttacccattttaaatgtatttct

SEQ ID NO: 9908 - DNA, 424 bp, Bos taurus
  Clone ID: 43-BOVMS1-019-Q1-E1-C4
cccagatccacctggatgatgctctgcggggccaggaggacttgaaggagcagctggccatggtggagcgcagagccaacctgctgcaggctgagatcgaggagctgagggccaccctggagcagacagagaggagcaggaagatcgcagagcaggagctcctggatgccagtgagcgtgtccagctcctgcacacccagaacaccagcctgatcaacaccaagaagaagctagagacagacatcactcaaatccagggagagatggaggacattatccaggaagctcgcaacgcagaagagaaagccaagaaggccatcactgatgcagccatgatggctgaggagctaaagaaggagcaggacaccagtgcccacctggagcggatgaagaagaacctggagcagacggttaaggacctgca

SEQ ID NO: 9909 - DNA, 345 bp, Bos taurus
  Clone ID: 43-BOVMS1-020-Q1-E1-C4
atgcgacgtcatatctcttctatggtgtcacctaaattcaattcactggccgtcgttttacaacgtcgtgactgggaaaaccctggcgttacccaacttaatcgccttgcagcacatccccctttcgccagctggcgtaatagcgaagaggcccgcaccgatcgcccttcccaacagttgcgcagcctgaatggcgaatgggacgcgccctgtagcggcgcattaagcgcggcgggtgtggtggttacgcgcagcgtgaccgctacacttgccagcgccctagcgcccgctcctttcgctttcttcccttcctttctcgcaacgttcgccggctttcccccgtca

SEQ ID NO: 9910 - DNA, 415 bp, Bos taurus
  Clone ID: 43-BOVMS1-021-Q1-E1-C12
atttcattgattttttacctttattatttcctttcttctactttctttggatttattgtgctaatttttactaagtacttgttagttttcttttagcttttcttctctcaaatactaacattggaagccaagcatttctcacttgggacttttatagcagaatcaagcaaattttaatttatttaggtataatctatcagtaaaatgcacaaatctcaagtgctcagtttgctgagttttgattattttatacacccatgtatccatcagcccaagcaaaatatagaacatttccatcacctcagaaaattctctcaagcttctacatcagcatctgaattctaattaggatgttttcagtagtttcttttattgctagatagtattacactgttaagttaataacatgttttgt

SEQ ID NO: 9911 - DNA, 123 bp, Bos taurus
  Clone ID: 43-BOVMS1-023-Q1-E1-C4
gcgtccggtatccgacagtatgcgaaggacatcggcttcattaagttggactaaccaaacttccttagatggctcatccagcacatcaaccttaggcggaaacaatactagctctttgtatat

SEQ ID NO: 9912 - DNA, 449 bp, Bos taurus
  Clone ID: 43-LIB188-001-Q1-E1-C4
acaaaaaccttacataaattaaaaggatgaataaatttacaggtgtgaatgcaaactgtttccaactcaaggcaagtaaccagaacagtgctctggtgggaaatcttcagtaagaaaggaaagcaggtcctacggcttggaccttcccaaccccgtgtaagaccggccaagacagaaatgacaactgtttcaaggactcttgccagcctctagagaaatcctggaataggcagctctgacacattaataccctgcacagactgagagactcagtctcccagattcttatcaagccattggatttctcttccataaacattctcacctcagctcgaggtgagagccgcatataactaggggtttaaatcaaagatatgcacagggtattaaacatataccaaggtaagagttaacttgaatacaaggtcaaaatcagcaacaggttctac

SEQ ID NO: 9913 - DNA, 202 bp, Bos taurus
  Clone ID: 43-LIB188-002-Q1-E1-C4
tggccgcggcatactcgccatgatattcatcggggtattctgcctgataatcactatcactgatttctgacccattggttcctgttccttggcttccgttgtgaatgacaggttctgtgggagcagcacagtatttgggatcatacacttgccgcccaagcccatacacactcattcctttctgggaagcgactttgttggt

SEQ ID NO: 9914 - DNA, 174 bp, Bos taurus
  Clone ID: 43-LIB188-004-Q1-E1-C4
ggatactgagtgtcatggagctccgggaggaaaacggtcctggaaaaactcctccaagatgctggacccccgggttaaactgtcctccaagaagttcaacaacttggtccggtcccgggcaattcccaacaaggaatccatgccggcaacctttgttcaaaagttaaaagggga

SEQ ID NO: 9915 - DNA, 119 bp, Bos taurus
  Clone ID: 43-LIB188-005-Q1-E1-C12
acacgcgcagcaaccactgggctgtcggacacttatgggaaaaaaaaattttggaaaattcccaaaactttcataaggaggaaaccctaaaggagcacctaaggaattatgccaattgg

SEQ ID NO: 9916 - DNA, 417 bp, Bos taurus
  unsure (301): unsure at all n locations; Clone ID: 43-LIB188-005-Q1-E1-C4
tggcggcgggatacctggcccaaatcatacctgtgcctttattgctttgagcatctcatgctattacctggttctttttccagaaacctttgtgttggttacaaattattttccactgtagctgggctatgcaaagagtattctgtctgtcaattccccactccttaataacgatgttgttcaagccaggaatagccctgacaggaagctttgggaaacgcacagaatgaagacctcactttctgttcccagatcctgacttttccaaagtgccttaaaagaaaggagacaagtatcctgngtggtaacctttttgttactttacttttaaaaattaaattctgactttttttttcctttttgttttcctattacattttctttcatgttccattgtaatagtcaaatctgtggttc

SEQ ID NO: 9917 - DNA, 363 bp, Bos taurus
  Clone ID: 43-LIB188-006-Q1-E1-C4
ctcccgaccgacatgggcgcgggctaccagagcacggcggtgagcagggccccgatgaggaaggcaccaaaggtgatgcccagcacggcaggtaggacgaggcctttgtcatgcaggctggtgctgatgatgttcaggcgtgtggagacagtcttgtggacttccagggaccgaatcctgggatgcatggtcacagagcagctgaggatgccagtcgtgggcatgggcaccatgtagccgcggaggaggaagctgaagcgtatgtcaccactagggctcggggacagcaggctcacgcagctgctcttggcttcctggccctggatgagttccacgatttccatgtcgggccccaggttcagt

SEQ ID NO: 9918 - DNA, 378 bp, Bos taurus
  unsure (216),(220): unsure at all n locations; Clone ID: 43-LIB188-007-Q1-E1-C4
gccatgggcgcgggatacttgagcaggacagagtcactcgagcccctccagggagctgtggctaaattcctccccggcaacctgttttccccggcaattgataaacaagcatacccaaaccggtttcaacggttcaagggggaagggaaaaacaagtttccctgcccctcccgggaaccatacttccgttattctggtgccttcaagtgtctgcangacngggctggagacgtggcttttgttaaagacgacagtgtttgagaacttgccagagaaagctgacagggaccagtatgagcttctctgcctgaacaacagtcgggcgccagtggatgcgttcaaggagtgccacctggcccaagtcccttctcatgctgt

SEQ ID NO: 9919 - DNA, 439 bp, Bos taurus
  Clone ID: 43-LIB188-008-Q1-E1-C4
gcggcgggacctatcatgtagcagagtttgagctgcccaaaaccaagaccaactcagctgaaaataacactgctaattcctccatggcctatcctagcatcgttgctatggcatctcacagacaggctaaaatagagagatacaagcagaagaaggaggtggagcataagttgtctgcactgaaatctgctgtggaaagtggtcaagcagatgatgagcatgttcgtgaatattacctccttcaccttcgaaggtggattggtatcagcttagaagagattgagagcattgaccaggagataaagatcttgagagaaaaagactccgcaaaagaggcatcaacttctcagtcatctcgtcaggacaggcctccaatgaaaccgtttgttctcactcgggacatggcccaagccaaagttttaaagaacagctcagcaac

SEQ ID NO: 9920 - DNA, 423 bp, Bos taurus
  Clone ID: 43-LIB188-009-Q1-E1-C12
acaatgactcggagcctcctcggaagaccatgcgcaggggggtgctcatgaccctgctgcagcagtcagccatgaccctgcccctgtggatcgggaagcctggcccccgcccctctgcggggccattccagcttctggggactacgtggccaaacctggagacaaggtggctgcccgggtgaaggccgtggatggggatgagcagtggatcctggccgaggtggtcagttacagccacgccaccaacaagtatgaggtagacgacattgacaaagaaggcaaagagagacacaccctgagccgccgccggatcatcccactaccccagtggaaggccaacccggagacagaccccgaagctttattccagaaggagcagcttgtgctggccctgtatccccagaccacctggttctaacgcgc

SEQ ID NO: 9921 - DNA, 255 bp, Bos taurus
  Clone ID: 43-LIB188-009-Q1-E1-C4
acaaaccaggccgcaatgagcttgatgcataaagccacgtgctcgaagaggatgaggaaggccaggcggatcgccaggaggaaccactgctgctctgagaagttggagtcctgcactcggtcacattctcccagccctcgattttggcaggatcctggaagtctttggtgtagaacacagacaggctgtggttgacatagccggtgaagcagtcgacttcagactgggcccctctccggcaggggccatagcggt

SEQ ID NO: 9922 - DNA, 279 bp, Bos taurus; identical to SEQ ID NO: 4531
  Clone ID: 43-LIB188-010-Q1-E1-C4

SEQ ID NO: 9923 - DNA, 360 bp, Bos taurus
  Clone ID: 43-LIB188-011-Q1-E1-C12
ccatggacgccggatactttgaccagcgaattggagatgaagatataggccgggtggtcatcggtctcttttggaagactgttccagaaacactggaaaaatttgtggccttggctacaggagagaaaggatttggctacaaagacagcaaattccatcgtgtgatcaatgacttcatgatccagagtggagatttcacccgggaagacggcactggaggtaagagcatctacggtgaacgcttccccgatgagaacttcaagcttaaacactatgggcccggctgggtgagcatggccaacgcgggcaaagacaccaacggctcccagttcttcatcacgacagtcaagactgcctggc

SEQ ID NO: 9924 - DNA, 353 bp, Bos taurus
  Clone ID: 43-LIB188-011-Q1-E1-C4
acgagagctggagctgctctatgcccgggcccagctggagctggaagtgagcaaggcccaacagctggctgaggtggaggtgaagaagttcaagcagatgacagaggccctggggcccagcaccatcagagacatggctgtggcagggccggagatgcaggtaaaattgctgcagagcctgggcctaaaatccaccctcatcaccgatggttccacgcccatcaacctcttcaacacagccttgggtttgctggggctcggggctgaggcccagcccccagccaagaagcccaccgggggaaccagcgtccaagagggcttgcttcccatctccactgctgcccccctaaact

SEQ ID NO: 9925 - DNA, 376 bp, Bos taurus
  Clone ID: 43-LIB188-012-Q1-E1-C4
accatctcacaacctgagtggttcaaatgccgccgatggcagtggaggatgaagaagctgggtgctccctctatcacctgtgtgaggagggcctttgccttggaatgtatccgggccatcgcggagaaaaaggcggatgctgtgaccctgcatggtggcatggtgtttgaagctggccgggacccctacaaactgcggccagtagcagcagagatctatgggacgaaagagtctccccaaatccactattatgctgtggccgtcgtgaagaagggcagcaactttcagctgggacagctgcaatgcccgaaatcctgccattagggcctttgcaagtccgctgggtggatcatcactatgggaatccttcgcccgt

SEQ ID NO: 9926 - DNA, 413 bp, Bos taurus
  unsure (282): unsure at all n locations; Clone ID: 43-LIB188-013-Q1-E1-C12
atggccgccggatacaagaatagataagtattttgcacaaaggaaatttgttgatgatccagtagaactgatgcccatagaacgcagtttcttaaggattttgttttgcttctttgagggaggcggccatcgtcattgtcagttcagctgggggttccttccttcatgctgaggacctgtgtctttgaagttgctgacgtcctcggaatcccaggcaggctggtgaatgctcaggggctcccatggaggcatctggtggcctcgggccccctttgcttgtangaggcttagcaagttccttgtcgcttcttcccactgggcatactccctcagctgctccttcaggctctcctcctcatgaagttgtggggactctgccacactcttttttcccattaagtgtccgacagccc

SEQ ID NO: 9927 - DNA, 400 bp, Bos taurus
  unsure (7),(14): unsure at all n locations; Clone ID: 43-LIB188-013-Q1-E1-C4
actgtanatacganggaaagactgagcatgctcacttttttatactgatttttacagtatttgtaagaataaagacgcgttagacccactttgattcctgcgctcgcggccctccgaacccgcacgggagggcgcgcatctggctgacttgcaccccggggccggtcatcccgggttgctttgcttctcaaacaggccgaactccacctgcggacgtgctggttaacttgccgagatccgttcgggtggaaggtgcccgcgccccgggaacgtgttggaaacccgttggagtgcgtcccacttcgagtgggggtctaggggcaaggagaagaaggctcggttacccgaaaaccagcccgactcatcttggctttcatgggatttgctttcactttcctca

SEQ ID NO: 9928 - DNA, 395 bp, Bos taurus
  Clone ID: 43-LIB188-014-Q1-E1-C4
acaagaatagttaagtattttgcacaaaggaaatttgttgatgatccagtagaactgatgcccatagaacgcagtttcttaaggattttgttttgcttctttgagggaggcggccatcgtcattgtcagttcagctgggggttccttccttcatgctgaggacctgtgtctttgaagttgctgacgtcctcggaatcccaggcaggctggtgaatgctcaggggctcccatggaggcatctggtggcctcgggccccctttgcttgtaggaggcttagcaagttccttgtcgcttcttcccactgggcatactccctcagctgctccttcaggctctcctcctcatgaagttgtggggactctgccacactcttttttcccattaagtgtccgac

SEQ ID NO: 9929 - DNA, 430 bp, Bos taurus
  Clone ID: 43-LIB188-015-Q1-E1-C12
ccatggagccggatagacacgaagtctgttataaagtgcaccaggaaaaaatcaaggtcggggtaaattcaacaacaagcctggttaacaagccaaaactccccggaaaactggaaaaccttttgttttcttcttaaaaaaaaaaaaaaaaaaaaattgtagctttgatataacactggggaggggggaactataagcctaaattataaatggcacattactggtcatttggaagctgggggaatggggctgtgctgtgctcagtcatgttcaaccccttgcaaccccatggactgtagcctgccaggctcctctgtccatgggatttcccaggcgagaacactggagtgggttgccatttcctcctccagggtgaatgcggcagtttgttgcattttgactgcttcctcatctggaaggaaggaatgcc

SEQ ID NO: 9930 - DNA, 363 bp, Bos taurus
  Clone ID: 43-LIB188-015-Q1-E1-C4
acttcctggaggagatgcgggccgaggtggacagggtgtgcagacacacatacggggtcggtgagagtttcactgtgcagccgcgagtggagcctacagtgactgtgtatcctgcaaagactcagcccctgcagcaccacaacctcctggtctgctctgtgaacggtttctacccaggccacattgaagtcaggtggttccggaactgccatgaataggaggctggggtgatctccacaggcctgatccagaatggagactggaccttccagaccatggtgatgcttgaaacagttcctcagagtggataggtctacacctgccaagtggatcaccccaaccggacgagccctatcacagtat

SEQ ID NO: 9931 - DNA, 414 bp, Bos taurus
  Clone ID: 43-LIB188-016-Q1-E1-C4
atgccccggacgccatagccgccggatacacagggtaatttggaaactctgagcaagaataagggctttgaaaaataaggctttaaggaagcttgtcattttagggctgaactttaatagaatgtgaaaagtttgaactcttacactttaaacaaacaaaacctagaaattactgattggttcaaaacggttttatggaaaaactaatctgtaacaaaaacttggcattgagtgcgaaggctccaccgtttgagcaaagcaaacaaagggtcctgagggcagacggtggggggccgacgttcacaagagcaggcacttcctcttccgcttcttgacggggggtgggcagagaacagcccggatcgcctcatcaaacactgtcttgaggccccgctgcgtgagcgccgagcactc

SEQ ID NO: 9932 - DNA, 353 bp, Bos taurus
  unsure (255),(318): unsure at all n locations; Clone ID: 43-LIB188-018-Q1-E1-C4
caagcccgggcccaactggaactggaaattaacaagggccaacaactggcttaagttgaagttaaaaaattcaagcagattacaaaaggcctgggggccaacaacaacaaaaacaatgctgttgcaaggcccgaaaatcaagttaaaattccgcaaaaccctggcctaaaatccaacctcatcaacgatggttccacgcccatcaaactcttcaacacagcctttgggtttgctgggggctcgggggctgaaagncaaagccccaaagccaagaagcccaacggggggaaccaagcgtccaagaggggctttgcttcncatctcaaactgctgcccccctaactcttggaaac

SEQ ID NO: 9933 - DNA, 410 bp, Bos taurus
  Clone ID: 43-LIB188-020-Q1-E1-C4
ctcccgaccgtaatggcgccgggatacaatgagaggtgctaagaagcaaattcagagcagcagagttactcagtcatctttaaaaacaaaacacacacacacagcccttgaagggaaggtagatagcatttacaaaaaaaaagtggtaactgacacaagagtcaactctaaagcccaatttccctttgtgtgctgtgcttagtcgctcagtcatgtccgactctttgtgacaccatggactgaagtccactaagctcctctgtccatggggattctccaggcaagaatactggagtgggtaacttttcccttcttcaggggattttcccaacccaggtctcccgcattgcaggtggattctttaccatctgagtcaccaggaagccatggttaacataaaaccccagggt

SEQ ID NO: 9934 - DNA, 300 bp, Bos taurus
  Clone ID: 43-LIB188-021-Q1-E1-C12
ggccgcgggatacactgcgacaaagtctcaaaagcagtaacacttttttttccctgtcattgtgcttacccctagagacatagtagaccagttttagcttacatctgagaaaggaaaacccaaatttgacacaaactaaagtgctaaggacatcgcctcagaatcaattccaaggagtcacatgaaaaaaaaaaaattctcccacataaaaatgtttgccatgagaaaccagaaggcagatcttcacagaagccccaagggctcactcctgcccagtgttaggagacagggttgttgaca

SEQ ID NO: 9935 - DNA, 388 bp, Bos taurus
  Clone ID: 43-LIB188-021-Q1-E1-C4
gacacacaccttagtaaacatgggcttcccatgctgggtgaccatcgcacactggtcacagtccacggtgatggacgatttgtggtaggactctttcgagtgtttgagaacgtaatacaggtcggtcacccctccttcaaacacagtgctaaaataacgagggatgagggtcctgccgatagtgtatcgctttggtccatcttccaaagaaaatgaaagggttaatgtggcatcatcttcaaaaaactcggtggcaaacgcgtcccaccagaggttgtcgctgtcctctgtgcgggactgcagcctcttgttcatctcatagattcggtaccgggaggcgctggagaagggtgatgttacagctcaaatagctctgcagcctgcgttg

SEQ ID NO: 9936 - DNA, 384 bp, Bos taurus
  Clone ID: 43-LIB188-024-Q1-E1-C4
catgatggccggatacccagcacaaattccttgtattcaaaaatgtcacctacatctcaagtgtaagagacatttcgatatgtagaaattgtcatcgcattgcaaagacaatatgtacagtcactggttgtgtagcatctcggcttactgagacacacactatcatctctctcgtcaactgccgtcaaaatcggtttgattggactaaccttcggatttaccggtaacgacatcactcacccggtaatggtcagcaaaacaatcagcatggtcaatgatagcaatattgtcgatgacagatccatcgacactggtaacatcggagccatacgtgcggttacttgccccgaaattgacgttatcattgatcaggaaaatcttgct

SEQ ID NO: 9937 - DNA, 417 bp, Bos taurus
  unsure (377),(400): unsure at all n locations; Clone ID: 43-LIB188-025-Q1-E1-C12
tgggcccgggatacatgtcattattaggaaaattataagtgcatatacatcttttcattgatatgatttcaaagtagaaattgtttctcaaaaggagttgttacttgttttttttttttttttttaaaagcacactgcatacaggaagctgccttctccgggaccattttcacattttgtgggagatgccatttaaacaatacaaaatacagtatttatcacatttaacactgaacccatcactgctcagaggctgagagtccagcgaggttgcaggattacaatctatgggatttttcaacttggcaatgtcagtggtctccttaggggacatgaaggtttttctaagggatatttccaagggatgggaaatttcncagcgaagatgcagagggatcangaccccacagttctcat

SEQ ID NO: 9938 - DNA, 362 bp, Bos taurus
  Clone ID: 43-LIB188-025-Q1-E1-C4
gcccccggaggaaaaaccggccttgaaaaacctcttcaatgatcctggacccccggttaaacctgtcctccatgacttcaaccacttggttctgctcccggtcattctccatcagggaatcaatccggtcaccgttgttccaaaattaaaaggggaacctctggtttaggaactcctcaacctggtggccaaccattcccgatccgcttctgcaaacccgcgcgtaaaacttcatgcaggtctgcttgaggcggggcttacattcctcccaaagggctgtcatggtctcattgcacaccccctgggacgccttcagcttgttttcagaatccctggtgtcattcagggcgtcctctttcttc

SEQ ID NO: 9939 - DNA, 348 bp, Bos taurus
  Clone ID: 43-LIB188-026-Q1-E1-C4
gcaggtccctctggccgggtggagagccaaagagctggaagctccgagacttgttttttccaaatttctcctgcgccttgctgataagcttccagatcaagtcttccttgccatccacacttcgggccacgacagcatgagaagggacctgggccaggtggcactccttgaacgcatccactggcgcccgactgttgttcaggcagagaagctcatactggtccctgtcagccttctctggcaagttctcaaacactgtcgtctctttaacaaaagccacgtctccagccccgtcctgcagacacttgaaggcaccagaataaccgaagtatggtttccgggaggagc

SEQ ID NO: 9940 - DNA, 352 bp, Bos taurus
  unsure (24),(27),(173): unsure at all n locations; Clone ID: 43-LIB188-027-Q1-E1-C4
ctgacaagggcccttttttggcgnganggagaaattgtcatttggaatccttgaacagttgacgtttggcctccaagctgccttgaaaagcagcaggtcagcagctcaacccacaaaaaccaacaccaagtgaagctgaaaaaataaggccaaaatgtgaaaatgaccttcanattaaatatatgaaattggatatattccccaagtcaatctacacaattgcatttccagcatttgtataaggtacggcttgttcttacaataccggtaacaccgggcggggcggcggcccaaagtctcgcttctgtcgaggtgtccctgatgctaagattcgcatctttgacttgggggc

SEQ ID NO: 9941 - DNA, 429 bp, Bos taurus
  Clone ID: 43-LIB188-028-Q1-E1-C12
gcatggccccagccgccataggcccgggatacagcgcagaatctaacttcgaggggatcctcaaaaacccaagagcagagtctttgaacagcaggtccctctggccgggtggagagccaaagagctggaagctccgagacttgttttttccaaatttctcctgcgccttgctgagaagcttccagatcaagtcttccttgccatccacacttcgggccacgacagcatgagaagggacctgggccaggtggcactccttgaacacatccactggcgcccgactgttgttcaggcagagaagctcatactggtccctgtcagccttctctggcaagttctcaacactgtcgtctctttaacaaaagccacgtctccagccccgtcctgcagacacttgaaggcaacagaataaccgaagtatggttcccg

SEQ ID NO: 9942 - DNA, 217 bp, Bos taurus
  Clone ID: 43-LIB188-028-Q1-E1-C4
catgcgcctaccgccatgagcccgggatacctgataacaatggcagctggatccgggaactcaccggtgtggttcaaatgatattgggcttccacgaaggcagtgtagaccattatgctgatcaggtacccataacatgactgtgtgacactgacgacacagagactctgcctcaaaaaatcctaggatgccttgctgtccccagggactgcaagag

SEQ ID NO: 9943 - DNA, 429 bp, Bos taurus
  Clone ID: 43-LIB2809-002-Q1-E1-C12
gggatacctggtgagattgtggaaagcctttcaagcagtgaggaatctattacacgcatcaataagaaaattgagaagtttcagagtgaggaacagcagcaaacagaggatgaactccaggataaaatccacccctttgcccagacacagtctctagtctatcccttccctgggcccatccataacagcctcccacaaaacatccctcctcttactcaaacccctgtggtggtgccgcctttccttcagcctgaagtaatgggagtctccaaagtgaaggaggctatggctcctaagcacaaagaaatgcccttccctaaatatccagttgagccctttactgaaagccagagcctgactctcactgatgttgaaaatctgcaccttcctctgcctctgctccagtcttggatgcaccagcctcaccag

SEQ ID NO: 9944 - DNA, 422 bp, Bos taurus
  unsure (405): unsure at all n locations; Clone ID: 43-LIB2809-002-Q1-E1-C4
actttgcccttccctgtccatcccagacctactcagctcccaccgtgcctaagaaaacgggatggcttgaggactgggtgccagagacccctgggcgggggcgaggaagaggagggagggagaggtgactgggagggagacactgcctgcccccaggtcagctacaatcaggagggcgggcggaggaggcagcaggtccacagaaaggagcagctgccccagggcccctccggtcacttcggccaggcctaccactaacagcccagcagctccactcgcggggtgatacggttgtgccaggccacgggctggatccgcacgaagcgagcctggaacggcgtctcaaatatgttcttcttgtgggaattattgtccatgttaccagggaaaatcttgctttctganggccccgggtccttgta

SEQ ID NO: 9945 - DNA, 448 bp, Bos taurus
  Clone ID: 43-LIB2809-004-Q1-E1-C4
ccatgaccgccggatagcccaccagagaaacagaccactggaaacctcccccttgggatgatgtggaccctccaaaggacacactggtgtcgaacctgagcctgaactttgggccccagcagccagcagcccatgcggtcctgcggctagtgagtgagctgagtggggagatggtgcggaagtgcgacccccacatcgggctgctgcaccggggcactgagaagctaattgaatacaagacctatctgcaggcccttccatactttgaccggctggactatgtatccatgaggtgtaatgaacaggcctactcactggccgtggagaagctgctcaacatccggcctcctcctcgtgcacaatggatccgagtgctatttggagaaatcactcgacttttgaaccacatcatggctgtgaccacacatgccctggacattggggctat

SEQ ID NO: 9946 - DNA, 459 bp, Bos taurus
  Clone ID: 43-LIB2809-005-Q1-E1-C12
tgctcgccgtagccatggccacgcgatacaagctttttattttttttatttttttttttttggcttaaaatgtaatttattgaaaagaagaaagacaaaatctcagttaatgcacacaattatttgatatgatggcacttacaggagaagtgattcaaaggcttttaaaacattttccatacagaaatttaatgaagactttaattccctttgactcagtggcctttataccagcatgatactactggaatttaggtaacaagctgttaggacaatttcacttaaggatgttacactatctaaaatacagtagagaactcaagaagaaagagtgccttcaatttgagattgccctattctaaaacagcagttgaagcctttggatagaatggtttgacatgatagatgaaaagacatgtatagcatggattttcagaaccatcaaagaccataactgtg

SEQ ID NO: 9947 - DNA, 150 bp, Bos taurus
  Clone ID: 43-LIB2809-005-Q1-E1-C4
acacgcatcaataagaaaattgagaagtttcagagtgaggaacagcagcatacagaggatgaactccaggataaaatccacccctttgcccaaacacagtccctagtctatcacttcgctgggctcatccccaacagcctcccacaaaac

SEQ ID NO: 9948 - DNA, 145 bp, Bos taurus
  unsure (118): unsure at all n locations; Clone ID: 43-LIB2809-006-Q1-E1-C4
gctcgcaccgccatgggagcgggatacccggaggtgcccaagtgtgagtgggagtatcctgaaggctgtgaacaagtagtcacaggcaggaaactcttgcagtgcctctcaaggccanaggaggtgaaattggccctggaagtgt

SEQ ID NO: 9949 - DNA, 259 bp, Bos taurus
  Clone ID: 43-LIB2809-008-Q1-E1-C12
atgggcccgggatactttttatagtcggtgtccagcacaaggactttgttctcattcaaggcatcgatcttgaacaccgcagggatcttggttttttctgcaatgatcttcttctgagcacactcaccgttctcccatttctgcagcaggatctccaggtcgccctcaggggtgggcttcagctcctccacatacactctcaggggggcactctgggcgtccagcagggagatgtcgctggccgccatggccaaggagt

SEQ ID NO: 9950 - DNA, 294 bp, Bos taurus
  Clone ID: 43-LIB2809-009-Q1-E1-C4
ctactggaatttaggtaacaagctgttaggacaatttcacttaaggatgttacactatctaaaatacagtagagaactcaagaagaaagagtgccttcaatttgagattgccctattcgaaaacagcagttgaagcctttggatagaatggtttgacatgatagatgaaaagacatgtagagcatggaattttcagaaccatcaaagaccataactgtggagtccctcagaattcacctgactcttcaccacagtggcatagtagtcgtttcactgttctcagagccaatggga

SEQ ID NO: 9951 - DNA, 414 bp, Bos taurus
  Clone ID: 43-LIB2809-011-Q1-E1-C12
ccatagcggcgggatacctggtgagattgtggaaagccgttcacgcagtgtggaatctagtacacgcatcgatgtgaatcttgagaattttcagagtgaggatcagcagcatagcgatgatgaactccaggatgtgatccatccctttgcgcatacacagtcactagtccatgccttccctgggcccatccctaatagcctcccacataacatgtctcctcttacacagacccctgtggtagtgccgcctttccatcagcctgatgtaatgggagtctccagagtgaaggaggctatggatcctacgcacatcgaaatgcgattccctagagttccaattgagccctttactgaatgccagagcctgactcccactgatgttgaaaatctgcaccttccactgcctctgctcca

SEQ ID NO: 9952 - DNA, 378 bp, Bos taurus
  Clone ID: 43-LIB2809-011-Q1-E1-C4
gatcacagcagaaaggcctgaatgggcatatctctctggggatagggcactgctttctggggaacaggcaggactttggactgagaaagggacagcacggactgaggaggaaacatgacagttggaggaagaggctggtgaggctggtgcatccaagactggaacacaggcagaggaaggtgcagattttcaacatcagtgagagtcaggctctggctttcagtaaagggctcaactggatatttatggaagggcatttctttgtgcttaggagccatagcctccttcactttggagactcccattacttcaggctgaaggaaaggcggcaccaccacaggggtttgagtaagacgagggatgttttgtgggaggctg

SEQ ID NO: 9953 - DNA, 301 bp, Bos taurus
  Clone ID: 43-LIB2809-012-Q1-E1-C4
gccatagccgcgggatgaccccagctgggaattgttcccaatagtgctgaggaacgacttcacagtatgatggagggaatccatgcccaacagaaagaacctatgataggagtgaatcaggaagtggcctacttctaccctgagcttttcagacagttctacgatcgggatgccgatcgatcgggtgcctgggattacgttccactaggcacacagtacactgatgctgcatcagtctctgacgtcgcgaagccgcattgggtctgagaacattgaaaagactacgatgccactgtggtga

SEQ ID NO: 9954 - DNA, 419 bp, Bos taurus
  Clone ID: 43-LIB2809-013-Q1-E1-C4
ccatggcggcgggatactgttggcatttctggagctgagttggagaatcttgtgaaccaggctgcattaaaggcagctgttgatggaaaagaaatggttactatgaaggaactagagttttccaaagataaaatcctaatgggccctgagcgtagaagtgtggaaattgataacaaaaacaaaacgatcacagcgtatcatgaatctggtcatgctattattgcatattacactaaagatgcaatgcctatcaacaaaactacaatcatgcctcgagggccaacacttggacacgtgtccctgttgcctgagaatgatcggtggaatgaaactagagctcagctgcttgcccagatggatgtcagcatgggaggaagagtggcagaggagcttatatttggaagtgaccatattacaac

SEQ ID NO: 9955 - DNA, 363 bp, Bos taurus
  Clone ID: 43-LIB2809-015-Q1-E1-C4
cctccctattacaaaggatgaactagaaaaagaagccaaaaaagtggaaggattcgatatggttcagaagccgagttactatgttagactgggatctctgtccaccaagctgcgctcacgggcctaccagcaggccctttgtagggttgaagaagctaagcgaaaaggccaggagaccatttctcagctccattccgccttcaacctgagtgaacttgccaggaagaatgtgcataatgccaaccagaaaattcaggatgctcaggataagctctatctgtcctggctggagtggaagagaagcatcggctatgatgatacagatgaatcgcactgtgctgagcacattgagtcacgtatcac

SEQ ID NO: 9956 - DNA, 392 bp, Bos taurus
  Clone ID: 43-LIB2809-016-Q1-E1-C4
tgggcccgggataccccagatggaaattgttcccaatagtgctgaggaacgacttcacagtatgaaagagggaatccatgcccaacagaaagaacctatgataggagtgaatcaggaactggcctacttctaccctgagcttttcagacaattctaccagctggatgcctatccatctggtgcctggtattacgttccactaggcacacaatagactgatgccccatcattctctgacatccgtaatcccactggctctgagaacagtgaacagactactatgccactgtggtgaagagtcaagtgaattctgagggactccacagttatggtctttgatgggtctgaaaattccatgctcctaatgtcttttcatctatcatgtcaaacca

SEQ ID NO: 9957 - DNA, 433 bp, Bos taurus
  Clone ID: 43-LIB2809-019-Q1-E1-C4
gggctactttgaatgtacatcttatctaaattacccaggaatttgtggccaaaatcagtttaccacagataagctatgatgtgtctggttaattagcatttttatcttgaatgtaaattaatgtcataaaactaacaatacatgttttttattttttaaggaaattgttcccaatagtgttgaggtgagatatatctactaaatttaaaatatattaacatcatccaggatatcttaaaatttaattaaactttttattttttgaattttttagcagaagcacattcaaaaggaagatgtgccctctgagcgttacctgggttatctggtaaaattttattaaaagttaatcaaagaccaatgtatcagggaatgagcaagaatgttttaatgaataaaattacctcccctttttaatatctgctaaacttaa

SEQ ID NO: 9958 - DNA, 429 bp, Bos taurus
  unsure (420): unsure at all n locations; Clone ID: 43-LIB2809-021-Q1-E1-C4
gggatgcccagatggaaattgttcccaatagtgctgaggaacgacttcacagtatgaaagagggaatccatgcccaacagaaagaacctatgataggagtgaatcaggaactggcctacttctaccctgagcttttcagacaattctaccagctggatgcctatccatctggtgcctggtattacgttccactaggcacacaatacactgatgccccatcattctctgacatccctaatcccattggctctgagaacagtgaaaagactactatgccactgtggtgaagagtcaagtgaattctgagggactccacagttatggtctttgatggttctgaaaattccatgctctacatgtcttttcatctatcatgtcaaaccattctatccaaaggcttcaactgctgttttagaatanggcaatctc

SEQ ID NO: 9959 - DNA, 404 bp, Bos taurus
  Clone ID: 43-LIB2809-025-Q1-E1-C12
cccgggtaccgagcacgaattacgtgtattctatagtgtcaccaaaatcgaaggtgtaggaaacataaggttatgtattaattgtagccgcgttctaacgacaatatgtacaagcctaattgtgtagcatctggcttactgaagcagaccctatcatctctctcgtaaactgccgtcagagtcggtttggttggacgaaccttctgagtttctggtaacgccgtcccgcacccggaaatggtcagcgaaccaatcagcagggtcatcgctagccagatcctctacgccggacgcatcgtggccggcatcaccggcgccacaggtgcggttgctggcgcctatatcgccgacatcaccgatggggaagatcgggctcgccacttcgggctcatgagcgcttgttt

SEQ ID NO: 9960 - DNA, 426 bp, Bos taurus
  Clone ID: 43-LIB2809-025-Q1-E1-C4
gacactttgacagttcaacttatctaaattacccaggaatttgtggctaaaatcagtttaccacagataagctatgatgtgtctggttaattagcatttttatcttgaatgtaaattaatgtcataaaactaacaatacatgttttttattttttaaggaaattgttcccaatagtgttgagcagaagcacattcaaaaggaagatgtgccctctgagcgttacctgggttatctggtaaaattttattaaaagttaatcaaagaccaatgtatcagggaatgagcaagaatgttgtattgataaattatctctccttttcaatatctgctaaacttaaagtaagcagtctaacagattctagcagtatactgatcccttctgaaaataaaactgacaactttttttactcccagatatttaattc

SEQ ID NO: 9961 - DNA, 307 bp, Bos taurus
  Clone ID: 43-LIB2809-027-Q1-E1-C4
actcttgactggagaatccctggacagatgagcccggtatgctgcagtccatgggggttgctaaaagtcggacacgactgagcaacttcactttgacttttctctttcatgtactgcagaaggaaatggcaacctactccagtgttcttgcctggagaatcccagggatggcggagcctggtgggctgccatctatggggtcgcaccgagttggacacaactgaagcgacttatcaacggcagcagcaagcttaattgggaaacaaatatttgcaccaacacaagaggtggttgcagaatgcttgag

SEQ ID NO: 9962 - DNA, 411 bp, Bos taurus
  Clone ID: 43-LIB2809-030-Q1-E1-C12
acagcaaaaaggcctgaatgggcatatctctctggggatagggcactgctttctggggaacaggcaggactttggactgagaaagggacagcacggactgaggaggaaacatgacagttggaggaagaggctggtgaggctggtgcatccaagactggagcagaggcagaggaaggtgcagattttcaacatcagtgagagtcaggctctggctttcagtaaagggctcaactggatatttagggaagggcatttctttgtgcttaggagccatagcctccttcactttggagactcccattacttcaggctgaaggaaaggcggcaccaccacaggggtttgagtaagaggagggatgttttgtgggaggctgttagggatgggcccagggaagggatagactagagact

SEQ ID NO: 9963 - DNA, 371 bp, Bos taurus
  unsure (347): unsure at all n locations; Clone ID: 43-LIB2809-030-Q1-E1-C4
cagaaaggcctaaatgggcatatctctctggggatagggcactgctttctggggaacaggcaggactttggactgagaaagggacagcacggactgaggaggaaacatgacagttggaggaagaggctggtgaggctggtgcatccaagactggagcagaggcagaggaaggtgcagattttcaacatcagtgagagtcaggctctggctttcagtaaagggctcaactggatatttagggaagggcatttctttgtgcttaggagccatagcctccttcactttggagactcccattacttcaggctgaaggaaaggcggcaccaccacaggggtttgagtaagangagggatgttttgtgggaagctgt

SEQ ID NO: 9964 - DNA, 221 bp, Bos taurus
  Clone ID: 43-LIB3057-001-Q1-K1-C4
tcgggcttgtgaccagggaaccttctctgtacggcagtgggatctgcgtcttcccggaatgaccaagccccagaagccgggcttctttcaattagtgctgccgtttctggttctctctgagctgcgtaaagctagaagatttttatctagccccaacaaagcggctagtattccctctttttttttttttttttcctgcgagggtgtttttggctgcaatt

SEQ ID NO: 9965 - DNA, 308 bp, Bos taurus
  Clone ID: 43-LIB3057-002-Q1-K1-C12
atattagaacatttaattcctggacccaaacaaactaaaccgtaaccgttgatttcaaaaatcccggcccctctaactaaggatcaatatgcaccctatttccacttaaataaccatctccactgcctactcaactattcaagcaagattgacacttaccttaaactactcaattgcataataatctacaacaactaccacaccaatcacatataatcctaattcctgtcagatactgtaccaaatgatccaatcctcttacaacttcatcgatcattatagattcgaaattcattcttcaatctaat

SEQ ID NO: 9966 - DNA, 385 bp, Bos taurus
  Clone ID: 43-LIB3057-004-Q1-K1-C12
cttgaaatcatcaccaccatggacagcaaaggttcgtcgcacaaagggtcccgcctgctcctgctgctggtggtgtcaaatctactcttgtgccagggtgtggtctccacccccgtctgtcccaatgggcctggcaactgccaggtatcccttcgagacctgtttgaccgggcagtcatggtgtcccactacatccatgacctctcctcggaaatgttcaacgaatttgataaacggtatgcccagggcaaagggttcattaccatggccctcaacagctgccatacctcctaccttcctacccctgaagattaagaacaagcccaacagacccaccatgaagtccttatgagcttgattcttgggttgctgcgctcctggaatg

SEQ ID NO: 9967 - DNA, 446 bp, Bos taurus
  Clone ID: 43-LIB3057-005-Q1-K1-C4
gtacgttctctcctagtcgacattaacttgaagggacggacagttattgtgaagggccccagaggcaccctgcggagggacttcaatcacatcaatgtagaacttagtctccttgggaagaaaaagaagaggctccgtgttgacaaatggtggggaaacagaaaggaactggccactgttcgcacaatctgtagtcacgtacagaacatgatcaagggtgttacactgggtttccgttacaagatgaggtcggtgtatgcccacttccccatcaacgttgttattcaggagaatggttctcttgtggaaatccgaaattttttgggtgaaaaatacatacgcaaggttcgaatgaggccaggggttgcctgttcagtatctcaagcccagaaagatgagttgattcttgaaggaaatgacattgaacttgtgtcaaattcagctgc

SEQ ID NO: 9968 - DNA, 370 bp, Bos taurus
  Clone ID: 43-LIB3057-006-Q1-K1-C12
gcgagcggccgcccttttttttttttttttttttttttttcgggaaacttgaaaggttttatttcttaactacagacagctttaagagtcgggatacctggcgccatcactgcctgggcgaatcctcacccaggctgcgaggcggtaggagggcagaagagaggccttcagggtcaactttccgcggagagaggcccctgcccgctgcgccctcactggcccttcttgtgggcgttcttgatgatggcgtttttgaacagcgtgacaaggggcgtttggctcttctcggaggtcatgaacccgccgtagcgcttgtccttgggcgggctgccccagcggaagtgttccatcttatagggccccgagtcct

SEQ ID NO: 9969 - DNA, 302 bp, Bos taurus
  unsure (246): unsure at all n locations; Clone ID: 43-LIB3057-006-Q1-K1-C4
ccggagtccaagccggttcctcgccgatcttttagtcgtccgcttactctttccttccgggatgacagatgccgccgtgtccttcgccaaggacttcctggcaggtggagtggcagcggccatctccaagaccgcagtcgcgcccatcgagcgggtgaagctgctgctgcaggtgcagcatgccagcaagcaaatcactgcagataagcagtacaagggcatcatagactgcgtggttcgtatccncaaggagcagggagtcctgtccttctggcgtggtaacctggccaatgtgatcagat

SEQ ID NO: 9970 - DNA, 374 bp, Bos taurus
  Clone ID: 43-LIB3057-008-Q1-K1-C4
gtccggccgagttgagaggatcgtatccttcattcttttaccatcaatgacgtgacgctcgtacacggagggcattactactccacaagcagaaaaccaatgctaagaccggttcctccactacaagttagcatctgagttctttgcggatggacttgattctgatgagagcaccttggaacatttcaagaggtggctccatccatataaggtagccatcagtacagatgaagtccagtatctgattcctccagagtcacaggttgagaagccagcgcccagtgactagccaacaacatcagaacaattaattacacacatacatgcccagcatctgtcttgggtcctgagggaaaagcgtaacactcttttgt

SEQ ID NO: 9971 - DNA, 436 bp, Bos taurus
  Clone ID: 43-LIB3057-009-Q1-K1-C4
agcggccgcccttttttttttttttttttttttttttttttcaaacggggcaaaaaattttttttaattagaaaaaacagcaaaatcttataaaaatgttctaccaggtagtcaaaatgcccacttgtctcatttacaataatacaatatgtcacagtttctatgtacaatattataaaaaaggttgcacagtacaagttaaggcgttatttttcacaaggcatcaagcctcgatcctctagtgtagacccggtggggccgggggaagacgacgcttaattattgcaccattttgaaaacaaaactcgtcaaggaggatcgtggtcttctcccaccgggccttcagtctctgctgggggtcgggcatcgtggagggggggcggtgcggggaggagcaccccctcggtggccacgctgtgcccggccccggtccttt

SEQ ID NO: 9972 - DNA, 439 bp, Bos taurus
  unsure (32),(268),(396): unsure at all n locations; Clone ID: 43-LIB3057-013-Q1-K1-C4
cagcaaaggttcgtcgcagaaagggtccccgnctgctcctgctgctggtggtgtcaaaggtactcttgtgccagggtgtggtctccacccccgtctgtcccaatgggcctggcaactgccaggtatcccttcgagacctgtttgaccgggcagtcatggtgtcccactacatccatgacctctcctcggaaatgttcaacgaatttgataaacggtatgcccagggcaaagggttcattaccatggccctcaacagctgccatacctnctcccttcctacccctgaagataaagaacaagcccaacagacccaccatgaagtccttatgagcttgattcttgggttgctgcgctcctggaatgaccctctctatcacctagtcaccgaggtgcggngtatgaaaggagccccagatgctatcctatcgagggccataga

SEQ ID NO: 9973 - DNA, 374 bp, Bos taurus
  Clone ID: 43-LIB3057-014-Q1-K1-C12
cggaaggaccataaccctgaaagtgaacccatgacaccatcgaagaccgtgaaggcgaaaatccagaataaggagggcattccccccaaccagcagaggctcatctttgccggcaagcagctggaaaatggccgcactctttctgattacaacatccagaaagagtcgaccctgcacctggtcctccgtctgaggggtggtatgcagatcttcgtgaagaccctgaccggcaagaccatcaccctggaggtggagcccagtgacaccatcgagaacgtgaaggccaagatccaggataaggaaggcattccccctgaccagcagaggctcatctttgccggcaagcagctggaagatggccgcactctttctga

SEQ ID NO: 9974 - DNA, 430 bp, Bos taurus
  unsure (49): unsure at all n locations; Clone ID: 43-LIB3057-015-Q1-K1-C12
gtaggacagagggtaacatcgatgactcgctcattggtggaaatgcctncgctgaagggcccgagggcgaaggtaccgaaagcacagtaatcactggtgtcgatattgtcatgaaccatcacttgcaggaaaccagcttcacaaaagaagcctacaagaagtacatcaaagattacatgaagtcaatcaaagggaaacttgaagaacagagaccagaaagagtaaaaccttttatgacaggggctgcagaacaaatcaagcacatccttgctaatttcaaaaactatcagttctttattggtgaaaacatgaatccagatggcatggttgctctgctggactaccgtgaggatggtgtaaccccatatatgattttctttaaggatggtttagagatggaaaaatgttaacaaagttggcagttactttg

SEQ ID NO: 9975 - DNA, 413 bp, Bos taurus
  Clone ID: 43-LIB3057-015-Q1-K1-C4
gggagactggcaggcaatgtgtggtgcccaaatggcccaagcataaatgcaggcagggtgctgggatactggtaaaaggggctgacagaacgagctctgggttggcagcaaagaacgcccaggacgctgactagacctctcatcctttgcggacctcaatttctccatccactggagacggactgccacgctggtgtgggtggcaccatctatgagtacggggccctcaccatcgatggggaggagtacatcccctttaagcagtacgctggcaaatacatcctcttcgtcaacgtggccagctactgaggcctgactggccagtacgttgaactgaatgcaactgaagaagagcttgaaccatttggtctggtcattctgggctttcactgcaaccaatttggaaaacaaga

SEQ ID NO: 9976 - DNA, 439 bp, Bos taurus
  Clone ID: 43-LIB3057-016-Q1-K1-C4
cagaagaatcgtagaaagcatcatgggaagaaaagaatgaaaggcaagcgatccagaagcagggagagtagtagacctagaggtagaagagataaaaagagatcaagaaccagagatagcagttggtcaagaagaagccaaactctgtctctaagtagtgaaagctctagcagatcaagatctcgtagcagtgatcatggtaaaagaagatcacggagcagaaatcgagatcgttactacttgagaaataattatggcagcaggtataagtgggaatatacttactatagtagaaataaggacagggatggctacgagtcatcttacaggaggaggactctgtccagagctcactattccagacaatcatcaagtccagaacttagaattcagtccttttctgaaagaacaaatgctcggaagaataacaatcacagtg

SEQ ID NO: 9977 - DNA, 416 bp, Bos taurus
  Clone ID: 43-LIB3057-017-Q1-K1-C12
attaccatggccctcaacagctgccatacctcctcccttcctacccctgaagataaagacgaggcctacagacccaccatgaagtccttatgagcttgattcttgggttgctgcgctcctggaatgaccctctctatcacctagtcaccgaggtgcggggtatgaaaggagccccagatgctatcctatcgagggccatagagattgaggaagaaaacaaacgacttctggaaggcatggagatgatatttggccaggttattcctggagccaaagagactgagccctaccctgtgtggtcaggactcccgtccctgcaaactaaggatgaagatgcacgttattctgctttttataacctgctccactgcctgcgcagggattcaagcaagattgacacttaccttaagctcctg

SEQ ID NO: 9978 - DNA, 231 bp, Bos taurus
  Clone ID: 43-LIB3057-017-Q1-K1-C4
ctccgtgtcaacgcttcagcctttaagggagtgtaccaggtctagaagacctgggggcaggaatcatcattgccggctgggacccccaagaagggggacaggtgtactcggtgcctatggggggtatgatggtacgacagccctttgccattggtggctctgggagctcctatatctatggctatgtggatgctacctaccgggaaggcatgaccaaggaagaatgcctgc

SEQ ID NO: 9979 - DNA, 437 bp, Bos taurus
  Clone ID: 43-LIB3057-018-Q1-K1-C12
agggcagctgccgaagatcgagctgcaggtcactttcggctgttgcattcctgctgcgtatcctgggcttccgtgtcactggggcatctcgacccgccggctcccctgccgctggtgatctggcatgggatgggagacagctgttgtaatcccttaagtatgggtgctattaaaaaaatggttgagaagaaaatacctggaattcacgtcttgtctttagagattgggaagactctcagagaggatgtggagaacagcttctttttgaatgtcaactcccaagtaacaacagtgtgtcagattcttgctaaggatcctaaatcgcatcaaggctacaatgctatgggattctcccagggaggccagtttatgcgggcagtggctcagagatgcccattacctaccatggtcaaacttatctcaattggtggacaaca

SEQ ID NO: 9980 - DNA, 336 bp, Bos taurus
  Clone ID: 43-LIB3057-019-Q1-K1-C4
gggggttgctggcggctgggacgcttcctccctgctgtctgggggtgccgccgacatggagcctgagcccgagcccgtcacgctcctggtgaagagccccaaccagcgccaccgagacttggagctgagcgccgaccgcagctggagcgtgggccgcctcaaggcccatctgagccgcgtctaccccgagcgcccgcgtccagaggaccagaggttaatttattccgggaagctgttgttggatcaccagtgtctcagggacttgcttccaaagcaggaaaaacggcatgttatgcatctggtgtgcaatgtgaagagtacttcaaaaatgcccga

SEQ ID NO: 9981 - DNA, 242 bp, Bos taurus
  Clone ID: 43-LIB3057-020-Q1-K1-C4
cggacgcgtgggttctagatcgcgagcggccgccctttttttttttttttttttttttttttttggtttatttttgggtttggtttttttttttttttttttttttttttttttatttattttttttttttttttttttatttaaaaaaataaaaactttttatgaaaatgaaatatattacttatggataacctaatccactttttgaacaccaattaaaaaaataaagacccttaaatta

SEQ ID NO: 9982 - DNA, 439 bp, Bos taurus
  Clone ID: 43-LIB3057-021-Q1-K1-C12
tcggcccaacagacccaccatgaagtccttatgagcttgattcttgggttgctgcgctcctggaatgaccctctgtatcacctagtcaccgaggtacggggtatgaaaggagccccagatgctatcctatcgagggccatagagattgaggaagaaaacaaacgacttctggaaggcatggagatgatatttggccaggtaattcctggagccaaagagactgagccctaccctgtgtggtcaggactcccgtccctgcaaactaaggatgaagatgcacgttattccgctttttataacctgctccactgcctgcgcagggattcaagcaagattgacacttaccttaagctcctgaattgcagaatcatctacaacaacaactgctaagcccacattcatcctatccatttctgagatggttcttaatgatccattc

SEQ ID NO: 9983 - DNA, 350 bp, Bos taurus
  Clone ID: 43-LIB3057-021-Q1-K1-C4
gacgatgaagggacacttggacccctgcctcaggtagacggtgttcagacacaacagacagcagaagttatatgagcatttcttctgaagaaccaaagcagaaatttaaaaggaatttctacagttgatggaattccttccatgctgcaaaggagcatcttcccttcctccagttttctaaagatttcttgaccatcattttgaaaagattttattaaaactagctaaagacaacagactggaaagcttttctaataattttcgccagtagagaaaaaaaatgctccttgttcttcagtactttaaagatttcttgaccatcattttgaaaagattttattaaaactagc

SEQ ID NO: 9984 - DNA, 299 bp, Bos taurus
  Clone ID: 43-LIB3057-022-Q1-K1-C12
cctgaagataaagaacaagcccaacagacccaccatgaagtccttatgagcttgattcgtgggttgctgcgctcctggaatgaccctctgtatcacctagtcaccgaggtacggggtatgaaaggagccccagatgctatcctatcgagggccatagagattgaggaagaaaacaaacgacttctggaaggcatggagatgatatttggccaggtaattcctggagccaaagagactgagccctaccctgtgtggtcaggactcccgtccctgcaaacttaagatgaaaatgcacgtta

SEQ ID NO: 9985 - DNA, 319 bp, Bos taurus
  Clone ID: 43-LIB3057-022-Q1-K1-C4
gcgcacgtggctaagccagtattaccataactgccacttcgatgccgaaagggcccaagcggggaccgggagatcccgagtggatcgttgactgatagaccacgagccccacagacaaagtggtgaataaagggaagaaggacaagaagaccaaaaagacgttcttcgaggagctgtcagtagaagacaaacaggctggggaagaagagaaagtgctcaaggagaatgagcatcagcagcaacatcatgcagcagcagcatcagcaaaaaaagaaacgagacaccctaaaagggatgctgaaaaaggatgttgatgatg

SEQ ID NO: 9986 - DNA, 456 bp, Bos taurus
  Clone ID: 43-LIB3057-024-Q1-K1-C4
aaacagacaccaacttttatgaaagtgttagtttgattaagtaaaatggccttaattggggccggtttttttaaaggttttagtcatttaaatggtaactttaatacttacgtctatgtaatgtaaacgtcttcacagtttacacttttcatttgtatcgctgggctggattaagctttgttgtgattgtgaccaatattgatgccacgtgagcactatcttaccacattgccaattagttgtaataaatgttcaacgtacacaactgtagtgtgtttttatctttttccaaaagtctgtcaaactatgaagagctgctaaaggaagaatttttcaaaaaattttcaagtaagatgttgaaaattcacctccatttgaatgtggtggtggttaaaagcacacacaagttaaatggtggaagatttatagagtcttcatgtactttaaacccattta

SEQ ID NO: 9987 - DNA, 320 bp, Bos taurus
  Clone ID: 43-LIB3057-025-Q1-K1-C4
cgacgcgctgcactcacgcgctcggcccctccccaggcgactccttcgacggcccgtctgccgacacctgcctggaccctctataccaggctcacctaggctcccgcagcgctgccgtatcggtccgcctgggcgtgattctgactcagaggcgctcagtcctaatcccacagatggtagcttggccccattggctcctcaaccaagcacatacaccaaatgtctgaacctgcagatcctctcacactgagcatgattaccatgtcatcatcacattatcagtagggttaaactaacctgtcttactacggtctaaaccc

SEQ ID NO: 9988 - DNA, 141 bp, Bos taurus
  Clone ID: 43-LIB3058-001-Q1-K1-C4
atgaaatcaatgaccgatctttgacagttaaaaccatatgacatcagtgatactgaagctatgagtatacagattatgaggacttaagcttcgactactacataattgcaacatgagaatttaagccaggggagctacgac

SEQ ID NO: 9989 - DNA, 435 bp, Bos taurus
  Clone ID: 43-LIB3058-004-Q1-K1-C12
atcctatttattggatcaacaaacctactaggcctattaccccattcattcacaccaacaacacaactatcaataaacctaggcatagccatccccctgtgagcaggagccgtaattacaggattccgcaataaaactaaagcatcacttgcccatttcttaccacaaggaacacccactccactaatcccaatactagtaattattgaaactatcagcctttttattcaacctatagccctcgccgtgcggttaacagctaacatcactgcaggacacctattaattcacctaatcggaggagctacacttgcactaataagcattagcactacaacagctctaattacattcaccattctaatcctactaacaattctagagtttgcagtagctataatccaagcctatgtattcactctcctagtcagccta

SEQ ID NO: 9990 - DNA, 358 bp, Bos taurus
  Clone ID: 43-LIB3058-004-Q1-K1-C4
ctagttctagatcgcgagcggccgcccttttttttttttttttttttttttttttttttttttaagggaatttggaaaatccgctgttccaaactttcacggttcaacatactacttcaacatttaccaaggagtatcacactgttgtgtattgtcaccctgcttattcaacttatattcaaaggacatcatacaacatactggtctggatgaagcacaatctgcaatcatgatcgccaggacaaatatcaatatcctcatatatgcagatgacaccacccttatggcaaaaagttatgaggaactaacatccttttgattaaagtgaatgaatatagtgataaagctgtcttaatac

SEQ ID NO: 9991 - DNA, 347 bp, Bos taurus
  Clone ID: 43-LIB3058-006-Q1-K1-C12
ctcctatgcacacaatgtggccgagcagggcaagtacattgctatcgccagcaccacagtggagaccacagatcccgaagaggatgttgacccggccctggagctggtggaacccattgaccagaagattgtggtcatcagtgacttgtacgagcccatcgatgatggctccgagagccaggtgcactgttcctgctcctacgatgccaacacacactttgagacaacctgcaactacatcaaagacatctacgagcgcatgggaggctccgactttgactatgataacatgaagcgcagacagaatgatgtctgtggagaagctgaccagtgatgcgctgacccct

SEQ ID NO: 9992 - DNA, 222 bp, Bos taurus
  Clone ID: 43-LIB3058-006-Q1-K1-C4
atcttaggagccatcaacttgattacaccaattatcaacatacagccctcctcagtgtctcggtaccaaacccatctgttcggatgatccggattattcaccgcccgactactactactatcgatccctgtattaccagcctgcttcacaagacctataactgacgggtacctaatatctgcctattatcgacccggcatgagcgaggtgaacatattctgc

SEQ ID NO: 9993 - DNA, 428 bp, Bos taurus
  unsure (410): unsure at all n locations; Clone ID: 43-LIB3058-007-Q1-K1-C4
attgggattaggactctgaaagcagctttcaagactctgtccagtgcacaagattctgaggcagccttctcaaaactggaccagaaggatatggtctttcctaataaagtgtgcccaccatcaccagccctcaaaaacaagagaacaagaaaagatgataatgaaagttctgcccccactgagggtgagggtggctctgaactgcagcccaagaccaagcgcatgacaataagcagactggttttggaggaggacagccagagtactgagccgagctcaggcctcgactcttcccaggaggtcacaccggcatcaccatccaagcccactgtcctcaaccaacccctccctggggagaagaatcccaaagtaactaaaggcaagtggaacagctctaatggggttgaagnaaaagagacttgggtgga

SEQ ID NO: 9994 - DNA, 398 bp, Bos taurus
  Clone ID: 43-LIB3058-010-Q1-K1-C12
tcgcacactatgaacaggaaactactttaataagtgaacttttggaactgtacatacacagggctaacaatgttagataatccagattgttatgctctcatgatacacataaaagtttctcaattattggataatctatttcatattatggaagcatatctttaagactcactgatatatattatactgatgcaaatattaagtagggcataaaaataaaatttatcaaagatagatttttttatgtactcatattcagtcctttcatagtctctcattaagcaaagaaaatgacaaaagcaaacagacgaagcgtgcactccctgaactcctgactatacaggcggtagtgcaaccatctctccatccatttcaaactcctttgttccatccggtga

SEQ ID NO: 9995 - DNA, 227 bp, Bos taurus
  Clone ID: 43-LIB3058-010-Q1-K1-C4
cggacgcgtgggcggcagcagctgcagcgcctctcgtcttgtaggctctcctagctatcgccttttcgcttccggaaacatggcctccggtgtggctgtctctgatggggtcatcaaagggtcaaccaccttgaaggtcctaaaggtgtggcacccgaaggagtggaaaaaccccagaaggcggagctctttttgctgagtgaggaccagaagaacatcatcctgga

SEQ ID NO: 9996 - DNA, 408 bp, Bos taurus
  Clone ID: 43-LIB3058-012-Q1-K1-C4
cggacgcgtggggttcagtgattttttaaatgaatatgaaaaaggaagaactcctaatcctgacatagtctgcaacaagcatatcaaattccgttgtttttttaattatgctgtggataaccttggcgcagatgcggtggcgacaggtcactacgcaagaacgtccctggaagatgaagaggtgttccagcagaaacacatcaagaggccggaagggctcttcagaaaccggtttgaagttaggaacggttccccaggaagcactaaggagaaccctcttccccctgggggagttaacgaaagatttcgtaaagaaaatagctgctgagaacagacttcatcatgtgcttcagaagaaggagagcatgggcatctgttttattggtaaaaggaactttgaaaatttca

SEQ ID NO: 9997 - DNA, 426 bp, Bos taurus
  Clone ID: 43-LIB3058-013-Q1-K1-C4
ggagaacacagacgaaacctactgcatcgacaatgaagcgctgtgtgacatctgcttccgcaccctgaaactgaccacccctacctacggggacctcaaccacctggtgtcggccaccatgagcggggtcaccacctgcctgcgcttcccgggccagctcaatgccgacctgcgcaagctggccgtgaacatggtgcccttaccacgcctgcacttcttcatgcccggcttcgacccactgaccagccggggcagccagcactacagggcactgaccgttcctgagctgacccagcagatgttcgatgccaagaacatgatggccgcgtgcgacccacgccacggccgctatctgaccgtggccgccggcttcggggccgcatgtccatgaaggaagtggatgagcagatgctgagcgtgcagagc

SEQ ID NO: 9998 - DNA, 350 bp, Bos taurus
  Clone ID: 43-LIB3058-015-Q1-K1-C12
gtccccttctcctcccgccttcaatttttcccagcatcagggtcttttccaatgagtcaggtcttcacattaggtggtctaagtattggagttgcagcttcagcctcagtccttccaatgaatattcaggagtgatttcctttagatggagagatagtaacttaatctcttagcagggagcaacgatgcatcaagagatgcaaaagattctcaagcgtttctaacccagagagctacgccttcgcagcgacgcggaggtacgcgcaggcccctgcccttccccgacttctcgcccgccccgcgcggaccagggtcccacgccccgaccctctccggccgcgctccgccct

SEQ ID NO: 9999 - DNA, 429 bp, Bos taurus
  Clone ID: 43-LIB3058-016-Q1-K1-C4
gccgcgggcgcgggctgtcgggatggcggggtccggctggggccccccgcgactggacggcttcattctcactgagcgcctgggcagtggcacgtatgccacggtgtacaaggcctacgccaagaaggatactcgggaggtggtagccataaagtgtgtggccaagaagagtctgaacaaggcatccgtggaaaacctcctgacagaaattgagatcctcaagggcattcgacacccccacattgtacagctgaaagacttccagtgggacagtgacaacatctacctcatcatggagttctgcgcaggaggtgacctgtctcgcttcatccacacccgcaggattctgcctgagaaggtggctagggtcttcatgcagcaattggccagcgccctgcagttcttacatgaacggaacatctctcacct

SEQ ID NO: 10000 - DNA, 420 bp, Bos taurus
  unsure (385),(396): unsure at all n locations; Clone ID: 43-LIB3058-018-Q1-K1-C4
aaaagcccatgtttgttgtgtcagagcagaaagtaagtcccacacgtctgctgtggtcacagtgccagggcctcagatttcctccagtatttgcttctgatgagtaacaatggtctgtatgtaaacaaggaagatagaatattgctgattttgctggtatgtttttgtgtaaaagagctgcttcagagtgtggctatatgtgagagatgcccccggcttctccccgaggaccgtgctctgctccccaagttggtatggagcttacacgttacatgtgatttcagttctgtgcattttggggtctgttttggttaacctccaatggttgtcctgttgcccttccgtgtggactcactcctgtctgatggcccctggctgcctgctntgatcacctgngcaggataaccaccatcatctcct

SEQ ID NO: 10001 - DNA, 425 bp, Bos taurus
  Clone ID: 43-LIB3058-019-Q1-K1-C12
gctgagccctccctctaagccacgaggacctctccgccccagggggctgggcagcagagggagaaggaatgtgctgggggttctgcgtctgcccactttcttggatggtctgaaactgaacctggaagccggtctcctccaggtggtgccagagctggtcagaacccgccctcagtgtgggcgtgcctgcctcaggaccgcccccgaggcttccttccaacagctggtgggcctctggggatcctgccctcccccactgcacttggtgcctctgtgttgcagactccctgggtgggggctccggaggcccgtgtttctgtcctactccctgcaacctgacccgctacgggaaagagatctccatggtcaggatccccaacaggggctcggcccggtacctggcaagaaaatacaatcgcaacgag

SEQ ID NO: 10002 - DNA, 320 bp, Bos taurus
  unsure (308): unsure at all n locations; Clone ID: 43-LIB3058-020-Q1-K1-C4
acggcctcctccttttacctgctcagcggacttctggacgctttcgatggacatgctgctcgagtccttaatcaagggacccggtttggggccatgctggacatgctgacagaccggtgctccacgatgtgtctgctggtcaacctggccctgctgtaccctcgcgccacccttctcttccagctcagcatgagcctggatgtggccagccactggctgcacctccacagttctgtggtccgaggcagtgaaagtcacaagatgatcgacctgtctggaaaccccgtgcttcgcatctactacacctncagacctgctct

SEQ ID NO: 10003 - DNA, 232 bp, Bos taurus
  Clone ID: 43-LIB3058-021-Q1-K1-C4
ggcctacctggggctgctggagctgttggccgtccggcagaagcacgaggagttctgtgtcccgatggtcatggtccccgccaccgtcttcaacaacgtgcccggctccgacttcagcatcggggcggatactgccctcaacaccatcaccgatacgtgtgaccgcatcaagcagtcagccagcgggaccaagcggcgcgcgttcatcattgagaccatggggggcttctgt

SEQ ID NO: 10004 - DNA, 414 bp, Bos taurus
  Clone ID: 43-LIB3058-022-Q1-K1-C4
aacttcccaaatcattggattaacatcatgcagtcatccaaaattagggcggactatttggattctcccaatggctagatgagctaatataaatgaccaaagcaggtgtttttttaatgatttccaaattgccaacttcaaggatgattcttttattttctttaaaggtctttcatagttttgcagatactgcgtctgaagggggactggaattgtctccctgtgtctagttaccctgcttttaaaagctgctgcccatcacattcaacagccctcgcagttaagtcttcatttgggactgagtgtggaccaatgagtgtagaggtgcaaataagtgaatccttagaagtctcttcaaagaaaagcagcatgtgttcctttatcttaatcctctgtcttgctggccaaactgtc

SEQ ID NO: 10005 - DNA, 415 bp, Bos taurus
  Clone ID: 43-LIB3058-023-Q1-K1-C4
ggctctccatggcgtactatggatgcttcagagagaggacggctgttaaacaagttggctgacttaattgaaagagatcatctgctcctggcgacaatggaggcaatgaatggtggaaaactattttccaatgcatatctgatggatttaggaggctgcataaaaacactacgctactgtgcaggctgggctgacaagatccagggccgtacaatacccatggatggaaacttttttacatatacaagaagtgagcctgttggtgtgtgtggccaaatcattccttggaatttcccattgctcatgttcctctggaagatagggcctgcccttagctgcggaaacacagtggttgtcaaaccagcagagcaaaacccccttctttgggaaactgctcttcacatgggatctttaa

SEQ ID NO: 10006 - DNA, 425 bp, Bos taurus
  Clone ID: 43-LIB3058-027-Q1-K1-C12
cgcgtccggtttgtttaatgggtattttccctctcaccccgctgcaattccatatatcctttcttccattcaggaaaaaaaagggggaaaaaaggatagtgtagtatttgtccttttaaaacacatttaggttcttctcaaaagaacttaacccctttagctctctctgctcagtaagtagaattagatgcatgttgaccatttctatgattcgtgtaatgacttctccctgtccatttcatgtccttttaattatatactttaaaaaaaaaggcagtgataagttttgtgggttaccccttagcttattcaaatccatttaattaggaaaaaggaatagtttattaagaatgtagcttttcaccttaactttagaagcacactcatagttaatcccaaactgtgattaagctgaccttagattt

SEQ ID NO: 10007 - DNA, 336 bp, Bos taurus
  Clone ID: 43-LIB3058-027-Q1-K1-C4
ggatgttattttggcctttcgtatgtttgtcttttcatgtagaccagatatttgaaagggcagacgatggctaaaaggtgtaacgtgcagcttgtttctacgtggtttgggggagcttttaccttagatgggaaaatggaaccctggattcaccaggccatggtggcacccttctccttcacccttcccttcggttcaatacctgttgtttctcctttcaaatatgtgattgtactaactctttccatatgaaagaattctccttatttaaataaaaaaagtttaaaaaaaagaaaaacataattaaaaatataataaatattaaaattaataaaa

SEQ ID NO: 10008 - DNA, 281 bp, Bos taurus
  unsure (8): unsure at all n locations; Clone ID: 43-LIB3058-028-Q1-K1-C4
acggcctnctccttttacctgctcagcggacttctggacgctttcgatggacatgcggctcgagtccttaatcaagggacccggtttggggccatgctggacatgctgacagaccggtgctccacgatgtgtctgctggtcaacctggccctgctgtaccctcgcgccacccttctcttccagctcagcatgagcctggatgtggccagccactggctgcacctccacagttctgtggtccgaggcagtgaaagtcacaagatgatcgacctgtctggaaa

SEQ ID NO: 10009 - DNA, 437 bp, Bos taurus
  Clone ID: 43-LIB3058-029-Q1-K1-C12
ctcaatttctgtcgaacattcaccaagtagaaaagaaaaaaaaaacccataaaatatagcataaaacagaccttgacaaattaaaaaattgaaatcataaagcttatatgtcctgacaacagtggaatcaaactggaaatctgttaacaaagacaacaggaaactctcaaaatacttggaaacgaagcaacacacttctaaataattatgggtaaacaataagcctcaatgaaaattaaaaagtatatagaactaaataaaaattagaacacaaagtatgtaggaggcagctaaagcagtattgagagggaaatttatagcaccaaatgcttacatttaaaatgaggaaaggtgtaatataatttaaattatttcctccagaaactagaaagcacaataaacccaaagcaagcagaaggaatgaaataataataaat

SEQ ID NO: 10010 - DNA, 380 bp, Bos taurus
  Clone ID: 43-LIB3058-029-Q1-K1-C4
cgcgagcggccgcccttttttttttttttttttttttttttttttttttttttttttgaaaacggtattttctgtttaattcgttttgccaaacaaacacagggaaaactttagtctgactaattgtacagaaaatagaatttgtaaccagtagcaaacataacaggatagacctaagtccctggcaggctggatttccatcaacaggttacctagatccccttgtagatggcctcctgggagggaagtcctaggaagctgaggcacagatttgccagtccccatcagaatcacaggctgcacctgggaaggaaaagcacaaaaaagtagaactgatgttacttggatctcttatcactacacacacaacaattgtcttt

SEQ ID NO: 10011 - DNA, 360 bp, Bos taurus
  unsure (312): unsure at all n locations; Clone ID: 43-LIB3058-032-Q1-K1-C4
gaaaaatatgatggtcatcagcaattcttcgcaattgtacagctgataggaacacgcaggcaagctgaaaattttgcttatagacttgagctaaatggtcataggcggcgattgacttgggaagccactcctcgctctattcatgagggaattgcaacagccattatgaatagtgactgcctagtctttgacaccagcattgcacagctctttgcagaaaatggcaatttaggcatcaatgtaactatttccatgtgttgaaatggcaatcagacattttctggccagtgtttaaaaccattgcattcaatntcacagagaataaggcacctgtctgcctaccaaccaaaaacttgaggt

SEQ ID NO: 10012 - DNA, 413 bp, Bos taurus
  unsure (364): unsure at all n locations; Clone ID: 43-LIB3058-034-Q1-K1-C4
gctgtacaccgggaagaccgcctgtaactacgtcgacgaggtctggccaggcctctaccgcggagaccaggaaatagccaacaaccaccgggagctgcgtcgcctgggcatcacgcacgtcctcaacgcctctcacagccggtggcgagggacgcccgaagcctacgaggggctgggcatccgctacctgggtgtcgaggcccatgactcgccggccttcgacatgagtgtccacttccaggcagccgctgacttcatccaccgggcgctgagccagccaggagggaggatcctggtgcactgcgccgtgggagtgagccgctcggccaccctggtgctggcctacctcatgctgtaccaccgnctcacccttgtggaggccatcaagaaagtcaaggaccaccgaggcatca

SEQ ID NO: 10013 - DNA, 442 bp, Bos taurus
  Clone ID: 43-LIB3058-035-Q1-K1-C4
atagagtcctttagcaaagattggaagatttacttatacaaattatttaaggaaatctgtctcgaattttgagctgaccactagggtaaccaagtggagacatcagtggtcagatataacaaagaacacagactttatataattattccagaaaagtcacaaataaacacaaatgtcagcaaataacaacaacaaaccctggaggtggtaggagtctattactcaaaagtatagcattgtattattttaaatgtcaacatttcaacaaaaaagtataagatcctcaaagaaataagcaactatggccaacacacagggggaaaatcaatttaaaaaaaaaaaaaaaaaaaacagttcctgagaaacagaagattataaattaactaaataaaggcttcaaaatcactaatataataatgctaaaaaaaaaaaactgttaaaa

SEQ ID NO: 10014 - DNA, 426 bp, Bos taurus
  Clone ID: 43-LIB3058-036-Q1-K1-C12
gccgtaagagaagaagagcctgtgacatcatggggttcagagcagggtgttatcccagggctcatgctatcctaattactagcaagccttaaaggtggttcctcctgatcaaattcttctcattgtggaaatttatacctggaagccttcttggaggctactaatgcattacattaattaccgaatcagtggaattcttaagagacaagatagattcatgtacatttgtcacctctctccttccctgcctgccctgctcccccagtcccagcttttcaatataccatcttaaagggttttttaaagatttgacacttgtctagaaaacagagagcctaatttaccaaaatgaaacttgtaaaattttgtgtccttgtatgtaagtttacttttaacggaggaaagattctagataatgacaaatga

SEQ ID NO: 10015 - DNA, 425 bp, Bos taurus
  Clone ID: 43-LIB3058-036-Q1-K1-C4
cgtgaatcttggccactgacatggcaatgcatgtttgaaatcatggactctttcaaaggaaaaatggagaattttgactacagcaacaaggaacacatgacccttctgaagatgatactgatcaaatgctgtgacatctctaacgaggtccgccccatggaggtggcagaaccgtgggtggactgtttgttggaggaatatttcatgcagagtgaccgcgagaagtcagagggcctccccgtggccccattcatggaccgggacaaagtgaccaaagccacagcccagattggtttcatcaagttcgtcctgatcccgatgtttgagacagtgaccaagctcttccccgtggttgaagagctcatgctgcagccattgtgggagttccgagatcgctacgaggagctgaagcagatggacgatgc

SEQ ID NO: 10016 - DNA, 413 bp, Bos taurus
  Clone ID: 43-LIB3058-038-Q1-K1-C4
tcgcgtgagtgggccatggctgacaaccagtttaagtacctgcctaaagccgacagacaggcgctgaatgagcacttccagtccatcctgcagaccctggaggagcaggtatccggtgagcgacagcgcctggtggagacccatgccacccgagtcattgccctgatcaatgaccagcgccgggccgccttggaaggtttcctggcggcgctgcagggggatccgcctcagccagagcgggtcctgctggccctgcggcgctacctgagagctgagcagaaggagcagaggcacacgctgaggcactaccagcacgtggctgccgtggaccccgagaaggcccagcagatgcgcttccaggtgcagacccaccttcaagtaattgaggaaaggatgaatcagagcctggggct

SEQ ID NO: 10017 - DNA, 439 bp, Bos taurus
  Clone ID: 43-LIB3058-039-Q1-K1-C4
tgaagctgaacctccaatacttgggcatccgattgggaaaagctaactaatggaaaaggaccgtgatcctgcaaaagatggaaggcaggaggagaagaggacaacagaggataagatggttggatggcatcactaactcaatggacatgaatctgcgcaaactctggaagacagtgaaggacagggaagcctggcatgctacagtccatgaggtcacaaagagtcagacatgactgagtgactgaacaacaacaatactttatgcacaatttattatatgtcaattatacatccataaaatggtaaaaaatcaagagccaagcaatggttgcagtacttatattttaaataattacaactggataaaagtagaactgccaggataaaagtagatcagatagagagggcctaatattcttcctagtagtggcaccatccc

SEQ ID NO: 10018 - DNA, 176 bp, Bos taurus
  Clone ID: 43-LIB3058-041-Q1-K1-C4
ccggcccgacccactcgttcgagagaatgttggttgtatacccatgtgaaatcaacttcttgaagacctaaaagacttgaggtaccggtccaggttcgatgcacgatactggatgcttggggctagtgcactgggacgacccagagggatggtatggggagggaggagggaggagg

SEQ ID NO: 10019 - DNA, 450 bp, Bos taurus
  unsure (44): unsure at all n locations; Clone ID: 43-LIB3058-043-Q1-K1-C4
gatgaaccaacagaacagcctgtgaggtgtaacaaaatggcctncagcatctttgggacacctgaggaaaatcccccttcctgggccaagtcggcaggtgccaagtctagtgggggcagggaagacgctgagtcatctggaccccagagaaggaattcttctgaagcgaactctggagacttcttagatctgaagggagaaggtgatgttcatgaaaatgtggacacagacttgcaggccagcctggggcagagcgaggagaagcctgtgcccgccgtccctgtgcccagcccagtggcgccggcacctgtgccatcccggagaaacccccctggcggcaagtccagcctcgtcctgggttagctccgtctgccccgaactctgtcgttctgttcctttgttttttccatgcttgtgaactgcacaacttgagcctgactgtacatcttt

SEQ ID NO: 10020 - DNA, 432 bp, Bos taurus
  Clone ID: 43-LIB3058-045-Q1-K1-C12
ggggggaacgtgttctggacaatcaagttccaggagtgatttcagtggcgaattctaccaaagttggctggtgtgaaagcccaggcctgcgggggagcagaggctgctgagggcttcctagtcgcctgtgacttggcagcgctggagtacgccttcccagtgggagaatctgagatagctgtggtgtcacttgacatctcccgagcctcgtgaagtttgttggccaagtgtgcagtgactcaagctaacgagagaccaaatctctgttaggggagcaagaagcagaatgggatgatctgtccttaggtttttgtcagtttgttttgccttactgatttctaagtgcaataagggagtgtcacgtctgggacttcctgatggctgcttccctgtggcccccctggggcaaggcaagggggacaggttcagcgt

SEQ ID NO: 10021 - DNA, 415 bp, Bos taurus
  Clone ID: 43-LIB3058-045-Q1-K1-C4
tcgcggacgcttgggaaaaaaaaaaaaaaatttaaaaaaaaaaaaaaaaaaaaaaaaaaaaggaaaaaaaaaaaaaaaaaaaaaaaaaaaaaaaaaaaaaaaaaaaaaaaaaaaaaaaaaaaaaaaaaaaaaaaaaaaaaaaaaaaaaaaaaaaaaaaggccgcccttttaaaagatcccacttttacaaacccaccattccaactaataaccttttttatagggcccctaaacttaatttcattgcccatgattataaaactcctaatttggaaaaaccttgtgtttcccaacttaaatccctttcaaaaaaatccccttttcacaaattggcttaaaaccaaaaagcccccccccattctccttcccaaacattcgcccaccctaaatgccaaactgacccccccttttacag

SEQ ID NO: 10022 - DNA, 415 bp, Bos taurus
  Clone ID: 43-LIB3058-048-Q1-K1-C4
gttgtcagtactgcagagcttccctcattgcttagttgctaaagaatccacctgcaatgcaggaaaccctggtgcgatgtctgggttgagaagattccctggagaattcattgcagcctgtttgagcatggtctgtgagctaagaatgatttttgaatttattcaaaaatttttgaatttttaaataaattttaaaaaatgctaaaagaaaaagaatatttcatgacacacaaaaaatacatgaaagccaaattttctccttaaagatttgttggaatacatatggataacggtcatttgttatgggtcaactgtggcttcctctgggatataaaggcagggctgaatggtttcaacagtacagctctcaaagctgacaataggtgtctggccctttccagaaagaaaggtagct

SEQ ID NO: 10023 - DNA, 428 bp, Bos taurus
  Clone ID: 43-LIB3058-052-Q1-K1-C12
ctggggaaggctgctgtcgtgtctccaatcccctctcctcccttccgccagctgtctcagcccccatccctatcacctaccacgcccacctccagggacacccagacctgcctcggtggctccgctatacccagcgcagcccctaccagcctggcttcctctatggcactgccaccccagaagatcgtggacaccagatcattgaggtaccagcaggggccccagctggctgtgttgcatgcagcagggacccggagttcactcatttgcatgaatttcgtgcctctaatgtggtgcgctcctcagtctcctctcaccaggcccagctgcaccacgtttctctcccaacccaacctcttagccccctaccccatcctccaggtcacagcgtacaatcgggacagcttcaacactacgcagcagatgct

SEQ ID NO: 10024 - DNA, 197 bp, Bos taurus
  Clone ID: 43-LIB3058-052-Q1-K1-C4
gatttctcaagcttcattaagctagggcccaccaggaggacagctggggcagcggcagggcctcctgcaggctgggggcaccagagactcggggtgggagtaggggggccccccagggcgatgcccaggcgctcaatgattctcactgggcggagaggtggggcctagcttaataaagatttctcaagcttcatggc

SEQ ID NO: 10025 - DNA, 393 bp, Bos taurus
  Clone ID: 43-LIB3058-053-Q1-K1-C12
catcctcaaggagcggcaccacacgaaggtgcagtaccagctcaagtccgagcacatgtcgctggcgcaggtgttcagcaaaatggaacaggtggtgggcgtgttgggcgtcgaggactactcggtcagccagaccaccctggacaacgtgttcgtgaacttcgccaagaagcagagcgacaacctggagcagcaggagacggagccgccctctggcctacagtccccgctgtgccgcctgctcagcctgttccggccgcggcctccccccactgagctgcgggcgctggtggccgacgagcctgaggacctggacacggaggatgagggccttataagcttcgaggaggagcgggcccagctctccttcaacacggacacgctctgctgacc

SEQ ID NO: 10026 - DNA, 325 bp, Bos taurus
  Clone ID: 43-LIB3058-054-Q1-K1-C4
tcgggccttcgagtttccttgagctgctatatgaaaactgagagtctgagacaagcagaggaagtccccaaggcaaggtggccttggccagaggcttattcttctagactgactctgaccagtctgagggtaggtggggctatcctgccaactgggagagtcagcagacagaattcctggcctgctcagatcgcagaggggcctcctgagcgatgcgtcgagtgtctcaggcccactgagctgccacatggtcatgccgtgggcccgtgtgagcttgattctctgtgcttgggggaagtatagtgtaagtgcagaggaaaggggt

SEQ ID NO: 10027 - DNA, 316 bp, Bos taurus
  Clone ID: 43-LIB3058-056-Q1-K1-C4
aaattttgtatatttttcttttatttatttattttttaaaaaagctggaagcggatgcacagggggtgaaactgaaaaaagaaaaaaatttttgttggcttttgtttacctggcgtgtgtggtaatcgactcgctccctctctctgcttgctatccctgacctttctttttgctccttttaaaaaaatattaatttcccccttctgtgcagtggagcatgggggggggggggagggggaagggtttgagaatccacccaagcccggtccctagtccccagatatattgtaattaacccttttaaaacatttacctt

SEQ ID NO: 10028 - DNA, 341 bp, Bos taurus
  Clone ID: 43-LIB3058-057-Q1-K1-C12
cgcgagcggccgccctttttttttttttttgaatgtcatctcaggttttaatagaggctgtcattcactatatacaggattctccgccaaaggtggcctggttggtagcaacccaaacaccaccaaaagccgcgggcagctcaggggccactagtgggaattgtcttggccggctgcacgtcctcgatctcagaagacagccagcggtaggtgcggtgacgccgcagcacctcgatggccttgagttccaggggcgtggcctcaacgcccaggtcttccaagcctggcaggtgaggcaagatcttgtctgtggagtgaaatccgtccactttatccctcgt

SEQ ID NO: 10029 - DNA, 391 bp, Bos taurus
  Clone ID: 43-LIB3058-058-Q1-K1-C4
cttctaggagctttattcatactgattatgttatccaattgtatagattgaatatttgagtggaaggaatttacattctgtttaaatgatgggattccatcgagatatatcactcatgatcatgacctttttggtagtattcttaaaattctacagagactaaatgttagagatgatcctccattttcaattttaactaattctatcccatttctcaaaacccaatccttgtgcatgcttttctcagtcttgtggtgggactggatacaatgactgaccttacccttcacccctcccccaacccttatatgccatttcccatggagttcataaaaatattttttttaaccttacatatcatagtgaatggtttccccagtgtatatgaatg

SEQ ID NO: 10030 - DNA, 284 bp, Bos taurus
  unsure (14),(157): unsure at all n locations; Clone ID: 43-LIB34-001-Q1-E1-C12
cgcttccacgacangcgcgacgccgaggacgccatggatgccatggacggagccgtactggacggccgcgagctgcgggtgcagatggcgcgctacggccgccccccggattcgcaccatagccgccggggccccccgccccgcaggtacgggggcngcggctacggacgtcggagccgcagccctaggcggcgtcgccgcagcagattccggagtcggagccggtccaggtcccggagtcgatctcgctacagccgctccaagtcccggtcccgcactcgctc

SEQ ID NO: 10031 - DNA, 383 bp, Bos taurus
  unsure (336): unsure at all n locations; Clone ID: 43-LIB34-002-Q1-E1-C12
aagagacccagggggccgccaagaattctacacccactgaaacagccaaggaaaaagggggccccagctctctgcctctgggcaaactgttctggaaaaagtcagttaaagaggattcagtccccacaggtgcagaggagaatgtggtgtgtgagtcaccagtagaggctgtaaagtctgaagaagtagagtcagccttacaaacagtggatctcggcgaagaaggagagcgcacacccgatcccgcagaagaagcacccaggagagaagaacgcagagccccgaggccctccctgatggcgctcctcagacagatgtcagtgaaatgggatgganggatcacccactctgaagaaataaatgagaaagactccagctaccaa

SEQ ID NO: 10032 - DNA, 408 bp, Bos taurus
  Clone ID: 43-LIB34-002-Q1-E1-C4
cccgggcggccccacgcgtccactacggcggggcgcaaagatggcggcatcggccagacaaccctaaagcagcggcaatggaacctccctcgtctccggggccggagcggctctttgattcgcaccggctcccgggtgacggcttcctgctcctcgcgctactactctacgctccagtcgggttctgcctcctggtcctgcgcctgtttcttgggatccacgtcttcctggttagctgcgcgctaccatacagtgtctttcgcaggttcgtggtgcggaccatgtgtgcagtgctggggctcgtggcccggcaggaggactctggactccgggatcaccgtgtcagggtcctcatttccaaccacgtgacacctttcgaacacaacatagtcaacttgctcaccagct

SEQ ID NO: 10033 - DNA, 415 bp, Bos taurus
  unsure (337): unsure at all n locations; Clone ID: 43-LIB34-003-Q1-E1-C12
ggccttgtttttttttcttttttttctctttccctggagcctaaggggaacgtgcctgctgcctcctgggtgtgacgccagcggcgtcccccatgggacttgagagttctgatatgccgtgggatgccccactggtcactggcagttgggggccagtggcctcgtcctgggttcgtggtgattgaacggggcctgccgggcaacgaacgaacccccagacggctgcaagcagctccggcccggtcctgacggtcctcgtcatcgcagtcacgtgccttagtaactgtgcccgggaagcatgctgccgcttgctcgctgctgcttctcctcctcctcncgccctcccctgctgccttccactcgtcacagctgatagacaatatccctggagacattagcacacatccccacccgg

SEQ ID NO: 10034 - DNA, 104 bp, Bos taurus
  Clone ID: 43-LIB34-003-Q1-E1-C4
caggttgagaacaaaacatcagaagccagagagctggtcaaagcaatccaaatcagctataaccctgatcaaccatcaaagccaaataacatagagagtgctac

SEQ ID NO: 10035 - DNA, 393 bp, Bos taurus
  unsure (385): unsure at all n locations; Clone ID: 43-LIB34-006-Q1-E1-C12
cgaaatctgtgtgagccaaggtgaggtggtccaggtcctcgccgtcaaccagcagaacatgtgcctggtgtaccagcccgctagcgaccactcccccgccgctgagggctgggtccctggcagcatcctggcgcccctcaccaaagccatggcagccacagaaaatagtgacgggagcatcaaaaaagaaccctactgaaaccctaggtgacaaaaggcatgcctcctgttgctccatttgacccaccacaggatccactggactggacttctatttatattgtattaagttactgatatatatatacacacacacacacacacacacacatatatatattattttttgattgactccaaaaaattaccttagcacaaatgccanacctgcat

SEQ ID NO: 10036 - DNA, 416 bp, Bos taurus
  Clone ID: 43-LIB34-006-Q1-E1-C4
atcgccagtggctccgagctgtctgaaagtgccttcggctattttatcacagcctgtggagttatcattttgaccataatctgttatctgggcctgccacggctggaattctaccgctattaccggcagctcaagctcgaagggcccggggagcacgagaccaagctggacctcattagtaaaggagaggaatcaaaagcaggccaagaggagaccggattctcagcccccagctctcagcccgccaaggaaagccactctgtccgcgctatcctcaaaagtatcttagtcccggctttctccgtctgcttcgtcttcagcatcaccattgggatatttcctgctgtgacagctgatgtcgagtcgaccatcgcgggcaccagcgcctggaaggcctacttcattcgcgtgtcctg

SEQ ID NO: 10037 - DNA, 395 bp, Bos taurus
  unsure (267): unsure at all n locations; Clone ID: 43-LIB34-007-Q1-E1-C4
accccacaaaactttggcacaatgaagtgggtgacttttatttctcttctccttctcttcagctctgcttattccaggggtgtgtttcgtcgagatacacacaagagtgagattgctcatcggtttaaagatttgggagaagaacattttaaaggcctggtactgattgccttttctcagtatctccagcagtgtccatttgatgagcatgtaaaattagtgaacgaactaactgagtttgcaaaaacatgtgttgctgatgagtcncatgccggctgtgaaaagtcacttcacactctctttggagatgaattgtgtaaagttgcatcccttcgtgaaacctatggtgacatggctgactgctgtgagaaacaagagcctgaaagaaatgaatg

SEQ ID NO: 10038 - DNA, 384 bp, Bos taurus
  Clone ID: 43-LIB34-008-Q1-E1-C12
tgctggagatgcatttgatggctacgattttggcgatgattctagtgacaagtttttcacatcccataatggcatgcagttcagtacttgggacagtgacaatgataagtatgatggcaactgtgctgaacaggatggatctggttggtggatgaacaaatgtcacgctggccacctcaatggagtttattatcaaggtggcacttactcaaaaacatctactcctaatggttatgataatggcattatttgggccacatggaaatcccggtggtattccatgaagaaaaccaccatgaagataatcccacttaacagacttgccatcggagaaggacagcagcaccaactggggggagccaaacaggctggagacgtataaaa

SEQ ID NO: 10039 - DNA, 421 bp, Bos taurus
  Clone ID: 43-LIB34-008-Q1-E1-C4
ctccctgacgagggcaagatgcaggacctggaagccaagctgaccccggagacgctgacgaggtggcgaaactccctgcagcccagacgaatacatgaactctacctgccaaaattttccatcaaaagcaactatgaactgaatgacaccctctcccagatgggcattaagaaaatattcaccgacgctgacctgtcaggaatcacagggaccgcggacctggtagtctcccaggtggtccacggtactgcgctggacgtggacgaggagggcacggaaggagctgctgccacgggaatcggcatagaaaaactgtcctttcagaaaaccactgtgcgtttcgacaggcccttcctgattgccatagctctcaaagacacccagagcatcatctttttggggaaagtcacagaccccagtc

SEQ ID NO: 10040 - DNA, 378 bp, Bos taurus
  unsure (337): unsure at all n locations; Clone ID: 43-LIB34-009-Q1-E1-C12
ggcgaaggacgcggtttctggaggcgaagaacgcggttggccaatcgcaagccagaagatgaaggttctgtgggttgccgtggtggtcgcgcttctggcaggatgccaggcggatatggagggagagctggggcccgaggagcccctgactacccagcagccccgggggaaggacagccagccttgggagcaggcgctgggccgcttctgggattacctgcgctgggtgcagaccctgtctgaccaggtgcaggaggagctgctcaacacccaggtcattcaggaactgacggcgctgatggaggagaccatgaaggaggtgaaggcctacaaggangagctggagggacagctaggccccatggcccaggagacaca

SEQ ID NO: 10041 - DNA, 420 bp, Bos taurus
  unsure (264),(329),(335),(353),(390): unsure at all n locations; Clone ID: 43-LIB34-009-Q1-E1-C4
attccaggctcggagccccgggcccgccgacaccatgagttggtcctcgcaccctccgagtgtaatcttctacattctttcattgctttcttcagcatgcctggcatatgttgctacccgagacaactgctgcatcttagatgaaagatttggtagttattgcccaactacctgtggaattgcagatttcctgaataattaccaaaccagtgtagacaaagatctacgaactttggaaggcatcttatatcaggttgagaacanaacatcagaagccagagagctggtcaaagcaatccaaatcagctataaccctgatcaaccatcanagccanataacatagagagtgctnacaagaattccaagagtatgatggaagaaattatganatatgaaacactgataacaacacatgaatc

SEQ ID NO: 10042 - DNA, 446 bp, Bos taurus
  Clone ID: 43-LIB34-010-Q1-E2-C12
aaactttggcacaatgaagtgggtgacttttatttctcttctccttctcttcagctctgcttattccaggggtgtgtttcgtcgagatacacacaagagtgagattgctcatcggtttaaagatttgggagaagaacattttaaaggcctggtactgattgccttttctcagtatctccagcagtgtccatttgatgagcatgtaaaattagtgaacgaactaactgagtttgcaaaaacatgtgttgctgatgagtcccatgccggctgtgaaaagtcacttcacactctctttggagatgaattgtgtaaagttgcatcccttcgtgaaacctatggtgacatggctgactgctgtgagaaacaagagcctgaaagaaatgaatgcttcctgagccacaaagatgatagcccagacctccctaaattgaaaccagaccccaata

SEQ ID NO: 10043 - DNA, 371 bp, Bos taurus
  unsure (312),(330),(337),(343),(348),(363): unsure at all n locations; Clone ID: 43-LIB34-010-Q1-E2-C4
ctcatgggaaggacctgctgtttaaggactctgctgatgggtttttaaagattccttctaagatggattttgagctgtacttgggatatgaatatgtcactgctcttcagaatctaagagaaagtaaacccccggactcctcaaaggatgagtgcatggtgaagtggtgtgcaattggtcaccaggagaggacaaagtgtgatcggtggagtgggttcagcggcggggcaatagagtgtgaaacagcagagaacactgaagagtgcatcgccaagatcatgaaaggagaagctgatgccatgagcttggacngaggctacctctacatancaggcanatgtgngctgntgcctgtcctggcanagaactac

SEQ ID NO: 10044 - DNA, 414 bp, Bos taurus
  unsure (390): unsure at all n locations; Clone ID: 43-LIB34-011-Q1-E1-C12
acgcgtccgaactagttactttactcttactaactatacccattataataataagctttaacacctacaaaccttccaactacccactctacgtaaaaacagctatctcatacgccttcattaccagcataattcccacaataatatttatccactcaggccaagaactaattatttcaaactgacactgactaaccatccaaactcttaaattatccctcagctttaaaatagactatttctcaataatatttatcccagtagcactattcgtcacatgatctattatagaattctcaatatgatatatatactcagaccccaatattaacaaattcttcagatatctactcctagtcctcattactatgctcatccttgtaaccgcanacaacctctttcagctattcattg

SEQ ID NO: 10045 - DNA, 338 bp, Bos taurus
  Clone ID: 43-LIB34-011-Q1-E1-C4
aaggatctgggtgtgttgtgtcctacaggatgtaagttgcaagatactttggtaagacaggagagaacaatccgaaagaagtatagaagatttacgtaatactgtggactctgtttcccggacctcttcttccacctttcaatatataactctgctaaaaaacatgtggaaaggaaggcagaatcaagtacaagataatgaaaatgtagtaaacgagtactcctcacatctggaaaagcaccagttatatatagatgagactgtgaagaataatatcccaactaagcttcgtgtgctccgttcaattctggagaatttgagaagcaaaatacaaaaat

SEQ ID NO: 10046 - DNA, 411 bp, Bos taurus
  Clone ID: 43-LIB34-012-Q1-E1-C4
gccgaccgggccctggcccgcgttccgagcaggagcgccggggccccgaggccttccggggcgcctgccgcctccggctccagcttggggcagagcatctgaggacatggctctcaagaacgttaatgataatgctgaattgaggagaggaaccatcacgtcgatcacactctgtttactgaggtggggaagcgggacttccctggtggctcagtggataagaatccacctgtcaatccaggggacatgaattcaattcttggtctgggaaaattcctcttgccacagagcagctaagccaggttgcaccacaactactgagcccacgtgctgccaactaccgaagcctgagcactctagagcccgtgctccccaacaagagaagccacggcaacgcgaagcctgagcact

SEQ ID NO: 10047 - DNA, 459 bp, Bos taurus
  Clone ID: 43-LIB34-013-Q1-E1-C12
ggtccacgcacgcgtccaagaggtagttatggctccacgcaggccactttcatggtgttccaagccttggcccaataccagaaggatgttcctgatcacaaggagctgaacctggatgtgtccatccaactgcccagccgcaactctgcggtcaggcatcgtatcctctgggaatctgccagcctcctgcgctcagaagagactaaggaaaatgagcgtttcacagtaaaagctgaagggaaaggacaaggcaccttgtcggtagtgaccgtgtaccatgccaagctcaaaggcaaagtctcctgcaaaaagttcgacctccgggtttccatacgcccagcccccgaaacagtcaagaagcctcaggacgccaaatgttccatgatccttgacatctgtaccaagtacctgcgagaacaggatgccactatgtccatcctggatatatccatgatgaca

SEQ ID NO: 10048 - DNA, 382 bp, Bos taurus
  Clone ID: 43-LIB34-013-Q1-E1-C4
agaagatttacgtaatactgtggactctgtttcccggacctcttcttccacctttcaatatataactctgctaaaaaacatgtggaaaggaaggcagaatcaagtacaagataatgaaaatgtagtaaacgagtactcctcacatctggaaaagcaccagttatatatagatgagactgtgaagaataatatcccaactaagcttcgtgtgctccgttcaattctggagaatttgagaagcataatacaaaaattagaatcggatgtctcaactcagatggaatactgccgcaccccgtgtactgttacttgcaatattcctgtggtgtctggcaaagaatgtgaggaaatcatcaagaatggaggtgaaacatctgaaatg

SEQ ID NO: 10049 - DNA, 437 bp, Bos taurus
  Clone ID: 43-LIB34-014-Q1-E1-C4
gggtccacgcacgcgtccgaggacacgtgggctgcgggcgacagagcccgcggtgctggcagcgagcaggcagcaggcgggatcgtaaagccttgtcccggttcccgcgagcagttcaccgcggcgtccggaaggttaagctgaaacggcagctcagcttcggagatgttaccgtccaaattgcatgcgcttttctgcctctgcacctgccttgcactggtttatccttttgactggcaagacctgaatccagttgcctatattgaatcaccagcatgggtcagtaagatacaagctctgatggctgctgcaaacattggtcaatctaaaatccccagaggaaatggatcttattccgtcggttgtacagacttgatgtttgattacactaataagggcaccttcttgcgtttgtattatccatctcaagatgatga

SEQ ID NO: 10050 - DNA, 400 bp, Bos taurus
  Clone ID: 43-LIB34-015-Q1-E1-C12
acattttctctttacacttagcaggagtttcctcaattttaggagccatcaacttcattacaacaattatcaacataaagccccccgcaatgtcacaataccaaacccctctgttcgtatgatccgtaataattaccgccgtactactactactctcgctccctgtattagcagccggcatcacaatgctattaacagaccggaacctaaatacaaccttcttcgacccggcaggaggaggagaccctattctatatcaacacttattctgattctttggacaccccgaggtctatattttaatcttacctgcgtttggaataatctctcatatcgtgacctactactcatgaaaaaaagaaccattcggatatatgggaatagtttgggctataatgtc

SEQ ID NO: 10051 - DNA, 391 bp, Bos taurus
  Clone ID: 43-LIB34-015-Q1-E1-C4
gtgctcaccctcttgggactggggctggcattcttcagggattaccggtcttcttatctagcaagaatgaacgcttcccgagaagtaaaatcggtagaacttcctaactgtaaattaataaaaggaatagaaactggtgctgaagacctggagatacttcctaatggactcgctttcattagttccggattacgatatcctggagtaaaaagctttgaacctgataagcctggaaaaatactgctgatggacctgaacaaagaggatcctacagtgttggaattgaagatgactggaagtaactttgatgcgtcttcatttaaccctcacggcattagcacattcacagatgaagataatactgtgtacctgctggtggtgagccatccag

SEQ ID NO: 10052 - DNA, 396 bp, Bos taurus
  Clone ID: 43-LIB34-017-Q1-E1-C4
tgagttcagtcgtgtggttggtggagaagatgctgaaagaggtcaattcccttggcaggtccttttgcatggtgaaattgctgcattctgtggaggttccatcgttaatgaaaaatgggttgtaactgcagcccactgcatcaagcctggtgttaaaattactgttgttgcaggtgagcataacaccgagaagccagaacctacagagcaaaagcgaaatgtgatccgtgctattccttaccacagctacaacgcatctattaataagtacagccacgacattgccctcctggagctggatgaacccttagagctaaatagctatgtaacccctatttgcattgctgacagggactacacgaacatcttccttaaatttggttatggttatgtgag

SEQ ID NO: 10053 - DNA, 417 bp, Bos taurus
  Clone ID: 43-LIB34-018-Q1-E1-C4
ccaggcgtcaagtacgaacagctctaagccttctaattcgcgctgaattaggccaacccggtactctgctcggagacgaccaaatctacaacgtagttgtaaccgcacacgcatttgtaagaatcttcttcatagtattaccaatcataattggaggattcggtaactgacttgttcccctaataattggtgctcccgatatagcatttccccgaataaataatataagcttctgactcctccctccctcattcctactagtcctcgcatcctctataattgaagctggggcatgaacaggctgaaccgtgtaccctcccttagcaggcaacctaacccatgcaggagcttcagtagatctaaccattttctctttacacttagcaggagtttcctcaattttatgagccaacaact

SEQ ID NO: 10054 - DNA, 332 bp, Bos taurus
  Clone ID: 43-LIB34-019-Q1-E1-C3
gggtcctaccacgcgtccgcaaggctcggagccacgggcccgccgacaccatgagttggtcctcgcaccctccgagtgtaatcttctacattctttcattgctttcttcagcatgcctggcatatgttgcgagccgagacaactgctgcatcttagatgaaagatttggtagttattgcccaactacctgtggaattgcagatttcctgaataattaccaaacgagtgtaaacaaagatctacgaactttggaaggcatcttatatcaggttgagaacaaaacatcagaagccagagagctggtcaaagcaatccaaatcagctataaccct

SEQ ID NO: 10055 - DNA, 413 bp, Bos taurus
  Clone ID: 43-LIB34-020-Q1-E1-C12
gggctcctcgtgccagatccctgtctgatggcttttatgaaaaaatacctcctccccatcctggggatcttcttggcctactactactattctgcgaatgaggaattcagaccagagatgcttcgaggaaagagagtgattgtcacgggggccagcaagggaatcggaagagaaatggcctatcacctggcaaggatgggagcacatgtggtagtgacagcgaggtcagaagaaagtctaaagaaggtggtatcccgctgcctggagctgggggcggcctcagcacactacgtggcgggcaccatggagaacatgaccttcgctgaacaatttgttgccaaagctggagagctcgtggggggacttgacatgctcattctcaaccacatccactacacgcctttgggggtgtt

SEQ ID NO: 10056 - DNA, 401 bp, Bos taurus
  Clone ID: 43-LIB34-020-Q1-E2-C12
gggctcctcgtgccagatccctgtctgatggcttttatgaagaaatacctcctccccatcctggggatcttcttggcctactactactattctgcgaatgaggaattcagaccagagatgcttcgaggaaagagagtgattgtcacgggggccagcaagggaatcggaagagaaatggcctatcacctggcaaggatgggagcacatgtggtagtgacagcgaggtcagaagaaagtctaaagaaagtggtatcccgctgcctgcagctgggggcggcctcagcacactacgtggcgggcaccatggagaacatgaccttcgctgaacaatttgttgccaaagctggagagctcgtggggggacttgacatgctcattctcagacacatccactacacgcc

SEQ ID NO: 10057 - DNA, 375 bp, Bos taurus
  Clone ID: 43-LIB34-021-Q1-E1-C12
ggcgacggctctggatccactgcccacaccccgctctcgcatgcatacatgaggacagagagaacttccttcctcctggctctggggctcctggtgtctgggttctgctccagggtccactgcctcccagataatgtgaccccagaagaacagcacagagggacgtctgtggatggccactcattagcctccagcaacactgacttcgccttcagcctctataagcacttggctttgaaggaccccaataagaatgtcatcttctcccctctgagcatctcgaaagccttggccttcctgtccctgggggctcatgaccacactgtgacagacatcctggaaggtctcatgttcaacctcacagagacccccgag

SEQ ID NO: 10058 - DNA, 235 bp, Bos taurus
  Clone ID: 43-LIB34-021-Q1-E1-C4
ctgtcacatgggtggatatccaggctgttcggtttctgtattcatgtgggtgcatcagcgtcaacgtgatggaatctggtaatcgagttaaccatatagtgcccaactgctatgggtaccaccgactccacgtaatcctgtttctagaactagcaggactcgacctgactgagggactcataaagattctcatggatcgtggatacagatttaccagaattgacgaacgagaaat

SEQ ID NO: 10059 - DNA, 437 bp, Bos taurus
  unsure (362),(400): unsure at all n locations; Clone ID: 43-LIB34-022-Q1-E1-C4
gcagtcactaatggagcttccagagcgataccactatggcatgtacgccaagttcatcaatgactacggcacccattacataacgtctggatcgatgggtggtgtctatgagtatatcctggtgcttaacagagaaaaaatggaaacagctggtgttaccagcgctgaaatccagaaatgctttggagtctctttgggcattgagtatgagtattcagaggcgatacaaattaaaggaagttcatcattaggaccctgtaaaaaatctggagatggcaaactaactgaaaacgagaaggccatgggagtggaagacttcatttctcgggtgcgcggcggcagctctggctggggaagcagcnttgaccaagacagcagcatcgttacgtagcgctcctgngggaagtcattaaagtataatcctgctgttattgatt

SEQ ID NO: 10060 - DNA, 415 bp, Bos taurus
  Clone ID: 43-LIB34-023-Q1-E1-C12
cactaaaactcgggggaaagagtccttgcattgtgtttgctgatgccgacttggacaatgctgttgaatttgcacaccaaggagtattctatcaccagggccagtgttgtatagctgcatcccgtctctttgtagaagaatcaatttacgatgagtttgttcgaaggagtgttgaacgggcgaaaaagtatgttcttggaaatcctctgaccccaggagtcagtcaaggccctcagattgataaagaacaatatgaaaaaatacttgacctcattgaaagtgggaaaaaggagggggccaagctggaatgtggcggaagcccttggggggaaaaaagctactttatccaacccacagttttctctgatgttacggaatatatgcgcattgccaaagaggagaaattttgacctgt

SEQ ID NO: 10061 - DNA, 357 bp, Bos taurus
  Clone ID: 43-LIB34-023-Q1-E1-C4
ataagccaaccgtctttttggagacaaatccattacattcaatgagacctaccaggacatcagtgacgtggtatatggggccaagctccagcccctggacttcaagggaaatgcagagcagtccagattgactatcaaccaatggatatccaataagactgaagggcgtatcactgatgtcattcccccacaagccatcaatgagttcactgtcctggtgctagtcaacaccatttacttcaagggcctgtggaagtcaaagttcagtcccgagaacacaacgaaggaactgttctaccaggctgatggggagtcatgttcagtactcatgatgtaccacgagagcaagttccgcta

SEQ ID NO: 10062 - DNA, 278 bp, Bos taurus
  Clone ID: 43-LIB34-024-Q1-E1-C4
tgagactcgtgggtcgacgcaagcctctaggatcactcattggacgctcgtgcaaggaggccacgctcagcaccaccgcgatgaggccccggaaagcctggatgctcgtcctgctcctggccctggtgcagctgctggccgtggcgagcgccggggccccggacgaagattcttctgacaaagaggatgccatcgaggaggacgaggaggaggacgaggatgacgacgacgacgacgatgacttggaagttaaggaggaaaacggcgtcttgatcctg

SEQ ID NO: 10063 - DNA, 411 bp, Bos taurus
  Clone ID: 43-LIB34-025-Q1-E1-C4
gggggcggccctttttttttttcccggtgaactggtcaaacctttcaatgggcaagaaaccgtgtgttcagtttcctttgcatcattaaatgctatcctgggcattgattactaatttaattacatgaatcatgtgaaattgccctgtgaagtttttgaataatttagacctaagataatacagcctgataaagcagttcaccagtttgtcttaccaaatgcttactgttctataaaatgattctaaaattacttcttcagtagcgttaactggagcacttattttacacacgcttttgttttttaatttgaggtaatggcaccattgacttcccagaatttttgactatgatggctagaaaaatgaaagacaccgacagtgaagaggaaatccgcgaggcgttccgagtc

SEQ ID NO: 10064 - DNA, 418 bp, Bos taurus
  Clone ID: 43-LIB34-026-Q1-E1-C4
cggacacgtgggttcgaagttactgggattttgaatttcctcagccctatttacctaatactgaatttgttggaggactgcactgcaagcctgcaaagcccctacctaaggaattagaagagtttgttcaaagctctggaaaagatggagtcgtggtgtttactctggggtcaatgatcaaaaacctctcagaagaaaagtctaatatgattgcatcagcccttgcccagattccacagaaagttctgtggagatacacaggaaaaaaaccagaaacattaggagccaatacccgactatataaatggattccacagaatgatcttcttggtcatccaaaaaccagagcttttatcactcactgtgggaccaatgggatctatgaagctatttaccatggagtccctatggttggaat

SEQ ID NO: 10065 - DNA, 430 bp, Bos taurus
  Clone ID: 43-LIB34-029-Q1-E1-C4
gccttctcccgcctccgctacctggagtcgctcgacctcagccacaatggcctggccgccctgcccaccgggagcttcaccagctcgcccctgagcgacgtgaacctgagccacaaccggctccgcgaggtctccgtgtccgccttcgccacccacagccagggcagggcgctgcacgtggacctctcccacaacctcctccagcgcctgctgccccattcctcgcgggctggccagccggcgcccaccattcagagcctcaacctggcctggaaccggctccgcgctgtgcccgacctccggggcctgcccctgcgctacctgagcctggatgggaacccgctggcagccatcggccccggcgcctttgaggggctggcgggcctcactcatctgtcgctgggcagcctgcagggtctccccatgctgg

SEQ ID NO: 10066 - DNA, 412 bp, Bos taurus
  Clone ID: 43-LIB34-031-Q1-E1-C12
tgcccagacagaagaagcccagccctcagaaacaaaagaagtggagccagagccaactgaggacaaagatgtagaagctgatgaagaagacagtacgaaaaaagatgcttctgatgatctagatgatttgaatttctttaatcagaagagaaagaagaaaaaatcaatcgagatatttgatattgatgaagctgaagaaggtataaaggaccttaagattgaaagtgatgttcaggaaccagctgaaccagaggaagatcttgacattatgcttggcaataaaaagaagaaaaagaaggttgtcaagttccctgatgaggatgaagtactagagaaagatgaagctttagaagatgaagacagcaaaagagatgatggtatctcattcagtaaccagacaggccctgcttgg

SEQ ID NO: 10067 - DNA, 364 bp, Bos taurus
  Clone ID: 43-LIB34-031-Q1-E1-C4
ttccgggaccacccacgcgtccggatctagatcgcgagcggccgcccttttttttttttttttttttttttttttttttttttatttttcttttttttttttttttttttcttttttttattttctttttttttttttttgagaaaacacaaaagttttatcaaactaacactaagcaaccaattcacccgcatggggcacctgttactttcacaggaaacacacagaactggttattcagcaaactggatgttgatggccaaagatttcctacagatacatctgaatccagcagccattatccccctggtctgtggaagaacttttgccccttttggcatttcaggtacctgggttctgaaag

SEQ ID NO: 10068 - DNA, 409 bp, Bos taurus
  Clone ID: 43-LIB34-032-Q1-E1-C4
gggtgggggaggaataaataaggagtttgagattagcagatacaaatgattatatataaaatcaataaacaatgttgtactgtatagaacaggggactatattcaatatcctattatatactacagtggaaaagaatatatgtgtatatatgcacataactgaattactttgctatacaccaaaaactaacacagcatttgtaatcaactataattcgatttaaaaaaaagtggcgccccgttggcttaccaaccaaagaaacagttatggtctagctcacctttctgggttgtgaattaagaatactttataatttacttcactgtctctttttgccgaaatgaaactcactatttgggaaactaccatttacaaccatttaatactactatcatggagaaagaaatg

SEQ ID NO: 10069 - DNA, 406 bp, Bos taurus
  Clone ID: 43-LIB34-033-Q1-E1-C12
aaacagctggggcaccagctggggtgagaacggttacttccgcatccgcagaggaaccgacgagtgtgcgatcgaaagcatagcgctggcggccaccccgattcctaagttgtagggtgtacctcgcagggtttcacgctgaccaccgccagccaggaagggaagatgccttattcagggactggagacatgtacggtattgctactgcagtttcaaaagattatagatagcttcctgtgaagatctgtgcctttacaattaaaagtgcccttgattttaattttaatacactttccccctgaaaagcagtctgctttttcctcagtactctgttcagtgccgtttttatggaggatggtgaaagaccaagtaatggattttgctaatcattttgtgattcaaacg

SEQ ID NO: 10070 - DNA, 369 bp, Bos taurus
  Clone ID: 43-LIB34-033-Q1-E1-C4
ccagccgcgcggatcgcgcgcccccgccgctctgcccccaaacttcagctgcagctacattcgaagccatctaatttattcctcaaaaaaatcagaaacggagcagcgacacagggaacgagtccgcggaggagtaaaaccacagcagagcaacaagatcctccgagccgcctcccccgcccggagccacaatccggcctcgggagtggaggagccaacaagtgagaaagcgccgcggtcccggggctcagcctgaggaagcgggcgctccggagcccggaaccccccgagtcccctcgagccccccgaacagcgatcgctgcggcagctctgctccggatcgttctgcgcgagcagcgccgggcgctg

SEQ ID NO: 10071 - DNA, 429 bp, Bos taurus
  Clone ID: 43-LIB34-035-Q1-E1-C12
ttcgcgggtctagccacgcgtcccactcaggttgctgaaaagcctgtggaggatgaaacgcataggcagcagagtcaacttacgtggacgtttgcaattgttaaacgggagtccactagtcggcacacctgtggctcctgctgttgagggtccattcgtctgttcggccgaaattgcggtcattgcagagctgatgtcaccactcacgcctgcatctgcaccgtcatctacctcaggtccagctggagcatctcacgacacggatttcagaatcaaagggtcaaccccgacagccctatccttcgctcccgtccaagctccttctgtcatcctgccactgcctgtgcaaatcgtgtaccggctctgtgtggacctccggcgccctcaggagctagtgaacctgttctcggacccttgacaaagggttta

SEQ ID NO: 10072 - DNA, 390 bp, Bos taurus
  unsure (372): unsure at all n locations; Clone ID: 43-LIB34-035-Q1-E1-C4
cccacgcgtccggaggaggacacagctctggagtgcggctccagggagaccatggagcgcccagtgagagtgaaggcgtgggtggaggagaaccggggctccttcctgcccccggtctgcaacaagctcctgcaccagaagcagctcaaaatcatgttcgtggggggtcccaacaccaggaaggactaccacatcgaggagggtgaggaggtattttaccagctggagggggacatgcttctccgagtcctggagcgagggaaacaccgggatgtggtcattcgtcagggagagatcttcctgctgcctgctggggttccccactcgccgcaaaaggtttgccaacacagtggggctggtgattgaaccgangcggctgaaaacagaact

SEQ ID NO: 10073 - DNA, 389 bp, Bos taurus
  unsure (284),(292): unsure at all n locations; Clone ID: 43-LIB34-036-Q1-E1-C4
ccgcgcctcttcccagccttaggcccggcccctttcgcctgtgtgcattagtccgtgcggaaacgctgccaatatgtcggacaagctgccttacaaagtcgctgacatcagcctggccgcttggggacgcaaggccctggacctggcagagaatgagatgccgggcctgatgcacatgcgagaaatgtactcggcctccaagcctctgaagggcgctcgcattgctggctgcctgcacatgaccgtggagaccgccgtcctcattgagaccctcgttgccctgngtgctgangtgcggtggtccagctgcaatatcttctccacccaggaccatgcagcagctgccattgccaaggctggcattccagtgtacgcctggaagggtgaaa

SEQ ID NO: 10074 - DNA, 434 bp, Bos taurus
  Clone ID: 43-LIB34-037-Q1-E1-C5
caccatctctccgcatcctcctttcctcaggcatcaaagcagagaccacgggaacctagttcaccaggctcgaggctggaggccccgccatgacatccctaaggccccttctgatgctggccctgctggcgtgggttgttgtggctgaccaagagtcctgcaagggccgctgcaccgagggcttcaacgccaccaggaagtgtcagtgtgacgagctctgttcttactaccagagctgctgtgccgacttcatggctgagtgcaagccccaagtgactcgtggggatgtgttccatctgccagaagatgagtacgggttccatgactacagcgacgcgcagaccgtcaacagcaacgtggaagcacagcccgagagcaccaccctggcccctgttctgcaggctcagaccctagagactcctgtccaggcacca

SEQ ID NO: 10075 - DNA, 379 bp, Bos taurus
  Clone ID: 43-LIB34-038-Q1-E1-C4
ggccataaatcaacaccaggttgtttgttggaaaacctgcttaaagagtcttcctcagaattctcatccactgagttgctattttcgggaggtgtctcttttctttatagtcagtgatcagttggtgaataataacaccactaacaacagcacattcttcagcagtccatccaaaaacatcttgagaaaagatgttaacaccttgctgaagaagactgactgcatttgactcataactgacagcaagcatgagggctgttcttttcatcttatcaaccacatatatatttgcttctttctgtactaaaaactccaaacatttgctgtttcctttcacttgtagtaacagtggtgtgaggtcatccttattcctggcttc

SEQ ID NO: 10076 - DNA, 320 bp, Bos taurus
  Clone ID: 43-LIB34-039-Q1-E1-C4
caaaggatgatttcttgcaacttcgaaaaatttaaaaccatgaaacatctattactgctacttttctgtgcttttatagttcaggcccaatttcctactgactatgacgagggacaagatgacagacctaaggtaggtttgggtgcccgcggtcatcggccctatgacaagaataatgaagaggcccccagcctgagacctgtgccccctcccatcagcggacgtggctatcgggctcgtctcgccacatcaactgtgggccagaataaagtggagacaaagccccctgacgctgatggctgcctgcacgcggacccgga

SEQ ID NO: 10077 - DNA, 156 bp, Bos taurus
  Clone ID: 43-LIB34-041-Q1-E1-C12
agggaaagggcagtgcccagagctgtgagctgccaacatcccaataaaaaggtgaccctctgctgctcagggcttccccactgagccacgggatgaggccaccaggcaggcctcctatggaactcctccctcagaataaagtttgaaactggcttc

SEQ ID NO: 10078 - DNA, 212 bp, Bos taurus
  Clone ID: 43-LIB34-041-Q1-E1-C4
gtcgccccacgcgtccgacaagtactaccgagtgaaccttcgcacacggcgggtggacgctgtgatccctccctacccacgctccatcgcccagtactggctgggctgtccagtccctggccaagcgtagcagcctgagtccaaacagctggtcactgctgctccctgctccagcatcctccttccagctcaatatagatcccttgaccctg

SEQ ID NO: 10079 - DNA, 422 bp, Bos taurus
  Clone ID: 43-LIB34-042-Q1-E1-C4
atccagtaaactgaaggaatgctgtgataagcctttgttggaaaaatcccactgcattgctgaggtagaaaaagatgccatacctgaaacctgcccccattaactgctgactttgctgaagataaggatgtttgcaaaaactatcaggaagcaaaagatgccttcctgggctcgtttttgtatgaatattcaagaaggcatcctgaatatgctgtctcagtgctattgagacttgccaaggaatatgaagccacactggaggaatgctgtgccaaagatgatccacatgcatgctattccacagtgtttgacaaacttaagcatcttgtggatgagcctcagaatttaatcaaacaaaactgtgaccaattcgaaaaacttggagagtatggattccaaaatgcgctcatagttcgttacac

SEQ ID NO: 10080 - DNA, 388 bp, Bos taurus
  Clone ID: 43-LIB34-043-Q1-E1-C12
agaagctgaagctagttaacatcagtgtcttggctcccaactggctcccaattcctggtgaaactcctaaagggagactgttaaatcatgaaattaatcaccatccttttcctttgttccaggctgctaccaagtttaacccaagagtcttctcaagaaatcgactgcaacaaccaggatgtatttaaagctgtggacgctgctctgacaaaatacaacagtgaaaacaagagtggcaaccagtttgtattgtaccgcataaccgaggttgccagaatggataatcctgacacattttattccttgaagtaccaaatcaaggagggcgactgtccttttcaaagtaacagaacttggcaggactgtgactacaatgactctgcacaag

SEQ ID NO: 10081 - DNA, 407 bp, Bos taurus
  Clone ID: 43-LIB34-043-Q1-E1-C4
aggccatcaagggggacatgaacctgagcatcgtgatgaccacctgctccaccttcttcgccctgggcatgatgcccctcctcctgtacctttactccaggggcatctatgatgggtccctgaaggacaaggtgccgtacggcggcatcatgatatcactgatcctgattctcatcccttgcaccataggcatcatcctcaaatccaaacggccacaatacgtacgctatgtcaccaagggagggatcatcctcctgcttttgtgcagtgtggctgttgtagtgctctccgccatcaacgtgggcaagagcatcttatttgtcatgacaccacacttgctggccacctcctccctgatgcctttcatcggcttcctgctaggctaccttctctctgctcttttttgc

SEQ ID NO: 10082 - DNA, 413 bp, Bos taurus
  Clone ID: 43-LIB34-044-Q1-E1-C4
agcaacactgacttcgccttcagcctctacaagcagttggctttgaaggaccccaataagaatgtcatcttctcgcctctgagcatctccatagccttggccttcctgtcgctgggggctcatgaccacactgtgacagagatcctggaatgtctcaagttcaacctcacagagacccccgagacagaaatccaccagggcttccagcacctcctgcagacgttcaatcagcccagcaaccagctgcagctgagcgtgggcaacgccatgtttgtgtcagaggagctgaagctgctggacaaattcaggaaagatgccgaggctttttacgcctctgaggttttatccactaacttcaaggattctgaaactgccgtaaagcttatcaatgaatatgtgaagaatagaactca

SEQ ID NO: 10083 - DNA, 378 bp, Bos taurus
  Clone ID: 43-LIB34-045-Q1-E1-C4
accccacagaactttggcacaatgaagtgggtgacttttatttctcttctccttctcttcagctctgcttattccaggggtgtgtttcgtcgagatacacacaagagtgagattgctcatcggtttaaagatttgggagaagaacattttaaaggcctggtactgattgccttttctcagtatctccagcagtgtccatttgatgagcatgtaaaattagtgaacgaactaactgagtttgcaaaaacatgtgttgctgatgagtcccatgccggctgtgaaaagtcacttcacactctctttggagatgaattgtgtaaagttgcatcccttcgtgaaacctatggtgacatggctgactgctgtgagaaacaagag

SEQ ID NO: 10084 - DNA, 423 bp, Bos taurus
  Clone ID: 43-LIB34-046-Q1-E1-C4
gagaattcccatattaataaaaaagaaaattaaatgccacctttcctactataataatgttgattcttaatttacggggtacagtaatgcacaatagaatctttgttctctcaacaacctaaagtaggaggtttatttccatagtctgatagtgccaggtaaatgtcaattaaacagaaatatagtatttcaattgatttttgtttcattttccattgcattgtaaattcatgtgtactaagcaaagtgatcatttttttacatttctgctttgaatgcagatgcaatttaatataatagatttttttaaaggaattaaagataatacataaatctttagcttttatacaaatatatttaattcagaagtgtgtttatacacatatacacacatgtgttcatatatgtaccacatatatacat

SEQ ID NO: 10085 - DNA, 336 bp, Bos taurus
  Clone ID: 43-LIB34-047-Q1-E1-C12
cagacgcgtgggttcaatacttaccattgataaaaatgagtacaagtacaggccctgttcccagagagttcaagagccagctccaagaggcccctctagaatggaaggcactgctggaaatgcagcagacgaaaatggtgttggaaactttcggtggcgatggacatgccagaggagactctgtatctcaaggaacaggattagcaccaggaagtcccagaaagcctggaaccagtagtattggaaatgtgaaccctgggagctatggacctggaagtagtagtacttggaaccccggccgccctgagcccggaagtgctggcacctggaaccccg

SEQ ID NO: 10086 - DNA, 196 bp, Bos taurus
  Clone ID: 43-LIB34-047-Q1-E1-C4
taatgagtagtattatttttttttttttttttttttttttttttttttttttttttttttttttttttttttttttgttttgttttgtttttttttttttttttttttggtgaaagggcccaaaaaaatttgttggagggggggtgaaaaagcctggaagtgtggggggtatctcaggagcggaaagagggggggg

SEQ ID NO: 10087 - DNA, 424 bp, Bos taurus
  Clone ID: 43-LIB34-048-Q1-E1-C4
ggcacatgaatggatatggatcgcatactttcaagctggttaatgcaaatggagaggcagtttattgcaaattccattataagactgatcagggcatcaaaaacctttctgttgaagatgcagcaagacttgcccacgaagatcctgactatggcctccgcgatcttttcaatgccattgccacaggcaactacccctcctggactttatacatccaggtcatgacatttagtgaggcagaaatttttccatttaatccatttgatcttaccaaggtttggcctcacggcgactatcctcttattccagttggtaaattggtcttaaaccggaacccagttaattactttgctgaggttgaacagttggcttttggaccaagcaacatgccgcccggcatcgagcccagccctgacaaaatgct

SEQ ID NO: 10088 - DNA, 419 bp, Bos taurus
  Clone ID: 43-LIB34-049-Q1-E1-C4
atcctcttgagtcagccctatccacggcagagatgttttccgtgacggacctctgcctggtcctgagtttggtgggtgcaattaatacagaagatggtagtgatcctcccagtggtgactttttaactgaatgaggaggggtgcgtggcccaagacttgtggaaagacagcaatctgcctgcaaagagacaggctggcccttctgctctgatgaagactggaatacaaaatgcccttctggctgcaagatgaaagggttgattgatgaagtcgatcaagattttacaagcagaatagatacactaagagattcactatttaattatcagaaaaacagtaaggactctaatacattgaccaagaacatactggaactaatgagaggagattttgccaaagctaacaacaatgataataca

SEQ ID NO: 10089 - DNA, 338 bp, Bos taurus
  Clone ID: 43-LIB34-050-Q1-E1-C12
cggggctcctcgagccagatccctgtctgatggcttttatcaacgaatacctccgccccatcctggggatcttcttgggctactactactattctgcgaatgaggaattcagacctgtgtgatgcttcgaggaaagagagtgattgtcacgggggccaccaagggaatcggaagagaaatgggctatcacctggcaaggatgggagcacatgtgctagtgacagcgaggtcagaagaaagtctaaagaaggtggtatcccgctgcctggagctgggggcggcctcagcacactacctggcgggcaccatggacaacatgaccttccctgaacaatttg

SEQ ID NO: 10090 - DNA, 244 bp, Bos taurus
  Clone ID: 43-LIB34-051-Q1-E1-C12
tacacatgtggggcctgaatatcagccttcttcacactataaaaaggatgatggatgcctgaatggcaatgcttattttgttgatacctactgtgtggtaggccctcaggattttggggcttcaaaggtgaattgttgttcagtcgctaagtcgtgtccagctctgtgaccccatggactatagcacgccaggctcccctgttcttcactatcttccagagttagctcaaaaagatgaataaac

SEQ ID NO: 10091 - DNA, 243 bp, Bos taurus
  Clone ID: 43-LIB34-052-Q1-E1-C4
gctctggatccactgcccacaccccgctctcgcaggcagacatgaggacagagagaacttccttcctcctggctctggggctcctggtgtctgggttctgctccagggtccactgcctcccagagaatgtgaccccagaagaacagcacaaagggacgtctgtggatggccactcattagcctccagcaacactgacttcgccttcagcctctacaagcagttggctttgaaggaccccaatc

SEQ ID NO: 10092 - DNA, 350 bp, Bos taurus
  Clone ID: 43-LIB34-055-Q1-E1-C12
gaaagcagactaacatgcaaaatcagtgaatccaaggcaatataaataggctcaagtactcaagatctcatcatcgtcatcacttttagtatttagctgtacctcacaacatctccttcattagtcttctttgtaaaagccttcagtgaggttgagcattgccttctcggctttggaggcttgagtaccatggtgaggaagaagcagtggaggaagtcaggagcacacagctgctctgggaatgcccggccatccctgtgcaagtggtgcttgtgttacttatgaaaagcccctaccccaaggtcttccgcatggcagcgatcatgtaggatatgttacgttcagtgata

SEQ ID NO: 10093 - DNA, 358 bp, Bos taurus
  Clone ID: 43-LIB34-055-Q1-E1-C4
aacgtcagttgggaacatgtgtacacccgtggcggattcatgttgatgtatggcaaaatcaatacaatattgtaacgtaagtagcctctaattaaaatatctaaaattaatgcagacagtattttttaccttactaacttctacagttgtgactttcttattctttgattagctgtatgatctatagtgatgcttattcctgatgcggataattcatagcgtctcactttttgcgtcctgaccagtcggccttggatttatcagttttagtgatacatgttttatggcttataatgtggcacttgttgaatattccatgtgttcttgtaaagactgtgtgtattgctgctgagtggta

SEQ ID NO: 10094 - DNA, 227 bp, Bos taurus
  Clone ID: 43-LIB34-057-Q1-E1-C4
acggttaatatcattggaccatttgaagatgtgggtttcattataccctgtgtagttcagttcaggttcagtcgctcagtcatgtctgactttgcgatcggatggactccagcagaccaggcttccctgtccatggccaactcgcatagctcactcacacgcatgtccatcaggtcagtggtgccatccagtcatctcatcctctgtcgtcaccttctcctctcatc

SEQ ID NO: 10095 - DNA, 228 bp, Bos taurus
  Clone ID: 43-LIB34-058-Q1-E1-C4
ctttggagatgaattgtgtaaagttgcatcccttcgtgaaacctatggtgacatggctgactgctgtgagaaacaagagcctgaaagaaatgaatgcttcctgagccacaaagatgatagcccagacctccctaaattgaaaccagaccccaatactttgtgtgatgagtttaaggcagatgaaaagaagttttggggaaaatacctatacgaaattgctagaagaca

SEQ ID NO: 10096 - DNA, 205 bp, Bos taurus
  Clone ID: 43-LIB34-059-Q1-E1-C4
tgctgatgatggccggcatcgacgactgctacacttctgccaggggctgcactgccaccctgggcaacttcgccaaggccacttttgatgccatttccaagacctatagttacctcacccctgacctctggaaagagacggtgttcaccaagtctccatatcaggaattcactgaccatcttgtgaagacccacaccaagagtct

SEQ ID NO: 10097 - DNA, 389 bp, Bos taurus
  Clone ID: 43-LIB34-061-Q1-E1-C12
ccacgcgcccgggaggcggctatggatgcactgcccacaccccgctctcgcatgcagacatgacgacacacagaacttccttcctcctggctctggggctcctggtgtctgggttctgctccagggtccactgcctcccacagaatgtgaccccagaataacagcacatacggacgtctgtggatggccactcattaccctccagcatcactgacttcgccttcaacctctacaagcagttggctttgaaggaccccaataagaatgtcatcttctcccctctgagcatctccatagccttggccttcctgtccctgggggctcatgaccacactgtgacagagatcctggaaggtctcaagttcaacctcacacagacccccgagaca

SEQ ID NO: 10098 - DNA, 352 bp, Bos taurus
  Clone ID: 43-LIB34-061-Q1-E1-C4
ccgactcgacgtcgtcgttacaggaaaaaagaaccgggtgagaaaaacttcggtttcaaccgttttgcccatttctgcagatttgttccaaagtcgaagcatctcaaaggcagtgatggctctccagaggacccaggcctttcttctgctcttgctgctgaccctgctggggctagggctggtacagccctcctatggccaggatcgcatgtaccaacgattcctgaggcaacatgtggaccctgatgagacaggaggcaatgacagctactgcaatttgatgatgcaaagacggaagatgacttcacatcagtgcaagcgcttcaacactttcattcatgaaagatctttg

SEQ ID NO: 10099 - DNA, 193 bp, Bos taurus
  Clone ID: 43-LIB34-062-Q1-E1-C12
gaaaatgtcctgactgatgtatacaaagacctgagtgaccatcacgtttacttggagggcaccatgtagatgctcaacatggtttctgctcgacatgcctagcacacaaagtacactctaaaacacgttgcagtcggaacacttacacatcgccaacgtaatgttcatgaaggtgatccggtcatcttctttc

SEQ ID NO: 10100 - DNA, 208 bp, Bos taurus
  Clone ID: 43-LIB34-062-Q1-E1-C4
ccaacagcgtccgcgatggccacaccgctccgacctatcaatgtccatggagccttttgaaattgactgaccaccagcatatacactgtccctacgaccagctgcaggtctatgtcagcgggaggaacatcggtgagttctgtgggaagcaaaggcccgagcgcattgatgcccaaagcaactcggtggacctgctcttcttcacgga

SEQ ID NO: 10101 - DNA, 174 bp, Bos taurus
  Clone ID: 43-LIB34-064-Q1-E1-C12
tgtttcctcgagatgaacacaagagtgagattgcccaacggtttaaagatatgggagaagaacattttaaaagcctggtacagattgccttttctcagtatctccagcagtgtccacttgatgagcctgtaaaattagtgaacgaactaactgagtttgcaaaaacatgtgttg

SEQ ID NO: 10102 - DNA, 233 bp, Bos taurus
  Clone ID: 43-LIB34-065-Q1-E1-C4
tcgacccacgcatccggcctcgagcagggagctggtggctcttccatccccagaccagccaagcctgtgagtgacaccccagacagaggaaccagagccatgcggagtctcagcggactgctgttgttactgactgcctgcctggcggtaaacgccagctccgtgcccacattgcccgatgacattcaagtgcaggagaacttcgacctgtctaggatctatgggaagtggtt

SEQ ID NO: 10103 - DNA, 203 bp, Bos taurus
  Clone ID: 43-LIB34-066-Q1-E1-C12
gctgcgtgtggcccccgaggagcaccccgtgctgctgacggaggcccctctgaaccccaaggccaaccgtgagaagatgacccagatcatgttcgagacgttcaacactcctgccatgtatgtggccatccaggctgtgctgtctctgtacgcctctggccgcaccactggcattgtcatggactctggggacggggtcaccc

SEQ ID NO: 10104 - DNA, 263 bp, Bos taurus
  Clone ID: 43-LIB34-066-Q1-E1-C4
cccggaagtgcgcctcccctaagagctccccagaccccggcactgggccgcgaacccacctgcctcaatgccgctgtagccatggtctgtgtggttggtatctgtgcccgcccagggcgcggcccgggataaagacgttccggccccgccccgctcacgccccctccagtgggatggtttgtcagcctagcaccccaggcgggcctggccttcccagttgcagggcgcccgcggggagcagggccctaccgcagagcgcatgc

SEQ ID NO: 10105 - DNA, 236 bp, Bos taurus
  Clone ID: 43-LIB34-067-Q1-E1-C4
ctcagcccactgcttcagctgtgggcccatctgagggtacgtgccatcatctctctctcctgctggggatgggggaagggactaaacaccttcaccctcccccctgcctgtgtcttcaggccctgatacacagcctgctggctcccccatccagccctcccccttccactcgtgccttgcttagagccagaagggacgaagccgggaactggaggccagaggaggagccaacagat

SEQ ID NO: 10106 - DNA, 239 bp, Bos taurus
  Clone ID: 43-LIB34-068-Q1-E1-C4
cggtccaaccaaaccttcggaaggtccggagccccgggcccgccaaaacaatgatttggcctccgaaccctccgattgtaaccttcaacattctttcattgctttcttcagcatgcctggcatatgttgctacccgagacaactgctgcatcttagatgaaagatttggtagttattgcccaactacctgtggaattgcagatttcctgaaatattaccaaaccagtgtagacaaagat

SEQ ID NO: 10107 - DNA, 237 bp, Bos taurus
  Clone ID: 43-LIB34-069-Q1-E1-C4
cgggtccacccacacgtccgctctttttcgctgcgggcgcagcgccgggacctgctgccctctcgccggcccggtcagtccccggcccggcccaaccgcccccgccccgcccggctcccgctcgcgcccatggcggcccccggcggcgcccggcgacggccgctgctcctgctgctgttcgcaggcctcgtgcacggcgcatcagcagtgtttgtggtgaagaatggcaacgggacc

SEQ ID NO: 10108 - DNA, 245 bp, Bos taurus
  unsure (199): unsure at all n locations; Clone ID: 43-LIB34-070-Q1-E1-C12
acgaaaaatcttttttgataccgatgatgatgatgatatgccacatagcacttccaggtggagggagactgccagcgctgatgaaggccacttggatggcctggcaagaaggagcggaggtgagggctcaagtggctaccctgagccgaagtaccccgaagacaagagggaagccaggagtgaccaagtgaagcccganaaaggtgcctagacggcgacgaaccaatggccagaccccgacttct

SEQ ID NO: 10109 - DNA, 232 bp, Bos taurus
  Clone ID: 43-LIB34-070-Q1-E1-C4
gggaattaaggcaggatgtctgatttcaagggatggagacagatgcccagtttgcacaggagtgggatggggtgtggtaacaaaaggagggtgactggggagaggacttttgtgccaaatccctaattgcctcgtggggaccacgtgtgcagcatgacactctcggctaggggtggacccaagcgcctgcgggagcccccgttctccttgcacttgaactctatgggggttt

SEQ ID NO: 10110 - DNA, 351 bp, Bos taurus
  Clone ID: 43-LIB34-071-Q1-E1-C4
aggggccctcaaggatttagtcactgaagaggccttcctgggcatcacagatcaggagactgaaggcaaatttgtggatctgacaggaaagggggtgacctaccaaaactggaatgatggcgagcctaacaacgcttctcctggggagcactgtgtgacacttctgtcggacggcacatggaatgacatcgcttgttccgcctcctttttgaccgtctgtgaattctctctctgagggagaatgagcctaaagtcctcctgttcctttactcatctcatgggcccacaacctgatttggaggataaatctatgtcaatttcacacacccagtactgagttgctccttttgt

SEQ ID NO: 10111 - DNA, 423 bp, Bos taurus
  unsure (377): unsure at all n locations; Clone ID: 43-LIB34-073-Q1-E1-C4
agggaaaaagctcaaattgtttggcaaaagtgataccatacagacggattatgttgtttatatggatgagcttgcctccttcattggggcaaagcccaacatcccatggctgtttctcacagatccaaagttggcattggaggtctactttggcccttgcaccccataccagtttaggctggtgggcccaggaaagtggccaggagccagaaacgccatcctgacccagtgggaccggttactgaaacctatgacgacaagagtggttgggagtcctctgaagccttgcttattttgcaactggttcagacctgttcttatttctgttgtatcaattgctgctctcattgtgttgttctagccatcattctatctangattctgaacattactaacaatacctggaaagaagcttcactatat

SEQ ID NO: 10112 - DNA, 431 bp, Bos taurus
  Clone ID: 43-LIB34-074-Q1-E1-C4
gggccgacccacgcgtccaccgccgccgccagcccgcgcggctggagcccaggcaggcagcccgcggcccgcgccgtcggggctccgggcgcggctatggagctgtggccgtggctgatcgcggcgctgctgctgctgctgctgctggcgcagctgagccgctcggcccgcttctacgccaagatcggcctgtactgcgccttctgcttcacggcctcggcgatggccgcggtcgtctgcctgctgcgccacgggggccggacggtggagaacatgaggatcatcagttggttcgtccggtccttcaagtacgcatatggcctccgctttgaggtcaaaggccgtgagacgctggacgaggaccggccctgcgtcatcatctccaaccaccagagcatcctggacatgatgggcctcatggaggtcctccc

SEQ ID NO: 10113 - DNA, 202 bp, Bos taurus
  Clone ID: 43-LIB34-075-Q1-E1-C12
gtcgtattagagcggccgcccttttgtttggttattgatttcatagaatattttttatgagaggaaaggtttatgttattagtttttagaatcagtagtttttagggagaacaacttgactattcatctgtcacaggatttgagacccattatcagaagtttaatgagagtatgggacctagataacatttcgtcagtaatg

SEQ ID NO: 10114 - DNA, 254 bp, Bos taurus
  unsure (148): unsure at all n locations; Clone ID: 43-LIB34-075-Q1-E1-C4
caaagaatacgacacctggtatgcggccgggatcctgagctttgacaagagctgtgctgtggctgagtatggtgtgtacatgaaggtgacctccattctggactgggttcggaaaaccatcgctaacaactaaggcggggctggctangagcagctgcctggaaggacgaggggaaagctgcacaggagtggaggggacacgagtgcagtgtggcgctggtgggttccagccaataaagagcttgctttgcctc

SEQ ID NO: 10115 - DNA, 135 bp, Bos taurus
  unsure (24): unsure at all n locations; Clone ID: 43-LIB34-076-Q1-E1-C4
gacaagatgacagacctaaggtangtttgggtgcccgcggtcatcggcccaatgacaagaagaaggaagaggcccccagcctgagacctgtgccccctcccatcagcggaggtggctatcgggctcgtcccgcca

SEQ ID NO: 10116 - DNA, 442 bp, Bos taurus
  Clone ID: 43-LIB34-077-Q1-E1-C12
cctagagtacgtcgtattatcccaaaggccagagagtgaagcttaatgatggccacttcattcctgtcctgggatttggcactgctgaagctaaagaggttcctaagagtgaagctctggaagtcaccaaatttgctatagaggttgggttccgccatattgactgtgctcatgtgtaccaaaatgaagagcacgttggccaggccattcgaagcaagattgcagatggcactgtgaagagagaagacatattctacacttcaaagctttggtgcactttccttcgaccagagttggtcagaccagccttggaaaagtcactgaaaaatcttcacctggactatgttgatctctatattattcattttccactggctatgaagccaggggaggaattattgccaaaagatgaaaatggaaaactgataggtgattcggtgga

SEQ ID NO: 10117 - DNA, 442 bp, Bos taurus
  Clone ID: 43-LIB34-078-Q1-E1-C4
tggaaatgaggtcgatatacatgggatatacttctcaggaaacactttcctgtcaagaggagaaaggagagacacagcaaacctcttccctcaaacaagtttgagtctcttcatgaagccagatactgcagggacttttgatgtggaatgcctcacaactgatcactacacaggtggcatgaaacaaaagtacactgtgagccagtgcagccagaggtccgaagatttatacctctacctgggagaaaggacctactacatcgcagcggtggaggtggaatgggattattccccaagtacgaaatgggaaaaggagctgcatcatttacaggaacataatctttcaaatgcatttttagataaggaaaaattttacataggctccaagtaaagaaagttgtgtatcggcaattcactgacaacacaattcaggttcctgtgg

SEQ ID NO: 10118 - DNA, 415 bp, Bos taurus
  unsure (380): unsure at all n locations; Clone ID: 43-LIB34-079-Q1-E1-C4
acggcagctcacttctttgaggctgcgcaccgcgaggagttcccacggtcccgcagcagatttctgcagcggaactcccgggggcaggatgatttgggaagtcaccgtgttgctcagcttggtcctgggaactggtgctgtccccctggaggaccctgaggacggaggcaagcactgggtggtgatcgtcgcaggatcaaacggctggtataattacaggcaccaggcagatgcatgccacgcctaccagatcgttcaccgaaacgggatccctgatgagcagatcatcgtgatgatgtatgacgacatcgccaactccgaagacaatcccaccccggggaattgtgatcaacaggcccaacggctcagacgtgttacanggcgtgctgaaggactacacgggcgaggatgtcac

SEQ ID NO: 10119 - DNA, 425 bp, Bos taurus
  Clone ID: 43-LIB34-080-Q1-E1-C4
agctgtcacaagagtcagggatccaacaacaggccttgagaaatgtggctcttatacctcctgctgccagtcctgttctacagggtgggaggcgccacacccacccctcagaagctctatggggaggtgatgtccccgctgttccccaagccttaccctaacaattttgagaggaccactgtgatcacagtacccacggggtacaaggtgaagcttgtcttctggcagtttgacctggagccttcggaaggttgtctctatgactatgtcaagatttctgctgataagaagaccatggggaggttctgtgggcagctgggttctcccctgagcaatcccccaggaaggaaggaattcatgtcccaagggaacaagatgctgctgaccttccactcggacttctccaacgaggagaacggcaccat

SEQ ID NO: 10120 - DNA, 469 bp, Bos taurus
  unsure (202): unsure at all n locations; Clone ID: 43-LIB34-081-Q1-E1-C12
tagccgtctagaattcaggggccaaccaagccttcagcggccccttggttggtgcccaaaggccggcaatttaaaattgtggaaatttcaacttcaaaaaccggaaagcacggcaatgcaaaggtcaatctggttggtattgacatcttcactgggaagaaatacgaagatatctgcccatcaactcataatatggatgtcnccaacatcaaaaggaacgattttcagctgattggcatccaggatggatacctatcactcctccaagacagcggggaggtgcgagaggacctccgtctgcctgagggagaccttggcaaggagattgagcagaaatacgactgtggagaagagattctgatcacggtgctgtccgccatgacagaggaagcggctgttgcaatcaaggccatggcaaaataactggctcccaaggtggctgtggtggcagcagtgatcctccagcctg

SEQ ID NO: 10121 - DNA, 435 bp, Bos taurus
  Clone ID: 43-LIB34-082-Q1-E1-C4
gtccgattcaacatctcagtgaatttcaatttaagcctcctgaatggcaagaaggaaaacaaaacacaaaagaatggggcaaagaaactgcaacctggttccggtgggttaacccccaaaatccggctccgttgattcaaggagcaaccgttcgcaattgtcaaaaggcaagggaaagtatgccataacaagttacatctaagtgtctgccaaataaaatagccaacgggcccctgacctctaagaagtttccattccagtgaagtgtaaggtgttataataatgactgtgatgcatattgtctaatttcctcttgtttttaagaaatggaagaattagcagaacatggtgtatttctgcctcctaatatgcaaggactgactgatgaacagattgaagaattgaaattaaaggatgaatggggtgaaaagtgta

SEQ ID NO: 10122 - DNA, 416 bp, Bos taurus
  Clone ID: 43-LIB34-084-Q1-E1-C12
actcactgcacaattgcaaccaaagctgcatattcctgttgtggggcctccttccagccttctatttcagttcactatcttcagccatctgggacatggctctgtttttcgtcttgatctttgcctttagcactggacctggacttctagagtctcctcccaaagtgcgactggtgagaggtccccatcgctgtgaagggcgggtggaagtggaacggaatggcgagtggggcactgtgtgtgatgatggctgggacttgaaagatgtggaagtggtgtgccgggagctgggctgtggagcagccaaggggacaccaagtggtaatttgtataagccactggcagatgaaaaacaaaaaatcttcatccaagacgtcaactgcaatgggacggaggatgaattgattgaatgtgac

SEQ ID NO: 10123 - DNA, 423 bp, Bos taurus
  Clone ID: 43-LIB34-084-Q1-E1-C4
gcgtctaaggacacttgggttagaagtattaaatatcagcatatttccaaaaagtgctgtgaattttttgacaacatccgtaaaaaagataaaagaaagtcgcctcaaagatactcaaaagccgcgtgtggactttcttcagctgatgattaactcccagaattccaaagaaacagacaatcataaagctctctctgaccaagaactcatggcccagagtattatctttatttttggtggctatgagaccactagcacttctctttccttcattatatatgaattggccactcaccctgatgtccagcagaaactgcaggaagagattgatgcgactttccccaataaggcgcctccgacctatgatgtcctggcacagatggagtatcttgacatggtggtgaatgagactctcagaatgtt

SEQ ID NO: 10124 - DNA, 376 bp, Bos taurus
  Clone ID: 43-LIB34-085-Q1-E1-C4
aagagaaacaaatcaagaaacaaactgcacttgttgagctgttgaaacacaagcccaaggcaacagaggaacaactgaaaaccgtcatggagaattttgtggcttttgtagacaagtgctgtgcagctgatgacaaagaagcctgctttgctgtggagggtccaaaacttgttgtttcaactcaaacagccttagcctaaacacgacacaaccacaggcatctcagcctaccctgagagtaagaggaaaaaagagaaatgaaaactcagagcttattcatctgttttccttttctgttggtgttaaaccaacactctcactaaagaacgtaaatttctttaaatattttgcttcttttgtttgtgctacaattaat

SEQ ID NO: 10125 - DNA, 379 bp, Bos taurus
  Clone ID: 43-LIB34-086-Q1-E1-C12
cgttatggtgctaaatgtgttgctgttggtgagtctgatggcagcatatggaatccagatggtattgacccaaaggaactggaagacttcaaattgcaacatggaacaatcctgggctttcccaaagcaaagatctatgaagggagcatcttggaggttgactgtgacatactaatccctgctgccagcgagaagcagctgaccaagtccaatgcaccaagagtcaaagccaagatcattgctgaaggtgccaacggaccgacaactccagaagctgataagattttcctagagaggaacattatggttattccagatctctacctgaatgctggaggagtgacagtgtcctactttgagtggctgaagaatctaaatc

SEQ ID NO: 10126 - DNA, 450 bp, Bos taurus
  Clone ID: 43-LIB34-086-Q1-E1-C4
cacgcgtccgtagaaatctcctcagctgactattagacttagtccactgccaccgcaacaccttttagtttctaagctttgttggaatacattataccagatttaatttgcaacatgttgtcttaacagtggacttatgtaatacttttatccatgtttaaaaaggaacgaatttgatcaaaggcaaagcatttaatgccattagccaaggaaaaagcttccaggactttgaaatgttaaccattttctgtctgtaaagctccaaatagttaggaatgacttctacattttgttgcaaacacctaagagatgcttttcagatatttatattgccatattcttaattgcatggtttgcattactagatccagttctgcgcctatataccctctggtagtgctttttaaccttcctggaagccagtttcctaccagatgattgagattttca

SEQ ID NO: 10127 - DNA, 421 bp, Bos taurus
  Clone ID: 44-BOVMS1-001-Q1-E1-C8
ctggacacagcgggaacagagcaatttacagcaatgagggatttgtatatgaagaatggccaagggtttgcactagtatattctattaccgctcagtccacatttaatgacttacaagacctgagggaacagattttacgagttaaggacacagaagatgttccaatgattttggttggcaataagtgtgacctggaagacgagcgagtagttggcaaagaacagggtcagaatttagcaagacagtggtgtaactgtgcctttttagaatcttctgcaaagtcaaagatcaacgttaatgagatattttatgacctggtcagacagataaatagaaaaacaccagtggaaaagaagaagcctaaaaagaaatcgtgtctgctgctttagacccacagtaagcatcagctctgagccagat

SEQ ID NO: 10128 - DNA, 356 bp, Bos taurus
  Clone ID: 44-BOVMS1-002-Q1-E1-C8
attccagacactgatccggccaccattcttgaccctttttatcatctttcatctaatagtttcataacacatcttttatcacaatccaaaactgacaccagcacaaatatataaaacacaacaccccttgagaaacaaaatgaacgaaaatttatttacctcttttaatacccctgtaactttaggtctccctcacgtaacccttatcgtactagtcccaagcctactattcccaacatcaaaccgactagtaagcaatcgctttgtagccctccaacaatgaacacgtcaacttgtatcaaaagaaataatgagtaaccacatttcaagaggacaaacatgaacagtaataataa

SEQ ID NO: 10129 - DNA, 352 bp, Bos taurus
  Clone ID: 44-BOVMS1-003-Q1-E1-C8
gggtcgaactacgcgtccgaaatagtaaaaaagaaaaaattataaataaatataaaaaaaaaaaaaaaaaaaaaaaataaatatataaaaaaaaaaaaaaatatataaaataaaaaaatataataaaagtataaaaattaaaatggtataaaaaaaaaaataattttttaagggggggcccctttagggttttgactttttttttccttttatggtactttaatttttttttatattgtttcctaattttctttttatgggcgtttttttttaaattttttattgggaaaacctttggttttcctcttttttcccctttttaaaaattcccctttttcctaattgggttttt

SEQ ID NO: 10130 - DNA, 442 bp, Bos taurus
  unsure (138),(349): unsure at all n locations; Clone ID: 44-BOVMS1-004-Q1-E1-C12
accaatgcctatggatgcttgtcaccctgccactggttcacgttacgtacatcatgtcgatcatcgaactggcgatggaacacgtgtgacatgtcatatattagctcacctaaacaatctggcgatgccaactgtaanctggactgtatacattcgtaaattttccataaagcaaatcccaatttgcagacattgaacccaaatttgataccactgctgtttttctggtctgaccgtcgcaaccctcatcaaactacacccagcagatgcgacaaggtacgcaataactgtttggtattttgatgcagatgagagagcgcgagctaaagtaaaatatctaacaagtganaaaggtgtgagggttgaactcaataaaccttctgattcgatcagtaaagacgtcttatagagcctttcatcagcattaccccacttcacctac

SEQ ID NO: 10131 - DNA, 276 bp, Bos taurus
  Clone ID: 44-BOVMS1-004-Q1-E1-C8
cgcgtccgaaaaaaaaaaattaaaaaaaaaaaaaaaaaaaaaaaaaaaaaaaaaaaaaaaaaaaaaaaaaaaaaataaaaaataaaaaaaaaaaaaaaaaaataaaattgtaaaaaaaaaaaaaaattggtgtgatatatcaacaataaagtatcattataattttggggggggtcttttaagggttttaatttttattttggggctttgttcatttagttctttttaaaatgttctctttatttttttttaaggggttttttttttatattcttt

SEQ ID NO: 10132 - DNA, 427 bp, Bos taurus
  unsure (350): unsure at all n locations; Clone ID: 44-BOVMS1-005-Q1-E1-C8
gagacctcaatgaaatggagatccagttgaaccatgccaaccgcatggctgctgaggccctgaagaactacaggaacactcaagccatcctcaaggatacccagatccacctggatgatgctctgcggggccaggaggacttgaaggagcagctggccatggtggagcgcagagccaacctgctgcaggctgagatcgaggagctgagggccaccctggagcagacagagaggagcaggaagatcgcagagcaggagctcctggatgccagtgagcgcgtccagctcctgcacacccagaacaccagcctgatcaacaccaagaagaagctagagacagacatcacgcanatccaaggagagatggaggacattctccaggaagctcgcaacgcagaagagaaagccaagaaggccatcactgatgc

SEQ ID NO: 10133 - DNA, 452 bp, Bos taurus
  Clone ID: 44-BOVMS1-006-Q1-E1-C12
agaacatggagcagacggtgaaggacctgcagaaccgtctggatgaggctgagcagctggccctgaagggcgggaagaagcaaatccagaaactggaggccagggtgcgtgagctggaaggagaggtagagagtgagcagaagcgcaatgtggaagctgtcaagggtctgcgcaaacacgagaggagagtgaaggaactcacttaccagacggaagaagatcggaaaaatattctcagacttcaggacttggtagataaacttcaggcgaaagtgaaatcttacaagagacaagctgaggaggctgaggaacaatccaatacaaatctatctaaattccgcaagctccagcatgagctggaggaagccgaggaaagggctgacattgctgaatcccaggtcaacaagctgcgggtgaagagccgggaggttcacacaaaaatcatcagtgaa

SEQ ID NO: 10134 - DNA, 441 bp, Bos taurus
  Clone ID: 44-BOVMS1-006-Q1-E1-C8
tcaagacccactcttgcatcacctactcttgaagaaaaagaagaagaaaagaagaaagctgagaagaacgtgacttctgaaacaaaaaagaaagacaaagaagatgtcaaaatgaaaactgagaaggaaactgccatggatgtgaaaagaaaagcacctactaaaaaagaggaaaagaaggaagattccaagaaaacaaaaacacctacagaagaactacccaagggaaaaaaacaggaaaagaaagaacaacacgtggaaccagcaaagtcaccaaagaaggaacaatcagctccaagtgaaaaacacattaaagcaaagactgaacgaaccaaagaaaaagttggttctgcctcatcgaaaaaagctgttactggaaagaaagaagaaaaaacaaccaagacagtggagcaagaaattagaaaagaaaaatctgggaag

SEQ ID NO: 10135 - DNA, 323 bp, Bos taurus
  Clone ID: 44-BOVMS1-008-Q1-E1-C12
aaatataaaaaaaaaaaaaaaaaaaaaaaaaaaaaaaaaaaaaaaaaaaaaaaaaaaacaaaaaaaaaaaaaaaaaaaaaaaaaaaaaaaaaaaaaataaaaaaaaagggatgccgcccaaaaggttccaattttacttacccgttcatgcaacttcatacctcttcaaaagtgtcaccaaatttcatttaacgggccgtcatttaaaaacctcttaactggaaaaaccctgacgttacccaccttaaccgctttgaataaaatccccttttccaaacttggtgtaaaaccgaaaaggccctaaacgatcgcccttcccaaaa

SEQ ID NO: 10136 - DNA, 475 bp, Bos taurus
  Clone ID: 44-BOVMS1-008-Q1-E1-C8
ccgggccgaccacgcgtccaattatcaagtatttatatggtagagaaaataaaatgaatcaatgttgactatgtgatatgttttaatgaacaagaaaatgtaccctttggtgaattagactctatgcagtggtttataatatgcacatgtttataatacatttatgtttgtagtaaagacttgtttagagtatctttccaattatttatctgggagggaaaaaaaccctattaaaatgctacatatctttttcagagataataaaaggatatatattttctatctacaggctgcatagtttgagtttccctattatcagttgttttaaaactcatctataacgttatgaagggcttgacattcatagatgtaaatttatattgtttacaaatctggtgagaagatgtctgtatttgagaatgggatgtgacatgacatctttatttccgcatctagaggaacaaattaaaaacca

SEQ ID NO: 10137 - DNA, 411 bp, Bos taurus
  Clone ID: 44-BOVMS1-009-Q1-E1-C8
ccacgcgtccgacgaactagaaacatagtatgtagattcacttttttaaatgcaacagctgtgctgaaatttttttatcattaacacttgaagtaataaaataggcttcatttattaataaatgtttcatttgatttatttttctattatagttccatttgtgaggattgtgactttgtttatgagctataatttctatacttgtgacgcttaaaatgaagcaaacaagttaaaaaaagaaaattgcagataacacttgtcccttccgtcttcacttagttgtgtaactgttttaattcactttgcctttgcagaagtttgggtagcttctttgtactgctaatgagtctcatccaggaagattaagtacaatgcattcaccttgcctactacatgggtaacatggggaaa

SEQ ID NO: 10138 - DNA, 366 bp, Bos taurus; identical to SEQ ID NO: 1154
  Clone ID: 44-BOVMS1-010-Q1-E1-C12

SEQ ID NO: 10139 - DNA, 89 bp, Bos taurus
  Clone ID: 44-BOVMS1-010-Q1-E1-C8
aaaagaaaaaaaaaaaaaaaaaaaaaaaaaaaaaaaaaaaaaaaaaaaaaaaaaaaaaaaaaaaaaaaaaaaaaaaaaaaaaaaaaaaa

SEQ ID NO: 10140 - DNA, 412 bp, Bos taurus
  unsure (409): unsure at all n locations; Clone ID: 44-BOVMS1-012-Q1-E1-C6
cccacattcgcaggaaaattatgtcttctcctctttctaaagagctaagacagaagtacaacgttcgatccatgcccatccgaaaggatgatgaagttcaggttgtacgagggcactacaaagggcagcaaattggcaaagtagtccaggtttacaggaagaaatacgtcatctacattgaacgagtgcagcgggagaaggctaatggcacaactgtccacgtgggcattcaccccagcaaggtggttatcaccagactaaaactggacaaagaccgcaaaaagatcctcgaacgtaaagccaaatctcgccaagtaggaaaggaaaagggcaaatataaggaagaaacaattgagaagatgcaagaattaagtcatcttgtctacagctttcattaaaaactgttaanatg

SEQ ID NO: 10141 - DNA, 458 bp, Bos taurus
  unsure (345),(370): unsure at all n locations; Clone ID: 44-BOVMS1-013-Q1-E1-C8
ggggaagatggcggcggccgttccgcagcgggcctggaccgtggagcagctgcgcagcgagcagctccccaagaaggacattatcaagtttctgcaggatcacggttcagattcgtttcttgcagaacataaattactaggtaacattaaaaatgtggccaagacagctaataaggaccatttggttacagcctataaccatcttttcgaaagtaagcgtttcaagggtactgaaagtataagtaaagtgtctgagcacgtgaaaaatgtgaatcttaatgaagattaacccaaagaaaccaagtctgaagagactctggatgagggtccaccaaaatatacaanatctgttcttaaaaaaggagataanaacaactttcccaaaagaggagatgttgttcactgctggtatacacgaacactacaagatgggactgtttttgataacaatattcaac

SEQ ID NO: 10142 - DNA, 157 bp, Bos taurus
  Clone ID: 44-BOVMS1-016-Q1-E1-C8
tatagagaaagtaccgcaagggaacgatgaaagaaaaaactaaaagtataaaaaagcaaagattaccccttgtaccttttgcataatgaattaactagtataagacttaacaaaatgaattttagctaagcagcccgaaaccagacgagctactcac

SEQ ID NO: 10143 - DNA, 302 bp, Bos taurus
  Clone ID: 44-BOVMS1-017-Q1-E1-C12
ggcattggctatccgtaccctcgcggccctgtctttcccagccgtggcggctactcaaacagagggaactacaacagagggggaatgcctaacagagggaactacaaccagaacttcagaggacgaggaaacaatcgtggctacaaaaatcaatctcagggctacaaccagtggcagcagggtcaattctggggtcagaagccatggagtcagcattatcaccaaggatattattgaatacccaaattaaacgaactgatacatatttctccaaaaccttcaaaaaaaaaggcaacaacaaa

SEQ ID NO: 10144 - DNA, 259 bp, Bos taurus
  Clone ID: 44-BOVMS1-018-Q1-E1-C8
gtgacatgtcaggcttctccattttccttttctgccttgactatctaaaagctactttattttaacttattatggtgatcatgtaagaagacaaaaagagaaagtgtacctcttttactggaatagtgtttctgattacaagtgaaataaggcatttttttataaacataaaggcaacctggcttctgcaacctctcctctatcatgaaaaccgacatctttacttcactcactatcaataataaatatattttctgac

SEQ ID NO: 10145 - DNA, 368 bp, Bos taurus
  Clone ID: 44-BOVMS1-019-Q1-E1-C8
atgcgacgtcatagctcttctatagtgtcacctaaattcaattcactggccgtcgttttacaacgtcgtgactgggaaaaccctggcgttacccaacttaatcgccttgcagcacatccccctttcgccagctggcgtaatagcgaagaggcccgcaccgatcgcccttcccaacagttgcgcagcctgaatggcgaatgggacgcgccctgtagcggcgcattaagcgcggcgggtgtggtggttacgcgcagcgtgaccgctacacttgccagcgccctagcgcccgctcccttcgctttcttcccttcctttctcgccacgttcgccggctttccccgttcaagctctaaatcgggggctccctt

SEQ ID NO: 10146 - DNA, 378 bp, Bos taurus
  Clone ID: 44-BOVMS1-020-Q1-E1-C12
aaaaaaaaaaaaaaaaaaaaaaaaaaaaaaaaaaaaaaaaaaaaaaaaaaaaaaaaaaaaaaaaaaaaaaaaaaaaaaaaaaaaaaaaaaaaaaaaaaaaaaaaaaaaaaaaaaaaaaggggcggccccccaaaaggttcaaagcttacttacccttacatgcaacgtcaaacccctccaaaagggtcccctaaattcaattcacgggccgtcgtttaaaaacgtcgtcacgggaaaaaccctggcttacccaaacttaacccccttgaaaaaaatccccctttccccagctggcgtaatatcaaaaaggccccaaccgtttgcccttcccaaaatttgcacaacctgaatggcaattgggaccccccctttaccggc

SEQ ID NO: 10147 - DNA, 445 bp, Bos taurus
  Clone ID: 44-BOVMS1-021-Q1-E1-C8
cactaataaaaattgtaaacaatgcattcatcgaccttccagccccatcaaacatttcatcatgatgaaatttcggttccctcctgggaatctgcctaatcctacaaatcctcacaggcctattcctagcaatacactacacatccgacacaacaacagcattctcctctgttacccatatctgccgagacgtgaactacggctgaatcatccgatacatacacgcaaacggagcttcaatgttttttatctgcttatatatgcacgtaggacgaggcttatattacgggtcttacacttttctagaaacatgaaatattggagtaatccttctgctcacagtaatagccacagcatttataggatacgtcctaccatgaggacaaatatcattctgaggagcaacagtcatcaccaacctcttatcagcaatcccatacatcgg

SEQ ID NO: 10148 - DNA, 412 bp, Bos taurus
  unsure (332): unsure at all n locations; Clone ID: 44-BOVMS1-022-Q1-E1-C8
agttgatccagtgttccaagctaaaatgttggatatgttgaagcagacaggaaggcctgagatggttgttggttggtatcacagtcaccctggctttggttgttggctttctggtgtggatatcaacactcagcagagctttgaagccttgtcggagagagctgtggcagtggttgtggatcccattcagagtgtaaaaggaaaggttgttattgatgccttcagattgatcaatgctaatatgatggtcttaggacatgaaccaagacaaacaacctcaaatctgggtcacctaaacaagccgtctattcaggcattaattcatggactanacagacattattactccattactattaactatcggaaaaaatgaattggaacagaagatgtaattaattttcataagaag

SEQ ID NO: 10149 - DNA, 411 bp, Bos taurus
  Clone ID: 44-BOVMS1-023-Q1-E1-C12
ccatcgcgtccgcccacgcgtccgaaaaaaaagaaataaggaaattacaataaaaaaataaaaaaaatataaaaaatcaaaatcaaaagataacctccttcacaaaaaaggtcatacgttcgccaaattaagacatttttgatgtggaaacgacgcgttaccgagttttggtaagccggattggttaaggacacaggcggcacgctacttcgacagctccactagtttcatcgctcttaatagctggtgccacagctttgggtattaagattatggatgaaatgggttatagtataaacggagaaaatgcacattatgggactccgagaatcccgagtgctttcgataaagtgcctgggggattatcgagtggctcaaccgtagctgtagctgcacctcttgtggattttt

SEQ ID NO: 10150 - DNA, 234 bp, Bos taurus
  Clone ID: 44-BOVMS1-023-Q1-E1-C8
acgcgaccgtgatcgcggcgcaggcggctgacctcgagccaccgcgcagcagctgctctccaaccatcagcgttgccgctgccgcaaactgacacactgtttataatgtgtacatacattgtttacctcattttgttatttttaaaacgaagccctgtggaaggaaatggaaaacttgaagcattaaactcagtcgttctgttttgctgcgtaaaagaaattcataactcttca

SEQ ID NO: 10151 - DNA, 364 bp, Bos taurus
  Clone ID: 44-LIB188-001-Q1-E1-C12
acatggatatagctatttatttctatctactagaaaataaagtcatattttttcttaatttaatattggtcattgctaatcagaacacactattgccaggaacacagtagttattgttaaaatcagctgcactagatacaatttgaaaatatccagcaccaggttaattccaataacgaacccaatagattagttaatgctatgagaagactaaagagaaagagaaaagagacgcagacccaggcctggctccacatgctactaactaccagctctcagatgtgtcactgggaacaatacacactccatgcgttttgctacatctccagaagaggtaaggacttgagtccacacgggggatgct

SEQ ID NO: 10152 - DNA, 462 bp, Bos taurus
  Clone ID: 44-LIB188-001-Q1-E1-C8
tgctccaggataccatgggcgggcgataccttaacagcaggttcgtggggggctgtgacattctcctgcagatgcaccagaacggggacctggtagaagaactgaaaaagctggggatccgctccgccctcttagatgacacaaaagaggaggactcgaagtgagggaaggcggcccgggcgaggggccgctggtgtcagcgtctcaccaccagagaagcctgacccgttcaggttcccagtcttcagatggctgcttgcgctggctcctccagtttgtaagcagccaagtgattttagtgtgtctggtgtttgggcaaggaagatcctatctcgaacataatcgtaaacactgtaccaagactactctttgcaccacatcggccagttcttccgttccaactacgtgttcctattccagcttccctggctggccgagaagctgctaaccatgtctgacttc

SEQ ID NO: 10153 - DNA, 462 bp, Bos taurus
  unsure (420): unsure at all n locations; Clone ID: 44-LIB188-003-Q1-E1-C8
catgctaccgtgcgccatggcggccggatacatctcttacgcacgtcgccacggtgaagggcgacttccgtaacagaactgccaccgtcttggctacagacgtgtttaatgaacattataatcaatttggagaaagaacacactccacccacgccactaccttcttcctccgagggatacagacagcacagaacttgtctcctgtagaacaacttcaagggatcaataagagctaagagtaaccgccagctgaaggatatagtaagacacattcgtggaaatctagtcactgccaaaaggatatgtgtatttaggatatacagtaattacttcaaatgttgaaaatggctgaatgaaccaggagcagacttgaccaaattcacactctttgttcaggaggaagttcccgggactgctgangggccactagtcacactgcttctccgccggcccaagccgcgc

SEQ ID NO: 10154 - DNA, 413 bp, Bos taurus
  Clone ID: 44-LIB188-004-Q1-E1-C12
acttgagcaggacagagtcactcgagcccctccagggagctgtggctaaattcttctctgccagctgtgttccctgcattgatagacaagcataccccaacctgtgtcaactgtgcaagggggagggggagaaccagtgtgcctgctcctcccgggaaccatacttcggttattctggtgccttcaagtgtctgcaggacggggctggagacgtggcttttgttaaagagacgacagtgtttgagaacttgccagagaaggctgacagggaccagtatgagcttctctgcctgaacaacagtcggacgccagtggatgcgttcaaggagtgccacctggcccaggtcccttctcatgctgtcgtggcccgaagtgtggatggcaaggaagacttgatctggaagcttctcagc

SEQ ID NO: 10155 - DNA, 422 bp, Bos taurus
  Clone ID: 44-LIB188-005-Q1-E1-C8
accagtaatagggagtgggatcaatcccttctcttttgtaacctgccaggatctcttcattatcccagatacgcatggagccacccacgatctcaccaacattgggcatcaacacgtcgacagattcggtgagccgggggtcctcgggacagcgctgcatgtagaaggacttgatctccacgggaaagcgacacagcaagatgggctcgttgatggtgtccgtcatcagtctctctggagcttccgggatgtcctctccaaattcatagaaagttccgtcttctttctttatattgtgttctttcagccacacaatcgcatctgaatagttcatccgtttgaaaggccgtttagggggcttaaaattcgggttgaggtcgcgcactatgtttcctgcgggtgatttcaggactctatcaacc

SEQ ID NO: 10156 - DNA, 410 bp, Bos taurus
  Clone ID: 44-LIB188-006-Q1-E1-C12
actatggcaataccggggctttcaggtgcctggctgaggacgttggggacgttgcctttgtgaaaaacgacacagtctgggagaacacgaatggagagagcactgcagactgggctaagaacttgaatcgtgaggacttcaggttgctctgcctcgatggcaccaggaagcctgtgacggaggctcagagctgccacctggcggtggccccgaatcacgctgtggtgtctcggagcgatagggcagcacacgtgaaacaggtgctgctccaccagcaggctctgtttgggaaaaatggaaaaaactgcccggacaagttttgtttgttcaaatctgaaaccaaaaaccttctgttcaatgacaacactgagtgtctggccaaacttggaggcagaccaacgtatgaagaa

SEQ ID NO: 10157 - DNA, 373 bp, Bos taurus
  Clone ID: 44-LIB188-006-Q1-E1-C8
acaaaataaagtttttctcatacaaaaagatatacaattaaaaaacaaaaaatgaaaccaccttcagcccacatactttttcagaaaagggtagagcgagctcagagctctgacacaggacagtgaacaaagtgctaaggcggagagtgactgaccaagtgctagaggctgcagcgagacaggagctgtcaacaaccctgtctcctaacactgggcaggagtgagcccttggggcttctgtgaagatctgccttccggtttctcatggcaacatctggatgctctcatcacagtgttggggcattttatctagggttcctccttgggtttggagaagtcacagtgggcaaggctgataacagcaacccttacg

SEQ ID NO: 10158 - DNA, 389 bp, Bos taurus
  Clone ID: 44-LIB188-007-Q1-E1-C8
gccatgggccgggataaaaacaatggatgctcaagtctcttatataaaaatggtgtagtaattgcataaaacctaggtttatcctcccatatacttcaaatcacctctagattagttataatacttaatacaatgtaaatgctatgtaaatagttgtaaatacaatgtaaatgctatgtaaatagttgctgaatgtgtagcaaattcaagtgtttgctttttggaacttgactgaactttttttcttctttccaaatattgtcaacccatggttggctgaatccgtgaatgtggaactcatggataggagtgccagttgtattgtattctttctttctttattttttggccgtgctgagcagcttgtgggaatcttagttcccaccagg

SEQ ID NO: 10159 - DNA, 442 bp, Bos taurus
  Clone ID: 44-LIB188-008-Q1-E1-C12
catgcaccctaccgccatgggcccgggataccaaaagaccttcctcctgatactgcgctgctggacctgcaaaacaacaaaataactgagatcaaagatggagactttaagaacctgaagaaccttcatacactgattctcatcaacaacaaaattagcaaaatcagccctggggcatttgctcctttggtgaaattggaacgactttatctttccaagaatcaactgaaggaattgccagagaaaatgcccaaaactcttcaggagctgcgtgtccatgagaacgagatcaccaaagtgcgaaagtctgtgttcaatggattgaaccagatgatcgtcgtagaacttggcaccaacccgctgaagagctcaggcattgaaaatggagcctttcacggaatgaagaagctctcctaaatccgcattgctgacacaaatataa

SEQ ID NO: 10160 - DNA, 417 bp, Bos taurus
  Clone ID: 44-LIB188-009-Q1-E1-C8
accaggttttattatctttttatcaaaaaaatcagtaacagacaacaatgtgaggtgctcactcccaacatggccagaggaaaagggacatggggggaggaagaggacccagccagctgggaccctggggtcacagaaggggagggaagcaagggtaactccctccagtacagcgccgaatctaccttcgaggggatcctcaaaaacccaagagcagagtctttgaacagcaggtccctctggccgggtggagaaccaaagagctggaagctccgagacttgttttttccaaatttctcctgcgccttgctgagaagcttccagattaagtcttccttgccatccacacttcgggccacgacagcatgagaagggaactgggccaagtggcactccttgaacgcatccactggcgcc

SEQ ID NO: 10161 - DNA, 410 bp, Bos taurus
  Clone ID: 44-LIB188-010-Q1-E1-C12
acctgcagggaagattgctattgacagaggctatgacatcgcccagatatcccgacacctggacttcatcagccttttgacctatgactttcacggagcctggcgccagacagtcggacaccacagccccctgtttcgaggccaggaagatgcaagttctgacagattcagtaacgctgactacgctgtgagctacatgctgaggctgggggctccagccaataagctggtgatgggtatccccacttttgggaggagctacactctggcctcttccaagacagatgtgggagcccccatctcagggccaggaattccaggccagttcaccaaggagaaagggatccttgcctattatgagatctgtgacttcctccacggagccaccacccacagattccgtgaccagc

SEQ ID NO: 10162 - DNA, 399 bp, Bos taurus
  unsure (269),(278),(357): unsure at all n locations; Clone ID: 44-LIB188-011-Q1-E1-C8
acaagaatagttaagtattttgcacaaaggaaatttgttgatggtccagtagaactgatgcccatagaacgcagtttcttaaggattttgttttgcttctttgagggaggcggccatcgtcattgtcagttcagctgggggttccttccttcatgctgaggacctgtgtctttgaagttgctgacgtcctcggaatcccaggcaggctggtgaatgctcaggggctcccatggaggcatctggtggcctcgggccccctttgcttgtangaggcttancaagttccttgtcgcttcttcccactgggcatactccctcagctgctccttcaagctcccctcctcatgaaagttgtgnggactctgccacactccttttttcccattaagtgtccgacag

SEQ ID NO: 10163 - DNA, 441 bp, Bos taurus
  Clone ID: 44-LIB188-012-Q1-E1-C12
actttgcagaggccctggggccactggagagctttgaagcctggcctgatgacttgctcatcagcacctaccccaagtcgggcaccacctgggtaagcgagatcctggacctgatctaccaggagggtgacctggagaagtgtcagagagcccctgtcttcttgcgggtgcccttccttgagttcagcgcccctggggttcccacaggtgttgagcttctgaaagatacaccagccccacggctcctcaagacacacttgcctctggccctgcttccgaagaccctgctggatcagaaagtcaaggtgatctacatcgcccgcaacgccaaggatgtggccgtctcctagtaccacttctatcgcatggccaaggtgcaccctgaccctggcacctgggacagcttcctggagaagttcatggccggggaagtgtgccacc

SEQ ID NO: 10164 - DNA, 419 bp, Bos taurus
  Clone ID: 44-LIB188-012-Q1-E1-C8
actgattttaaaaactaataacttaaactgccacacacaaaacatatggtccacaaaaacattctcctttccttctgaaggttttacgatgcattgttatcattaaccagtcttttactattaaacttaaatggccaattgagacaaacagttctgagaccgttcttccaccactgattaagactggggtggcaggtattggggataatattcatttagccttctgagctttctgggcagacttggtgaccttgccagctccagctgccttcttgtccactgctttgatgacacccacagcgactgtctgtctcatgtcacgcacagcaaaacggcccaggggaggataatcagagaagctctcgacacacatgggcttgccaggaaccatatcaacgatggcagcgtcaccagatttc

SEQ ID NO: 10165 - DNA, 406 bp, Bos taurus
  Clone ID: 44-LIB188-013-Q1-E1-C8
acttttacaggaaggggtaatggggcatcaggtagctggtgtcattgttaagggaatgagaaacacttgctaaattaacataatgctgtttcttttcaaaatgatccccaaatagctaaccgacgttccttgttcctattgcattccctcccccaaaggcaatggtcatgaccagtttcttattcagtcatccagaagtattctccagctacttatataatctatcaaatacaaatggtattcccaggtggcgctagtggtaaagaatctgcctgcaatgcaggagacccaggcccgacccccgggccgggaagatctcctggagaaggaagtagcaacccactccaatattcttgcctgaaaaatcgcggggacagagaaatctagcaggctacagtccatggga

SEQ ID NO: 10166 - DNA, 427 bp, Bos taurus
  Clone ID: 44-LIB188-014-Q1-E1-C12
acttcattgtggaagagttagcactaagcaggaaacctttccatgctgtgaagaagctgggacagaaggttcttccttgagtgtgaccatcttcacttcagctcaggagccctgttggctgaagtgtagggcgtcctttctgattcctgaagtagatgaagagccccaccgcaaggaagagcagacccagaacgaagcccccgactccactcatcatcttgctctgagcagagtcagaccgtgccctccattctactgtgatagggcttgtctggctggggtgctccacttggcaggtgtagacctctccactctgaggaactgtttcaagcatcaccatggtctggaaggtccagtctccattctggatcaggcctgtggagatcaccccagcctcctcttcatggccattccggaaccacctgac

SEQ ID NO: 10167 - DNA, 382 bp, Bos taurus
  Clone ID: 44-LIB188-014-Q1-E1-C8
acaagcttattttttttttttttttttttttttttgaccaatccattttttaattctgaaattcttgacattacagagctaaactgagatttattagcattccagtctgacatttcttatcgagaagcagaaataagtttcatgagccaaaaacccatgtcagaactaagtccagggaaaagcttataaaacgaaatatggatcccagcattaacagctgaacagagaatgtgatttttaggattcttagcggatgataaagttgtggagaaactgaacacttacaaattatttaaaacctggaatcactgaccagaaattacagagtcggatgatgggatgacagcagaacgggttatgagagaacctacaatgttctagc

SEQ ID NO: 10168 - DNA, 272 bp, Bos taurus
  Clone ID: 44-LIB188-015-Q1-E1-C8
ttctccacctgatcatcgcaggtggtgaccaactgcggtcggaggtggcgctggaagtgtgaggagagacggcgggactaaacctctcatgtacagcgatctgtaagaccgggatccccgttccgcaccaagagagatgctctcacatgaaggtgggagagacagctgcattcagtgtgactgtgagttgaccagagtgcgagagaaggagcaggcacattatcctagaagccgtggggctgggggacgctttggaaatcctcgtgagcccg

SEQ ID NO: 10169 - DNA, 435 bp, Bos taurus
  Clone ID: 44-LIB188-016-Q1-E1-C12
acagcgccgaatctaccttcgaggggatcctcaaaaacccaagagcagagtctttgaacagcaggtccctctggccgggtggagagccaaagagctggaagctccgagacttgttttttccaaatttctcctgcgccttgctgagaagcttccagatcaagtcttccttgccatccacacttcgggccacgacagcatgagaagggacctgggccaggtggcactccttgaacgcatccactggcgcccgactgttgttcaggcagagaagctcatactggtccctgtcagccttctctggcaagttctcaaacactgtcgtctctttaacaaaagccacgtctccagccccgtcctgcagacacttgaaggcaccagaataaccgaagtatggtttccgggaggagcaggcacactggttctccccctccccct

SEQ ID NO: 10170 - DNA, 446 bp, Bos taurus
  Clone ID: 44-LIB188-016-Q1-E1-C8
gccatggcggccggatacatgaacacaagccaggggtcttcccaccacaaagagttcctcttcaacatacatggggagaacctctttggagctgagttccagctgcaaatttgtgttccagttaaattacaaggtttccagttcctaacagtgacgaacctgaccaagattcaggcccacaccgtgtgcactcaggctctcgagcgcgtttgtgggagcgacctggttcagcttgtggaagaatggcattcagtaagctgtaaggtcacctcggataaagaaaatgtaaccgtggctgcagagctctccttgaatcagctaaagcagttactaagagatgtgactgagctgcagatccttggtgaaatatctttcaacaaatctctgtatgaggggctcaacacagagaaccacagaactaagatcactgtcatcctcctgaaaga

SEQ ID NO: 10171 - DNA, 406 bp, Bos taurus
  Clone ID: 44-LIB188-017-Q1-E1-C8
acagacacattcagatgcagctgcagaaagaggggtccagtgatctgaagtcacatagcgggatgcagcattactcagtccccacaaggcagctgtctcaaactttaggaaccgtgagagacacatcagagccctggtcactgtcaccacttgcagcctgggtgtaggtctgtctttttttcacctgagcgcttcttcctccagatcacagctccagccaccacagctactacgaggagaaccaggccaacaatgatgcccatggtgaggaaggaggtctgaggaggttcccatctcagggtgaggggctcctgaagcccttcgtgctgcacatggcacgtgtatctctgctcctctccagaaggcaccaccaaggccgcccacttctggaagtttccgtcccctg

SEQ ID NO: 10172 - DNA, 419 bp, Bos taurus
  Clone ID: 44-LIB188-018-Q1-E1-C12
accgtgccttgtttttgacactctcctggtcgtcatacgccacccactggttgcccttggtggcataggggacctgctggtcacggaatctgtgggtggtggctccgtggaggaagtcacagatctcataataggcaaggatccctttctccttggtgaactggcctggaattcctggccctgagatgggggctcccacatctgtcttggaagaggccagagtgtagctcctcccaaaagtggggatacccatcaccagcttattggctggagcccccagcctcagcatgtagctcacagcgtagtcagcgttactgaatctgtcagaacttgcatcttcctggcctcgaaacagggggctgtggtgtccgactgtctggcgccaggctccgtgaaagtcataggtcaaaaggctgatg

SEQ ID NO: 10173 - DNA, 284 bp, Bos taurus
  Clone ID: 44-LIB188-018-Q1-E1-C8
gatactaggcgtcagtcccgctcagcgtcagctcgcggccgggctgggctttctggtccctgttcatgaagaaggagaagacgttcttgtcgaacagcttctgctgcaccaggttgtctatgacgggcagcacgttgttgactgagatgcgggggtaagccatgctcacagtgccgtctaatttggccgcgattaataccacaccgggctgcttgatggcctctccgaacgtctgcctctgcaccgtgacgccacccgggctggatgaggatgggttacagggt

SEQ ID NO: 10174 - DNA, 408 bp, Bos taurus
  Clone ID: 44-LIB188-019-Q1-E1-C8
acagcgccgaatctaccttcgaggggatcctcaaaaacccaagagcagagtctttgaacagcaggtccctctggccgggtggagagccaaagagctggaagctccgagacttgttttttccaaatttctcctgcgccttgctgagaagcttccagatcaagtcttccttaccatccacacttcgggccacgacagcatgagaagggacctgggccaggtggcactccttgaacgcatccactggcgcccgactgttgttcaggcagagaagctcatactggtccctgtcagccttctctggcaagttctcaaacactgtcgtctctttaacaaaagccacgtctccagccccgtcctgcagacacttgaaggcaccagaataaccgaagtatggttcccgggaagagc

SEQ ID NO: 10175 - DNA, 411 bp, Bos taurus
  Clone ID: 44-LIB188-020-Q1-E1-C8
acttgttttggctcctacaagggaactggcaaaccaagtagccaaagacttcaaagatgtaactaggaaactcagtgtggcgtgtttttatggtggaacatcatatcaaagccaaattaatcatattcgaaatggtattgacatcttggttgggaccccaggtcgtatcaaagaccatctgcagagcggccgcttagatctttctaaactgcgccacgttgtgcttgatgaagtggatcaaatgttagatttaggttttgctgaacaagttgaagacattctccatgagtcctacaaaactgattctgaagacaatcctcagactttgcttttttctgcaacttgcccacagtgggtatacaaagttgcaaaaaaatatatgaaatccagatatgaacaggttgaccttgt

SEQ ID NO: 10176 - DNA, 286 bp, Bos taurus
  Clone ID: 44-LIB188-021-Q1-E1-C8
acctgtgtagtggggatgactgaagccccgcgacagcccaagcatcgaggacggctgctccgtgctccagctaacagttctccgcagtcagcccgcggctaacagcccctgtgcccgtccccgggaggatgacattagcgctgcccgccccacccgctcttttgttagtttagtttcctacgcattacctggctttcccggctagtccctctttatagccaaagaaatgaacattccaaggatttggaagtggaatctatgatgtgaaacactttgcctctcgagt

SEQ ID NO: 10177 - DNA, 426 bp, Bos taurus
  Clone ID: 44-LIB188-023-Q1-E1-C8
catggccgcgcgatacatatgatcagccagcccaccgggcactttgacaagcttgttgttgttcaaatgaagttccctcaaatgaggagtgttggccaaagagccattgtcaaccgcagagatgctgttgaaactcagtcccaacttagccaaattattcagtcctttcaggctagctgcatcaactttggtgattttgttgccatcgagatgtaattcagtaagggaaggaggaagaccttgagggatggtagttatatttgtgtcagcaatgcggatgtaggagagcttcttcattccctgaaaggctccattttcaatgcctgagctcctcaacgggttggggccaaatttctacgacgatcatccggttcaatccatgaacacagactttcgcactttggtgatctcgttctcatggacacg

SEQ ID NO: 10178 - DNA, 406 bp, Bos taurus
  Clone ID: 44-LIB188-024-Q1-E1-C8
acaagctttatttttttttttttttttttttttttaactgtataaactatttattaacacaaagcccacacattatttcttcttggacacacccacagtgcgaccacggcggcctgtggtcttggtgtgctggcctcggacacggagtccccagaagtggcgcagccccctgtgggcccgaatcttcttcaggcgctccaggtcttcacggagtttgttgtctagaccgttggccaggacctggctgtatttcccgtccttcacgtccttctgtctgtttaagaaccagtctgggatcttgtattggcgtggattctgcataatggtgatcacacgttccacctcatcctcggtgagctccccggccctcttggtgaggtccatgtctgctttcctcaacaccaca

SEQ ID NO: 10179 - DNA, 425 bp, Bos taurus
  Clone ID: 44-LIB188-025-Q1-E1-C8
cgccatgggcccgggatactgcctcacccctaacctcagtcatgtgttccaagaacttctgtccgtttatttatttggttttggtaacattgaattcgttttgactatgctgggtctttgctgctcgctggaagttgctaggacctctggactgcagtctcccatctcttgctgacctcttgttgacctctgcagaatcctggttggtgggagcttgttagttccttgttccttacccggacctcctgtggtaagtgttttctctcctctgcggcctggtaagggtgggtgggcattggcatcccaaaggtggctagaagtcaatgatttaggcaggcttgtgaatagatatgggagaaggcaatggcaccccactccagtacctaaatctgttgattgccaactctaccactacagtatcccac

SEQ ID NO: 10180 - DNA, 428 bp, Bos taurus
  Clone ID: 44-LIB188-026-Q1-E1-C12
cgccatgggcgcgggatacttgtcatccgactcagtctgccggtttctctgccactccacggctacatcttctgggtagaagccggtgaccatgcaggtgacgctgagcgtgcttttgctgagctcttccttgggtgggtccaggacatacacctgcggctcccgggccggccctttgctcctggagatgatcctcacgatgggggccgagaggcctttgttgttgaccttgcacttgaactcctttcctccagtccagtcctggtgctggatgggcagggcgctgaccacgcggtacagaatcgcccacatcttggagcatcccttcaagtctccgctcaggagcttggctaagagaacgtgctccatgaccgattgtcccctcgcggcccctgctgagccatggcacatgcagcagcaccagcagc

SEQ ID NO: 10181 - DNA, 396 bp, Bos taurus
  Clone ID: 44-LIB188-027-Q1-E1-C12
acttgagatggacagagtcactcgagcccctccagggagctgtggctaaattcttctctgccaactgtgttccctgcattgatagacaagcataccccaacctgtgtcaactgtgcaagggggagggggagaaccagtgtgcctgctcctcccgggaaccatacttcggttattctggtgccttcaagtgtctgcaggacggggctggagacgtggcttttgttaaagagacgacagtgtttgagaacttgccagagaaggctgacagggaccagtatgagcttctctgcctgaacaacagtcgggcgccagtggatgcgttcaaggagtgccacctggcccaggtcccttctcatgctgtcgtggcccgaagtgtggatggcaaggaagacttga

SEQ ID NO: 10182 - DNA, 401 bp, Bos taurus
  Clone ID: 44-LIB2809-001-Q1-E1-C12
acataatttacacaaaagcgatcacctcccctgtgtggactcgggcgaggactggccccttctccttagagagaagcggggtggcttttgggaaggcaaaggacttcctgtaacaatgcatttcgcgatatttggaatgactattaaaaaaaaaacaaaaccatgtacaagctttttttttttttttttttttttttttatttttttttttttttttttttttttttttttttttttgcacttgaaattttattcccagagggaaagaaaaatatttccataactcagaaagagtagggaaagggttttaaaaaatcatcagcaaagtttgtatgaaaccaccatataaacccagttatattcaatataaactaacagagagagtataaataattcaggaa

SEQ ID NO: 10183 - DNA, 387 bp, Bos taurus
  unsure (378): unsure at all n locations; Clone ID: 44-LIB2809-002-Q1-E1-C8
acagcagaaaggcctgaatgggcatatctctctggggatagggcactgctttctggggaacaggcaggactttggactgagaaagggacagcacggactgaggaggaaacatgacagttggaggaagaggctggtgaggctggtgcatccaagactggagcagaggcagaggaaggtgcagattttcaacatcagtgagagtcaggctctggctttcagtaaagggctcaactggatatttagggaagggcatttctttgtgcttaggagccatagcctccttcactttggagactcccattacttcaggctgaaggaaaggcggcaccaccacaggggtttgagtaagaggagggatgttttgtgggaagctgttanggatgggcc

SEQ ID NO: 10184 - DNA, 477 bp, Bos taurus
  Clone ID: 44-LIB2809-003-Q1-E1-C8
gggcgatacaatgaggaaaactgtctgggaaagggagaaccatagccttggctcagagccttgaggcacagcctgaagacttcctacttaacatctaggaaggctgctttagtgtttttctaggccacgggtctgtctggaatggagagccaatggcctcctatagataccaatgtgtcatctagaaaggatatgctggattcagtttgccacatctcactaggccgactttgtaaccttgtttgtcacctgtctacactgcttaagcatttgatattgaatgaataatgtagagttgatgaaaactttaaaattaaacatgttttcagtcacatgttatttctttgaaactgaggactctgaattttcaacttattgaatctctaataaacactgtaactccaatattttggccacctcatgcgaagacttgactcattgggaaagaccctgctgctgggatggactgggggctgg

SEQ ID NO: 10185 - DNA, 395 bp, Bos taurus
  unsure (315): unsure at all n locations; Clone ID: 44-LIB2809-005-Q1-E1-C8
cgtatgtgtatgatacataaggttatgtattaattgtagccgcgttctaacgacaatatgtacaagcctaattgtgtagcatctggcttactgaagcagaccctatcatctctctcgtaaactgccgtcagagtcggtttggttggacgaaccttctgagtttctggtaacgccgtcccgcacccggaaatggtcagcgaaccaatcagcagggtcatcgctagccagatcctctacgccggacgcatcgtggccggcatcaccggcgccacaggtgcggttgctggcgcctatatcgccgacatcaccgatggngaagatcgggctcgccacttcgggctcatgagcgcttgtttcggcgtgggtatggtggcaggccccgtggccgggggact

SEQ ID NO: 10186 - DNA, 374 bp, Bos taurus
  Clone ID: 44-LIB2809-006-Q1-E1-C8
acagcaaaaaggcctgaatgggcatatctctctggggatagggcactgctttctggggaacaggcaggactttggactgagaaagggacagcacggactgaggaggaaacatgacagttggacgaagaggctggtgaggctggtgcatccaagactggagcagaggcagaggaaggtgcagattttcaacatcagtgagagtcaggctctggctttcagtaaagggctcaactggatatttagggaagggcatttctttgtgcttaggagccatagcctccttcactttggagactcccattacttcaggctgaatgaaatgcggcaccaccacaggggtttgagtaagatgacggatgttttgtgggaggctg

SEQ ID NO: 10187 - DNA, 209 bp, Bos taurus
  Clone ID: 44-LIB2809-007-Q1-E1-C8
tacagtattagtagcaacttgcttgtcaaattgaaagccaacaactctgcctttatgatgctaagctcatgtacttatttcttctcctaacttcgttctcttcagttcccattatctcttcccgtggtattgtctctgtcaccttcatttctccttggcctcattgccccccacgcaagctggtggtcattcagtggtgggttactaat

SEQ ID NO: 10188 - DNA, 423 bp, Bos taurus
  Clone ID: 44-LIB2809-008-Q1-E1-C8
acctatacatttgactctctgtaaaacacttacgctgttttgtgcataatctatgtaaactttacaatttccattctcattatgatggaatgttttatctctacaataccctggatgtgttgtgtcttctgtaatttcatgactgaattgtcaaatagaacacaaatagaaattttatttcaagacaagtatttaaaagatttgataggcaacccaatttagcctgaatgatttttaatataatctttttcccttgtagccttttccagaagtgtttggaaaggagaaggtcaatgaactgagcaaggatattgggagtgaatcaactgaggatcaagccatggaagatattaagcaaatggaagctgaaagcatttcgtcaagtgaggaaattgttcccaatagtgttgagcagaagcacat

SEQ ID NO: 10189 - DNA, 376 bp, Bos taurus
  Clone ID: 44-LIB2809-009-Q1-E1-C12
acagcagaaaggcctgaatgggcatatctctctggggatagggcactgctttctggggaacaggcaggactttggactgagaaagggacagcacggactgaggaggaaacatgacagttggaggaagaggctggtgaggctggtgcatccaagactggagcagaggcagaggaaggtgcagattttcaacatcagtgagagtcaggctctggctttcagtaaagggctcaactggatatttagggaagggcatttctttgtgcttaggagccatagcctccttcactttggagactcccattacttcaggctgaaggaaaggcggcaccaccacaggggtttgagtaagaggagggatgttttgtgggaagctgtt

SEQ ID NO: 10190 - DNA, 231 bp, Bos taurus
  Clone ID: 44-LIB2809-009-Q1-E1-C8
ggataccaagtgtacattacgaggtgtccaaggagtacaagagttcgaggcatacaaagaggatatttccatcaagcacaccaggtgttcataacttctcacatagccactgctccagcttctcagaacagtctgctttatgggccaaccagtatttaattcctactttatccagaatcttcttgacagacatttttgtcatcagtaagatcatcagccaggaacttgtca

SEQ ID NO: 10191 - DNA, 412 bp, Bos taurus
  Clone ID: 44-LIB2809-010-Q1-E1-C12
acaactaactttggagttgatattaatagaaattattccaaaattattcttaggtcacaaataactactatcccacataaaaagggaaaaatcccacccaattaaggaaaaggtatcctgtgtatgtttccatggcaatgagtttatgcattctcagattttgtccggctagttatccaccctttatctgatgcatttattccatctctcagagagaaccatatagattcctgacggcatccaggacacgtggctcgtggtggacacacttcatggtggatactgctactataaaaatactcagaacttaagagaattccaagatgctttataaaaagcattagtcatgcctcaaaactgccctttgaggtacgtcagtattattatcccattttaacagaaggaaaactga

SEQ ID NO: 10192 - DNA, 393 bp, Bos taurus
  Clone ID: 44-LIB2809-010-Q1-E1-C8
accccaaggcctcctgagcaggcccgtggaacatgagtcttcccgaggccaacaaggtgaggctatcaaacaacttgaagatggaataacgaggctgatgaatggagaagatgattgtccgtccttgtttagacatcctagagccagacatcctggaatgtgaagtcaagttggccttagaaagcatcactacaaataaaactggtggacgtgatggaattccagttgagctattccaaatcctcttcaggagcaaaaggacagcatttgctgtgcttgaatctaagccagttgtgggctcatccaggaacaagatggatggatcagtaataagctccattgcaatactagtcctttttctttctcctccagacacaccacggataaactgag

SEQ ID NO: 10193 - DNA, 246 bp, Bos taurus
  Clone ID: 44-LIB2809-011-Q1-E1-C8
actttttgtagtcggtgtccagcacaaggactttgttctcgttcaaggcatcgatcttgaacaccgcagggatcttggttttttctgcaatgatcttcttctgagcacactcatcattctcccatttctgcagcaggatctccaggtcgccctcaggggtgggcttcagctcctccacatacactctcaggggggcactctgggcgtccagcagggagatgtcgctggccgccatggccaaggagt

SEQ ID NO: 10194 - DNA, 145 bp, Bos taurus; identical to SEQ ID NO: 5002
  Clone ID: 44-LIB2809-012-Q1-E1-C12

SEQ ID NO: 10195 - DNA, 368 bp, Bos taurus
  Clone ID: 44-LIB2809-014-Q1-E1-C8
gatacaattggtacggctacttgctgatgacgtaaccagcatagcacccagtgctctggctcttgccattgagattgaatgcataacagtagataagtccgacatgacccttgactcggcgaaggtcttcctgaaaggccagttggaacaacctgcactcgaacttccgactcctaatggaagtgggagatacatccactgcttcctgactacagcttaccaacacatgatctgtagtgcaacagaggagcagctgacttgacaagtcgttctgtccagatggtcttctggtgtacaatggttgtggagtccagcagcttggcagtgttgtccttgtgcgcagtaacgaacatagacatagccctgca

SEQ ID NO: 10196 - DNA, 433 bp, Bos taurus
  unsure (389): unsure at all n locations; Clone ID: 44-LIB2809-017-Q1-E1-C8
gccatgggcgcgggatacaactagatttggagttgatattaatagaaattattccaaaattattcttaggtcacaaataactactatcccacataaaaagggaaaaatcccacccaattaaggaaaaggtatcctgtgtatgtttccatggcaatgagtttatgcattctcagattttgtccggctagttatccaccctttatctgatgcatttattccatctctcagagagaaccatatagattcctgacggcatccaggacacgtggctcgtggtggacacacttcatggtggatactgctactataaaaatactcagaacttaagagaattccaagatgctttataaaaagcattagtcatgcctcaaaactgccctttgaggtangtcagtattattatcccattttaacagaaggaaaactgaagcac

SEQ ID NO: 10197 - DNA, 394 bp, Bos taurus
  Clone ID: 44-LIB2809-021-Q1-E1-C12
catggccgcgggaaacctgaaaaacacggtcaacacgatgcgcctctggtccgctcgggcgcccaatgacttcaacctcagagactttaacgttggagactacattcaggccgtgctggaccggaatcgggccgagaacatctcccgggtcctctatcccaatgataatttttttgaagggaaggagctaagattgaagcaggagtattttgtggtagctgctaccttgcaagatgtcatccgacgtttcaaagcctccaagtttgactccagcaatagcaccaaaactgcgttcgatgccttcccagatcaggttgccatccagctgaatgacacccacccttcacttgccatccctgagctgatgaggatttttgtggatattgaaaaactg

SEQ ID NO: 10198 - DNA, 427 bp, Bos taurus
  Clone ID: 44-LIB2809-021-Q1-E1-C8
gccatggtcgcggaatacaactgaggtgactaatcactgcacagaaagcaaatctgttttcaattttcttagcaattctgatataatattcactgtaatcaaaactgcctcagttcagttcagttcagtcactcagtcatgtccaactctttgtgaccccctggaccgcaacacaccatgactccctgtccatgaccaacacccgaagcttgctcaagctcatgtccattcagtgatgccatccaaccatctcatcctctgtcctcttctcctctcctgccttcaatctttcccagaatcagatcttttccaatgcatcagttcttcaaatcaggtggccaaagtattggagtttcagcaaaagtctttccagtgaatattcaggactgatttcttttacgattgactgaatacttatttatatctg

SEQ ID NO: 10199 - DNA, 266 bp, Bos taurus
  Clone ID: 44-LIB2809-023-Q1-E1-C8
gcccgggatacaacctaaaagcctgctcgtccataactccctggcgatatggcaatgctttctatgtaacgagcaagccctaggggtgcaaaaaggacaccctggacttatgacgcttgatcacagttgctggaagacgctttagatgctgatgtatctaatgactattgcagaagcacattgaggtactgatgtacctcatcaatgcaactcaagctctggtgttcagtttcagactcaagtggatcattagggaaaggcatttc

SEQ ID NO: 10200 - DNA, 345 bp, Bos taurus; identical to SEQ ID NO: 7627
  Clone ID: 44-LIB2809-024-Q1-E1-C8

SEQ ID NO: 10201 - DNA, 403 bp, Bos taurus
  unsure (368): unsure at all n locations; Clone ID: 44-LIB2809-025-Q1-E1-C8
gccactgggcgcgggatacagcagaaaggcctgaatgggcatatctctctggggatagggcactgctttctggggaacaggcatggctttggactgagaaagggacagcacggactgatgaggaaacatgacagttggacgaagatgctggtgaggctggtgcatccaagactggagcagaggcagaggaaggtgcagattttcaacatcagtgagagtcaggctctggctttcagtaaagggctcaactggatatttacggaacggcatttctttgtgcttatgagccatagcctccttcactttggagactcgcattacttcaagctgaaggaaatgcggcaccaccacacgggtttgagtaagangacggatgttttgtgggaggctgttatggatgggc

SEQ ID NO: 10202 - DNA, 251 bp, Bos taurus
  Clone ID: 44-LIB2809-028-Q1-E1-C8
gggatacaccttagccatggcggccagcgacatctccctgctggacgcccagagtgcccccctgagagtgtatgtggaggagctgaagcccacccctgagggcgacctggagatcctgctgcagaaataggagaacggtgagtgtgctcagaagaagatcattgcagaaaaaaccaagatccctgcggtgttcaagatcgatgccttgaatgagaacaaagtccttgtgctggacaccgactacaaaaagt

SEQ ID NO: 10203 - DNA, 438 bp, Bos taurus
  Clone ID: 44-LIB2809-030-Q1-E1-C8
acctggagagattgtggaaagcctttcaagcagtgaggaatctattacacgcatcaataagaaaattgagaagtttcagagtgaggaacagcagcaaacagaggatgaactccaggataaaatccacccctttgcccagacacagtctctagtctatcccttccctgggcccatccctaacagcctcccacaaaacatccctcctcttactcaaacccctgtggtggtgccgcctttccttcagcctgaagtaatgggagtctccaaagtgaaggaggctatggctcctaagcacaaagaaatgcccttccctaaatatccagttgagccctttactgaaagccagagcctgactctcactgatgttgaaaatctgcaccttcctctgcctctgctccaatcctgggttgcaacagcctcaccagcctcttcctccaa

SEQ ID NO: 10204 - DNA, 404 bp, Bos taurus
  unsure (351): unsure at all n locations; Clone ID: 44-LIB2809-031-Q1-E1-C12
acagcaaaaaggcctgaatgggcatatctctctggggatagggcactgctttctggggaacaggcaggactttggactgagaaagggacagcacggactgaggaggaaacatgacagttggaggaagaggctggtgaggctggtgcatccaagactggagcagaggcagaggaaggtgcagattttcaacatcagtgagagtcaggctctggctttcagtaaagggctcaactggatatttagggaagggcatttctttgtgcttaggagccatagcctccttcactttggagactcccattacttcaggctgaaggaaaggcggcaccaccacaggggtttgagtaagangagggatgttttgtgggaggctgttagggatgggcccagggaagggatagact

SEQ ID NO: 10205 - DNA, 406 bp, Bos taurus
  Clone ID: 44-LIB2809-031-Q1-E1-C8
acagtatactttaaaattttctttttaaattgaaagccaacaactctgcctttatgatgctaagctcatgttcttatttcttctcctatcttctttctcttctgttcccattatccttccctttgttttgtccctgtcaccttcctttctccttctcctcattgccccccaggcaagcaggtggtcagtcattggtgggtttccagcttccaaagcctagacaaccctgctgtagtctcaaactagtggtctttgccccggctgaccctttccttgaactgtctgagctttaaggtggatggctcaagctagagatatgacagaatcttctgggaagggccttgatgatcttcagcccagacttttgctaaatgaaatggaaaaatgactttattttggcaccaaa

SEQ ID NO: 10206 - DNA, 387 bp, Bos taurus
  unsure (7): unsure at all n locations; Clone ID: 44-LIB2809-032-Q1-E1-C8
caaaaangcctgaatgggcatatctctctggggatagggcactgctttctggggaacaggcaggactttggactgagaaagggacagcacggactgaggaggaaacatgacagttggaggaagaggctggtgaggctggtgcatccaagactggagcacaggcagaggaaggtgcagattttcaacatcagtgagagtcacgctctggctttcagtaaagggctcaactggatatttagggaatgacatttccttgtgcctacgagccatagcccccctcactttggagacccccattacttcaagctgaaaggaaagcggcaacaccacaagggtttgagttagaagacggatgttttgttggaagctgttatggatgggcccaag

SEQ ID NO: 10207 - DNA, 347 bp, Bos taurus
  Clone ID: 44-LIB3057-001-Q1-K1-C12
tgacgctatatcatgttgatttgatttcataacaacctagaaaatgttcatttcctctgggtatctatggtacagttaattcacattgtgtaaatatccacttggagactatctgccttgggcattttccccctagcatttctgtgtctccgcaaggtgtacaaaaaaaaaaaaaaaaaaaaactactgtaaaaggcagtttaattgttagaaatgactgtttttgcacctcttgtaaaaagttatttagagattgcatttactgcttttttgttttgctttgctttatgtatgactcccagaggaaaaccatacaatgggtattctctctgaagctgagtaatcac

SEQ ID NO: 10208 - DNA, 334 bp, Bos taurus
  Clone ID: 44-LIB3057-001-Q1-K1-C8
ccgggttgagaggagcgtggccttttcctctccccgccatggcgtgtgctcgtgcactgatatcagtgtactccgaaaagggggagtcctctggcaaaaatgtcactttgcctgctgtgttcaaggctcccattcgacccgatattgttaactttgttcacaccaacttgcgcaaaaacaacagacagccctatgctgtcagtgaattagcaggtcatcaaaccagtgctgagtcttggggtaccggcagagctgtggctcgaattcccagggttcgaagtggcgggactcaccgttccggtcagggcgcttttggaaacatgtgtcgtggggg

SEQ ID NO: 10209 - DNA, 334 bp, Bos taurus
  unsure (21),(69): unsure at all n locations; Clone ID: 44-LIB3057-002-Q1-K1-C8
cggacgcgtgggtctttccgntgagcgctcctttccaaagtggttttccatgatccgtgccggtttaanaagcttacagagctgttcatcgctgctgatggcatccacaccggccagtttgtgtactgcggcaagaaggcccatctcaacatctgcaacgtgctcccggtggtcaccatgcctgatggcaccatcgtgtgttgtctgtaagagaagcctggtgaccgatgcaagctgtcatgagcctctggaaactattccacaatcatcttccacaacccttatacaaataatactctagtgaagctgccttctgtctccaaaaatgtcatct

SEQ ID NO: 10210 - DNA, 380 bp, Bos taurus
  Clone ID: 44-LIB3057-003-Q1-K1-C12
cggacgcgtgggtcagaactggaggtcaggttcctgacacaaactacatatttatgggtgattttgtagaccgaggttactatagtttggagaccttcacttaccttcttgcactaaaggctaaatggcctgatcgtattacacttttgcgaggaaatcatgagagtagacagataacacaggtgtatggattttatgatgagtgccaaaccaaatatggaaatgctaatgcctggagatactgtaccaaagtttttgacatgctcacagtagcagctttaatagatgagcagattttgtgtgttcatggtggtttatctcctgatatcaaaacactggatcaaattcgaaccattgaacggaatcaggaaattccccat

SEQ ID NO: 10211 - DNA, 349 bp, Bos taurus
  Clone ID: 44-LIB3057-003-Q1-K1-C8
gcggctgggaccctgtacacatatcctgaaaactggagagccttcaaggccctcatggccgctcagtacagcggggctcaggtccgcgtgctctccgcaccaccccacttccattttggccaaaccaaccgcacccccgaatttctccgtaaatttcctgctggcaaggttccagcctttgaaggtgacgatggattctgtgtgttcgagagcaatgccattgcctactatgtgagcaacgaggagttgcggggaagtactcccgaggcagcagcacaggtggtgcaatgggtgagctttgctgatagcgacatagtgccaccggccagcacctgggtggttccctacc

SEQ ID NO: 10212 - DNA, 425 bp, Bos taurus
  unsure (377): unsure at all n locations; Clone ID: 44-LIB3057-004-Q1-K1-C8
ggctcctccgattgcagctcggttaaaaatggtctccaggatggtttctaccatgctgtctggcctggtgttatggctgacatttggatggactccaacagctgcttatagcccaaggaccccagaccgggtctcagaaacagatatccagaggctgctccatggcgtgatggagcagctgggcattgccaggccacgggtagagtacccagctcaccaggccatgaaccttgtgggcccgcagagtatcgaaggtggagctcatgaaggtctgcaacacttgggtccctttggcaacatcccaaacatcgtagcagagttgaccggtgacaacattcctaaggacttcagtgaggaccagggctacccagaccctncaaacccctgtcccgttggaaaaacagatgatggatgtctaggaaaca

SEQ ID NO: 10213 - DNA, 401 bp, Bos taurus
  Clone ID: 44-LIB3057-005-Q1-K1-C12
cggacgcgtgggtcgcgagcggccgccctttttttttttttttgtgagaaaacacatgttatttgttttaatgatacgcatgcttttcttctgtaaatagacaataaatttttgtagatagtcttggtgtgttatcttaatttcgtatttcactgtgtaaaatcagtgaatatagctaaagtgttagtggactggatgaaaagaaactggttactaggcaagaacaggaggctgtagttacccatgactacttttagctatgcagactaatacattctgcaggtttacagctcagcaccttcaccttttttcactggtatttcatgtaaggcatcaaccactgtaatttttgctgatgctgaagcctgtccttgggaattggatgcatggcactcatattc

SEQ ID NO: 10214 - DNA, 423 bp, Bos taurus
  Clone ID: 44-LIB3057-005-Q1-K1-C8
gaaggacagaacgatgtctgtgtggatctgctcagggacatgatcaagccaatgaaaggcgagggcaagctctatgcatccaaggcgcacatgaactccgagctcatggacatgaagaaccacatgccgcgtgtgctagtggctccgtccctgcgaaacagcacagaactgatgaaggccatacctagtcttgtgaagatcccagaaatgcacgccaccatgccaaagctgtccaaagcagatgatgaaacctgagatcatagaagagactgtagaagacacttctgaaagcattgacgatccagactaacctgaacaagcaactgaaatatgcattgacatgattctagaagacatcaccggacagcccctaagcagagcacacagtgacgtgactgacgcaattgcatatcctgaaccttt

SEQ ID NO: 10215 - DNA, 352 bp, Bos taurus
  Clone ID: 44-LIB3057-006-Q1-K1-C8
gggcgccggcgcagccgggaaccgcgcgtcgccatggcggagctgcagcagctccgggtgcaggatgcagtggactccatggtgaagagtctggagagggagaatatccggaagatgcagggccttatgttccggtgcagcgctgcctgttgtgaggaaagccaggcgtccatgcagcaagtgcaccagtgcattgagcgctgccatgcacctctggctcaagcttaggccctggtgaccatcgagttggagaagttccaggaccgtctggcccggtgcaccatgtactgcaatgacaaggccaaagattcaatagacgcatggagtaaagagcttcatgtgaagcggcagc

SEQ ID NO: 10216 - DNA, 337 bp, Bos taurus
  Clone ID: 44-LIB3057-007-Q1-K1-C12
gtctcaattagagattcgatctttcatttgatgtacaaattcatatattttatcggtgtttatactctttggtcttgttacttttatcaattacacagtagatttccatgacatgggatttataatgttataatatgaatggcaaatagatactattgagaagggaaaaaaaaaaaaaaaaaaaaaaaaaaaaaaaaaaataaaaaaaaaaaaaaaaaaaaaacaaaaaaaaacataaaaaataatataaataataggtgaaattcttggatttatgaaagacgaacaactttctaatgcatttgccaaggatgatttcattgatcaagatctaaaa

SEQ ID NO: 10217 - DNA, 377 bp, Bos taurus
  Clone ID: 44-LIB3057-007-Q1-K1-C8
agcagcagcaaagccacaacaacccagcccccggccccgagggacagctcaagttccacccggacacagatgatgtacccgtcccagctccagctggtgaccagaaggatgtggatgcttcagaaaagaaggtcccagaacagacccctgagcctccccagctggattcacagcacctgtgatcattccaggaccccaacactcagggttcctcccaaggctgatgggaggggggtggagtgtcacaatcaacctcctctggggacccggccacacttgtggcctcctgcgggagggggaacaggctggctgtttccttctcatactgctgcccgggccctgtatctgccacctcagtctccacagccttccagtct

SEQ ID NO: 10218 - DNA, 422 bp, Bos taurus
  Clone ID: 44-LIB3057-008-Q1-K1-C12
tgaagtccttatgagcttgattcttgggttgctgcgctcctggaatgaccctctctgtcacctagtcaccgaggtgcggggtatgaaaggagccccagatgctatcctatcgagggccatagagattgaggaagaaaacaaacgacttctggaaggcatggagatgatatttggccaggttattcctggagccaaagagactgagccctaccctgtgtggtcaggactcccgtccctgcaaactaaggatgaagatgcacgttattccgctttttataacctgctccactgcctgcgcagggattcaagcaagattgacacttaccttaagctcctgaattgcagaatcatctacaacaacaacctgctaagcccacaatcatcctatccatttctgagatggttcttaatgatccattccc

SEQ ID NO: 10219 - DNA, 426 bp, Bos taurus
  unsure (319),(345),(351),(372),(379): unsure at all n locations; Clone ID: 44-LIB3057-009-Q1-K1-C12
cgaaggcccgcggcgggtgttgacgctatgtgatttctgcccagtgctctgaatgtcaaagtgaagaaattcaatgaagcgcgggtaaacggcgggagtaactatgactctcttaaggtagccaaatgcctcgtcatctaattagtgacgcgcatgaatggatgaacgagattcccactgtccctacctactatccagcgaaaccacagccaaaggaacgggcttggccgaatcagcggggaaaggagaacctggtgaacctgactctagtctggcacggtgaagagacatgagaggtgtagaataagtgggaggcccncggcgcccccccgtttcccgcgaggnggctgngcggtgtccgccggccttgcngggccgncggtgaaataccactactctgatcgttttttcactggacccgtgagg

SEQ ID NO: 10220 - DNA, 449 bp, Bos taurus
  Clone ID: 44-LIB3057-010-Q1-K1-C8
atcttcagccaaatccagagctaagctaggaatgctgaacactatgtcgaagatccgaggccaggtgaaaactacggggtacccgcagacagagggcctgctgggcgactgcatgctgaaatacggcaaggagctcggggaaggctccacttttggcagtgcattgatagaagttggtgaatccatgaagctaatggctgaggtgaaagactctcttgatattaatgtaaagcaaacttttattgatccacttcagttactacaagacaaagatttaaaagagattgggcaccacctgaaaaagctggaaggccgccgcctggattacgattataaaaagaagcgagtaggtaagataccagatgaagaagtcagacaagcagtagaaaaatttgaagagtcaaaggagttggctgaaagaagcatgtttaattttttagaaaatgatg

SEQ ID NO: 10221 - DNA, 166 bp, Bos taurus
  unsure (29),(103): unsure at all n locations; Clone ID: 44-LIB3057-011-Q1-K1-C8
tcccggccgacccagcgtccggccccggnggcggggggaggtcttccttttgcggtggcccgggctcccgtggggccgggggctgcggtcgctctgtgcgcgngccgggcccttgccgtgcgtcgccccggctgcggcgggcgtcgcggccgcccccggggtgccc

SEQ ID NO: 10222 - DNA, 399 bp, Bos taurus
  Clone ID: 44-LIB3057-012-Q1-K1-C12
tcgagcggccgcccttttaatatatttatttttttcatatcatttttttttattggtgtttatacattttactatattttcttactatatttttttatattctttttaccttttttaaaaaataaaaatcttaacattaatattactttttttctatttaattaatatcttacttgatctgcttttactaaacctcagtaacttataccttattcattataaaaaattttatgtcaacttactgtagattactattatcatatactttaaaacaaaccaatttgtaaaaatgctaaatttttaagcaattaagcactgatagtatcataaatcctacaaagctttatagttccttatactcaccttgtctattctctgactaaagtcttgatttcaata

SEQ ID NO: 10223 - DNA, 337 bp, Bos taurus
  Clone ID: 44-LIB3057-012-Q1-K1-C8
atcgtgtccgaagatggactgattgtgacaaacgcccacgtggtgaccaacaagcatggggtcaaagtcgagcttaagaacggtgccacctatgaggccaaaatcaaagacgtggacgagaaggcggacattgcccttatcaaaatcgaccaccagggaaagctgcctgtgctactgcttggccgctcctcggagctgcggccgggagagttcgtggtcgccattggaagcccgttttcccttcaaaacacggtcaccacggggatcgtcagcaccacccaacgtggtggcaaagaactggggctccggaactcggacatggactacatccagacag

SEQ ID NO: 10224 - DNA, 230 bp, Bos taurus
  Clone ID: 44-LIB3057-013-Q1-K1-C12
aattattcccatcctattggccgtagcattccttacgttagtggaacgaaaagttctaggctatatacaactccgaaaaggtccaaatgtcgtaggtccatatggcctacttcaacccatcgccgatgcaatcaaacttttcctaactaaaaaaaaaaaaaaaaaaaaaaaaaaaaaaaaaaaaaaaaaaaaaaacaaacaaaaaaaaaaaaaaaaaatagaagaaccaa

SEQ ID NO: 10225 - DNA, 450 bp, Bos taurus
  Clone ID: 44-LIB3057-013-Q1-K1-C8
cggcgcgagccacgcatccgctaccttcctaccccttaagataaagtttacgcccaacagacccaccatgaagggctgatgagcttgattcgtgggtagctccgctcctaaaatgaccctctctatcacctaatcaccgatgtgcactctatgaaaggagcccaatatgctatcctatcgagggccatagagattgatgaacaaaacaaacgactactataaggcatcgagatgatatttgaccactttattcctggagccaaagagactgaaccctaccctgtgtggtcaggactccagtccctgcaaactaatgatgaagatgcactttattctgctttctataaccttctccacttactgcgcaagcattcaaacaagattgacacttaccttaagctccttaattgcagaatcatctacaacaacaactgctaatcccacattcat

SEQ ID NO: 10226 - DNA, 264 bp, Bos taurus
  Clone ID: 44-LIB3057-014-Q1-K1-C8
ccggaccccggtcccgacgcgcggcggtggcgcgccgcgccgcgccccggtggacgcgggcgactgcccgccggcggggacggcggtggaccggctatccgaggccaaccgaggctcccgcggcgctgccgtatcgttccgcctgggcgggattctgacttagaggcgttcagtcataatcccacagatggtagcttcgccccattggctcctcagccaagcacatacaccaaatgtctgaacctgcggttcctttcgtactga

SEQ ID NO: 10227 - DNA, 272 bp, Bos taurus
  Clone ID: 44-LIB3057-017-Q1-K1-C8
agcttcctggtgaagtgtgtttcttgaaatcatcaccaccatggacagcaaaggttcggggcagaaagggtcccgcctgctcctgctgctggtggtgtcaaatctactcttgtgccagggtgtggtctccacccccgtctgtcccaatgggcctggcaactgccaggtatcccttctagacctgtttgaccgggcagtcatggtgtcccactacatccatgacctctcctcggaaatgttcaacgaatttgataatcggtatgcccagggca

SEQ ID NO: 10228 - DNA, 443 bp, Bos taurus
  Clone ID: 44-LIB3057-018-Q1-K1-C8
caaacatgaggggaaaatatcagttatgatcaaagttgttactgatttcttgtatgtcccgtgattcctgttgctttacccacaacagacaagtaattgtctaagtgtttttcttcgtggtccccttcttctccccaccttactccattcttaactctgcattctggcttctgtatgtagtattttaaaatgagttaaaatagatttaggaatatcgaattaattttttaagtgtgtatattcttttttctttgttgtttatatttattctgatatttacctttttttattatatttatgttttgtgtttttttttttcacatttccttttattttcttttttttacttttcttttttattattttcttttttttttttctttttttctttcttattatttattattctttttatttttttttttttttatttctttttattt

SEQ ID NO: 10229 - DNA, 333 bp, Bos taurus
  Clone ID: 44-LIB3057-019-Q1-K1-C12
gccgggttgagaggagcgtggccttctcctctccccgccatggcgtgtgctcgtccactgatatcagtgtactccgaaaagggggagtcctctggcaaaaatgtcactttgcctgctgtgttcaaggctcccattcgacccgatattgttaactttgttcacaccaacttgcgcaaaaacaacagacagccctatgctgtcagtgaattagcaggtcatcaaaccagtgctgagtcttggggtaccggcagagctgtggctcgaattcccagggttcgaggtggcgggactcaccgttccggtcagggcgctttttgaaacatgtgtcgtggg

SEQ ID NO: 10230 - DNA, 218 bp, Bos taurus
  Clone ID: 44-LIB3057-019-Q1-K1-C8
gcaagattgacacttaccttaagctcctgaattgcagaatcatctacaacaacaactgctaagcccacattcatcctatccatttctgagatggttcttaatgatccattccctggcaaacttctctgagctttatagctttgtaatgcatgcttggctctaatgggtttcatcttaaataaaaacagactctgtagcgatgtcaaaatctaagactg

SEQ ID NO: 10231 - DNA, 342 bp, Bos taurus
  Clone ID: 44-LIB3057-020-Q1-K1-C12
gaattcccggccgccgacgtctacttgccgttgacatttattggtgcatacttttgttttaagaagaatgccattgatcagcagttctatctcaatcagatggcacgtcagattcctgaacagtctttctacacaaagccattacctagtattatcatgggagggattttgccctttgggttcatctttatacagcttttcttcatcctgaatagtatttgttcacaccagatgtattacatgtttggcttcctgttcctggtgtttatcattttggttattacctgttctgaatcaactatacttctttgctatttccacctgtgtgcagaggattatcat

SEQ ID NO: 10232 - DNA, 387 bp, Bos taurus
  Clone ID: 44-LIB3057-021-Q1-K1-C8
ggaagattaaccatgtattgaactactgaaaagtatatatttttagatatacagaaggaatctacatggagcagcattcagacctatatagaagtcatagcattctgtataggaccacaaaggaaataacattaaacaacttaaacagactttgttgggtagaaatacctttagatcttgcaatgacatccaaaaagaaaatgccacaaaagtttgctgagaacttttgttgtttgaattttctctgtcagtgtatttagcccaaatagaacagctttgggttaacacatacataggaatcaaaaaaacatagctaactaaataaatcagtctggtttgccaatccagcttgactaagtaaactaatcacttgcaacatgaaaaact

SEQ ID NO: 10233 - DNA, 235 bp, Bos taurus
  Clone ID: 44-LIB3057-023-Q1-K1-C8
tcgcgcctctttttcttcgctgcctcccagttctagtattagccgtcgccatgggttttgtagacttgaaaagccccgctggcctccaggtgctcaacgactacttggcggacaagagttacatagaggggtatgtgccatcacaagcatatgtagcagtgtttgttaccgtcttctgcccaccacctgccgacttgtgttatgcttttcgttggtataatcatatcaaatccta

SEQ ID NO: 10234 - DNA, 318 bp, Bos taurus
  Clone ID: 44-LIB3057-024-Q1-K1-C8
attttgaacccaacaatagcagctccatttctggggtctgagtctttcaagcccggaagcttgctttacggttaagtcaaaatggccagttgactaacaatcattccaattgccgaaacctgatcccggcagacaggagacccaaaccttggttcgagaattcttatgctgtgaaggaagctatcaacatgtaggcaaaacgttcaatcatggcaagatatctaagtgaatacctcttgccatttgccagctgtcagcacctgccctacttgaagaatggtggtcattaaatgaaactgtgcattgataataaaagaa

SEQ ID NO: 10235 - DNA, 311 bp, Bos taurus
  Clone ID: 44-LIB3057-025-Q1-K1-C12
gatcaatgagcttgaagctgctcttcagaagaaagatgaagatatgaaagcaatggaggaaagatacaaaatgtacttagagaaagcaagaaatgtaataaaaactttagatcccaaattaaatccagcatcagctgaaataatgctacttagaaagcagttggcagagaaagagagaagaattgagattctggagagtctagcattccagaaattggggatggaatctagacttgtgagcagcagtggtgcttgcaaagacacggtggcctgtgctcctgcccggtctttcctagcacagcagcgccaca

SEQ ID NO: 10236 - DNA, 414 bp, Bos taurus
  Clone ID: 44-LIB3058-001-Q1-K1-C12
gttaaatatttattttcttctccaagctttagggaaagagagaggggtcaagagttaaagacctttttatctctgagaagcatccctctaagacattctgtgggagctctgtcagtagtactccttaacacctggggtgggtagaagccttactaaaattgtgccgagagcctgatcttacttactccatattacattctttccaacctgaatttctgctcattttgtttggaggaagccccttactctctaactgatggatggcccagtgtcattttgatctgctgcttttcagaatagaaatttacagataatttaaaaaatattttttagtatgtaaacactgtaggtcacctgatatatttatcagtggtctatagtccactggttttgagccaagtctagaatttattg

SEQ ID NO: 10237 - DNA, 400 bp, Bos taurus
  Clone ID: 44-LIB3058-001-Q1-K1-C8
cggactcgtgggatgatggataaaaaataaaagcctgccacctctgttggctaggcagttttgtacacttttttgaaatatgtaaaaattatgaaacaaacctcatcagtataatataattaaaaggccaatttttttcctggcaactgtaaatgaaaaaatatatggactaaacatagccctgtgctgtatcatggccacagtatattgtaacccttgtctaatcattgatttgtgtcacttctgaagtttcacagaaatgaacgaactttctcatcgatgtgatgagtgagataattacgggagtggtaggaatcgtggctggaatcctggtttgggttgtgttgcacacaggtgtagccgtctgctctgtgtatttttccctttgataacgtgcttt

SEQ ID NO: 10238 - DNA, 448 bp, Bos taurus
  Clone ID: 44-LIB3058-004-Q1-K1-C8
tgtgtacttcagtggttctgtgtgtgctccattcattgcattagttattggaagccactgatggttgactctactagaacagttagaaccggacacggaacaacagactggttcaaaattgggaaaggagtatgtcaatgttgtgtattgtcaccctgcttatttaacttatatgcagagtacatcatacaaaatactgggctggatgaagcacaagctggaatcaagattgccaggacaaatatcaataacctcagataggcagatgacaccacccttatggcagaaagtgaagaggaactaagagcctcttgatgaaagtgaaagaagagagtgaaaaagctggcttaaaactcaacattcagaaaactaagatcatggcatctggtcccatcacttcatggcaaatagcataaatatggggaaacaatggaaacaatggcagact

SEQ ID NO: 10239 - DNA, 459 bp, Bos taurus
  Clone ID: 44-LIB3058-005-Q1-K1-C12
ttggtatatgtttaataccctgtgcatatctttgatttaaacccctagttatatgcggctctctcacctcgagctgaggtgagaatgtttatggaagagaaatccaatggcttgataagaatctgggagactgagtctctcagtctgtgcagggtattaatgtgtcagagctgcctattccaggatttctctagaggctggcaagagtccttgaaacagttgtcatttctgtcttggccggtcttacacggggttgggaaggtccaagccgtaagacctgctttcctttcttactgaagatttcccaccagagcactgttctggttacttgccttgagttggaaacagtttgcattcacacctgtaaatttattcatccttttaatttatgtaaggtttttgtacgcaattctcaattcttttaagagatgacaacagactttgattttctactgtcat

SEQ ID NO: 10240 - DNA, 346 bp, Bos taurus
  Clone ID: 44-LIB3058-005-Q1-K1-C8
cggacgcgtgggtgagtgtctgtgaccgtgactgcgtccctgtgactgtgcagcgcccgtggtgatctggggtagggggcacccctacagtgggacccctcccccactattcttcctgtccagcccctccctcccactggagcagctccagacccatccctcaactccatgatccctcccagccagggttaagatggtgtgaggcggctgggagggtttccagacctccctgtcccatccccagaaagggggtggtggggtgaatttacctggcccagccccgcctccctcaatcaacccagcccttgggccgtctgtgtcagtggtttccggtgctttttttttt

SEQ ID NO: 10241 - DNA, 323 bp, Bos taurus
  Clone ID: 44-LIB3058-006-Q1-K1-C8
cggacgcgtgggcgcgcgttcacggaaggaggatgccttctttcacgcccaccgatccgtagagcataaagaatctgccgaggaggcaggagaagaaagcccgaatccatctaccgccgtggagccagaagatggcggaagctgtaccgcgccaacggccacctcttccaggccaagcgctttaacaggagagcgtactgcggccagtgcagcgagaggatatggggcctcgcaaggcagggctacaggtgcatccactgcaaacggctggttcataaccgctgttacgtgctcgtccaactgacctgaagcaggcttatgga

SEQ ID NO: 10242 - DNA, 280 bp, Bos taurus
  Clone ID: 44-LIB3058-008-Q1-K1-C12
gttctagatcgcgagcggccgccctttttttttttttttttttttttttttttttttttttttttcaagtccaagaatctttatttcatgaacaaaactacttgtgtaaagagagacgaggctgaatgggcccttttttaagtggccacaatccaaggctggtgaaagagggtgggttgggctggggtgagagtgcgtcgcagggagaggagaccccaggtccagccagaggaagcaggaggggaaatggcaccagggctcaaaggggaattggggggcg

SEQ ID NO: 10243 - DNA, 417 bp, Bos taurus
  unsure (380): unsure at all n locations; Clone ID: 44-LIB3058-008-Q1-K1-C8
gtgccacttcttgtcccctttcctttctgtatgtcctcctctatcccttcacctctcttcctttatcccagtctccttaccctgtaggtcattcctctggaaaaccaaacagagaaagacctcaggtggacaggccattcatttcccttctaagaccttcattgcctttgctttctttcttctgcgtgccttttcctctcccttcctcccctttcctgagggtctggatccaggagaaagatccatttccttccctgccacagcagaggcattgggaaagaagccaagccactgacccaggatggcccagcacttgtggggactgcccaggaatagccccttgcttctgtagcccccccagtgacccaaaaggtcctctntctccccaaagcagacgtcgcatatagggcaacagta

SEQ ID NO: 10244 - DNA, 415 bp, Bos taurus
  Clone ID: 44-LIB3058-010-Q1-K1-C8
agaatggtaaaaagaagaaaatgaagcgaaagtgtcctggcccaggagacaaaggaaatgcttccctgaggagcagtggctcacaggaccagaatgggaaatctaaagagcagcagcagcctgtgagaatgagtcaggggttcatcaaccaacatacggtgcaacgccagggaaagcaaatttgtaaatactttcttgaaaggaagtgtattaagggagaccaatgtaaatttgatcatgatgcagagatagagaagaaaaaggaaatgtgtaagttttatgtacaaggatattgtaccagaggggaaaactgcctatatttgcataatgaatatccttgcaagttttaccatacaggagcaaaatgttatcatggagaacattgcaagttttcacatgctccactgactgatga

SEQ ID NO: 10245 - DNA, 436 bp, Bos taurus
  Clone ID: 44-LIB3058-011-Q1-K1-C8
cttatcatatagtaaacccaagcccttgacctcttacaggagctttgtctgccctcttaataacatccggcctaaccatgtgatttcactttaactcaatgaccctgctaataattggcctaacaacaaatatactaacaatataccaatgatgacgagatgttatccgagaaagcaccttccaagggcaccataccccagctgtccaaaaaggcctccgttatggaataattctttttattatctccgaagtactattctttaccggatttttctgagctttctaccactcaagcctcgcccccacccctgaactaggcggctgctgacccccaacaggcattcacccactaaaccccctagaagtcccactgctcaacacctctgtcctattggcttccggagtttctattacctgagcccatcatagtttaat

SEQ ID NO: 10246 - DNA, 427 bp, Bos taurus
  Clone ID: 44-LIB3058-013-Q1-K1-C8
ctagatcgcgagcggccgcccttttctttttgttggtgttgttgtttatttgttattttaaaaggaaattgcacttttaaagaatcattggttaacttaatatatttgcttttttattattttctcacctgcactgcgagggaaattgaaccagtcaggaaaaaagttaagaaagatttttgtttcaattctaagaaacacttgcagctctcttctcttcacttgagtcttcctgtttttccatgatgctcatcttggttctttcgattgtttccttgagacaacttaaaacctgaagatttctgcaggctgtgtaagcatgttttcctgttggcttgctgtgtgtgtctgttaaatgaatgtcatgtgtaaatgctaaaataaatcgacagtgtctcagaactgagtaactgcagtgacttgatgc

SEQ ID NO: 10247 - DNA, 278 bp, Bos taurus
  Clone ID: 44-LIB3058-015-Q1-K1-C8
cggacgcttgggcggacgcgtgaggcaaaggccaagagaggtatagaagctttagttactacatgggagtctgtggttgactactgcaacaggcttctaaagaagccatatgctcatcgggcactaagaagtatgaatgtgaagtatgagaaagacatgtctgactagattgagaaaggaacagctgaaagtggacattaagaagatctagagtacatgaatgaaaatctaaaggatgtattgacgaaaagggaatatgaataatcagtagatggtgt

SEQ ID NO: 10248 - DNA, 284 bp, Bos taurus
  Clone ID: 44-LIB3058-016-Q1-K1-C8
tcgctgactacaaatcggttcacaagggactcaaggcgcacgacgcccaggcacgctttgcaaaatcttcaagctgggaggacgagacagccgttccgggtccccgatggcaagacgctgaagcccagcttcgcttccagaaccccgtccgcagcttcttaatacaaccggctcgacgctaaccattgtctaaattcccaagtgcaggaggcatacctgcaccctgcccacatgcgcgtcctgcaggctcctggccagcggctcaatggagaagacggtgcagc

SEQ ID NO: 10249 - DNA, 436 bp, Bos taurus
  Clone ID: 44-LIB3058-017-Q1-K1-C12
gctgtcctggcggcgccaactgaagcgccgcgtctgtgccgacatgctgcgccgcgctctgctctgcctggccctgaccgcgctattccgcgcgggtgccggcgcccccgacgaggaggaccacgtcctggtgctccataagggcaacttcgacgaggcgctggcggcccacaagtacctgctggtggagttctacgccccatggtgccgccactgcaaggctctggccccggagtatgccaaagcagctgggaagctgaaggcagaaagttctgagatcagactggccaaggtggatgccactgaagagtctgacctggcccagcagtatggtgtccgaggctaccccaccatcaagttctccaagaatggagacacagcttcccccaaagagtacacagctggccgagaagcggatgatatcgtgaactggctg

SEQ ID NO: 10250 - DNA, 439 bp, Bos taurus
  Clone ID: 44-LIB3058-018-Q1-K1-C8
aaccttacatatcatagtgaatggtttccccagtgtatatgaatgttttaagtgtctccaatagcttacacagtttaggagctttccaatactcatttaataaggtttaatcatttgctaatggaaattttaccacttcccattttccttgttaccaaatttcagctctcaggagctgttctgcaattctgaaattgcttttcttgcctctttagtcacctgtcacaggaggttcttgctcagtaatgatatggtgagttagattaataacttttttttgcacttcagatttagaagaaacgatcctgtttccatttgaaaggaactgtaaagcttttttatcatttaaccaactgaacaacacaccataagcagcctagggatgagcacttctttgaaggcgattaggttattcacctggtataaaactatttactat

SEQ ID NO: 10251 - DNA, 460 bp, Bos taurus
  Clone ID: 44-LIB3058-019-Q1-K1-C8
gcagctccgtctaaggtccgcctcgctccgcggcggccatcagacccttgggctcaggctcgaggggctgggagctgcgcgctccgctcaggcagagcgacaccgccctccccgcgcgctcctccccgaggagccgagtccgcgcccggcccgcccgcccgcccggcgctgccccggccctctcggcccgcgtgaggccgtccgcgcccggccccgccgccgccgtcgtcgccatgggctgtctcggaaacagcaggaccgaggaccagcgcatcgaggagaaggcgcagcgcgaggccaacaagaagatcgagaagcagctgcagaaggacaagcatgtctaccgggccacgcaccggctgctgctgctgggtgctggagaatctgggataagcaccattgtgaagcaaatgaagatcctgcatgtaaaagggtttaatggatagggcggtgatgagga

SEQ ID NO: 10252 - DNA, 422 bp, Bos taurus
  Clone ID: 44-LIB3058-020-Q1-K1-C12
aggtgtcaggtatggtacagaatggctattagatgctacaaacctttaagagatgagaactaccttgcagcgatcatattacaatataactgtggaaactatcatgagttggtacctaacacaatattttcttgaaacatgacaaagctcatgaaatatcaatgcaagtgatatatttccataccggatgactacacgctttaaacctgctttggactacctgatcctccattaggtacttaaagacaatagcatactctcatacagcacattgcggaatttgacagcttgtataaagattagcatatttaataatgtccatcgaatcatgtatgatatgactgagcatgttaatgtgacatagtgatttataaatttaagtataatgaagttactgcttactgctgctgctaagtcgcttc

SEQ ID NO: 10253 - DNA, 460 bp, Bos taurus
  unsure (417): unsure at all n locations; Clone ID: 44-LIB3058-022-Q1-K1-C12
tcttttttatatagagtatatcatagtgacaaatttatatttatattattggcaacttcagttttggcaatttatttactgtaaaatgtaccactttaaaaatgttaattgcttgttttgtttgtatgccgttgtttttaatttcctttgtgaaaggagataaatgtggtagtaattattggagcattttgttgaagaccatcatgctgtgttacttcaatacctgcgtaagtggtggttgactggtgaccgtgtacacagcagacgtttagaatagtatgatgccttcaatttaaatggaaatgaggttattcttttaaggattttaatttaaatgtgcatttttctgtaaggaataataaaataatagtaattaaggactattcagtactatattaaatacatgttcttcctgtnttgtttaattatactgtaaattcactttgtccttgattattca

SEQ ID NO: 10254 - DNA, 413 bp, Bos taurus
  Clone ID: 44-LIB3058-024-Q1-K1-C12
actagataatgaatatccttagttgaggcactaagatttaataaacaaaatgataattgctttttaatatctagcattacagagcactgaatgcttaacagtttgcaacagaaagccttcactacaaaagaagtttgcacaggtattagcaatgcaatccagataaggcttttaatctaaaatgctggagagttttcttccccaaaacagaattacaaagaacaggagatagcttcctttgttttaaataggaggcagaattattcttttagaaagcagttcccactgtttctgttaacctattctaggaacagtagaaaaatctgtgtactccacagcgaacttacacatgataaagacagaattcctgaaccctgcaatagtctgtttctatcatgatagtacttgggatg

SEQ ID NO: 10255 - DNA, 134 bp, Bos taurus
  Clone ID: 44-LIB3058-026-Q1-K1-C12
ataaacaatagcaccatagaggagtgtttgaagcactatatgaagcatttcatcaatagccctatgggaacatttacacggcttaaccataatctagcataggatgcaaaaactgctaacacatccaatccatt

SEQ ID NO: 10256 - DNA, 401 bp, Bos taurus
  Clone ID: 44-LIB3058-027-Q1-K1-C8
gcgagcggccgccctttttttttttttttttttttttcttttaaaaagattttattggaggtttttgcagagcgggatgcagattccagatccacaggccaaggagacctattatgctgtgggtaccggctggggcatgccaggcggctctggcttcccacccttctgttcatagatcggggtcgtgggcagtatttcatctttgccttccacaatgctcacgtgatcaggcacaggcttcttatggccaatattaccagtcggttcccaaggcagcatgatctttaccttgatgcccatcacaccctgtctgatcagcacatggtgcacgtgggtgtccacatagtagttaacagggtccccacttgtggatcatgaggccatccacaaacttcatggat

SEQ ID NO: 10257 - DNA, 418 bp, Bos taurus
  Clone ID: 44-LIB3058-028-Q1-K1-C12
cacatcaggtggccaaagtactgcagcttcagcttcatcatcagtccttccagggaagacccattactgagctggttaggatggactggttggatctccttgcagtccaagggactctcaagagtcttctccaacattacatcttaaatgcacacattctttatcaccttagctactatcatatctcttccataacattctatacattacctctgccaaaaccttattctttactttttataccttttttggctatatattttctttacttttttttttattttttataatattctttattattttttttttattatttttatttttatattatattatttttttttttttttattttatttttattttcttttattatttattatattttattttttttttattttttatttttttt

SEQ ID NO: 10258 - DNA, 277 bp, Bos taurus
  Clone ID: 44-LIB3058-028-Q1-K1-C8
gctttaaagcagcgattctggccccggctggtcaggtgaagagcgagcgagaaccgggttctgcgtagttgtttccgaggggcagcaagggaaaagggtttaaccatgtcgtctctggtcagaaagataatcagcaccgcgaaagcccccgcggacattggtccctacagtcaggctgtgttagtcgacaggaccatttacatttcaggacaactaggcatggaccctgcaagtggacagcttgtgccaggaggggtggcagaagaggctaaacagg

SEQ ID NO: 10259 - DNA, 417 bp, Bos taurus
  Clone ID: 44-LIB3058-029-Q1-K1-C8
cgttgagagaacgagaaggaaggagagaaaatggcgtccacggattatagtgcatagggccaagctgcagcccagcagggctacagtgcttacaccgcccagcccactcaaggatatgcacagactacccaggcatatgggcagcatagttatggaacctatggacagcccactgatgtcagctatacccaggctcagaccactgcaacctatgggcagaccgcctatgcaacttcttatggacagcctcccactggatattctactccagctgccccccaggcatacagtcagcctgtccaggggtacggcactggtgcttatgacaccaccactgctacggttactaccacccaggccttctatgcaacttagtctgcatatggcactcaacccgcttacccggcgtatggacag

SEQ ID NO: 10260 - DNA, 255 bp, Bos taurus
  Clone ID: 44-LIB3058-030-Q1-K1-C12
gctaagagacttcatccaaagtataggccaagtatccagtgacgtggtagagggctggcctgagtcttataagtgtgactatccggaaagctacaagggaacccctctaaaagacttccaggtatctgagctatcctgcaacacagctctgctgatcatcaccattgtggtccctgggctggtgctggctgttgctgtgactgtcctctgtatctacctggatctgccctggtaccttaagatggtgtgtcagtg

SEQ ID NO: 10261 - DNA, 411 bp, Bos taurus
  Clone ID: 44-LIB3058-030-Q1-K1-C8
tcgcggacgcgtgggtttaaaactttaattgctgtcttttcaaactgtatttatacaagtttattagggcctgatccatacttggagaataatcagtcaaactttttattttgaaataagaaataacctgttaggcatttcagcagcatatatcatcttgacaacccagagtatgtatgtatgtgtgcgtttctattgtatgtgtttctgtatgtatatggtggagggcaggagtgaatgttcacacacatttcgttgtgtagtcaactaattaggagaattgttctaaagacagttggatgaaattagctgctgagatgggagtttctgcctcaggagatccggaaccaaatgagggacacattgctggtgggtcaaatggctttagctataaccagaacacttagtttc

SEQ ID NO: 10262 - DNA, 451 bp, Bos taurus
  Clone ID: 44-LIB3058-031-Q1-K1-C8
tccccgccccgccccctaccacccccattttaggtttagtggatggaaggaagggtggagaggcatgggtgggggggtgtcctactcttactcttctctctatttctttcccctttgtattcctttttattttctcttcctattcacttctttttttctttctctatttattctttttatcttctttctttgttatttcttttttttttttttttttttcttttttctttttttcttttcttaattttttctttttttttttttttttttttttttttttttttcttttttttcttttttcttttctttttttattttttttttttttttttattttattattttttttttttttttttattttttttttttttttttcttttttttttctttttactttttctttttttattttttttcttttttttttttcttttttttattttttttt

SEQ ID NO: 10263 - DNA, 280 bp, Bos taurus
  Clone ID: 44-LIB3058-032-Q1-K1-C8
gacttaaatatctgcctgaggtcaggaggcaatgtgccttagacaaaagctcaggtgagagactaagatgaatgtctttcctcttctcactgcccacaagatttcctcctggaaacgtctttggtagatctggccaggagcttgcctttatataaatcggagaaatacgaacaccgtacactatccacagatagagaacaagtagatttgggtagaggatattatttccaaactagcattttagttcacctaggggggtgtgtttgcatacacatttaca

SEQ ID NO: 10264 - DNA, 422 bp, Bos taurus
  Clone ID: 44-LIB3058-035-Q1-K1-C8
tgccgatacaccagccacacaagattattcagaagcccaccacagggctgttggccatgaccttggccctccacctctgtgacctggtacacattgctggcttcggctacccagacgcccaccagaagaagcagtccattcactactatgagtatatcacgctcaagtccatgatgtggtcaggccacaatgtctcccaggaggccctggccatcaagcggatgctggagatcggagcggtcaagaacctcacttacttctgactcgggcaagggctgttcccatcggctcaccctgctaagcggccccggtccgtgcctctgggggtgccaggtgccagcatggccggcttggactcaccttctcctgtgtggggagggggccaggtctaagatgaggccgtgcccctggctgctctggtg

SEQ ID NO: 10265 - DNA, 406 bp, Bos taurus
  Clone ID: 44-LIB3058-038-Q1-K1-C12
tttatttttttttattttattttgttttgtatttttttatttttttttgtttgtttcttttattttattattttttatttattttattattttttatttatttatttttttattatttattttttattttattatttttattatttttattttttttattatttatttattttttttatatatttttctaaaaatatattaaataatactattttttaaggaataatttaatataaaatactaaaatgaaacacataatttaaaataaaaaaaatgaaaatgtatatgatacaaacttacatatatatgattttaacatgatagatattatatagtgatatctaaatataaataaatatcatatttaaagaaagttatgacattaaaaataattgattaattaaaa

SEQ ID NO: 10266 - DNA, 355 bp, Bos taurus
  Clone ID: 44-LIB3058-042-Q1-K1-C8
gtaataagcaagacattacaatggcaatatcatcaaagttaattcagcagcagcttgaaaaagaaatcaatactttacgggttacccgttctgctgccccgagcacactggacagttccagcactgcccctgctcagctggggaagaaaggcaaagaatttgaattctcacagttgcccctcaaagtagagttcctggagtgcagcgccaagggtggaagaggggatgctggctctgctgacatccaggacttggaaaagtggctggctaaaatcgcctgaggactagatccaaacacaagatgtgaatgtgtgtatgtgtgaatgacagtttttgaataggatttggccagact

SEQ ID NO: 10267 - DNA, 441 bp, Bos taurus
  Clone ID: 44-LIB3058-043-Q1-K1-C8
gcaagattatctgctaaacctgctcctttaaagccagaacccaagcctaaaaaggcccctgcaaagaagggagagaaggtacccaaagggaaaaaggggaaagctgatgctggcaaggatgggaataaccctgcagaaaatggagatgccaaaacagaccaggcacagaaagctgaaggtgctggagatgccaagtgaagtgtgtgcatttttgataactgtgtacttctggtgactgtacagtttgaaatactattttttatcaagttttataaaaatgcagaattttgttttactttcttttttttttttaagctatgttgttagcacacagaacacttcattgttgttttttgggggaagggcacgtcactaacagaatgtctccgaagctgaattgacgtgggggaaaaatacctttcccgtctagttttgagagac

SEQ ID NO: 10268 - DNA, 211 bp, Bos taurus
  Clone ID: 44-LIB3058-044-Q1-K1-C12
gttctagatccgcgagcggccgcccttttttttttttttttttttttttttttttttttgttttttttttttttttttttttttttttaattaattaatttatttttattttttgttacaaattatatgtattataaagaaagctaacaaaaaaagaaaaaaaaaaaaagtacgcgaacaagcaaaaggataaaaattgtaaaggggactt

SEQ ID NO: 10269 - DNA, 406 bp, Bos taurus
  Clone ID: 44-LIB3058-046-Q1-K1-C12
gttctagatcgcgagcggccgcccttttttttttttttttttcgaaaagcaatttttattgaagaatttggagggaaagtctcataatagtaaaaatactaaagttgagtataaaaaaacgccttggtgcagcgcaacgtctggccaggaagcgcacagggcgcaacaacggcccctgcaaagggcgccgggcagggccggggcaacagcgggagtgaagcttctagaaggacaagtgctaccggggggagccatcggagagacggtcccagtgggaaaggggtgcagggagggctttctcctgagatcagaaaccccagtacgcacagacagcgataggtggcacccggcccctctatcttgccagagccccagcccggcctgatcgtgggggccacccttctgc

SEQ ID NO: 10270 - DNA, 414 bp, Bos taurus
  Clone ID: 44-LIB3058-047-Q1-K1-C12
ggaggaggaggagctgtttcccgtagtcttagcggccggagatgctgagtgagcaggagcacatgagcatctcaggaagcagcgcccgccacatggtgatgcagaagctcctccgcaagcaggagtccacagtgatggttctgcgtaacatggtggaccccaaggacatcgacgatgacctggaaggggaggtgactgaggagtgtggcaagtttggtgctgtcaaccgtgtcatcatctaccaagagaagcagggcgaggaagaggacgcggagatcattgtcaagatttttgtggagttttccgtagcctctgagactcacaaggccatccaggccctcaatgggcgctggtttgctggccgcaaggtggtggctgaagtgtatgaccaggagcgttttgataacagtgacc

SEQ ID NO: 10271 - DNA, 422 bp, Bos taurus
  Clone ID: 44-LIB3058-048-Q1-K1-C8
gaaagatgaaaacgagctgaaatcatgtcctgaaaatcggtccagagtcacgaaatcaggaagcagaggaatggaacgaactgttgtgatggataaatccaaaggggagcctgtcatcagcgtgaaaaccacaagcaggtcaaaggagagaagctcaaagagtcaggatcgcaagtcggaaagcaaagagaagagagacatcctgtcgtttgataaaatcaaagaacagagggagcgagagcgccagaggcagcgggagcgggagatccgagagacagagaggcggcgagagcgtgagcagcgggagcgggagcagcgcctggaggccttccacgagggcaaggagaaggcgcggctggagcgggaacgagagcagcttgaccgccagtggcagcgcctcgagcgggagcgcctggagcgcg

SEQ ID NO: 10272 - DNA, 198 bp, Bos taurus
  Clone ID: 44-LIB3058-049-Q1-K1-C8
tgctagaggccatgctgggaggattaatatgatttatctcaacactagcagaaacaaagcgagctccatttgatttaactgaaggagaatcagagctagtctcgggcttcaacgtagaatatgcagcaggaccatttgccctcttcttcatagcagagtacgcaaatattatcataataaatatctttacagcaattt

SEQ ID NO: 10273 - DNA, 405 bp, Bos taurus
  unsure (3),(23),(31): unsure at all n locations; Clone ID: 44-LIB3058-050-Q1-K1-C8
ctnccctgcgccccaaccaccgnctgctcgnctcacggccccgcgcccggccccctcgggccctctgctcaatgaaactgtgcgcgatgatcaagaaaatgtgcccgagcgactcggatgtgaggatcccggccaagaactgctaccgcatggtggtcctcggctcgtccaaggtgggcaagacggccatcgtgtcgcgcttcctgacgggccgctacgaggacgcctacacgcccaccatcgaagacttccaccgcaagttctactgcattcgaggcgagaggtaccagctggacatcctcgacacgtacggcaaccgcgcattccccgccatgcgacgcctctgcatccttaccggagacgtgttcatcctagggttcagacagtacaaccgcgactccttcg

SEQ ID NO: 10274 - DNA, 451 bp, Bos taurus
  Clone ID: 44-LIB3058-051-Q1-K1-C8
ggctggtagctgtctcacgagctcagtacctgcgctcaggcgccgggtggtcgtggtctcgggcccgcgagtcctatcccgacagcgcagggctccaggagctgatgctggggtccagtggcaggaggttgctcacgactgtgctgcaggcacagaggtggccctttcagccctccagagacatgagattggtgcagttccaggcaccccacctagcgggaccccacctgggcctggagtcagggaatggcgggggtgtcatcgacctcaacgcctttgagcccacactgcccaagacgatggtggagttcctggagcagggagaagccactctgtcagtggtgagaagagcactggccacccagttgccagtcctcccacggtcagaggtgacgttcctggccccagtcactcggccagacaaggtggtgtgcgtgggcatgaactatgc

SEQ ID NO: 10275 - DNA, 445 bp, Bos taurus
  Clone ID: 44-LIB3058-056-Q1-K1-C12
atgttgttttaccaaatcaattcaagcagatggttttgcaataatatatttgtttttgcttttaattttcattcaagataaaaattatttgctgatttttctacccccaaattattgggaatcatggaatatttatttccgttgatgactgctttcaaaattatatgcagactctgattagggcttaactaacggattttcaaagaagaaaaaactattctggtggtatagaaaattatgatgctttcagttcagttcagtcgcttagtcgtgttcgactctttgcgaccccatgaatcacagtacgccaggcctgcctgtccatcaccaactcccggagttcactcagactcatgtccatcgagcgatgatgccatccagccatctcatcctctgtcgacctcttctacttctgcccccaatccctcccagcatcagagtcttt

SEQ ID NO: 10276 - DNA, 274 bp, Bos taurus
  unsure (19): unsure at all n locations; Clone ID: 44-LIB3058-056-Q1-K1-C8
gcgccctcccttacggagncgtccctgagggtcggaagcgggacccgcctgcacgacccgggagccccggaggccgacccccacccccgagacagctcttctacaatgggacagaacccttgaggtctcaggacccactgtcgtggcccatgctggccgccaacctggagaccgtggccacagaaggcgcggaggccctctacacagggcagcttggccagctgctgctggaggacattgccgaggaaggtagccggctgacccggcaggactt

SEQ ID NO: 10277 - DNA, 409 bp, Bos taurus
  Clone ID: 44-LIB3058-058-Q1-K1-C12
gttaaaaataaatgcttaacatcagctgtttactatcactggggaagaagttaacttgaaatatttactgataaatagccttttcttaaagtgtgacttttctgccttgtctgcatactatgtcacatgttctatttgcactgttgcaatatgggtcaaaagtcttgtggcatagggctagggaaatgtcagtctctcacttgtcccatttgttctgttactgttctgtgggactgatctaccctcataaacctgtgatcatcgcctaaatgttaagttgtgaatgtgtcaccttttgcttggttatttcaaccaggcattgaatatatatgtatatgtatatattcaatgctgctgtatataatcagatgtggcacagtttatcagtttggtcctgggggtgaatgga

SEQ ID NO: 10278 - DNA, 157 bp, Bos taurus
  unsure (138): unsure at all n locations; Clone ID: 44-LIB34-001-Q1-E1-C8
cccacccactaataaaaattgtaaacaatgcattcatcgaccttccagccccatcaaacatttcatcatgatgaaatttcggttccctcctgggaatctgcctaatcctacaaatcctcacaggcctattcctagcantacactacacatccgacac

SEQ ID NO: 10279 - DNA, 406 bp, Bos taurus
  unsure (386): unsure at all n locations; Clone ID: 44-LIB34-002-Q1-E1-C8
agtcagggagaatataaatgaccatcgccattgaggttctgttacatttgagaagctgaagcaactcccaggacacagctcacaggctgattttgcttctcggctccaaaataagaattgatttgaggacaattgttacgactctgcagccgataactttgaagagaacctgtgaggaaggcagctaggggggcttgatcgcacacctacatcctacatctccggcatgtgcactgggagctgtgccaagtgcctgaggggcaccctcatccccctgtctgtgtttggcctcctcgctaacatcctgctatttttccctggaggaaaagtgatagacaacaatgaccacctttccgacgaagtctggtattttggaggaatactangaagcggagtcttgatgatc

SEQ ID NO: 10280 - DNA, 349 bp, Bos taurus
  unsure (217): unsure at all n locations; Clone ID: 44-LIB34-004-Q1-E1-C12
attggcgaaaggaatttgaccttgaccataaagaatgctgacccatctgacagtggcttgtattgctgccgtattgagaaaaaagggtggttcaatgatataataatcactcaagagttgagtataagagattcctcaggagacatgtagtctgctattcccatctcttcaagaatattccagtttgttgtgattcacaattaaaggctttcacacnggtcatgaagtataagtacatgtttttttaatttctcttgctttttctatgatctagcataagttggcaatttgatttctggatcctctgccatttccgaatccagcctgtacatctggaagttctctgttc

SEQ ID NO: 10281 - DNA, 328 bp, Bos taurus
  Clone ID: 44-LIB34-004-Q1-E1-C8
gtggggtcactggcggtggctcggggaggccgaccgggaagggagggggctgtgggggcggctcggaggcaccagccccggctggggagcagcggtgactccggtggccggggccacggctttccgagcttcggtgtgaggccgccgcgggccccgttttccggcggccgcccgagtttgtggtgattgttgccgccgccgccaccgccccggctgccatctcctcctcctcccgggccgccgcctcctcctcttcctcctcctcctgggccgggccgatcccctccccgctgccgcctcctcctgggctgggcccgcggtgtctcgt

SEQ ID NO: 10282 - DNA, 363 bp, Bos taurus
  Clone ID: 44-LIB34-005-Q1-E1-C12
cccggcgcggcacccaggggggcgggcaccccctcgcgcggctgccccttgcctcccgccgcctggccgtccaaggaccggccgcggggagagggcgtgtgctgccggctgcggagccccgcggcagccggccgctcgccccagccccactccagcacctccgcgtctcccaccgccgtgtgtctcctctgcccgcaggactcgctcagcagcagcttgaaaacatgctacaagtacctgaatcagaccagtcgcagtttcgcagctgttatccaggcgctggatggggaaatgcgccatgcagtatgcatattttatctggttctccgagctttggacacactggaagatgacatgactatc

SEQ ID NO: 10283 - DNA, 405 bp, Bos taurus
  Clone ID: 44-LIB34-005-Q1-E1-C8
cttagttggctgtgccaggtcttagttgaagcatccagggtctttagttgtggcatgtgggatctagttccctgaccacagggattgaacctgtgtccccagcattaagggtgtggagtcttagccactggaccactaggggagcctcgtcccagtttatactccaaatgacagtctccttcagactgcctatttgtctatgtctaccatcactgttctagctggagtgtaccaatttctgtatctaataagtcattttttaaaaattgcacatcttttgcatttatttttctgtggtacatttacagcttggtcaccactcagcatagatttttttccaacttctatttaagtcaatttgccagtttttttttcctccttgaaattgccttgttaggtactcct

SEQ ID NO: 10284 - DNA, 395 bp, Bos taurus
  Clone ID: 44-LIB34-007-Q1-E1-C12
gtttcaagcccagctgcgctgaagcttctgcactctgagcgtcataacctgcaccatgcccatgatcctgggttactgggacatccgcgggctggcccatgccatccgccttctcctggagtacacagacacaaactatgaggagaggcagtactcggtaggagatgctcccgactatgacagaagccagtggctgaatgaaaaattcaagctgggcctggacttccccaatctgccctacttaatcgatgggactcacaagctcacccagagcaacgccatccttcggtacatcgctcgcaagcacaacctgtgtggggagacagaggaggagatgattcgtgtggacattttggagaaccaggttatggatgtccgcttggccatggctagga

SEQ ID NO: 10285 - DNA, 371 bp, Bos taurus
  Clone ID: 44-LIB34-007-Q1-E1-C8
gttggttggggttgtgatggaggtggagtgggatgcactgagagtgctgggagcggttacagccctgttcctgctgctgtgggcgacctgggctgtgggatccacagtctatatttacctgctgcctcaggcacgccggagcaaccactggctccgggcacacggggcctgggcagtggtgacaggagccaccagcggcattggcaaggcttacgcacatgagctcgcccggagaggtctgaacgtcgtcctcatcagtcgagacctgagcaagttgaagcacgaggcaaaggagatagaggggctttacggcaaaagaacacgagtgattcaggtggatttcaccgggggctttggaatctacgagacca

SEQ ID NO: 10286 - DNA, 421 bp, Bos taurus
  Clone ID: 44-LIB34-008-Q1-E1-C8
accgccaagatggagagtttgtatcgagtcccgttcttagtgctcgaatgcccgaacctgaagctgaagaagccgccctgggtgcacatgccgtcggccatgacggtgtacgctctggtggtggtgtcttacttcctcattaccggaggaatcatttatgatgttattgttgaacctccaagtgtcggctcggtgactgatgaacatgggcatcagagaccagtcgctttcttggcctacagagtaaatggacagtacattatggaaggacttgcatccagcttcctgtttacaatgggaggtttaggttttataatcctggacagatccaatgcaccaaacattcccaaactcaataggtttcttcttttattcattggattcgtgtgtgtcctattgagttttttcatggctagagtat

SEQ ID NO: 10287 - DNA, 259 bp, Bos taurus
  Clone ID: 44-LIB34-009-Q1-E1-C8
ggcgaagaacgcggttggccaatcgcaagccagaagatgaaggttctgtgggttgccgtggtggtcgcgcttctggcaggatgccaggcggatatggagggagagctggggcccgaggagcccctgactacgcagcagccccgggggaaggacagccagccttgggagcaggcgctgggccgcttctgggattacctgcgctgggtgcagaccctgtctgaccaggtgcaggaggagctgctcaacacccaggtcattc

SEQ ID NO: 10288 - DNA, 408 bp, Bos taurus
  Clone ID: 44-LIB34-010-Q1-E1-C12
aaactttggcacaatgaagtgggtgacttttatttctcttctccttctcttcagctctgcttattccaggggtgtgtttcgtcgagatacacacaagagtgagattgctcatcggtttaaagatttgggagaagaacattttaaaggcctggtactgattgccttttctcagtatctccagcagtgtccatttgatgagcatgtaaaattagtgaacgaactaactgagtttgcaaaaacatgtgttgctgatgagtcccatgccggctgtgaaaagtcacttcacactctctttggagatgaattgtgtaaagttgcatcccttcgtgaaacctatggtgacatggctgactgctgtgagaaacaagagcctgaaagaaatgaatgcttcctgaaccacaaagatga

SEQ ID NO: 10289 - DNA, 353 bp, Bos taurus
  Clone ID: 44-LIB34-010-Q1-E2-C8
gtttccatcctttatcgacagccaaaatagaaaccctcaagcgcacgtgaaggatccggacatggtctgggacgtctggagcctgcgtcctgagtctctgcatcaggtttccttcctgtacaatgatcgagggattccagatggacacaggcacatgaatggatatggatcacatactttcaagctggttaatgcacatggataggcactttattgcatcttccattagaagactgatcagggcatcacaaacctttctgttgaacatgcagcaagacttgctcacgaagatcctgactatggtctccgcgatcatttcaatgcgattgccacaggcaactacgcctcctgga

SEQ ID NO: 10290 - DNA, 375 bp, Bos taurus
  unsure (356): unsure at all n locations; Clone ID: 44-LIB34-011-Q1-E1-C8
atggcacgcaaagactacgacactacgcctcctgtcgtgcgctggctcaacgagcagagatactatggaggtggttatggctccacgcaggccactttcatggtgttccaagccttggcccaataccagaaggatgttcctgatcacaaggagctgaacctggatgtgtccatccaactgcccagccgcaactctgcggtcaggcatcgtatcccctgggaatctgccagcctcctgcgctcagaagagactaaggaaaatgagcgtttcacagtaaaagctgaagggaaaggacaaggcaccttgtcggtagtgaccgtgtaccatgccaagctcaaaggcaaagtctcctgcanaaagtttcgactccgggtt

SEQ ID NO: 10291 - DNA, 423 bp, Bos taurus
  Clone ID: 44-LIB34-012-Q1-E1-C12
gcaaaatccaaagagtttgaccagatcatcaaaattgggcgtactcatacacaggatgctgttccacttactcttgggcaggaatttagcggttatgttcaacaagtgaaatatgcaacaacaagaataaaagctgccatgccaagaatttatgagctcgctgctgggggcactgctgttggcactggtttaaatactagaattggctttgcagaaaaggttgctgcaaaagtggctgtgctcacaggcttaccttttgtcacagctccaaataagtttgaagctctggctgctcatgatgctttggttgaactcagtggagccatgaatactactgcttgcagtctgatgaagatcgcaaatgatattcgttttctgggttctggtcctcgctcaagactgggagaactaattttgcctgaa

SEQ ID NO: 10292 - DNA, 417 bp, Bos taurus
  unsure (343): unsure at all n locations; Clone ID: 44-LIB34-012-Q1-E1-C8
cagtcaccagccctgacctaggacagtgaatcgataatggcactctccatcacgcggggccttctgctgctggcagccctgtgctgcctggcccccatctccctggctggagttctccaaggacacgctgtccaagagacagatgatacatcccaccaggaagcagcatgccacaagattgcccccaacctggccaactttgccttcagcatataccaccatttggctcatcagtccaacaccagcaacatcttcttctcccccgtgagcatcgcttcagcctttgcgatgctctccctgggagccaagggcaacactcacactgagatcctgaagggcctgngtttcaacctcactgagctcgcagaggctgagatccacaaaggctttcagcatcttctccacaccctcaaccag

SEQ ID NO: 10293 - DNA, 419 bp, Bos taurus
  Clone ID: 44-LIB34-014-Q1-E1-C12
agcagcctttggggtgtttggtctctgccagattcatgcctttgtggattatctacgcagcaagttgaatccacagcaatttgaagttcttttccgaagtgtcatctccctagtgggctttgtccttctcaccattggagctctcctcatgctgacaggaaaaatatctccctggacggggcgtttctactcactgttggacccttcctatgctaagaacaacatccccatcatcgcctccgtgtctgagcatcagcctacgacctggtcctcgtactatttcgacctacagcttcttgtcttcatgtttccagttggtctctattactgctttagcaacctgtctgatgcccggattttcatcatcatgtatggtgtgaccagcatgtacttttcagctgtaatggtgcgtctgatgc

SEQ ID NO: 10294 - DNA, 387 bp, Bos taurus
  Clone ID: 44-LIB34-015-Q1-E1-C8
gcctcagaccacactatctccactcgctcagacctgtggaagattagcgaccatgatttccaatgggataggaaccgtcaccgctggaaaaaggagtatatgtcttctccctttgctgcttattggcctctggggctgtgtgacctgtcatcggagccctgtggaagacgtctgcacagccaaacctcgggacattcctgtgaatcccatgtgtatttaccgttcctcagagaagaaggcaactgagggccaaggctccgagcagaagattcctggggccaccaaccggcgggtctgggaactgtccaaggccaattcccactttgccactgccttctatcagcatttggcagactccaagaataacaatgacaacattttcctgtc

SEQ ID NO: 10295 - DNA, 413 bp, Bos taurus
  Clone ID: 44-LIB34-016-Q1-E1-C12
gagcttctgattgataatgagaaggtcacctctggtcacacaactaccactcgtcgttcatgctctaaagtcattacaaagacagttacaaatgccgacggtcgcacagaaacgaccaaagaagtggtaaagtctgaagatggttctgactgcggtgacgcggacttcgactggcaccatacttttccttcgaggggtaacctagatgatttctttcatagagacaaggatgatttcttcacccgtagttcacacgagtttgatggtaggacaggcttagcacccgaatttgcagccttaggggaatcgggctcttccagtagtaaaacttcaactcacagcaaacagtttgtaagcagcagcacaactgtcaacagaggtggctccgcgattgaaagcaagcactttaaaat

SEQ ID NO: 10296 - DNA, 416 bp, Bos taurus
  Clone ID: 44-LIB34-016-Q1-E1-C8
atgaatggtgttgaggaccggatgtcgataatatgggaaaaaggcgtgcacagtggcaaaatggatgaaaaccggtttgtggcagttaccagcacaaatgcagcgaaaatctttaacctctatccaagaaaaggaagaatagctgtgggctcagatgctgacattgtgatttgggacccaaaagccacaaggaccatttcggcaaaaactcatcatcaggctgtcaacttcaacatcttcgagggcatggtttgccatggggtgcccatggtgactatttcaagaggcaaagtggtatacgaagctggagttttcagtgtctctgcaggagatgggaagtttattcctcgtaaaccgtttgctgaatatatttacaaacggatcaagcaacgggaccagacttgcatacctacccc

SEQ ID NO: 10297 - DNA, 409 bp, Bos taurus
  Clone ID: 44-LIB34-017-Q1-E1-C12
cggacgcgtgggtctaagatggattttgagctgtacttgggatatgaatatgtcactgctcttcagaatctaagagaaagtaaacccccggactcctcaaaggatgagtgcatggtgaagtggtgtgcaattggtcaccaggagaggacaaagtgtgatcggtggagtgggttcagcggcggggcaatagagtgtgaaacagcagagaacactgaagagtgcatcgccaagatcatgaaaggagaagctgatgccatgagcttggacggaggctacctctacatagcaggcaaatgtggcctggtgcctgtcctggcagagaactacaaaactgagggtgaaagttgcaagaacacaccagaaaaagggtatcttgctgtagctgtggttaaaacatcagatgctaata

SEQ ID NO: 10298 - DNA, 354 bp, Bos taurus
  Clone ID: 44-LIB34-017-Q1-E1-C8
taacatggtggcaattcacatggggtttgggactgtcgaattgaaagccttagttataccatattaagcctataattacactctgatttgatgtgattcctgacatttggcacttgtcaaaatgcagttttccttttcttttcttcctggtgcaaatgattaaacaagtcttccctgtttctttggtgcaatgaagtatagcagataaaatgggggaaagggaaattatcacctttaacaagattaatttttaaatgtttttatatatatttgaaattgttaaaattggttttgctgaaacagaatttcacccttgagatactatttgaatgttggtttcaataaaggttcttg

SEQ ID NO: 10299 - DNA, 417 bp, Bos taurus
  Clone ID: 44-LIB34-018-Q1-E1-C8
aagctggtggctcttccatccccagaccagccaagcctgtgagtgacaccccagacagaggaaccagagccatgcggagtctcagcggactgctgttgttactgactgcctgcctggcagtaaacgccagctccgtgcccacattgcccgatgacattcaagtgcaggagaacttcgacctgtctaggatctatgggaagtggttcaatgtggccgtgggctccacctgcccatggctgaagaggttcaaggagaagatgaccatgagcacagtggtgttgaaagcggggccgacgagcaaggagatcagcgtcaccaacactcacaggcggaaaggtgtctgtgaatcgatctctggtacttatgagaaaacaagcactgatgggaagtttctctatcacaaagccaaatgggata

SEQ ID NO: 10300 - DNA, 388 bp, Bos taurus
  Clone ID: 44-LIB34-019-Q1-E1-C12
caaaactttggcacaatgaagtgggtgacttttatttctcttctccttctcttcagctctgcttattccaggggtgtgtttcgtcgagatacacacaagagtgagattgctcatcggtttaaagatttgggagaagaacattttaaaggcctggtactgattgccttttctcagtatctccagcagtgtccatttgatgagcatgtaaaattagtgaacgaactaactgagtttgcaaaaacatgtgttgctgatgagtcccatgccggctgtgaaaagtcacttcacactctctttggagatgaattgtgtaaagttgcatcccttcgtgaaacctatggtgacatggctgactgctgtgagaaacaagagcctgaaagaaatgaat

SEQ ID NO: 10301 - DNA, 413 bp, Bos taurus
  Clone ID: 44-LIB34-019-Q1-E1-C8
aagcagggagctggtggctcttccatccccagaccagccaagcctgtgagtgacaccccagacagaggaaccagagccatgcggagtctcagcggactgctgttgttactgactgcctgcctggcggtaaacgccagctccgtgcccacattgcccgatgacattcaagtgcaggagaacttcgacctgtctaggatctatgggaagtggttcaatgtggccgtgggctccacctgcccatggctgaagaggttcaaggagaagatgaccatgagcacagtggtgttgaaagcggggccgacgagcaaggagatcagcgtcaccaacactcacaggcggaaaggtgtctgtgaatcgatctctggtacttatgagaaaacaagcactgatgggaagtttctccatcacaaagc

SEQ ID NO: 10302 - DNA, 215 bp, Bos taurus
  Clone ID: 44-LIB34-021-Q1-E1-C8
catttgtactcaaaaacttggtgtaatgtttacacataaaatgtgaatcttgttctatgaacattaagttgtctaaaggattgccatcccctagatttttaaagcagtttcacaaagcaaatgcatagtgccattttcctttcaataatgaaaaaacaattagaaaagcaatggggacaatactggctggtcccaaaaaaatggcaatccttaat

SEQ ID NO: 10303 - DNA, 369 bp, Bos taurus
  Clone ID: 44-LIB34-022-Q1-E1-C8
ccggcctggagtatatagaatttaaaccttctctcagaagtgtattggtgaagttaaagaagaagacagccaaccaaaggtcatctgaaattgtgactggctgataatcccaggacaaaattagagaccactactcaagcataaggcctccacgaagatgtttgatttaaaggcttgggctgagtatgttgtggaatgggctgcaaaggacccatatggcttccttacaacagttattttggctctgactccattgtttctagcaagtgctgtgctgtcttggaaattggccaagatgattgaggccagggaaaacgagcagaagaagacacagaaacgtcaagacaatattgcaaaagctacacgact

SEQ ID NO: 10304 - DNA, 381 bp, Bos taurus
  Clone ID: 44-LIB34-023-Q1-E1-C8
gttgactttggcaggaaatgggatccatataaacaaggatttggaaatattgcaaccaatgcagaagggaagaaatactgtggtgtaccaggtgagtattggctcggaaatgacagaattagccagcttaccagtatgggacccacaaagcttttgattgaaatggaggactggaaaggcgataacgtgacggcactctatgaaggatttactgtacagaatgaggccaacaagtatcaactgtcagtgagcacatacaaaggaacagctggcaatgccctcatacaaggggcttctcaactggtgggagaaaaccggagcatgaccatccacaacaggatgttcttcagcacacgcgacagaagacacgacggctggaaa

SEQ ID NO: 10305 - DNA, 388 bp, Bos taurus
  Clone ID: 44-LIB34-025-Q1-E1-C8
gcggcgacggcggcagcggcgaacgggactggagggagcagcgggatggaggtggatgctgcagtcgtccccagcgtgatggcctccggagtgactggcagcgtttcagtcgctcttcatcccctcgtcattctcaacatctcagaccattggattcgcatgcgctcgcaggaggggcggcctatgcaggtgattggggctctgatcgggaagcaggagggccgaaatattgaggtgatgaactccttcgaactgctgtcccacaccgtggaagagaagattatcattgacaaggaatattattacaccaaggaggagcagtttaaacaggtattcaaggagctggagtttctgggttggtataccacaggggggccgccttgaccct

SEQ ID NO: 10306 - DNA, 366 bp, Bos taurus
  Clone ID: 44-LIB34-027-Q1-E1-C8
cagagacccccgagacagaaatccaccagggcttccagcacctcctgcagacgttcaatcagcccagcaaccagctgcagctgagcgtgggcaacgccatatttgtgccagaggagctgaagctgctggacaaattcaggaaagatgccgaggctttttacgcctctgaggttttatccatcaacttcaaggattctgaagctgccgtaaagcttatcaatgaatatgtgaagaataaaacgcatggaaaaattgagaagctcttaaatgatcttgacgtgctcacaaatttaatcttgttgaattatatcttctttaaagcccagtggaagacgccatttaatcctaaccatacttacgaatcag

SEQ ID NO: 10307 - DNA, 213 bp, Bos taurus
  Clone ID: 44-LIB34-028-Q1-E1-C12
atttatctacatgggttctttttacttttaaagtgaagtgatgctttgcaaatccattgtctcatacgaaaaatattatccttttcttttcaaataaagttcctgagggatgtgaagcacttttgtcacggtcttctagacctcaccaacctgtatggctccccccagatggtgcagctgaccttctctgacggcaagtcagttaagtgggat

SEQ ID NO: 10308 - DNA, 387 bp, Bos taurus
  Clone ID: 44-LIB34-028-Q1-E1-C8
ccgagcgccgctctggccgcactgcgctcgccctgagctccgggctcctgctaagccagcgccgctgtcgcctccctccagtcgccatcatgatcatctaccgggacctcagtagccatgacgagatgttctccgacatctacaagatccgggaggtcgcggacgggctgtgtctggaggtggaggggaagatggtcagtacgacagagggtaacatcgatgactcgctcattggtggaaatgcctccgctgaatgccccgagggcgaaggtaccgagagcacagtaatcactggtgtcgatattgtcatgaaccatcacttgcaggaaaccagcttcacaggggaagcctacaggaaagtacatcagagattacatgaagtcagtc

SEQ ID NO: 10309 - DNA, 387 bp, Bos taurus
  Clone ID: 44-LIB34-029-Q1-E1-C8
cggacgcgtgggtaatggttatgataatggcattatttgggccacatggaaatcccggtggtattccatgaagaaaaccaccatgaagataatcccacttaacagacttgccatcggagaaggacagcagcaccaactggggggagccaaacaggctggagacgtataaaagaccatttcaaaagtgatttacttttttaaagaactttatctgaaaagaaaaagataatatttttcctatgggacaatggacttgcaaagcctcacttcactttaaaagtaaaaagaacccatgttgagaactccactaacagttttatgccggtgataatttatctacataccatttcaataaatattttgtttcctaagactaagacgcactcg

SEQ ID NO: 10310 - DNA, 396 bp, Bos taurus
  Clone ID: 44-LIB34-030-Q1-E1-C8
gtcaagctgagcccggcccagctgggagatatctgcgtgggaaacgtgcttcagcctggggccggagcgaccatggcccgaattgcccagtttctgagtgacatcccggagactgtgcctttgtcagctgtcaataggcagtgttcgtcggggctccaggcggtggccagcatagctggtggcatcagaaatgggtcttatgacattggcatggcttgtggggtggagtccatgtccctagctgacagagggaaccctggaaatattacttcacgcctggtggagaaggagaaggctagagactgcctgattcctatggggataacctcagagaatgtggctgagcagtttggcatttcgcgggagaagcaggatacctttgcactggcttcccag

SEQ ID NO: 10311 - DNA, 407 bp, Bos taurus
  Clone ID: 44-LIB34-031-Q1-E1-C8
gtgagagtgccctgctggcctggtcctgggtgccggcgtggtgaggaacccagcgctcgaagaggcagccatggggctgctgtctggggacacgctggggcccctggccgtggccctgctcatcttcttgctcttgctggacctgatgcaccggcgctcacgttgggccccacgatacccaccaggccccatgccgctgccggtgctgggcaatctgctgcaggtggacttcgaggacccacgtcccagctttaaccagttgcggcgccgtttcgggaacgtgttcagcctgcagcaggtctggacaccggtagtcgtgctcaacgggctggcggctgtgcgcgaggcgctggtgtaccgcagtcaggacactgccgaccgttccactcaggcactctacaagcact

SEQ ID NO: 10312 - DNA, 411 bp, Bos taurus
  Clone ID: 44-LIB34-032-Q1-E1-C12
tcttgctactgctcaaaatctggaagtcccgctcgtgtgccgggatttcaggcaagagccaggtcctgtttgctgtggtgttcactgcccgctacctggacctcttcaccaactacatctcactctacaacacgtgcatgaaggtggtctacatcgcctgctctttcaccacagtctggatgatttacagcaagttcaaagccacttatgatgggaaccacgacacgttccgagtggagttcctcgtcattcccacggccatcctggcgttcttggtcaaccatgactttacccctctggagatcctctggactttctccatctacctggagtcggtggccatcctgccgcagctgttcatggtgagcaagacgggcgaagcggagaccatcacgagccactacctgtttg

SEQ ID NO: 10313 - DNA, 402 bp, Bos taurus
  Clone ID: 44-LIB34-033-Q1-E1-C8
gggaaacttgtggcctccgcataacagtaggaaggtgttcctactgggtctcacacatgtttgaatgtgtaagaattgttcaaaaagaaaaagaaaaaaaaaagaattgttcagatttgggaataaagacagatcatacctaaaactgctcttctacttctcttaagggcagaaggagctgtgaacattctctggacaccagatgtttgaatcatattatcattaataaatttctgtgatgctgacaaacaccagactaatgaataggattggagtagaccatgtttcattagttcattcacaggaatttaaaagtgattctggattctttttaacttggatattcatttagtttcattttaatcagaaaagttaatgggagcagaaatatttgaagcccta

SEQ ID NO: 10314 - DNA, 446 bp, Bos taurus
  Clone ID: 44-LIB34-034-Q1-E1-C12
ggctcggtcccccgggcccgccgacaccatgagttggtcctcgcaccctccgagtgtaatcttctacattctttcattgctttcttcagcatgcctggcatatgttgctacccgagacaactgctgcatcttagatgaaagatttggtagttattgcccaactacctgtggaattgcagatttcctgaataattaccaaaccagtgtagacaaagatctacgaactttggaaggcatcttatatcaggttgagaacaaaacatcagaagccagagagctggtcaaagcaatccaaatcagctataaccctgatcaaccatcaaagccaaataacatagacagtgctaccaagaattccaagagtatgatggaagaaattatgacatatgagacactgataacaacacatgaatcaacaattcgatttttgcaagaaatatataact

SEQ ID NO: 10315 - DNA, 433 bp, Bos taurus
  unsure (396): unsure at all n locations; Clone ID: 44-LIB34-035-Q1-E1-C8
aaagataccctctcgactaaacaaccaagatagaataaaacaaaacatttaatcccaatttaaagtataggagatagaaatctaagtacggcgctatagagaaagtaccgcaagggaacgatgaaagaaaaaactaaaagtataaaaaagcaaagattaccccttgtaccttttgcataatgaattaactagtataagacttaacaaaatgaattttagctaagcagcccgaaaccagacgagctactcacaaacagtttaccaagaactaactcatctatgtggcaaaatagtgagaagatttgtaagtagaggtgacatgcctaacgagcctggtgatagctggttgtccagaaaatgaatctaagttcagctttaaagataccaaaaattcanataaaccccactgtagctttaaaagttagtctaaaaa

SEQ ID NO: 10316 - DNA, 394 bp, Bos taurus
  Clone ID: 44-LIB34-036-Q1-E1-C12
gctctggatccactgcccacatcccgctctcgcaggcagacatgagggcagagagaacttccttcctcctggccctggggctcctggtggctgggatccgcagtgtccactgcctcccagagaatgtggtggtgaaggaccagcacagaagggtggatggccacacgttagcctccagcaacaccgacttcgccttcagcctctacaagcagttggctttgaagaaccccaataagaatgtcatcttatccccgctgagtgtctccatagccttggccttcctgtctctgggggcccgtggctccaccctgacagagatcctggaaggtctcaagttcaacctcacagaaatccaggagaaagaaatacaccatagctttcagcacctcctgca

SEQ ID NO: 10317 - DNA, 403 bp, Bos taurus
  unsure (382): unsure at all n locations; Clone ID: 44-LIB34-036-Q1-E1-C8
agaggaggagaccctattctatatcaacacttattctgattctttggacaccccgaagtctatattttaatcttacctgggtttggaataatctctcatatcgtgacctactactcaggaaaaaaagaaccattcggatatatgggaatagtttgggctataatgtcaatcggatttctaggtttcatcgtatgagcccaccatatattcactgtcggaatagacgtcgacacacgagcctacttcacatcagccactataattattgctattccaaccggggtaaaagtcttcagctgattggcaacacttcatggaggtaatatcaaatggtctcctgctataatgtgagccctaggctttattttcttatttacagtanggggtttaactggaattgtct

SEQ ID NO: 10318 - DNA, 411 bp, Bos taurus
  Clone ID: 44-LIB34-037-Q1-E1-C12
gaccactagatgtctttatttactcttctattcaagcagcagtaatggaaagtaaagtctgggagactgtgaaggacagggaagcttggagtgctgcagtccttgaggtcgcagaataggacacaactgagtgactgaacaacaacagcaaattgttaacttagtgtaaggtgggaatctcagggatctaacctcctctaattctgtgataaagtaataataccagtttcctggtcatgggaagcctttgtgatgttgagtatgaaaaggttgaatcctgacaagtctaaaattattgaaaaacaaattttgtgtaattttgttataagaattcttctctttttactttttgccttgtttggttaaaagttgagggactagtcagcacaataacttgtacacaaatgttta

SEQ ID NO: 10319 - DNA, 424 bp, Bos taurus
  Clone ID: 44-LIB34-037-Q1-E1-C8
aacgctttgactataaagatcagacgagcctgaggctgatgagtctgttcaacgagaacttctacctgctcagcagcccctggatccagctttataataatttctcagactacctacagtacctgcctggaagccatagaaagctactgaaaaatgtgtctgaagtaaaaagttatgctttagaaagagtgaaggatcaccagaagtccctggaacccagctgcccccgaggcttcttggacaccatgctgatagaaatggccaaggaaagacacagtgtggaccctatgtacaccttggaaaacatcgctgtgactgtggccgacctgctctttgcggggacagagaccaccagcaccaccctgcgatacgggctcctgattctcatgaaatacccggaggttgaagagaaacttcatgaaga

SEQ ID NO: 10320 - DNA, 276 bp, Bos taurus
  Clone ID: 44-LIB34-038-Q1-E1-C12
gatgaactggctcctgcagactcgagcttcaggatggttcacgcagagagctcgaccctgaaggaacattttgtaggttacgcaactaccagtgactttgacctgcagacagttgagcttccagccttaccagatgcagaggtcctgctcgacgatttgtacttgactgtggatccttacacgagaatcatggcaaaacactgtgatagacggtgacatcaggatcggagagcaattggccagagttgtcgaaactaaaaagtcagccttcccaac

SEQ ID NO: 10321 - DNA, 411 bp, Bos taurus
  Clone ID: 44-LIB34-039-Q1-E1-C8
aatagctctaagccttctaattcgcgctgaattgggccactacggtactctgctcggagacgactacatctacaacgtatttgttagcgcacattcagtgtgtatagtcatcttcatagtaatactattcataattggaagagtcagtaactgacttgttcacctaataagtggtgatcacgatagagcatttcaccgatgagatcttatgagcttctgatacttccatctctcattcctactactctgcgcatcgtctagatttgaagctggagcacgaacacgctgaaccgtgtagtctcgcttactaggcaacctagcgcatgcaggagcttcattagatcaaatcattttctctttacacttagcaggaatttcctcaattttaagagccagcagcttcattacaag

SEQ ID NO: 10322 - DNA, 331 bp, Bos taurus
  Clone ID: 44-LIB34-040-Q1-E1-C8
ggttctgaaaccctagaggacgcaactgtgagtgtctctgtcctagcctctcaacttgctttcctgtgtccaataccactgcagactccagtactagcctgtccagagcagcaagtgagaggaaacaagccagcattgtaagaggacatgcttctcctccctctctccgtgctgctcctgctcacacagccctggagatccctgggagcagaaatgacaaccttttctcagaaaatactggccaatgcctgtaccctggttatgtgtaaccccctggaaaatggcttgcctggtcatgatggacaagatgggagagaatgtccccatggag

SEQ ID NO: 10323 - DNA, 420 bp, Bos taurus
  Clone ID: 44-LIB34-041-Q1-E1-C8
agccgggacgggtggcacagctggctcattgagcatctgtggccccaaggtccctcaacagtggatgctgcctttctctgggataaaaagctctacctcatccagggtacccaggtatatatcttcctgacaagggcaggctacactctcgtaaaagattatccaaagcagctggagaaggaatttgggagccctgatggggtctgccttcattctgtggatgcagcctttacctgtcctggatcttctcagctctacatcatggcacgccagaagctgtggaggctggacctgaacttaggagctcaagccacgtggacagagcttccttggctccatacgaaagtcgatggggccctgtgtacagagaagtctctgggcccccactcgtgttctgccaatggtcggggcttgtacctc

SEQ ID NO: 10324 - DNA, 348 bp, Bos taurus
  Clone ID: 44-LIB34-042-Q1-E1-C8
acacctacttcttttatttcatcttaaaaagtgtaacaaacaagtcttgattcaaaatgacagccttaaatcctttcgagagcaagttggcgggtcaacaaataaaatcatatgaaatgacagcatattaataatacccaaaagcataatggtagatcttttgggatcatctgtgatttagagatgataatctcatactctgaattgaattaaaaatcaataacctgtcacatttcatcaaagttaatgaaaatttgggacctgttttattcaaccttcctaaatactttcatttgctgtagagaattcctaaaggggtatatccctcactgtgaaacacaagcctat

SEQ ID NO: 10325 - DNA, 377 bp, Bos taurus
  Clone ID: 44-LIB34-043-Q1-E1-C8
agcctgcactgaactgtaggcctgacgcacaaaaacctttgctttctctttccatcaggggaaaggcatcagttcatggcagaaaaagaatcccaaatgaccgtaaagacctaaagctgatgtgtgatatggaagctcatgagtctcacatggctctggtcacctgagaagtctctagttccttttcctttaggtttgcacgtggctgagttccactaacttgggccacatttgaagtgaaaatgcaaatttgtatactttctgcaccccctgcgagaaacaaagttttcttgggtcaacactgttatatgaaactcgagtctttatttgttaatagtgcgtgctaagccagtgaataaaatcttgagaagcaacta

SEQ ID NO: 10326 - DNA, 414 bp, Bos taurus
  Clone ID: 44-LIB34-044-Q1-E1-C12
atccttcactccctagtggacaagtccaacatcaaccggcagctggaggtgtacacgagcggaggcgacccagagagtgtggccggggagtacggacggcactccctctacaagatgctcggctacttcagcctggtgggcctgctgcgactgcactccctgttgggggattactaccaggccatcaaggtgctagaaaacatcgaactgaacaagaagagcatgtattcccgtgtgcccgagtgccaggttaccacatactattatgtcggttttgcatatttgatgatgcgtcgctaccaggatgccatccgggtctttgccaacatcctcctctacatccagaggaccaagagcatgttccagaggaccacgtacaaatatgagatgatcaacaagcagaatgagcagatg

SEQ ID NO: 10327 - DNA, 300 bp, Bos taurus
  Clone ID: 44-LIB34-046-Q1-E1-C12
agaaaagagctattcgtacagccacagtcaatacatttggttatattgcaaaggccattggccctcatgatgtattggctacacttctcaacaacctaaaagttcaagagagggggaacagagtttgtacatatgctggcatagcgagccgcgcggctgcatcttcagcgttcgacaggagacggggcgtattggagtgagcgacactgctcgaactgaatgttgagaatggagtgttggagtcacgttccttccttgtgtgaatatattggtgaaatgggaagcgactacatttaggcg

SEQ ID NO: 10328 - DNA, 417 bp, Bos taurus
  Clone ID: 44-LIB34-048-Q1-E1-C12
gatttttgaaccttaaacagtacaactggagtatttgtgtgaatgtaccactgggaaaatctaacatgttgatgttaatcaatgtccttctcaccttgtggttttacactgctcatggacaggggaaacattgtaattatccagtaataagacatggacggctatatcagtcatacagtggatactttccagcacgtgtaaatcaacagtttctctataactgtgatcagtattttgtgcctccttcactatattcctcggattacctgacttgcacagcagaaggatggtttccagaagaaccatgccttagagaatgtattttcaataatttggaaaatggatataccccaagtagtgaaagaaaagctgtacagggtgaaacagtaagggttcgctgctattatggctacagtc

SEQ ID NO: 10329 - DNA, 423 bp, Bos taurus
  Clone ID: 44-LIB34-048-Q1-E1-C8
tgctaatatcaactggaacaatctgaaagacaagaagtcctgccacactgcagtagacagaaccgctggctggaacatccccatgggtttgctctacagcaagattaataactgtaaatttgatgaatttttcaacgcaggttgtgcacctggatcgccgcgagattccagtctctgtgctctgtgcattggctcagagaagggtacaggaaaggagtgtgttcccaacagcaatgaaagatactatggctatacaggggctttcaggtgtctggtggagaagggagacgtggcctttgtgaaggaccagactgtcatacataacactgacggaaataataatgaagcatgggcaaaaaatctgaagaaggaaaattttgaagtactatgcaaagatggcaccaggaaacctgtgacagatgc

SEQ ID NO: 10330 - DNA, 439 bp, Bos taurus
  Clone ID: 44-LIB34-049-Q1-E1-C8
cgtggccccaccctgacagagatcctggaaggcctcaagttcaacctcacggagatccaggagacacagatccaccagggcttccagcacctcctgcaggcgctcaatcgacccagcaaccagctgcagctgagcgtgggcaacgccatgtttgtgcaggaggagctgaagctgctggacaagttcatagaagatgcccgtgtgctgtactcctccgaggccttcccgaccaacttcagggatcctgaagctgccaagagtctaataaatgactatgtgaagaataaaacccaggggaaaattgaggagctgttcaaggacctttccccaagaacggagttggtcctggtgaactacgtctactttaaagcccaatggaagacccgctttgaccccaaacacactgagcaggcagagttccacgtgagcgacaacaaga

SEQ ID NO: 10331 - DNA, 426 bp, Bos taurus
  unsure (414): unsure at all n locations; Clone ID: 44-LIB34-050-Q1-E1-C8
catattccaaatctaaacttctgaaaattaggggtggggagggcaatacatcctaatttgagtccaaaaacctgagagccaggagtcagatatctaatagaaggaaaaaaatgggtgtctcagttcaagagaagagagtaaaatgtgccctgactctgcttttttgttctattgggtggattggataatgctcacctgcactggttgggatcatgggttggatgatgctcgcttgcgttggtgagggaggtcttcttcactctacggattcaaattttaatcacttccagagataccctcacagatatgtatggaaataatattttaccatctatctgggcatccccattcaagttgatttgtaaaattaagcatctcacacagctagtgaacagttgagctgaggttggattncagtttttctct

SEQ ID NO: 10332 - DNA, 236 bp, Bos taurus
  Clone ID: 44-LIB34-052-Q1-E1-C1
gccacctcaatggagtttattatcaaggtggcacttactcaaaaacatctactcctaatggttatgataatggcattatttgggccacatggaaatcccggtggtattccatgaagaaaaccaccatgaagataatcccacttaacagacttgccatcggagaaggacagcagcaccaactggggggagccaaacaggctggagacgtataaaagaccatttcaaaagtgatttac

SEQ ID NO: 10333 - DNA, 240 bp, Bos taurus
  Clone ID: 44-LIB34-052-Q1-E1-C12
ggcgccccacgaacgtgcggtgcgtgacgggcgagggggcggccgcctttccggccgcgccccgtgtcccgggacgaagggctctccgcaccggaccccggtcccgacgcgcggcgggggcgcgccgcgccgcgccccgggggacgcgggcgacggcccgccggcggggacggcgggggaccggctatccgaggccaaccgaggctcccgcggcgctgccgtatcgttccgcctgggcgg

SEQ ID NO: 10334 - DNA, 228 bp, Bos taurus
  Clone ID: 44-LIB34-054-Q1-E1-C8
gttctagatcgcgagcggccgccctttttttttttttttttttttttttttttttttttttttttttttttttttttttttttattcatatttttttttttttattttttggaaatatatttttcatttttttttaatttaaaggataaaaaaatggtaatatctaacaatgatcgggaggaagcagatcaacgggatacggtcgcggcggtgatggggtttgaaaaa

SEQ ID NO: 10335 - DNA, 350 bp, Bos taurus
  unsure (293): unsure at all n locations; Clone ID: 44-LIB34-055-Q1-E1-C8
gggagcgaggtgtatcactgcagtggcaatgggagctgggtgaacaaggtgctgggcatagagccgccaaaatgcattgcagtctgtggcacccccagcgagccttttagatcaacacaaagaatatttggaggctccattgcgaagattgaaaatttcccctggcaagtcttcttctcgaacccatgggctggtggggctctcattgatgaatactgggtgctgacagctgcccatgtcgtggagggaaacgatatcccagtgatgtatgttgggtcctcctcagtggtcanctcacaattgtcaaatgctcagatgctcactgcagagagagtgtttatccatccagg

SEQ ID NO: 10336 - DNA, 149 bp, Bos taurus
  Clone ID: 44-LIB34-056-Q1-E1-C12
gtgtcgccatgggcagccgccacgcccggtgttaccggtattgtattatcaagcagtatccaaagtctcgcttctgtcgaggtgactcagatgctaatattcgcatcttagacatggggcgtaagtatgccaaactgcattattgctca

SEQ ID NO: 10337 - DNA, 370 bp, Bos taurus
  Clone ID: 44-LIB34-056-Q1-E1-C8
agatctcacaaaagtccacaaggaatgctgccatggtgacctacttgaatgcgcagatgacagggcagatcttgccaagtacatatgtgataatcaagatacaatctccagtaaactgaaggaatgctgtgataagcctttgttggaaaaatcccactgcattgctgaggtagaaaaagatgccatacctgaaaacctgcccccattaactgctgactttgctgaagataaggatgtttgcaaaaactatcaggaagcaaaagatgccttcctgggctcgtttttgtatgaatattcaagaaggcatcctgaatatgctgtctcagtgctattgagacttgccaaggaatatgaagccacactggaggaa

SEQ ID NO: 10338 - DNA, 217 bp, Bos taurus
  Clone ID: 44-LIB34-058-Q1-E1-C12
gggacagacaagtgtgcctgctccaaccacgaaccatacttcggctactcaggggcctttaaatgtctgatggagggcgctggggatgtggcctttgtcaagcactcaacggtattcgacaacctgcctaacccagaagacaggaaaaactatgagctgctctgcggggacaacacccggaagtctgtagatgattaccaagaatgctacttggcaa

SEQ ID NO: 10339 - DNA, 207 bp, Bos taurus
  Clone ID: 44-LIB34-058-Q1-E1-C8
acagggcttccagcacctcctgcagacgttcaatcagcccagcaaccagctgcagctgagcgtgggcaacgccatgtttgtgtcagaggagctgaagctgctggacaaattcaggaaagatgccgaggctttttacgcctctgaggttttatccactaacttcaaggattctgaagctgccgtaaagcttatcaatgaatatgtgaa

SEQ ID NO: 10340 - DNA, 206 bp, Bos taurus
  Clone ID: 44-LIB34-059-Q1-E1-C12
gttctgtgttttatggggcaccacgtcagagcaaactcttgtccacgttgtgctctgcggatgtctgccaatgtgctgaggggaagtgccctcgacagcgccgggccctgaagcatgggcagcaggacttggcgggttaccggatgaaattcgcctgctactctccccgagtggactatggcttccaggttaaggttctcccagaa

SEQ ID NO: 10341 - DNA, 204 bp, Bos taurus
  Clone ID: 44-LIB34-059-Q1-E1-C8
cagtcaccagccctgacctaggacagtgaatcgataatggcactctccatcacgcggggccttctgctgctggcagccctgtgctgcctggcccccatctccctggctggagttctccaaggacacgctgtccaagagacagatgatacatcccaccaggaagcagcatgccacaagattgcccccaacctggccaacgtttgc

SEQ ID NO: 10342 - DNA, 236 bp, Bos taurus
  Clone ID: 44-LIB34-060-Q1-E1-C8
gctgtggagggtccaaaacttgttgtttcaactcaaacagccttagcctaaacacgacacaaccacaggcatctcagcctaccctgagagtaagaggaaaaaagagaaatgaaaactcagagcttattcatctgttttccttttctgttggtgttaaaccaacactctcactaaagaacgtaaatttctttaaatattttgcttcttttgtttgtgctacaattaataaaaaatga

SEQ ID NO: 10343 - DNA, 419 bp, Bos taurus
  Clone ID: 44-LIB34-061-Q1-E1-C8
aatcagcatgagtactaccgggaaagttatcaggtgcaaagcagccatagtctggaagcctggtggatcattttccattgaggaggtagaagtggctccaccaaaggcaaaagaagttcgcataaagatggtggccacggcgctctgtgggactgagatgaaaatgttgaaggataaaaatcttcagcaccaacactaccctatcattatgggccatgaaggagctggaatagtcgagagtgtgggagaaggagtgagcacagtgaaagcaggagataaagttatcgcactctttctaccacagtgtggtgaatgcacctcttgccttaattctgcagacaatttttgtataaaactcaaacaggcataaacccaactggaggtctgatgggaccagtacatttacctgcaagggaaaa

SEQ ID NO: 10344 - DNA, 208 bp, Bos taurus
  Clone ID: 44-LIB34-062-Q1-E1-C8
tccggagttccgggtcaccaagcgtccgctcagctccatggctcggcatgagatgccattgcatgtggctgttgggcttgtgctggtctttggctaaagcccaccctctggctagagctcctgagcttgggcacggagttgaaggtgggaatgtggccaagccggatccagaagtgacggaacgctgctcggatggctggggctttga

SEQ ID NO: 10345 - DNA, 210 bp, Bos taurus
  Clone ID: 44-LIB34-065-Q1-E1-C8
cggacgcgtgggcggacgcgtgggctagttctagatcgcgagcggccgcccttttttttttttttttttttttttttttttttttttttttttgcattttctcatccagctttattggaaggccagcacattggggtgggccaggtctggggtggggtgggagggcactgagaatgctgttcttgtaagtgacctttgggggcagccctg

SEQ ID NO: 10346 - DNA, 260 bp, Bos taurus
  Clone ID: 44-LIB34-066-Q1-E1-C8
gctggtggctcttccatccccagaccagccaagcctgtgagtgacaccccagacagaggaaccagagccatgcggagtctcagcggactgctgttgttactgactgcctgcctggcagtaaacgccagctccgtgcccacattgcccgatgacattcaagtgcaggagaacttcgacctgtctaggatctatgggaagtggttcaatgtggccgtgggctccacctgcccatggctgaagaggttcaaggagaagatgac

SEQ ID NO: 10347 - DNA, 206 bp, Bos taurus
  Clone ID: 44-LIB34-067-Q1-E1-C12
cggacgcgtgggaacggaacggtctcccagaagcaatttagaatgactggtaaaacgaaatatacccaaagctcgcagcaacaaaaaaggatacagttctttctggccagcttcctgcttctgccctttctgctcgtctgcatcgtagagtctctcctgaagctttttattcctaagaagagaaaatcagtcaccggagagattgt

SEQ ID NO: 10348 - DNA, 200 bp, Bos taurus
  unsure (2),(4),(9),(15)...(16): unsure at all n locations; Clone ID: 44-LIB34-068-Q1-E1-C8
ancnggtcngcgggnncccgggggctctgtcccgccgcctcctgtcgcgcgctcggtcctcgaccggtcatgctctggtggtggttctggctccactcgggtcaccttcagggtgttcgaagccttggaccaagaccagaagagatgttccggaacacatggagctgaacctgcatgtgtccatccaattgcccagccgc

SEQ ID NO: 10349 - DNA, 236 bp, Bos taurus
  unsure (229): unsure at all n locations; Clone ID: 44-LIB34-069-Q1-E1-C12
gcgaggtcttcgaggacgcagagcagacggatgaattctggagtaaatacaaagatggagaccagtgtgaaggccacccgtgcctgaatcagggccactgtaaagacggcatcggagactacacctgcacctgtgcggaagggtttgaaggcaaaaactgcgagttctccacgcgtgagatctgcagcctgggacaatgggggctgcgaccagtttctgcagggaaggnagcgcag

SEQ ID NO: 10350 - DNA, 212 bp, Bos taurus
  Clone ID: 44-LIB34-069-Q1-E1-C8
ccagaccagccaagcctgtgagtgacaccccagacagaggaaccagagccatgcggagtctcagcggactgctgttgttactgactgcctgcctggcagtaaacgccagctccgtgcccacattgcccgatgacattcaagtgcaggagaacttcgacctgtctaggatctatgggaagtggttcaatgtggccgtgggctccacctgccca

SEQ ID NO: 10351 - DNA, 407 bp, Bos taurus
  Clone ID: 44-LIB34-071-Q1-E1-C12
acgtcaggagtttttcaagaatgctgccaagctgaagataaaggtgcctgcctgctaccaaagattgaaactatgagagaaaaagtactgacttcatctgccagacagagactcaggtgtgccagtattcaaaaatttggagaaagagctttaaaagcatggtcagtagctcgcctgagccagaaatttcccaaggctgagtttgtagaagttaccaagctagtgacagatctcacaaaagtccacaaggaatgctgccatggtgacctacttgaatgcgcagatgacagggcagatcttgccaagtacatatgtgataatcaagatacaatctccagtaaactgaaggaatgctgtgataagcctttgttggaaaaatcccactgcattgctgaggtagaaaaaga

SEQ ID NO: 10352 - DNA, 419 bp, Bos taurus
  Clone ID: 44-LIB34-071-Q1-E1-C8
cccacgcgtccaattatggatgtacaggggttcagactgctattgaagcaaattctctagggcaaatgcctgttattattgctggaaatgatcaacaacaaaagaaatatttggggagaatgactgaggagccattaatgtgtgcctattgtgtaacagaacctgtagcaggctctgatgtagctggtataaaaaccaaagcagaaaagaaaggagatgagtatattattaatggtcagaagatgtggatcaccaatggaggaaaagctaattggtattttttattggctcgttctgatccggatcctaaggctcctgctagtaaagcctttactggctttattgtggaagcagacaccccaggagtacaaatttggtagaaaaggattaaatatgggacaagcgatgttcagatacaa

SEQ ID NO: 10353 - DNA, 189 bp, Bos taurus
  unsure (113): unsure at all n locations; Clone ID: 44-LIB34-072-Q1-E1-C8
aatgcgagtcccaagtgctaatatgccatggttcaagggatggaaagtcacccgtaaggacggcaatgccagtggaaccaccctgcttgaagctctggattgcattctgccancaactcgcccaactgacaaacccttgcgtttgcctctccaggatgtctattaaattggtggtattggtactgtccc

SEQ ID NO: 10354 - DNA, 406 bp, Bos taurus
  Clone ID: 44-LIB34-073-Q1-E1-C8
agatgtgacttcagagtacccactggtggatgggaagctctccatccagtgctacttacgggccctggacaaatgctatgcattctaccgtcaaaagatcgagaaacagtggaagcaagctggcatcgatcggcctttcactctcgatgatgtgcagtatatgatttttcacacgcctttctgcaagttactccagaaatccctgggtcgcctgatgttcaatgacttcctgttggacagtggtgacacacagactggcatctacaaaggcttggaggccttcaggggactacagctggaagacaactacaccaataaggatgtacataaagcatttctaaaagcctctctgaacatgttcaataagaaaaccaagaactccctctacctccccaagtacaacggg

SEQ ID NO: 10355 - DNA, 414 bp, Bos taurus
  unsure (313): unsure at all n locations; Clone ID: 44-LIB34-074-Q1-E1-C8
aaaggatgtgatctgggaacttctcaatcacgcccaggaacattttggcaaagataaaccagacaatttccagcttttccaatcccctcatgggaaggacctgctgtttaaggactctgctgatgggtttttaaagattccttctaagatggattttgagctgtacttgggatatgaatatgtcactgctcttcagaatctaagagaaagtaaacccccggactcctcaaaggatgagtgcatggtgaagtggtgtgcaattggtcaccaggagaggacaaagtgtgatcggtggagtgggttcagcggcggngcaatagagtgtgaaacagcagagaacactgaagagtgcatcgccaagatcatgaaaggagaagctgatgccatgagcttggacggaggctacctctacat

SEQ ID NO: 10356 - DNA, 388 bp, Bos taurus
  Clone ID: 44-LIB34-075-Q1-E1-C8
gtgagtcgtgttaaactggcattgcactcataaagggggcttctcagctggtgggacaaaacctgggtatgaacatccagaacaccatgtacctcagcacataccacagagacagcgatggctggaaacgtacatatcgcagagcgcaatgttctatcggaagatggcggtggattgtggtagtaaccgatgccatgcagccattcccagtggcagatactactggggtggagcgttgacctgggatatggcaaagcacggcacatacgatggagtggtctggtatagctggcatggctcctgttactcactgaattagatgtccatgatgatcaggccttacgtcccatagcactcatacttcccacacagagtattattcttccac

SEQ ID NO: 10357 - DNA, 357 bp, Bos taurus
  Clone ID: 44-LIB34-076-Q1-E1-C8
cggacgcgtggggggtgcgcgacggcgccgggggctgcggtgaacgcctcacaggccgtgcagttccctgtggggaggcgccgtcgccattgccacctcgcccggtgagcgcgtcccgctcgccgagcagggccgcagccgaccgccggcaccatgggccagtgtggcatcacctcctccaagaccgtgctggtgtttctcaacctcatcttctggggagccgctggcattttatgctatgttggagcctatgtcttcatcacttacgacgactatgaccacttctttgaagatgtgtacactctcatccctgctgtggtgatcatagctgttggggccctgctcctcaatattggg

SEQ ID NO: 10358 - DNA, 336 bp, Bos taurus
  unsure (281): unsure at all n locations; Clone ID: 44-LIB34-077-Q1-E1-C8
cgcgggtgacacaagcgtctacagactgtcccaacaggggacctgggggcgaggcagagcttggggctcagtagatggggggttgggagtttcattggtactctccttaactgttttctgctttctcagggcatgacgcgcctcctgctcaccaagatccccttcttcagagaaataatcgtgagctccttttcctgcgagcactgtggctggaacaacacggagatccagtcggcgggcaggatccaggaccagggagtgcgctacactctgactgtcanggctcaagaggacatggacagagaagtagtgaagactgactcctgccacacagga

SEQ ID NO: 10359 - DNA, 393 bp, Bos taurus
  Clone ID: 44-LIB34-078-Q1-E1-C8
aactccctatagtatgtcgtattatcgcacatcaaatacttgaattaacatcgcagcactgacctcatgatcacactcccaaataccactgctcgttttgtccatgataattacgtcattcggacgacggctctcgctcctggtattgccctccgcaataagttcgatgtgaccagacttgttgctaaatctgtgcttcatcgcacgcagtgtggagacgagaagtcactccaactccacgcagtatctgactcggagggcactccagagtcttcgagacacgctgacccgagtctgaaatcaatctcacacactctatatcaaaacgcacggatttgcaacttatcctgctatatgagaatatttagagctatcatgacttccgtataccta

SEQ ID NO: 10360 - DNA, 184 bp, Bos taurus
  Clone ID: 44-LIB34-079-Q1-E1-C12
ctggtcccacgcgcgctcggacccgcggccaggcttgctcgcagctccccacaggcggggtcccgtgcgtgatgcagtcggtgtgggtgctggtgctactggccgcgctgggcagcgcccgggcggaccgcgattgccgggtgagcagcttccgactcaaggcgatcttcggcaaggctctctt

SEQ ID NO: 10361 - DNA, 386 bp, Bos taurus
  Clone ID: 44-LIB34-079-Q1-E1-C8
cggaggcgaaggacgcggtttctggaggcgaagaacgcggttggccaatcgcaagccagaagatgaaggttctgtgggttgccgtggtggtcgcgcttctggcaggatgccaggcggatatggagggagagctggggcccgaggagcccctgactacccagcagccccgggggaaggacagccagccttgggagcaggcgctgggccgcttctgggattacctgcgctgggtgcagaccctgtctgaccaggtgcaggaggagctgctcaacacccaggtcattcaggaactgacggcgctgatggaggagaccatgaatgaggtgaaggcctacaaggaggagctggaaggacagctaggccccatggcccaggagacacaggcc

SEQ ID NO: 10362 - DNA, 420 bp, Bos taurus
  Clone ID: 44-LIB34-080-Q1-E1-C8
caacgatgagcgccctgcaagctgtcgtcactctcctgctctgcgggcagcttctcgcggtggaaaccggcagtgaggccacagccgacagctgcccaaaggcccccgagattgctaatagccatgtggagtactcggttcgctatcagtgtgacaaatattacaaactgcatgctggaaatggggtgtatacttttaacaataagcaatggataaacaaggacattggacagcaacttcctgaatgtgaagaagatgacagctgcccagagccccccaagattgaaaatggctacgtggagtacttggttcgctatcagtgcaaaccctattacacactgcgcacctgtggagatggagtgtacacctttaacagtaagaagcagtggataaataagaacattggacagaaactccctg

SEQ ID NO: 10363 - DNA, 427 bp, Bos taurus
  Clone ID: 44-LIB34-082-Q1-E1-C12
aggtactgatgatgttcaagtttctggtacgtttattgtacattttaagacagaatcatttggtggtaaaaaatgaaaatgcagtaaagctgaagcaagaatgctttctttagcaacttttataacaacattattagaaaagataaggtatgtacttaacaaaattgtatttactatatgaagaaacttgaaagtgcaaggaaagtaaatctctccctaatgcatatcccatcagtcattttatgggaatacttttcatatgtagagatactctctcaagcttaaccagtggcaacaaagtcatagcttgtgacatcgaatccactggccaccatgaagcagaatcattcctcatcacaattaatggcgtttttttttttttaacaagacgtgaataactaccaagtgatgataatgcatgtgactg

SEQ ID NO: 10364 - DNA, 437 bp, Bos taurus
  unsure (322),(407): unsure at all n locations; Clone ID: 44-LIB34-082-Q1-E1-C8
gttctgaaaccctagaggacgcaactgtgagtgtctctgtcctagcctctcaacttgctttcctgtgtccaatagcactgcagactccagtactagcctgtccagagcagcaagtgagaggaaacaagccagcattgtaagaggacatgcttctcctccctctctccgtgctgctcctgctcacacagccctggagatccctgggagcagaaatgacaaccttttctcagaaaatactggccaatgcctgtaccctggttatgtgtagccccctggagagtggcttgcctggtcatgatggacaagatgggagagaatgtcnccatggagagaagggggatccaggttcaccaggacctgcaggacgagcaggaaggcctggatgggttggccctattgggccgaanagagacaatggctttgttggagaacctgga

SEQ ID NO: 10365 - DNA, 394 bp, Bos taurus
  Clone ID: 44-LIB34-083-Q1-E1-C12
agcggacgcgtgggcgcgagcgggccgccctttttttttttttttcgcaacgggtttgccgccgggacacaggtgtcgtgaaaaccaccgttaaacctaagccaaaatgggaaaggagaagacccacatcaacatcgttgtcattgggcacgtagattcagggaagtctaccacgactggccatctgatctataaatgtggcgggatcgacaagagaacaattgaaaagttcgagaaggaggctgccgagatgggaaagggctccttcaaatatgcctgggtcttggacaaacttaaagctgaacgtgagcgtggtatcaccattgatatctccctgtggaaatttgagaccagcaagtactatgttaccatcattggagccccaagacacaga

SEQ ID NO: 10366 - DNA, 407 bp, Bos taurus
  Clone ID: 44-LIB34-083-Q1-E1-C8
acctcgagcagggagctggtggctcttccatccccagaccagccaagcctgtgagtgacaccccagacagaggaaccagagccatgcggagtctcagcggactgctgttgttactgactgcctgcctggcggtaaacgccagctccgtgcccacattgcccgatgacattcaagtgcaggagaacttcgacctgtctaggatctatgggaagtggttcaatgtggccgtgggctccacctgcccatggctgaagaggttcaaggagaagatgaccatgagcacagtggtgttgaaagcggggccgacgagcaaggagatcagcgtcaccaacactcacaggcggaaaggtgtctgtgaatcgatctctggtacttatgagaaaacaagcactgatgggaagtttctc

SEQ ID NO: 10367 - DNA, 427 bp, Bos taurus
  Clone ID: 44-LIB34-084-Q1-E1-C8
aaaaatggcggtgccgaaggggagcctatggctcagggcccaactggggatcccgccgctgctgctgctggccatggccctggccggaggctcgggaaccgcttcggctgaagcgtttgactcggtcttgggtgatacggcgtcttgtcaccgggcctgtcagttgacgtatcccttgcacacctaccccaaggaagaggagttgtacgcgtgtcagagaggttgcacgctgttttcaatttgtcagtttgtggatgatggaattgatttaaatcggaccaaattggaatgtgaatctgcatgtacagaagcatattcccaatctgatgagcaatatgcttgccatcttggttgccagaatcagctgccatacgcagaattgagacaagagcaactcatgtccctgatgccaaaaatgcatctactc

SEQ ID NO: 10368 - DNA, 390 bp, Bos taurus
  Clone ID: 44-LIB34-085-Q1-E1-C12
aggtgggcgtcaagattcacttcttcccacaacactttcgaggactatctggcatgcctcgacgatactccgattacccacatgcacactcactctgatgtactatctcatcaatagggtcattcatttccctatcagcagttatacgactagttttcatcatctgagaaggatttgcatctaagcgagaagtcttgactgtcaacttaaccacgacatatcgagaatgattaaactgatgccctccaccatatcacacatttgctgaacgcatctatgttaacctattagatgaaaggaacgaatcgaatcgcctacgattggtttcatgccatcatcataacctcgatgtcactctcagtagacattgctgaagaatacgatgtttgc

SEQ ID NO: 10369 - DNA, 403 bp, Bos taurus
  Clone ID: 44-LIB34-085-Q1-E1-C8
agcaggtgtcgtgaaaaccaccgttaaacctaagccaaaatgggaaaggagaagacccacatcaacatcgttgtcattgggcacgtagattcagggaagtctaccacgactggccatctgatctataaatgtggcgggatcgacaagagaacaattgaaaagttcgagaaggaggctgccgagatgggaaagggctccttcaaatatgcctgggtcttggacaaacttaaagctgaacgtgagcgtggtatcaccattgatatctccctgtggaaatttgagaccagcaagtactatgttaccatcattgatgccccaggacacagagacttcatcaaaaacatgattacaggcacatcccaggctgactgtgctgtcctgatcgttgctgctggtgttggtg

SEQ ID NO: 10370 - DNA, 461 bp, Bos taurus
  Clone ID: 44-LIB34-086-Q1-E1-C8
cccactaataaaaattgtaaacaatgcattcatcgaccttccagccccatcaaacatttcatcatgatgaagtttcggttccctcctgggaatctgcctaatcctacaaatcctcacaggcctattcctatcaatacactacacatccgacacaacaacagcattctcctctgttacccatatctgccgagacgtgaactacggctgaatcatccgatacatacacgcaaacggagcttcaatgttttttatctgcttatatatgcacgtacgacgaggcttatattacgggtcttacacttttctagaaacatgaaatattggagtaatccttctgctcacagtaatagccacagcatttataggatacgtcctaccatgatgacaaatatcattctgaggagcaacagtcatcaccaacctcttatcagcaatcgcatacatcggcacaaatttagtcg

SEQ ID NO: 10371 - DNA, 354 bp, Bos taurus
  Clone ID: 45-BOVMS1-001-Q1-E1-D2
atcgcaagcagccgcccttcagctttcattcccagtgcatgtaccgaactgtgtatgacaatatatccgacctgccagtcttatcacacaagtttgagcattacttgcatggatccatgacaaccacagcctgtctgatttcatcatacacttgcagtcttcagtcatcgccttcatattagtcattgtgcgtagatgtgtgtgcaaatgaagtttgcaaaatgccagacacattcttacgcgtcactcccatggccagtatagctgtaaggactgtgtgaaacgaatctgtttggtcatacaatccttacgatgtactaaaaggtgcttcaggatgttcacacgcttgtcatc

SEQ ID NO: 10372 - DNA, 379 bp, Bos taurus
  Clone ID: 45-BOVMS1-002-Q1-E1-D2
actagaggccagggtgcgtgagctggaaggagaggtagagagtgagcagaagcgcaatgtggaagctgtcaagggtctgcgcaaacacgagaggagagtgaaggaactcacttaccagacggaagaagatcggaaaaatattctcagacttcaggacttggtagataaacttcaggcgaaagtgaaatcttacaagagacaagctgaggaggctgaggaacaatccaatacaaatctatctaaattccgcaagctccagcatgagctggaagaagccgaggaaagggctgacattgctgaatcccaggtcaacaagctgcgggtgaagagccgggaggttcaaacaaaaatcatcactgaagagtgatcgtgtcctgat

SEQ ID NO: 10373 - DNA, 380 bp, Bos taurus
  Clone ID: 45-BOVMS1-003-Q1-E1-D2
gcatatactcagcatttttgcacacttcgacgccatgggaattaatggataagaagctttcatggcatggcacgatgatacaacgcaagattttccagtgaacggcaaggcttagttccatgtgaatcacttgctaacctgcctagaaactgctgaggaataacaatcataagaataagccgactattagaaccagccaaagccgtaaattatgcaaaacatactgttgctatgatgtaactgcatttgacctaaccactgcgagaattcattccgctgtaatgttttcacactacttaaaatcataagcacatcacttaagatttccttctgcataaggtttttttgtactagtatgtcgtaatcatagtcgaccatca

SEQ ID NO: 10374 - DNA, 312 bp, Bos taurus
  Clone ID: 45-BOVMS1-004-Q1-E1-D2
atgcgacgtcatagcccttctatagtgtcacctaaattcaattcactggccgtcgttttacaacgtcgtgactgggaaaaccctggcgttacccaacttaatcgccttgcagcacatccccctttcgccagctggcgtaatagcgaagaggcccgcaccgatcgcccttcccaacagttgcgcagcctgaatggcgaatgggacgcgccctgtagcggcgcattaagcgcggcgggtgtggtggttacgcgcagcgtgaccgctacacttgccagcgccctagcgcccgctcctttcgctttcttcccttcc

SEQ ID NO: 10375 - DNA, 412 bp, Bos taurus
  Clone ID: 45-BOVMS1-005-Q1-E1-D10
gtcggcccgcgcgtccgttttaatttatttttttttttttttttttattctaacactgatagtattggcgtgagtggtagtattatggtagataatacgactattgttggtataaaagttatttttttcataatgggaaattgtcattttatttttatgttgtttgtggagggaaatattgtgatcgtggcagaatacataagtcgtatatgaaaatatatatttaatagagctgtgtctgctatgaaatctgatacaataggacttggattttttgttaacgcttggatgattactcactttggaaaaactgcagatgctgaagggcagggatacatggtctattaattgtccatccccacgaacatgtcccagatggcaccgatgaagtggatctgattgcagaatcccc

SEQ ID NO: 10376 - DNA, 332 bp, Bos taurus
  Clone ID: 45-BOVMS1-005-Q1-E1-D2
ttggataaacaaacctactaggcctattaccccattcattcacaccaacaacacaactatcaataaacctaagcatagccatccccctgtgagcaggagccgtaattacaggattccgcaataaaactaaagcatcacttgcccatttcttaccacatggaacacccaccccattaatcccattaccagtaattattgagactatcagcctttttaatcaacctatagccctcgccgtgcggttaacagcgaacatcactgcacgacacctattaattcacctaatcggaagagctatacttgcactaatatgcattaacactacaacagct

SEQ ID NO: 10377 - DNA, 336 bp, Bos taurus
  Clone ID: 45-BOVMS1-007-Q1-E1-D10
ggtcgaccgacccgtccggcgagccaatagggcactcaaagaaatccggaagtttgccatgaatgataggggaaccccctatatgctcatcgacaccatagctcaacaaagccatctgggccaactggatcaggaatgtcacatatcaggatacgtgtgcgtgttgtctacaagacgtaatgagagaaaacactcgcctaacacactctatacgttgggtaccaacgtgcccgtcagcaacttcacgtatctacagacagtcactgtggattagaactacttgctgatggtccaacctagttagtgaactgccaacgccctgtaacggcgcaataa

SEQ ID NO: 10378 - DNA, 441 bp, Bos taurus
  Clone ID: 45-BOVMS1-007-Q1-E1-D2
gtcaaaatcggccaaatgatatcatggcagaagtttgtagagcaattaaacagctggattatgaatggaaggttgtaaacccgtattatttgcgtgttcggaggaagaatcctgtgacaagtacatactccaaaatgagtctgcagttataccaagtggatagtagaacgtatttactggatttccgaagtattgatgatgaaattactgaagccaaatcagggactgctacgccacagagatcgggctcagttagcaactatcgagcttgccaaaggaatgattcagatgctgaggctcaaggaaaatcctcagaagcttctcttacctcatctgtaacctcacttgactcttctcctgttgaattaactccaagacctggaagtcacacaatagaattttttgagatgtgcgcgaatctaattaaaattcctgcacagt

SEQ ID NO: 10379 - DNA, 225 bp, Bos taurus
  unsure (119): unsure at all n locations; Clone ID: 45-BOVMS1-009-Q1-E1-D10
atgcgacgtcatagctcttctatagtgtcacctaaattcaattcactggccgtcgttttacaacgtcgtgactgggaaaaccctggcgttacccaacttaatcgccttgcagcacatcnccctttcgccagctggcgtaatagcgaagaggcccgcaccgatcgcccttcccaacagttgcgcagcctgaatggcgaatgggacgcgccctgtagcggcgcatta

SEQ ID NO: 10380 - DNA, 435 bp, Bos taurus
  Clone ID: 45-BOVMS1-009-Q1-E1-D2
gggtcgacgacgcgtccgacgcattagctaatttcaaaatccccaccggcggccctttttttttttttttttttttttttttttttttttttttttcttttttttttttttttttttttttttttttttttttttttttttttttttttttttttttttttttttgggggggaacctgctctctttattcacaggccccaaaacatggcctcatatttggacagggatgtggggaacccttgggggccgggcctccttttatagacccccgggttgaaggcctctgcctttgggaaactctttggccgttcaacttctaacgcctgcgaaatttgcccttgggcccgtttcgggctttcttgttgaactttggaagaatttcaaatcttgcccggacattgggagcggccccctttttttttttttttttttttt

SEQ ID NO: 10381 - DNA, 401 bp, Bos taurus
  Clone ID: 45-BOVMS1-012-Q1-E1-D2
caggctggctcgggtcgcggccgcggcgagttacatcgtttgccaatctgtccgcggacgccgctgccggagacagagccaggatgttcgggatgctgagcagcagctttgaggatgatcccttcttctctgattcttttatcgcacaccgagaaagtatgcgacagatgatgagaagtttttctgaaccttttggaagagacatgctcagcatctctgataggagaggaagagctcgtaaccgtatgggacatgaggatgaagaaaattccttgactgcaatgagttctcttgtgccttttggcagttttggtggtatgcatacagatgtcagcccctttcaggcaatggaccgaatgatgttaaatatgcgaaacagtatgcaggaattacaaagaaac

SEQ ID NO: 10382 - DNA, 342 bp, Bos taurus
  Clone ID: 45-BOVMS1-013-Q1-E1-D10
tatgaggcataattataaccagctcaatctgcctccgtcaaacggacctaaaatcactcatcgcatactcctctgtaagccacatagcactcgttatcgtagccatccttatccagacaccttgaagctacataggagcaaccgcccttatgattgcccacggcctcacatcctccatacttttctgtctagcaaactcaaactacgaacgaatccacagccgaaccataattctagctcgaggcctacaaacgctccttccactaatagccacctgatgactactagcaagtctaaccaacttagctctacccccaacaatcaacttaattggagaactat

SEQ ID NO: 10383 - DNA, 449 bp, Bos taurus
  Clone ID: 45-BOVMS1-013-Q1-E1-D2
ggatacaagcacgatagatgcacaagaagtagagacaatctgaaccattctgcccgccatcatcttaattctaattgctcttccttctttacgaattctatacataatagatgaaatcaataacccatctcttacagtagaaaccataggacatcagtgatactgaagctatgagtatacagattatgaggacttaagcttcgactcctacataattccaacatcagaattaaagccaggggagctacgactattagaagtcgataatcgagttgtactaccaatagaaataacaatccgaatgttagtctcctctgaagacgtattacactcatgagctgtgccctctctaggactaaaagcagacgcaatcacatgccgtctaaagcaaacaacgcttatatcgtcccgtccaggcttatattacggtcaatgctcagaaatttgcg

SEQ ID NO: 10384 - DNA, 425 bp, Bos taurus
  Clone ID: 45-BOVMS1-014-Q1-E1-D2
gtcaatatgactggcaatgatcttaacaatattcgtgacgctttttagcatcgttcagctagaagtttcaacacacagcttttatcacaatccagaactgacaccatcaagtatattaagacaaaacaccccttgagaaagaaaatgaacgagaatttacttacctcttttattacccctgtaagtttaggtctccctctcgtaacccttatcgtacgattcccaagcctactattcccaacatcaaagcgactagtatgcaatcgctttgtgaccctccaacactgaatacttcagcttgtatcaacacatataatgagtatccacaattctcaaggacaatcatgaacattaatattaatatctctgatcctatttaatgggttaacaaacctactatgcctatttacccattcattcaacac

SEQ ID NO: 10385 - DNA, 173 bp, Bos taurus
  unsure (86): unsure at all n locations; Clone ID: 45-BOVMS1-015-Q1-E1-D10
atgcgacgtcaaagctcttcgatagtgtcacctaaattcaattcactggccgtcgttttacaacgtcgtgactgggaaaaccctgncgttacccaacttaatcgccttgcagcacatcgccctttcgccagctggcgtaatagcgaaaaggcccgcaccgatcgcccttccca

SEQ ID NO: 10386 - DNA, 127 bp, Bos taurus
  Clone ID: 45-BOVMS1-016-Q1-E1-D10
gggtcgacgaacgcgtcagttcacaatttattactttaaaacaagtttgctggtagtcttgaatgcaatatttgtttattccaaaagatcatatttataataaaatcattgtacaaggagctctaag

SEQ ID NO: 10387 - DNA, 459 bp, Bos taurus
  unsure (291),(421): unsure at all n locations; Clone ID: 45-BOVMS1-016-Q1-E1-D2
gccctgccaacatgggacaaacagatccagtcactctgtttccaagtgaataaccttttggagaaaattagtcagacagcaccagaatggacagcacaagccatggaagcccagatggctcagtgactccttgcagaccgtctgtgcacactacatctttttccacgttgtacggattcatttcactatctctcaaaaacatttgcatcatgaccttacatatttcaatcccttttatgctggattctatttaaagaagacattattagagcaggaagtacaagcatttanaaatatgtagttcccatttattcaaggtctctgtgtatcaagctaactcagacgttttgaaagctttttctttaaacagagtaagtgaaatatctgtggctaagaagtttgggatttgtgataactttgntagtcatgtaaaaataagtgccttgtgcctctccacat

SEQ ID NO: 10388 - DNA, 326 bp, Bos taurus
  Clone ID: 45-BOVMS1-018-Q1-E1-D2
acaacacgctaataattgtcttcttaattagctaattagtactttacattatttcactaatactaacgacaaagctgacccatacaagcacgatagatgcacaagaagtagagacaatctgaaccattctgcccgccatcatcttaattctaattgctcttccttctttacgaattctatacataatagatgaaatcaataacccatctcttacagtaaaaaccataggacatcagtgatactgaagctatgagtatacagattatgaggacttaagcttcgactcctacataattccaacatcaggaataaagccaggggagcta

SEQ ID NO: 10389 - DNA, 377 bp, Bos taurus
  unsure (280): unsure at all n locations; Clone ID: 45-BOVMS1-020-Q1-E1-D2
ctgcagtgcaccagcagggcagaacccaggagctgtccccatgccccagattagcaacaacaaaatcaacaggaaatggggtgacctgtagcatgtgttttcacatggtagttgctatggactgagtgtttgtgtcccctcctaaaattcgtatgtagaaacgcccccgcagccgggtgatgctgtttggaggtggggcctctgggaggtgattcttgttagatgaagtcatgagggtggggccctcattatggaatcagtgccatgtgaggacaagtangaagagaccctcaccaaggacccaaccatgaacttccagcctccagactcgtgagaaataaatgttggctgtttaaaaaaaaaaagtttcgggcaat

SEQ ID NO: 10390 - DNA, 447 bp, Bos taurus
  unsure (424)...(425): unsure at all n locations; Clone ID: 45-BOVMS1-023-Q1-E1-D2
cgtccggaataggtagaatagcaatcatttccctgtaagcacaaagccataggtcaacaaagaaatgaaaattccaattcttaagcagaattttctaaagtgaaagtagataaatacaaaattaatttaactttactatatatcaggagtaacctatgagaagtgaaatggaaaaaagatcctgtttataatagcaaacaaaactataaaataagaagcaactttaaaaatatatatagaactaaaaaatgaaagacaaactctgtattcctagatgagataatttatagttggtggatatcattcccatacttattttatacttttattaaatgtgtgtgtattcagaacaatatggagttttgttctgtggctttaaaatgcaaatgaatagtgtcatgcctcatatattctacagcttgcnnttttacacacattaagttttga

SEQ ID NO: 10391 - DNA, 414 bp, Bos taurus
  unsure (58): unsure at all n locations; Clone ID: 45-LIB188-001-Q1-E1-D2
tccggcagcatggccgcgcgatacacggtcactaccgacaaggtgccttgtcctttcncttcagcttttactgtgaaacgctcattttccttagtctcttctgagcgcaggaggctggcagattcccagaggatacgatgcctgaccgcagagttgcggctgggcagttggatggacacatccaggttcagctccttgtgatcaggaacatccttctggtattgggccaaggcttggaacaccatgaaagtggcctgcgtggagccataaccacctccatagtatctctgctcgttgagccagcgcacgacaggaggcgtagtgtcgtagtctttgcgtgccagcagagccaagagggcgtaggacgtggcctccacattgtagagcttctggttgggttcctcccagcggttc

SEQ ID NO: 10392 - DNA, 308 bp, Bos taurus
  unsure (292): unsure at all n locations; Clone ID: 45-LIB188-003-Q1-E1-D10
gatacacggttcagcctgttcctgccccagcttcaactatagaggatgcgaagagtagtaagaatgagggaaggaggagtcagaagcttaaattatttattcggggaaatgctatatcgggagcaccaattattaagggaacaagtcagttaccgaatcctccaattatgattggtattactatgaagaagattattacaaatgcgtgtgccgttacaactacgttgtagatttggtcgtctccgagcagagttccgggttggcctaattcagcgcgaattagaaggcttanagctgttcctactata

SEQ ID NO: 10393 - DNA, 288 bp, Bos taurus
  Clone ID: 45-LIB188-003-Q1-E1-D2
tggcggccggatactcgcgcaactgccgcgccatgtcctgcttggcgttcctcagagcggcctccagctcggccagcttggcctgagcatccttaacagccatctcaccacgctgctcagcgtcagcgatggcagcctccagggaagccctctggcctttgagaccctcgatcttagcctggagacggttgatgttccggttcatctcagaaatctccgtcttcgtgcgacgaaggtcatccccgtgcttcccagccagtgtctgcagctcctcatacttgatttggt

SEQ ID NO: 10394 - DNA, 398 bp, Bos taurus
  Clone ID: 45-LIB188-004-Q1-E1-D2
ccatggccgccggatacatatgaaataaaatttctagatttggggagaaaaaatgctgctccgattatccgctccgcttcctccgttccttgaatcaagcttaaaaaactgtgggggttgggccctgctgaaccctgccccacttgaaagaggctgcctgctgtgctgctttctgctttaacattgtccaatcaaatgtgtagtcatattggtgattcagggtcctgaaaagaatgcggaatagctgcctcaagtacagcgccgaatctaccttcgaggggatcctcaaaaacccaagagcagagtctttgaacagcaagtccctctggccgggtggagagccaaagagctggaagctccgagacttgttttttccaaatttctcctgcgccttgctg

SEQ ID NO: 10395 - DNA, 276 bp, Bos taurus
  Clone ID: 45-LIB188-005-Q1-E1-D10
actcgcgcagctgccgcgccatgtcctgcttggcgttcctcagagcggcctccagctcggccagcttggcctgagcatccttaacagccatctcaccacgctgctcagcgtcagcgatggcagcctccagggaagccctctggcctttgagaccctcgatcttagcctggagacggttgatgttccggttcatctcagaaatctccgtcttcgtgcgacgaaggtcatccccgtgcttcccagccagtgtctgcagctcctcatacttgatttggt

SEQ ID NO: 10396 - DNA, 356 bp, Bos taurus
  Clone ID: 45-LIB188-005-Q1-E1-D2
ggcggcgggacaccgagactgtgagactgacacgctcatcacctacatggcctagtttgcataccggggggtccaaagcagccctgtgaatactgttcgtgacactctcatcactcattgtgcccagatcgtggcctgttacataaagaactgtgtgagcccctcctctgcgggacagttgatcctgcctgaatgcatgaagctcgtccctgtttatctgaactgtgtagtgaaaagtgaggtcctgcaccctgaagctgaggatcacactgatgaccgtgcctacgtccagcatccggttacctccatggatgtggctgagaccacagtcttcatctatccgcggctcctaacgt

SEQ ID NO: 10397 - DNA, 208 bp, Bos taurus
  Clone ID: 45-LIB188-006-Q1-E1-D2
ctccctagcgagatgggcccgggcatactcttgcatgaacaatccgatggatggctagtactgcagggctgtatccaatggggtcgtgatcattatgttaagagtgatcgacttgaatttcacttataacgttcatgcattgtgaaaggatgtggcactgcactccagtgatcatacttggagggttttaaggatatgggatttcgtc

SEQ ID NO: 10398 - DNA, 248 bp, Bos taurus
  unsure (231): unsure at all n locations; Clone ID: 45-LIB188-007-Q1-E1-D2
gccatgggcgcgggatacgacaatgaatttggctacagcaacagggtggtggacctcatggtccacatggcctccaaggagtaaggtccctggacccccagccccagcaggagcacgagaggaagagttcctcagctgctggggagtcctgccccatctccgccacactgagaatctcctgacttccacatgtttccatctctaaggccctgaggaaggggaggggcttanggagccctgccttgtgt

SEQ ID NO: 10399 - DNA, 434 bp, Bos taurus
  unsure (399): unsure at all n locations; Clone ID: 45-LIB188-008-Q1-E1-D2
gccgcgggatactctgagcagggcaatgtcaggatgctgctgaggctgtacgtgcttttcttgctgtcctggtctgtgaaactgttttggaagttgctgctgctctgagtaaccccatccactttccacttgacattgatatctttggggtacaaatcattcaccaagcacacgacagagacagttccggtcttcagctgctcatcacatggtttgaacaggaagacggatggctcagcatcagaccttttgatctccacctcggttccttggacgaaagtgggacgagtatgtgtacattcaaggggggagccggctcccctgacgtgcaaatgatggggcccaaggccctgccaagtcagcatcagtggggtatggggaagctgtgcctctccctgnaagttgggacaagcacagtttctgggacagaacat

SEQ ID NO: 10400 - DNA, 422 bp, Bos taurus
  Clone ID: 45-LIB188-009-Q1-E1-D10
tggccgcgggctacttgagctagacagagtcactcgagcccctccagggagctgtggctaaattcttctctgccagctgtgttccctgcattgatagacaagcataccccaacctgtgtcaactgtgcaagggggagggggagaaccagtgtgcctgctcctcccgggaaccatacttcggttattctggtgccttcaagtgtctgcaggacggggctggagacgtggcttttgttaaagagacgacagtgtttgagaacttgccagagaaggctgacagggaccagtatgagcttctctgcctgaacaacagtcgggcgccagtggatgcgttcaaggagtgccacctggcccaggtcccttctcatgctgtcgtggcccgaagtgtggatggcaaggaagacttgatctggaagcttctc

SEQ ID NO: 10401 - DNA, 421 bp, Bos taurus
  Clone ID: 45-LIB188-010-Q1-E1-D2
acggaacagttttaaaaatacagaataaaatagctttatctctactattattcacaacatctggtccaaatattacatattaaaatacttaaacgtttaatgaaggtatgttagaaaaacaatatgaaaattctttttaaaaacgccataaaagaattagacataaaaaacaaccccaccccaaataccctcaatatgcaaaataaaaataaaaaccaaacaaaatcccagaaaggtatatagccaaagtcagtcacaaaaacttaaggaaaatataggcatccctactgttttaagaacagtcagaaactgactaacatgacaaaggttgctatgaatgaacaaaaagtgttttaacttgaccgtcagtaagatggcaccactgcggagggtgtcctaagtgccaggaaacacacagagc

SEQ ID NO: 10402 - DNA, 421 bp, Bos taurus
  unsure (209): unsure at all n locations; Clone ID: 45-LIB188-011-Q1-E1-D10
actgggaacaaacgtctgggtgatccaaaacatagtagccagacaagcaccttagcacacaaaccctacagcttgtctagctctttctcctcttccagttcttctcgttaaaaaggcccctcccctgaaagagactggaggggtggcgtatgatcattcaaccaagaccgccaagagtgctaaatcctcttccataaatttctccttcncacctcttcctacaatggcccatttgcctgggcatagctcagacacaagtggccttcatttttcacagcccagctgtaaaactcgagttcctcacatgaaattggataaaagctccactggggccaatagtcacaatacaccccagaccacagactatcaagatactgtgaatatgcttaactcccttctcaatgcccaaggtgttcaaccc

SEQ ID NO: 10403 - DNA, 426 bp, Bos taurus
  Clone ID: 45-LIB188-011-Q1-E1-D2
acttgtcctccgactcagtctgccggtctctctgccactccacgtctacatcttctgggtagaagccgatgaccatgcaggtgacgctgaccgtgcttttgctgagctcttccttgggtgggtccaggacatacacctgcggctcccgggccggccctttgctcctggagatgatcctcacgatggaggccgagaggcctttgatgttgaccttgcacttgaactcctttcctccagtccagtcctggtgctggatgggcagggcgcttgacaacgcggtacgctcccagctggagggaggtgaccgcacgggctccagctctgtggcccccctcctccctttgcccaaccctcgtccgcaggtcctctgtgagatccttctctggccttccccagaatggggctggccctctgctgggggtatga

SEQ ID NO: 10404 - DNA, 432 bp, Bos taurus
  Clone ID: 45-LIB188-012-Q1-E1-D2
actgacgtcactgtatgaggaagccgtgaaggaagataataccatccactggacacgacctcaaaaacccagggtgctcacggaggacatttaccaacccagggctccgtctgcggaggtggagatgacggcctacgtgatccttgctcacgtcacggcccagccggccccgaacccataggacctcaaacgtgccacgagcatcgtgaagtggatctcaaagcagcagaattgccaggggggcttctcctccacccaggacacagtggtagctctccacgctttgtccagatacggagcacccactttcaccagcgctacgaaggctgcacaagtgaccatccagtcttcaaggacatttttcacaacattccaagtggaaaacagcaaccgtctgttactacatcaagtttcattgccagacgtgcctgg

SEQ ID NO: 10405 - DNA, 329 bp, Bos taurus
  Clone ID: 45-LIB188-013-Q1-E1-D10
tggccgccggatacgtgttgttgaacagctcctctcttggcttcgacctggccgtgttgcacctctacgtcatccaggaggccagtgagaactgcacctcgagggttatcgtggcccacgttcatcagcagatacgtgacctcgggcgttcctgtgatcatcatggtgtctttgggtttcggtgggaagttgatcacagatggttccctcacacacggctggttatgacacttggagcagtcaatggctaccccaccagccttgtccaccttggtgctgctggccggctggactactttgcacgtgatcgtctgtcctgacctgctggc

SEQ ID NO: 10406 - DNA, 307 bp, Bos taurus
  Clone ID: 45-LIB188-013-Q1-E1-D2
actctgaacagggcaatgtcaggatgcagctgacgcagtacgtgcttttcttgctgacctggtcagtgacactgttttggtagttgctgctgctctgaatacccccatccactttccacttgacattgatatctttggggtacaaatcattcagcaaacacacgacagagacagttccggtcttcagctgctcaacacatggattgacgaggaagacggatggatcaacatcagaccttttgatcccgaccttggttccttggacgaaagttcgaggaacatatgtacagtgccgaaaatctgtttt

SEQ ID NO: 10407 - DNA, 405 bp, Bos taurus
  Clone ID: 45-LIB188-014-Q1-E1-D2
acagcacagactatacacggaagtctttcgccccacagaccgccgcccacgtggagccctggactttgcagaatgggatggccatatgcggatgaaagggttggggcttccagcctctgatgctgtcgcaagccctttcccaaggtcatgggatgggggcagacagcttggcactggtagcaaaactccaacttcctctgaaatcctacgtggagaggtccatttctttgggactcctggctcagaggttttctgctccttgcagacctgtgagctttctcaggaacaagtatcctggacttagctgagactcctccaagaggagctgaagccctggccttggcggcagaacagccctgggaaacaggctggtcaagtctggtctcgacatcattgcccagccca

SEQ ID NO: 10408 - DNA, 441 bp, Bos taurus
  Clone ID: 45-LIB188-015-Q1-E1-D10
acgtcgatgactggggccaaggactccgtgtcgacgtctccgcagcctccaccacagccccgaaagtctaccctctgagttcttgctgcggggacaagtccagctccaccgtgaccctgggctgcctggtgtccagctacatgcccgagccggtgaccgtgacctggaactcgggtgccctgaagagcggcgtgcacaccttcccggctgtccttcagtcctccgggctctactctctcagcagcatggtgaccgtgcccggcagcagctcaggacagaccttcacctgcaacgtagcccacccggccagcagcaccaaggtggacaaggctgttgatcccagatgcaaaacaacctgtgactgttgcccaccgcctgagctccctggaggaccctctgtcttcatcttcccaccgaaacccaaggacaccctcacaatct

SEQ ID NO: 10409 - DNA, 370 bp, Bos taurus
  Clone ID: 45-LIB188-015-Q1-E1-D2
ccatagccgcgggatacctccctaatgacaaagtctccaaagtcaaattgcatatgaacaacgtacaggtttataaatattctggcgttttgtaaattttcccaatatactttgggggctaatacaactcagcagaagtacaggctcaatggtcagcatgaatatgctttaattcttatcctgacacctagggattttattaacaaaaacagcattataccatcttctcactgaccaaagcaccattgtgttgatccgatcatgtaagacgtgactctcctaagacaccaaagtgacagacctgcgcagggatgcgtctatgaaagaaggtgtgacgaaggatctgcaggctgacactggtggaatatca

SEQ ID NO: 10410 - DNA, 318 bp, Bos taurus
  unsure (158): unsure at all n locations; Clone ID: 45-LIB188-016-Q1-E1-D2
ccatagccgccggatacctggggtcatatatatgccggcccaggcaaagactgacacccggtttggacccgggttttacccaactggaaggaaaatggaggaattacaaattggccggccccaaccttggggccaaaaagttcccgccgggtcctggnaccctcaggcccacctgcctgcacacttattgtgccatctggaggctgatggtccagtggtccatggggggcaagatatggtttttggggtcatacagatgccgtctggtgccataagctgtcataccggactggctggcacatttgttggtgcccatct

SEQ ID NO: 10411 - DNA, 371 bp, Bos taurus
  Clone ID: 45-LIB188-017-Q1-E1-D10
acttgcagtgctggggtgtcccctccccactagccagccttgtgcggggcagtgggcctgggggcccggtaactggaagcagggcttagggtcttggctcaagtccaggccaaacttggcccagcctggtcaactgtggtccaggttcctaaatgacgcctacccacccccttgtgttgaaagcttgagcgttagaggggaagggggtgggcaggaaaagaggttattttacaagtttttaaaaattacaggaaagttaactttgagtaaaaaataaaaaagaatcaaagatcaagcagagggatgctcccctcccctcctccttcccttgtaaagaaggggcaagtggcccaggacgctcagatgatggt

SEQ ID NO: 10412 - DNA, 255 bp, Bos taurus
  unsure (29): unsure at all n locations; Clone ID: 45-LIB188-017-Q1-E1-D2
tgaccgtgcttttgctgagctcttcctgnggtggggccaagacatacacctgcggctcccgggccggccctttggtcctggagatggtcctcacgatgggggccggacctgcccgggcggccgctcgaaccaactgatccaaggattcgcccccagaaccctcatctatggtgacaccagtcgagcctcgggggtccctgaccgattctccggctccaggtctgggaacacagccaacctgactatcagctcgct

SEQ ID NO: 10413 - DNA, 189 bp, Bos taurus
  unsure (126),(154),(188): unsure at all n locations; Clone ID: 45-LIB188-018-Q1-E1-D2
ccagctggaggagcagtgccacatctagagcccgggagccttggcccctctggggacagacgatgtcatccccgcctgccccatcaggggaccaggaggaaccgggaccacattcacccctcctgngacccaggcccctccaggcccctcctgnggcctcctgcttggggccgctcctccttcagcant

SEQ ID NO: 10414 - DNA, 449 bp, Bos taurus
  Clone ID: 45-LIB188-019-Q1-E1-D10
gccatgggcgcgggatacttatgatcggccagcccaccgggcactttgacaagcttgttgttgttcaaatgaagttccctcaaatgaggagtgttggccaaagagccattgtcaaccgcagagatgctgttgaaactcagtcccaacttagccaaattattcagtcctttcaggctagctgcatcaactttggtgattttgttgccatcgagatgtaattcagtaagggaaggaggaagaccttgagggatggtagttatatttgtgtcagcaatgcggatgtaggagagcttcttcattccctgaaagactccattttcaatgcctgagctcttcagcgggttggtgccaagttctacgacgatcatctggttcaatccattgaacacagactttcgcactttggtgatctcgttctcatggacacgcagctcctgaagagttttggg

SEQ ID NO: 10415 - DNA, 396 bp, Bos taurus
  Clone ID: 45-LIB188-019-Q1-E1-D2
actttgcctggaaaatcccatggatggaggagcctggtaggctgcagtccacagggtcacgaagagttggacacgactgagcgacttcactttcacttttcactttcatgcattggagaaggaaatggcaacccactccaatgttcttgcctggagaatcccagggacgggggagcctggtggctgccgtctgtgggatcacacagagtcggacatgactgaagtgacttagcagtagcagcagcagcagcagcagcagctcattcctattctgtatgtaggttccttttgatccttcacagaatggagaattggggctgattgcattttacttctctagaaagtgtatgtgtgtgtgtgtgtgtgtgtgtgtgtgtgattctttggaggtatatg

SEQ ID NO: 10416 - DNA, 347 bp, Bos taurus
  Clone ID: 45-LIB188-021-Q1-E1-D10
tggcggcgggatacaacgtctacaagatccactggctcatggcagccctgactttcaccaagagcgtctctctcctcttccacagtatcaactactacttcatcaacagccagggccaccccatcgaaggcctcactgtcatgcactacatcacgcatctgctgaaaggtgccctcctcttcatcaccattgccttgatcggctccggctgggccttcgtcaagtatgtgctgtcagacaacgagaacaagatctttgggatagtgatcccactgcaggtcctggccaacgtggcctacattgtcatggagtcccgcgaggagggtgccatcgactacggtatctgg

SEQ ID NO: 10417 - DNA, 439 bp, Bos taurus
  Clone ID: 45-LIB188-021-Q1-E1-D2
gccatggcggcgggatactgtcccagtgggtcgtgtggagactggtgttctcaaacctggcatggtggtcacctttgctccagtcaatgtaacaactgaagtgaagtctgtagaaatgcaccatgaagcattgagtgaagcccttcctggggacaatgtgggctttaatgtcaaaaacgtgtctgtcaaagatgtccgtcgtggcaatgtggctggtgacagcaaaaatgatccacccatggaagctgctggcttcacagctcaggtgattattttgaaccatccaggccaaatcagtgctggatatgcaactgtgctgggatgtcacacagctcaaattgcttgcaaatttgctgagctgaaggagaagattgatcgtcgttctgggaaaaagctgggagatggccctaaattcttgaaatctggtgacgctgccatc

SEQ ID NO: 10418 - DNA, 406 bp, Bos taurus
  unsure (76): unsure at all n locations; Clone ID: 45-LIB188-022-Q1-E1-D2
atgcgcccggacgccatgtacgccggatagcatctcccaacctgaatggttcaaatgccgccgatggcaattgganggataaaaaactgggtggtccctccaacaactgtgttaagaagggccttgcctttggaatgtatccgggccaaccccgggaaaaaagcggatgctgtgacctggatggtggcatggtgtttgaggcgggccgggacccctacaaactgcggccagtatcagcagagatctatgggacgaaagagtctccccaaacccactattatgctgtggccgtcgtgaagaagggcagcaactttcagctggaccagctgcaaggccggaagtcctgccatacgggccttggcaaggtccgctgggtggattatccctatgggaatccttcgcccgt

SEQ ID NO: 10419 - DNA, 290 bp, Bos taurus
  unsure (255): unsure at all n locations; Clone ID: 45-LIB188-023-Q1-E1-D2
catggtagcgcgatacgtccccggaaccgtgataaccgggcgagacttctataagatcttgggggtgcctcgcagtgcctctataaaggatattaaaaaggcctacaggaaactagccctgcagcttcatcctgaccggaatcctgatgatccacgagcacaggagaaattccaggatctgggtgctgcttatgaggttctatcggatagtgagaaacggaaacagtatgatacatatggtgaagagggcttganagatgggcatcaaaacccccaaggaaaaatttttt

SEQ ID NO: 10420 - DNA, 426 bp, Bos taurus
  unsure (403): unsure at all n locations; Clone ID: 45-LIB188-024-Q1-E1-D10
ccatagccgccggatacttgtcctcagactcaggctgcccatttctctgccactccacggcgatgtagtctgggtagaagctggtgaccatgcaggtgaggctgaccgtgcttttgctgagctcttcctggggtggggccaggacatacacctgcggctcccgggccggccctttggtcctggagatggtcctcacgatgggggccgggaggccttcgttgtggaccttgcacttgaactcctttcctccagtccagtcctggtgctggatgcgcagggcgctgaccacgcggtaggtgctgttgaactgctcctctctcggcttcgtcgtggctgtgtttacctccacgtcgtccacgaaccaggagaacttcacctcggggtcatcgtggcccacgtcaancaccacacacgtgacctcgggcg

SEQ ID NO: 10421 - DNA, 416 bp, Bos taurus
  unsure (284): unsure at all n locations; Clone ID: 45-LIB188-024-Q1-E1-D2
ccatgaccgcgggatacaagaataattaagtattttgcacaaaggaaatttgttgatgatccagtagaactgatgcccatagaacgcagtttcttaaggattttgttttgcttctttgagggaggcggccatcgtcattgtcagttcagctgggggttccttccttcatgctgaggacctgtgtctttgaagttgctgacgtcctcggaatcccaggcaggctggtgaatgctcaggggctcccatggaggcatctggtggcctcgggccccctttgcttgtangaggcttagcaagttccttgtcgcttcttcccactgggcatactccctcagctgctccttcagactctcctcctcatgaagttgtggggactctgccacactctttttttcccattaagtgtccgacagccc

SEQ ID NO: 10422 - DNA, 384 bp, Bos taurus
  Clone ID: 45-LIB188-025-Q1-E1-D2
gcaatgggcgcgggacactttttaatttgaaagatttgtcaaactcttcacaccgtggcaagagtttgcatgattaataagaagcagctttttcatgaaatgcttggaggtgaacgagttctcagcctgtgagatccgaccatcccattgattttgaaatttcttttgattaatagaaagaaaaagtggggaggggagaagaggaggaacatgctagcgactgaaagatctctggtgacagccatccagatgtgaaaaaagaaaacagaaaacccaaaagaaaaccaatttgccacctgccctttttctgttttaccacgttctgctcctcgctcttgattttggtctttctggttgaaacagcctccctgtcctgcatctcct

SEQ ID NO: 10423 - DNA, 415 bp, Bos taurus
  Clone ID: 45-LIB188-026-Q1-E1-D2
tggccgcggcatactcctagttgaaggtcaaggccacgatgcggtccaggtcttccaccagctgcttgaaggtgggtctctgagaggggaccgcgtgccagcaatctctcatcatcatgtagagctcgttggtgcagttactgggcttgtccatacgatgaccctccttcagcagcttgaaaagctcctccacggggaccccagggtatggggagccgcccagagtgaagatttcccagaggagcaccccaaaagaccacacgtcgctctggtgggtgtagatccggtcaaacaaggcctccggtgccatccatttgacgggcagtcggccgttggttgtctttttatagtagtcgatgtggtggatgtctcgagcaagaccgaagtccgcaatcttcatcacgttgtcctccgt

SEQ ID NO: 10424 - DNA, 302 bp, Bos taurus
  Clone ID: 45-LIB188-027-Q1-E1-D2
cgccaagggcgcgggatacctgtgtggtggggatgactgaaccccgcgacagcccaagcatcgaggacggctgctccgtgctccagctaacagttctccgcagtcagcccgcggctaacagcccctgtgcccgtccccgggaggatgacattagcgctgcccgccccacccgctcttttgttagtttagtttcctacgcattacctggctttcccggctagtccctctttatagccaaagaaatgaacattccaaggatttggaagtggaatctatgacgtgaaacactttgcctctcgagt

SEQ ID NO: 10425 - DNA, 408 bp, Bos taurus
  Clone ID: 45-LIB188-028-Q1-E1-D2
gccgagcctgcatgcgccaagccgccatgagcgcgggatacacaggaggcggctggtagccctcggtgctctcggcgttctgggtgaagggcggctgctggtaggtgtccgcaggcacgcctgggtaggaggcgtaggccgtgctcgggtccggagtggggtccacgtagttctggatgaattcgtccactccagccttgtagcgctggtaggccaggaaggccagcacgcaccaggagaagatggagaagaagctgaaggtgatggccgcccgggctgagttggcttctacatgcacatcgttcttcttggtggccgcccactgattggtgaggaagcagaagccaacgaaccacaggaaggtccagagagctgagaagagcaggtcaccgatgaccaggtatcact

SEQ ID NO: 10426 - DNA, 408 bp, Bos taurus
  Clone ID: 45-LIB2809-001-Q1-E1-D2
tggccgccggacccttcaaattacaaaaaattagcaaatacagtggccaaaggaatctgtagcaacttctcaaaatactgttagcatctttgggtttgctgaggcttgtcaaaaactcacatcaaatcctctcaaaagaagatctgaatggatagacatgactaaacagttttgtggtgataatccaattttacacattaatttgctgttgcaaatctgcctgaagctacaggtaatgaaaaataaagcaagtgtaaaatggatagtctgacacttaaaaatttatacaaagtgaaggttatagtttacatatttgaaaatcacatatacactaaattaccattatctgaattacccaaagacaaattgcaccgtaacagctacaaaaggcatagagtttttgttttg

SEQ ID NO: 10427 - DNA, 433 bp, Bos taurus
  Clone ID: 45-LIB2809-002-Q1-E1-D10
tgggcgcgggatacaagtccattatgatgaaagtttcaaatttctattaaaggacatgtaggtgttaactggaaggactgatgctaaagctgaaactccaatactttggccacctcatgcgaggagctgactcattggaaaagaccctgatgctgggagggattgggggcagtaggaaaaggggacagcagaggatgagacggctggatagcattaacgacccgatggacatgagtttgagtgaactccgggagttggtgatggacagggaggcctgacgtgctgcaattcatggggttgcaaagagtctgacacgactgagcaactcaactgaatggaatttatctgataatgtgacatgcaggtagaagcaatttaagagtattgtaatagggtatcacttccaaagaactgactttatattataatacta

SEQ ID NO: 10428 - DNA, 412 bp, Bos taurus
  Clone ID: 45-LIB2809-003-Q1-E1-D10
cgacgcactatgctcgccgcagccatggccagggcgatacagcacaaaggactgaatgggcatatctctctggggatagggcactgctttctggggaacaggcaggactttggactgagaaagggacagcacggactgaggaggaaacatgacagttggaggaagaggctggtgaggctggtgcatccaagactggagcagaggcagaggaaggtgcagattttcaacatcagtgagagtcaggctctggctttcagtaaagggctcaactggatatttagggaagggcatttctttgtgcttaggagccatagcctccttcactttggagactcccattacttcaggctgaaggaaaggcggcaccaccacaggggtttgagtaagaggagggatgttttgtgggacgctg

SEQ ID NO: 10429 - DNA, 462 bp, Bos taurus
  Clone ID: 45-LIB2809-007-Q1-E1-D2
ctccggcaacatggccgggcgatacaggctacagaaccatcctccagggcttccggacctttgccaagaatggtggatgctgtggaggaaatgggaacaacccaaactgctgcatgaaccagaagatagaccacaccgttactctctcagcatctttattcaacccagaggagttcatgcccctggatcctacccaggaacccatcttccctccagagttgctgaggctgaaagacgttccaccgaagcagctgcgttttgaaggggagcgtgtgacctggatccaagcctccaccttgaaggagttgctggacctcaaagctcagcatcccgaggccaagctggtggtggggaacacagagatcggcattgagatgaagtttaagaatcacctatttcctatgatcacctgcccagcctggatccctgagctgaatgcactggagcacggacctgagggga

SEQ ID NO: 10430 - DNA, 285 bp, Bos taurus
  Clone ID: 45-LIB2809-008-Q1-E1-D10
cgtatgtgtatgatacataaggttatgtattaattgtagccgcgttctaacgacaatatgtacaagcctaattgtgtagcatctggcttactgaagcagaccctatcatctctctcgtaaactgccgtcagagtcggtttggttggacgaaccttctgagtttctggtaacgccgtcccgcacccggaaatggtcagcgaaccaatcagcagggtcatcgctagccagatcctctacgccggacgcatcgtggccggcatcaccggcgccacaggtgcggttgct

SEQ ID NO: 10431 - DNA, 448 bp, Bos taurus
  Clone ID: 45-LIB2809-008-Q1-E1-D2
ggatactgaagaaactgggcaaggactcgagagataagtgtggtaaactggaccccacctacaccagcgccactttactctttcagaaagaccctccagccaacatccagctcttccaagaggtgcccaatggtcagtccaaggaggacacagtgggccggcccctgccccacctggccgcggccatgcaagcctctggggaggccgtatactgtgacgacatccctcgctacgagaatgagctgttcctccggctggtcaccagcacccgggcccacgccaagatcaagtccattgatgtttcagaagctcagaaagtgccaggatttgtttgctttctctctgctgatgatattcccgggagtaatgaaaccggactctttaatgatgagacagtctttgcgaacgatacggtgacttgtgttggtcacatcattggtgctgtggt

SEQ ID NO: 10432 - DNA, 426 bp, Bos taurus
  Clone ID: 45-LIB2809-011-Q1-E1-D10
ccatagcggcgggatacctgagacgatcctcaccctgaacaaagccagaattaaaatttgggttttaactggagataagcaagagaccgctgtgaacattgcctatgcctgtaacatattcgaggatgagatggatgagatatttatcgtggaaggcaacaatgatgagactgttggaggagaactcaggtcagcaagggaaaagatgaaacccgactctctactggaatcagaccccgtaaacagttacctcgccacaaagccccaaccacccttcaaaatacctgaggaggtgcccaatggcagctatggcttaatcatcaatggctacagtctggcccacgctctagaaggaaacctggagttggaactggtgcggacggcatgcatgtgcaagggggtgatctgctgccggatgacacccct

SEQ ID NO: 10433 - DNA, 208 bp, Bos taurus
  Clone ID: 45-LIB2809-013-Q1-E1-D10
cctgaatgggcatatctctctggggatagggcactgctttctggggaacaagcaggactttggactgagaaacggacagcaccgtctgatgatgaaacatgacacttggacgaagatgctggtgatgccggtgcatccaagactggagcagaggcacaggaaggtgcagattttcaacatcagtgacagtcatgctctggctttcact

SEQ ID NO: 10434 - DNA, 367 bp, Bos taurus
  Clone ID: 45-LIB2809-013-Q1-E1-D2
accccagctggaaattgttcccaatagtgctgaggaacgacttcacagtatgaaagagggaatccatgcccaacagaaagaacctatgataggagtgaatcaggaactggcctacttctaccctgagcttttcagacaattctaccagctggatgcctatccatctggtgcctggtattacgttccactaggcacacaatacactgatgccccatcattctctgacatccctaatcccattggctctgagaacagtgaaaagactactatgccactgtggtgaagagtcaagtgaattctgagggactccacagttatggtctttgatggttctgaaaattccatgctctacatgtcctttcatcta

SEQ ID NO: 10435 - DNA, 268 bp, Bos taurus
  Clone ID: 45-LIB2809-015-Q1-E1-D2
ctcacaaagggagtaacctttgtcttaggttgaatccatggcttcatagctttctgatgctgataaacagtcttgagatactggggcaaggcgaatttctggtaacgctggctgatttttttcagaaaatttaggcgattcttttcttcttcagtcagtttagttttcttagtgaatacttctgttgattccatgtcaacggtcttctttgaattttcctcactggtggagagctgctctctgttcacagtgggagtaatgggaacag

SEQ ID NO: 10436 - DNA, 418 bp, Bos taurus
  Clone ID: 45-LIB2809-017-Q1-E1-D2
gccaagggcgcgggatcctgcttgtgagcgtgctaagcgcactctctcttccagcacccaggccagtattgagattgattccctctatgaaggaatcgacttctatacctctattacccgtgcccgatttgaagaattgaatgctgacttgttccgtggcaccctggaccctgtggagaaagcccttagggatgccaaactggacaagtctcagattcatgatattgtcttggttggtggctcaacccgtatccccaagattcagaaacttctccaggacttcttcaacgggaaagaactgaataagagcatcaaccctgatgaggctgttgcatatggtgcagctgtccaggcagccattttgtctggagacaaatctgaaaatgttcaagacttgctgctgttggatgtcactcct

SEQ ID NO: 10437 - DNA, 434 bp, Bos taurus
  Clone ID: 45-LIB2809-019-Q1-E1-D2
gggctacctggagagattgtggaaagcctttcaagcagtgaggaatctattacacgcatcaataagaaaattgagaagtttcagagtgaggaacagcagcaaacagaggatgaactccaggataaaatccacccctttgcccagacacagtctctagtctatcccttccctgggcccatccctaacagcctcccacaaaacatccctcctcttactcaaacccctgtggtggtgccgcctttccttcagcctgaagtaatgggagtctccaaagtgaaggaggctatggctcctaagcacaaagaaatgcccttccctaaatatccagttgagccctttactgaaagccagagcctgactctcactgatgttgaaaatccggaacctccctcggcctctgctccagtcttggatgcaccagcctcaccagcctc

SEQ ID NO: 10438 - DNA, 361 bp, Bos taurus
  Clone ID: 45-LIB2809-020-Q1-E1-D2
gggacaccacgtatcataaaagtggttatgacacacaagtcatagtacaaaacaatgacagcacagaatatggactcttccagataaataataaaatttggtgcaaagacgaccagaaccctcactcaagcaacatctgtaacatctcctgtgacaagttcctggatgatgatcttactgatgacattatgtgtgtcaagaagattctggataaagtaggaattaactactggttggcccataaagcactctgttctgagaagctggatcagtggctctgtgagaagttgtgaacacctgctgtctttgctgcttccgtcctctgtccggttcctggaacccctctgccccgtggctacct

SEQ ID NO: 10439 - DNA, 248 bp, Bos taurus
  unsure (176): unsure at all n locations; Clone ID: 45-LIB2809-022-Q1-E1-D2
gggatacctgaaaactcgttctcagatgccttacaaagtcttccattaccaagtaaagatacatttttctggaactgagagtaatacatacaccaaccaggccttcgagatctctctgtatggcactgtgactgagagcgagaacatcccttttaccctgcctgaagtttccacanataagacatactcctttctactttacacggaggtggatattggagaattgctaatgttgaaactcaaatgga

SEQ ID NO: 10440 - DNA, 357 bp, Bos taurus
  unsure (79),(255): unsure at all n locations; Clone ID: 45-LIB2809-023-Q1-E1-D2
tgggcccggcatacagcagaaaggcctgaatgggcatatctctctggggatagggcactgctttctggggaacaggcangactttggactgagaaagggacagcacggactgaggaggaaacatgacagttggaggaagaggctggtgaggctggtgcatccaagactggagcagaggcagaagaaggtgcagattttcaacatcagtgagagtcaagctctggctttcagtaaagggctcaactggatatttanggaaaggcatttctttgtgcttaggagccatagcctccttcactttggagactcccattacttcaggctgaaggaaaggcggcaccaccacaggggtttgag

SEQ ID NO: 10441 - DNA, 397 bp, Bos taurus
  Clone ID: 45-LIB2809-024-Q1-E1-D10
gggaaacctgaaaaacacggtcaacacgatgcgcctctggtccgctcgggcgcccaatgacttcaacctcagagactttaacgttggagactacattcaggccgtgctggaccggaatctggccgagaacatctcccgggtcctctatcccaatgataatttttttgaagggaaggagctaagattgaagcaggagtattttgtggtagctgctaccttgcaagatgtcatccgacgtttcaaagcctccaagtttgactccagcaatagcaccaaaactgcgttcgatgccttcccagattaggttgccatccagctgaatgacacccacccttcacttgccatccctgagctgatgaggatttttgtggatatttaaaaactgccctggtcaaag

SEQ ID NO: 10442 - DNA, 244 bp, Bos taurus
  Clone ID: 45-LIB2809-025-Q1-E1-D10
tccttagccatgacggccaccgacatctccctgctggacgcccaaagtgcccccctgaaagtgtatgtggaggagctgaagcccacccctgagggcgacctggagatcctgctgcagaaatgggagaacggtgagtgtgctcagaagaagatcattgcagaaaaaaccaagatccctgcggtgttcaagatcgatgccttgaacgagaacaaagtccttgtgctggacaccgactacaaaaagt

SEQ ID NO: 10443 - DNA, 386 bp, Bos taurus
  unsure (39): unsure at all n locations; Clone ID: 45-LIB2809-025-Q1-E1-D2
agcagaaacgccagaatgggcatatctctctggggatanggcactgctttctggggaacacgcaaggacttggactgaaaaagggacagcacggactgaggaggaaacatgacagttggaggaagaggctggtgaggctggtgcatccaagactggagcaaaggcagaggaaggtgcagattttcaacatcagtgagagtcaagctctggctttcagtaaagggctcaactggatatttaaggaagggcatttctttgtgcttaggagccatagcctccttcactttggagactcccattacttcaggctgaaggaaaggcggcaccaccacaggggtttgagtaagacgagggatgttttgtgggaagctgttacggatgggccc

SEQ ID NO: 10444 - DNA, 425 bp, Bos taurus
  Clone ID: 45-LIB2809-027-Q1-E1-D10
actctcatccctactgtggtgatcatagctgttggggccctgctcttcattattgggctaattggttgctgtgccacaatccgggaaaccgctgtggacttgccacgtctgtcatcatcctactcttggtttttgtcacagaagttgttgttgtggttttgggatatgtttacagagcaaacgtggaaaatgaagttgatcgcagcattcagaacgtatataagacctacaatggaaccaaccctgatgctgctagccgggccattgactatgttcagagacagctgcactgttgtggaattcacaactattcagactgggaaaatacagactggtttaaagaaacaaaataccagagcgtccctcttagttgttgcagagagacagccagcagctgtaacggcagtctggccaacccctctgat

SEQ ID NO: 10445 - DNA, 434 bp, Bos taurus
  Clone ID: 45-LIB2809-028-Q1-E1-D2
gggctacctggcacaatactgtctctctccatcggagaccgcgtccctgctgacatccgtctcacagaggtcacagacctcctggtggacgagtccagtttcacgggagaagccgagccaagcagtaagacagataccccactgacaggcgagggtgacctcacgaccctgagcaacatgatcttcatggggaccctggtgcagtgcgggaagggccagggcgtcgtgatcggaacaggagaaaggtcccagtttggagaggtgttcaagatgatgcaggctgaagagacacctaaaactcctctacagaaaagtatggacaagctggggaagcaactgacactcttctcattcggcataattggcctgatcatgttcactggctggctgcaagggaaacacctgctcagcaggttcaccatcgggggtcagcc

SEQ ID NO: 10446 - DNA, 265 bp, Bos taurus
  Clone ID: 45-LIB2809-029-Q1-E1-D2
ggaaatgggcctggcttccggggaaacaggcagaactttggactgaaaaagggacaccccggactgaggaggaaacatgacctttggaggaacacgctggtaaggctggtccctccgagactgcagcacaggcagaggaacgtgccgattttcaacatcagtgagagtcaggctctggctttcattaaagggctcaactggacccttacggaagggcatttccttgtgcttaggagccatagcctccttcactttggagactccc

SEQ ID NO: 10447 - DNA, 414 bp, Bos taurus
  Clone ID: 45-LIB2809-030-Q1-E1-D10
acctcttattacaagctctgcccctgctccttcccctcactgacatagcccctcttccctgaagctatgaacatgtgagatacttgtagacacgcaagcacctggcaagtttgctttcaagagcctgctaatgaatgaggaaagtcagtccaggccaggtgtcagagcccccaccatgagaaaaggaggaatacaaaggactgagagtgttaaacaaggcaaagctcttctttttctccaaaactagtcaggcctggagactacgtgatttgtttgaagacagaaccagcagagctgcagggtgactggaagccatcgccagagggaagaacacaagcttcaaggccagatgcccagctgagctctcagaacagcccagccaggaggacaggcaggagaaccaggggccaggcc

SEQ ID NO: 10448 - DNA, 414 bp, Bos taurus
  unsure (390): unsure at all n locations; Clone ID: 45-LIB2809-032-Q1-E1-D10
accccagctggaaattgttcccaatagtgctgaggaacgacttcacagtatgaaagagggaatccatgcccaacagaaagaacctatgataggagtgaatcaggaactggcctacttctaccctgagcttttcagacaattctaccagctggatgcctatccatctggtgcctggtattacgttccactaggcacacaatacactgatgccccatcattctctgacatccctaatcccattggctctgagaacagtgaaaagactactatgccactgtggtgaagagtcaagtgaattctgagggactccacagttatggtctttgatggttctgaaaattccatgctctacatgtcttttcatctatcatgtcaaaccattctatccanaggcttcaactgctgttttagaat

SEQ ID NO: 10449 - DNA, 348 bp, Bos taurus
  Clone ID: 45-LIB2809-032-Q1-E1-D2
ggcctgaatgggcatatctctctggggatacggcactgctttctggggaacaggcaggactttggactgataaatggacagcacggcctgacgacgcaacatgacagttggaggaagatgctggtgatgctggtgcatccaatactggaacagatgcagatgaaggtgcacattttcaacagcagtgaccagtcaagctccctgctttcaataaactggctcaactggatcatttaaggaatggcaattccttgctctcatgacccattccctccttcaacttggccagccccactacttcacggtgactgaaacgctgtaccaccacatgggtttgatttagacgac

SEQ ID NO: 10450 - DNA, 293 bp, Bos taurus
  Clone ID: 45-LIB3057-001-Q1-K1-D2
ttctacgccaatgtcaagatgccttttttctgagctgatgccctatctacagtcaggagcctatggctagggacaaagccaaaccctgtgagctggtccaggagaaatacgatgctgatgacaatgcgaaaatcatctgcctgggagacagcgctgtgggcaagtccaaactcatggagaggttcctcatggatggatttcagccccagcaactgtccacatacgccttgaccctgtacaagcacacggtcacagtagacagcaagaccgtacttgtggacttttgtgacaca

SEQ ID NO: 10451 - DNA, 430 bp, Bos taurus
  Clone ID: 45-LIB3057-004-Q1-K1-D2
gagcttcctggtgaagtgtgtttcttgaaatcatcaccaccatggacagcaaaggttcgtcgcataaagggtcccgcctgctcctgctgctggtggtgtcaaatctactcttgtgccagggtgtggtctccacccccgtctgtcccaatgggcctggcaactgccaggtatcccttcgagacctgtttgaccgggcagtcatggtgtcccactacatccatgacctctcctcggaaatgttcaacgaatttgataaacggtatgcccagggcaaagggttcattaccatggccctcaacagctgccataccttctcccttcctacccctgaagataaagaacaagcccaacagacccaccatgaagtccttatgagcttgattcttgggttgctgcgctcctggaatgaccctctctatcacctaatcac

SEQ ID NO: 10452 - DNA, 425 bp, Bos taurus
  Clone ID: 45-LIB3057-005-Q1-K1-D2
taaaaatgttagtgcgttactaaatgttaattgtcttttgcagaaaatgtagtaccatgtctgaagtcattattaatatttagaatatttcattccttagctccctcatttgctatgctcacagtcgactcatttcctttgcttggcagaattctgcaacgtgtgtgtcacccactactgagattgttcagcccctgatgtattaggcttgatctgcttatggtggtagcttgtcctgaaatgtgtgtagcaagctagtattctatgattaaattgctgtgtagtgcatgctctgagtggaattcagaggaaaacccagattcagtgattaacaatgccacaaaatgccagtagctagccgatgctcaaacagcagtggtgctgattctcttttgtggccttttcgacttgtgttgccctaaaat

SEQ ID NO: 10453 - DNA, 363 bp, Bos taurus
  Clone ID: 45-LIB3057-006-Q1-K1-D2
atcgcgagcggccgccctttttttctttttttttttgcgatgcaaactcctcacgttaggaataacggacactgtgagtggcaccttccaggatcaaaaaccgtacaatgcacacacacccatcccaagccttacacttcacatgcaccactgcaacaacattctcctctgctatccataaccctcaagaccgtaaccacattatgcatcatcctatgcatacacgcaaacagaccttcaattgttgaacatctgcttatatactcaccatattacgagtgctaatcttactagtcttacactgatgctcgaaacctgcaatattggactaatccttctgttcacagtaatagccacagaatt

SEQ ID NO: 10454 - DNA, 397 bp, Bos taurus
  Clone ID: 45-LIB3057-008-Q1-K1-D2
cggactcgtgggcgagcggccgcccttttttttttttttttttttttttttttcttggcgaaggtttattagtgtggagcatgtgtagtgatgttacagagtgtggggcctgaggagaggcttcccctctcccctcagcagctgctcagccgtgggctcctctaaggcagaggcaacagagaaaggggacaggactgcgaaaaggcgagaggaagagaaaaggacagtggtttgcggcagagggtggcaggccccctgccaaggaccccagacaccttcaaccccggccccagacatgtgacgagcccaccttctctgccagagcccccactagcccagcatttgctaagaaaagggctgtacccatgtccgtcagcaaagtgggcttgggatgggg

SEQ ID NO: 10455 - DNA, 252 bp, Bos taurus
  Clone ID: 45-LIB3057-009-Q1-K1-D2
cacgaacgtgcggtttttgacgggcgtgggggcggccgcctttcccgccgcacctggggttccgggacgaaaggctctgcgcaccggaccctggtcccgacgcgcggcgggggcgcgccgagccgtgccccgggggacgcgatcgacggcccgactgcgacgacggcacgtgaccgcctatccgaggccacccgacgctaccgctgcgctgtcgtatcggtactgctgggctgaattctgacttagatgcgt

SEQ ID NO: 10456 - DNA, 439 bp, Bos taurus
  Clone ID: 45-LIB3057-010-Q1-K1-D2
gcgcggacgcgtgggtcgcgagcggccgccctttttttttatttttttttttttatggttgtggtttttttttttttttttttttttttttttttttttttttttttttttttaattaaaagggttttattttttttaaatattcaaaaacagggcatattttttttaaaacccggggccacatttttaattgttgggttgggccacaaatgggggtaatttattcaaaaccagtttaatgacccattgtgtttttaaaacatttggaaaattttgtttttaaaattttcttttttttttttaatcccctaataattggggtttttgtttaataaacttttttgtaaacccccccaaaattttcaaaattaaaaggggtttaaaaacccacttttgggcgttacgttaacttttccaaattttaatccaaaggggggtt

SEQ ID NO: 10457 - DNA, 266 bp, Bos taurus
  Clone ID: 45-LIB3057-012-Q1-K1-D2
atcaatttaccttctttataatgtcctgagtaaacaaaacttacaccagaattgggtgtctcttggctggagtatagagtctctcatgggaaacagatttatgacctataaatagaaatctcatagccgcaagggtcttgggcaactcttgcagagtcctgccacaacttatgtggcttctataaaatgggcacagtccaggctcctggcatcagtttgagaccattaatcccttgactgccaataaacaaggtggatccttgcaa

SEQ ID NO: 10458 - DNA, 201 bp, Bos taurus
  Clone ID: 45-LIB3057-013-Q1-K1-D2
cttcagtacacctggtgtgctgggttaatggctagtactgtattggctccgtggaaacgtgtctgtgaaaagagtatgtagtggcttctttcaaattgttagatgctgaatatgttcacttttaaatcccaattctgtcccgatcttacagacgctactgtacttgaatggttaataaaactgcacagtgctgttggtggc

SEQ ID NO: 10459 - DNA, 342 bp, Bos taurus
  Clone ID: 45-LIB3057-015-Q1-K1-D2
atttggcaacagcaaatgaaacctctttaagatttaaggggttaccacttactaaggagtttagccaccatgtctgaaacttgttcctctcaagtgccgtgtttttgtggaacacttcatatattggcccaaagtatgtaaggaggtctcatgtgctgtagaagtaaaaaaaaaaaaaacagtctttgcataaaacagtatttatttttaattttgtgaccactattttagaaactttatttaatatttttaatgttttcattcattgctttgcttatctataaaataggcttctgtgtcctattttgcttctggtaatgttcggtatttgtttatttgttc

SEQ ID NO: 10460 - DNA, 411 bp, Bos taurus
  Clone ID: 45-LIB3057-016-Q1-K1-D2
cggacgcatgggctgacacgtgggctactagcacgtgacgatgctccaagagcgattgggagagttctcccgatactctgggaacattgtacaggaacgcgtggacacactgaaccacatggtacacgagctgatcaactccggacattcagataccgctactattgctgagttgaaggatgggataaactaggcctgtgcctacctactggagctcattggcaccagaacacagatcctcgctggctcctatgaactgtacaagttttaccacgactccaaggagatctttggacgcatccaggacatacacattaaacttccataggagctcgggagagatcataacacagtggatactttacagagcatgcacaccatctttgagcacgacattcaagccctgggcac

SEQ ID NO: 10461 - DNA, 423 bp, Bos taurus
  Clone ID: 45-LIB3057-017-Q1-K1-D10
tgacaatgatcttatcaatattcttgaccctttttatcatctttcaactaaaagtttcagacgcatcttttatcacaatcgcagaactgacaccaacaaaaatattaaaacaaaacaccccttgagaaacataatgaacgaaaatttatttacctcttttattacccctgtaattttaggtctccctctcgtaacccttatcgtactattcccaagcctactattcccaacatcaaaccgactagtaagcaatcgctttgtaaccctccaacaatgaatacttcaacttgtatcaaaacaaataatgagtatccacaattctaaaggacaaacatgaacattaatattaatatctctgatcctatttattggatcaacaaacctactaggcctattaccccattcattcacaccaacaacaca

SEQ ID NO: 10462 - DNA, 356 bp, Bos taurus
  Clone ID: 45-LIB3057-018-Q1-K1-D10
gccgagttgaaaggaacgtggccttctgctttccccgccatggcgtgtgctcgggcactggtatcagtgtactccgaaaagggggagtcctctggcaaaaatgtcactttgcctgctgtgttcaaggctcccattcgacccgatattgttaactttgttcacaccaacttgcgcaaaaacaacagacagccctatgctgtcagtgaattaacaggtcatcaaaccagtgctgagtcttggggtaccggcagagctgtggctcgaattcccagggttcgaggtggcgggactcaccgttccggtcagggcgcttttggaaacatgtgtcttgggggccgcatgtttgctccaactaa

SEQ ID NO: 10463 - DNA, 427 bp, Bos taurus
  Clone ID: 45-LIB3057-021-Q1-K1-D10
cctgttctcccctccagcactcctggagatagacgctcaagcctgacgcctctcaaaaggcagcagcagtcgccttatccacagacctcaggaaattcgctttgaccgttgcatgcctcaagctctggctcgagctaagggggaataaccgggcagatttctgggtccttataaaaagacaaaataaaaccaaaatgcatcaccaacacacgaccaattgatacactggcatgttagcttggccttgcagagactgagaggagagaagaggagctggtgtgttttccacctctaacagcttctggctatttcacagcttcagtgtttgaaccctattgttggggagggaaaaagagaagtaaagccctgaggccatgtgcaaggaattctgctttggctacagagatactggaagtctatgataatg

SEQ ID NO: 10464 - DNA, 357 bp, Bos taurus
  Clone ID: 45-LIB3057-021-Q1-K1-D2
ccgccgggttgagaggagcgtggccttctcctctccccgccatggcgtgtgctcgtccactgatatcagtgtactccgaaaagggggagtcctctggcaaaaatgtcactttgcctgctgtgttcaaggctcccattcgacccgatattgttaactttgttcacaccaacttgcgcaaaaacaacagacagccctatgctgtcagtgaattagcaggtcatcaaaccagtgctgagtcttggggtaccggcagagctgtggctcgaattcccagggttcgaggtggcgggactcaccgttccggtcagggcgcttttggaaacatgtgtcgtgggggccgcatgtttgcgccaacta

SEQ ID NO: 10465 - DNA, 411 bp, Bos taurus
  unsure (69): unsure at all n locations; Clone ID: 45-LIB3057-022-Q1-K1-D2
gccgccaccgccactgccgctgcttcgcgagctgagggcctaggcgtccacgggcgaggggagggtgcnggtgggagccctcgcgggcaccgcggagcgggccgggggaggccgggatggagccccccggagttgactgaagcggcctgaagcgggttccagagcctccaggcaggatctcggggcctcccgggggcgcggcggatggtctgagggccgtgcagacatggctcacctcaggggatttgccaaccagcactcgcgagtggaccccgaggagcttttcaccaagctggaccgcatcggcaagggctccttcggggaggtgtacaagggcatcgacaaccgcaccaaggaggtggtggccatcaagatcatagacctcgaggaggctgaggacgagatcgagga

SEQ ID NO: 10466 - DNA, 302 bp, Bos taurus
  Clone ID: 45-LIB3057-024-Q1-K1-D10
gtcagctacaaatgcatgcatatcgtgataacccagatatagtcttatgcgggaataagagtggtcacaaatacccctgactattcaactacttacttaccataatacatctacagcatcactatccacaatacttcattactagagcttacaacatcacctacatacatatgcatcttatccgcatgttcctcctcatcaactctctactgctgatatgcaataacacgatgatgctctatgacatcctatgacatctagaaaacaaccctgctctgcataaacttttccctcacatcctg

SEQ ID NO: 10467 - DNA, 439 bp, Bos taurus
  Clone ID: 45-LIB3057-024-Q1-K1-D2
ggcgtaaccaaattgaattccaatgacccaaccttataacccggagaagttcgaaaaaaagtgttgaggaagtcagcacctatattaagaaaattggctacaaccccgacacagtagcatttgtgccaatttctggctggaatggtgacaacatgctagaaccaagtgctaatatgccatggttcaagggatggaaagtcacccgtaaggacggcaatgccagtggaaccaccctgcttgaagctctggattgcattctgccaccaactcgcccaactgacaaacccttgcgtttgcctctccaggatgtctataaaattggtggtattggtactgtccctgtgggtcgtgtggagacttgtgttctcaaacctggcatggtggtcacctttgctccagtcaatgtaacaactgaagtgaaatctgtaaaaatgcacca

SEQ ID NO: 10468 - DNA, 399 bp, Bos taurus
  Clone ID: 45-LIB3057-025-Q1-K1-D2
gcattccaggttgctgactctttcagcagagccgggcctacgcttttgcaaccatgtgtaaaggacctgcagttggcattgatcttggcaccacctattcttgtgtgggtgtcttccagcacggaaaggtggaaataattgccaatgatcaagggaaccgaaccaccccaagctatgtcgcctttactgataccgaacggttaatcggtgatgcagcaaagaaccaagtcgcaatgaatcccaccaacacggtttttgatgccaaacgacttattggacgaagatttgatgatgctgttgtccagtctgatatgaaacattggcccttcatggtggtgaatgatgctggcaggcctaaggttcaagtagaatacaagggagagacaaagagtttttacc

SEQ ID NO: 10469 - DNA, 269 bp, Bos taurus
  Clone ID: 45-LIB3058-001-Q1-K1-D2
atagcacgacaccactgtacgctaggcggggatctacactatgttgaaataggtaaaaatctgaaacaaacctcatcagtataatataatcaaaatgtcacttcttttaataaacctataaatgaaaaaatatatggactaaacatatccctgcgctgtataatatacacaccatattgtaaccctcgactaatcatcgatttgtgtcatttgtgaaatttcacagaaatgtaccaactttctcatcgatatgataagtgacataatta

SEQ ID NO: 10470 - DNA, 365 bp, Bos taurus
  Clone ID: 45-LIB3058-002-Q1-K1-D10
cccacgcgtccgcccacgcgtccgcccacgcgtccgctcgctcgctagctgatcacgactgctcgctcggctcgaccgaatggcgccgcggctgctggcgtgcttcgggcgcggcggcggcggagcgacggcgtcggcgccggacgacgcgacgggcgagggccagctggaggcgccccccgctggcccggtgctggtggagctgttcgggtcgcaggggtgcggggcgtcgcccgaggcggacgccgtggcggcgcggctggcgcaggactccggctccggggacggcgccgtcgtggtgctggcgttccacgtcgactactgggactaccgcgggtggaaggaccccttcgcgtccagcgcct

SEQ ID NO: 10471 - DNA, 379 bp, Bos taurus
  Clone ID: 45-LIB3058-002-Q1-K1-D2
gcgcccacgcgtgcgcccacgcgtccgcctaaaaccatctgcttcagccttcagctagccccaagtttagtcggccgatcgatcactgaagtagtaatggcctccggcaacagctggaccctcgagatcgcgtcgccggtggctccgcagcgcctgttccgcgccgccgtgatggactggcacaccctggcgcccaaggtcgcctaccacgtcgtcgccagcgcgcagcccgtggagggcgacggcggcgttggcagcgtcaggcagttcaacttcacctcagtcatgccgttcagcttcatgaaggagaggctcgagttcctggacgcggacaagtgcgagtgcaagaacacgctcatcgagggcggcggcatcggcg

SEQ ID NO: 10472 - DNA, 441 bp, Bos taurus
  Clone ID: 45-LIB3058-004-Q1-K1-D2
acggcagcatctacaaccctgaagtgcttgacatcacagaggaaactctgcattcccgcttcctggagggcgtccgcaatgttgccagcgtgtgcctgcagattggttacccaaccgtcgcatctgtaccccattctatcatcaatgggtacaagcgcgtcctggctttgtctgtggagactgattacaccttcccacttgctgaaaaggtcaaggccttcttggctgatccatctgcctttgtggctgctgcccctgtggctgctgcccccactgctgaccctgctgccaccaccgcaggcccagtcaaagttgaagcaaacgatgagtcagacgagtcggacgaggatatgggattcggtctttttgactaatcactaagaagcagtcaactaggccagcattatttgcgaaatgagaaaataaaggcttacttctctt

SEQ ID NO: 10473 - DNA, 391 bp, Bos taurus
  Clone ID: 45-LIB3058-006-Q1-K1-D10
gttctcatgatccttatctgtgccatggctacgtacggcgcatacaagcaacgcgcagcctggatcatcccattcttctgctaccagatctttgattttgccctcaacaccttggttgcggtcaccgtacttgtttatccaaactccatccaggaatacatacgacagctgcctcctgattttccttacaaagatgatatcatgtcagtgaatcctacctgtttggtcctcattattcttctgttcatcagcattatcttggcttttaaaggttacttgattagctgtgtttggaactgctaccgatatatcaatggcaggaactcctctgatgtcctggtttatgttaccagcaacgacactacggtgctgctacccccgtacgatgatg

SEQ ID NO: 10474 - DNA, 401 bp, Bos taurus
  Clone ID: 45-LIB3058-007-Q1-K1-D10
ccggtggttgcatgggaaatgggtgttaacctagtggcccacaaaggctggttcagtgcctgttgtctttggggaggtaagcgagatggcccagaggcagtctccctgcacttcaccttgagcacctcctctcaggcagagggtcagtgggaacagcctgtgcaagggtccctagacaggaagatgtctcagacagtgatgggttccttgggtactcaagaagaggcctgagatgaggtggtgggccctcagatgccaagctgagaagctgggacatcacggcagggctctcccactgtccaccctaccctgcccccagatcccaagacgaaagcctggttgaggaagcacgtggaccctgtgttcggcttcccccagtttgtccgcttcagctggcgcac

SEQ ID NO: 10475 - DNA, 421 bp, Bos taurus
  Clone ID: 45-LIB3058-009-Q1-K1-D10
ggcagaccaagtctcttttacgcctcctggagctggtgaggctcatcccaggacagccctgtgtgcttcccaacctgccaccagacctgtatctccttcctggagggcagatgcggttgcaagcatccaagcccagaccagctctgatggtgaagccagtgacggggaagagacccaggttagcgctgctgatctggaagccctgatcagcggccgctaccccaccccctttgagggagatggtgagcctagcccagcccccgagggcctggataagtgggtctgtgcacagccttcaagccagaaggcaatcaaccacaacccccatatcacagagaagctggaagtactggccaaagcctacagcgttcagggagacaagtggaaggccctgggctatgccaatgccattaatgccctg

SEQ ID NO: 10476 - DNA, 408 bp, Bos taurus
  Clone ID: 45-LIB3058-012-Q1-K1-D2
cggacgcgtgggtccggctatatccctgcccgcctccccatcacctgcctcaccattccaccgaggttttcaatcgctcccagtagcctggaccccagcaaccggaagcctctcaccgtcctcaataaaggcatggagaaccccatgcctgaacgtacccgggagaaagaggaaccagtggtgcgggaggccagtgagcccgtcgactgccatctcagcgacatgttgcagcagctgcacagcgtcaacgcctccaagccctcggagcggtggctagtgaggcaagaggaggccgaggaccctgcctgcatgcccatcttctgggtcagcaagtgggtggactattcggacaagtatggcctcgggtatcagctgtgcgacaacagcgtctgggtgctcttcaatgac

SEQ ID NO: 10477 - DNA, 423 bp, Bos taurus
  Clone ID: 45-LIB3058-013-Q1-K1-D10
ccgggtcggaccaagccgtccggttaacctaaaaaaaaaaaaggccaccgtgcccttttaaccttcaacttccggtctaagatcctttaaccgtggtcacctttcaatagagagtcccgcccgcccgcccctggcggcagcgccaccaacagacgacagcgctctcaccacccaaccaaaaccacaacgtgaatttgcaacaggggagaaaaaaagaaccaaaacttctaaggccctgctttttttcttaaagtactttaaaaaggaaaatttgtttgtatttcttatttacattttatatttttgtacatattgctaggggtcagccatttttaatgatctcggatgaccaaaccagccttcggagcgttctctgtcctactctgactttacttgtggtgtgaccatgttcattataatctc

SEQ ID NO: 10478 - DNA, 422 bp, Bos taurus
  Clone ID: 45-LIB3058-014-Q1-K1-D2
atgatgctgagcgaatacatggaccgaatcatgacacaggaccacgtgatgcacctggtcctgaaggcagaccccctgaaggtgtacccgcagctgaaggggagcctgccagaaaacctgaaacaccttaaggactccatggatggcttggactggaagctctttgagagctggctgcatcagtggctcttgtttgaaatgagcaagaactcgctggaggagaagccctttgagggtccaccaaaagacccaatggagatggagtatccgtcatctgggctgggggtgtaagcaggatttcaataagtcgccccgtgagctcaacagacgcagacgccagtacccagacagccctgcaaggccacatcttaccttgcctgccccagcccctctactttccttacacacctctttccttggtg

SEQ ID NO: 10479 - DNA, 256 bp, Bos taurus
  Clone ID: 45-LIB3058-015-Q1-K1-D2
tagatcgcgagcggtcgtcctttttttattttatttttgtttattatttattttttttgtttgccaattactgtataatccaaatttaggaacttttgaaacaatcttttaaaaacattatttttgtcattggaaaattccattttttacattttgtattttacctaaaaagagtgacatttaaattctacatatgataccattaccaaaattctatcttaattgtttttttaaacatttaataatattttaaatt

SEQ ID NO: 10480 - DNA, 430 bp, Bos taurus
  Clone ID: 45-LIB3058-017-Q1-K1-D2
atcctcttggactctctacacgggtgcgcaggtgctgtgggcagggcacaagggccatgtatgagagggtggtgtcaggctgcgagtgtgccctgctttttcacttgcaccataactgtccccacgtcttcgaaatgctggcctttactgactgcacaccatttcatcttattgaaatggattatttaacctgccccttgtgtgccatatcttagcagacttgtttgcctcacagatcctgcaattaccgttcagatagttggggagattgagccttacttgggagccttgttcacccaaatgtgagaggctgtgacgacagaggacttccgcatgtggctgcagtgtatccttcagggactggacgtgagtaacctgtggtgagcagatcttcaagctgtgttgtcggctgcaacattgggtaagttac

SEQ ID NO: 10481 - DNA, 427 bp, Bos taurus
  Clone ID: 45-LIB3058-018-Q1-K1-D10
tgctttctttccaaccttagaagtcagtagtcaagccaggattaaagcttagatctcgtaagaaaaatcatttggagtcatggcttagagactgaatgggagaagccagtttgcaatggaataggaagaaatcgcctgggacccatcaagaaaaaaagggagaagaatcaaatcaacaaaattaaaaatgaaaatggagaaatcacaacagacaacacagaaatacaaaggatcataagaaactactatcaaaaccaatacaatattataaagtaattaacctccaattaaaataataaatttatattttaaaaaaagaaactactatcagcaataatgccaataaaatggacaatttggaagaaatggatgaattcttagaaaagtataactttccaaactgaaccaggaagaaatagaacatcgt

SEQ ID NO: 10482 - DNA, 453 bp, Bos taurus
  unsure (322): unsure at all n locations; Clone ID: 45-LIB3058-018-Q1-K1-D2
cgcggccatccaggcctacctgtccagcagcaacttcagcagagaggagacgcgctgtgaacaggacctgcccactccgaccacgccaccccagcccgcgcccaccccagctcccgcgagccctgccgtgttcaggtacaacgtttctggcagcaacggcacctgcttgctggccagcatggggctgcagctgaacgtcacctacaggagagtcgacaacaagacggtgaccagagagttcaatgtcaaccccaacaagaccaccttcggggggaattgctccgccacactggcaactctggagctccacagcgagaacctnctgctcctggcgctccagttcgtgatgaacgagagctccagcagggtgttccttcaaggagtccagctgaacctgaccctgcccgacgccaaagaaggcagcttcacggccaccaacagctcactgagggc

SEQ ID NO: 10483 - DNA, 424 bp, Bos taurus
  Clone ID: 45-LIB3058-019-Q1-K1-D10
gctgtcagttatctaaagcatgttgtttggtgctacaaagttttaatttttgtgaaattttttgttgtgttcctattacaatatagctgtgaaaactatcagaattgttaactaagacaatattttcttgaaataaaacaaagttcctgaaatatcaatgcaagtgttttttttccagaccggaagactaaggctttaaacctgctttgtactagctgttccttcatttgctacagaaatacaatattatactcttgaacagcacattgtggaatttgactgcttgaaaaaagattagcatatttaataatgtccatcgaatcatgtatgatatgactgagcatgttaatgtgacatagtgatttataaatttaagtataatgaagttactggttactgctgctgctaagtcgcttcagtcatg

SEQ ID NO: 10484 - DNA, 463 bp, Bos taurus
  unsure (450): unsure at all n locations; Clone ID: 45-LIB3058-019-Q1-K1-D2
ggaggttgtggacaaagtcatggagacactggacagtgatggggacggcgaatgtgacttccaggaatttatggctttcgttgccatgattaccactgcctgccacgagttcttcgaacacgaataaggaaaagaaagcagcggagctgtttctgcagcagagacggagtttgaccaggggaacacaggcagggcttgcagggctgtaggagctgagctttccgtgttgtagctaattaggaagcttgatttgctttgtgagggaacaattgaaacctctttccaaggaccatttttagtgcccccagccttacttctgcattactgggcatagtgttagctttctggacccagggactcttggtaactataacttaggaaagtcatttctcagtcacaaagcatgtgctgtgctagctgtccaagctgtggagacccctcacctagaanaaaaaattgacta

SEQ ID NO: 10485 - DNA, 328 bp, Bos taurus
  Clone ID: 45-LIB3058-020-Q1-K1-D2
cggacgcgtgggggcgactccgcactgtgcaagctacttaactatttttaacgtccactttttgctcatcagtgaaagagaacatgggataccccatgtgagtagagcaaggcgaaattaaatagaagaaaacagtggctggatagagaaagaaaatagaaggggaatcaagtgctttaaataataactcattgtagtccaccttcatccatgaggcaagtttcacacagtctaagaaaaaattaacctggtgggtaaataaacatacataccacaagcactgacttccacagatttttgtcatcaaggacaatgacgagaagttttt

SEQ ID NO: 10486 - DNA, 449 bp, Bos taurus
  Clone ID: 45-LIB3058-021-Q1-K1-D10
aagactcatatatatcggagtcgtgcagataaatgtgtgttttctctttagggagaaaaagccattctggttacggggaacccaaatttgagactaagtagtctggttagaaataaggatctccttttgagtgggcgtggggatgggagaggctgtgctggaagagttggctgtttggggctgatattccctcacgacaacttgagggcttctctctgccctgcttgcccttctgggaggctgacgttggttggttaacaggtggaagcccatgatagcagtagccatcacctgagccccaggtttaaaagacacacatgtacttgtacacacaggggtttggaaatatgagttggctggtcaacttgagcatgttactgacaagggggtattggggtttttttccggtgggactagcatgtcactaaagcaggccttttgataatatt

SEQ ID NO: 10487 - DNA, 245 bp, Bos taurus
  Clone ID: 45-LIB3058-021-Q1-K1-D2
aaattatggtttttccagtagtcatgtatggatgtattagttggactataaagaaagctgagcggaggggaattgatgcttttgaactgtggtgttggagaagactcttgatagtctcttttatagttaggagatctaaccagttcatcttaaggaatttatatctgattttttattgtaatgacttgatttttgattcttatatctttatttgtctttatttccgatgttaataactttatttt

SEQ ID NO: 10488 - DNA, 452 bp, Bos taurus
  unsure (230): unsure at all n locations; Clone ID: 45-LIB3058-022-Q1-K1-D2
ccgatatatttgaagaggtcctgaattacatgtacacggcaaagatctccgtgaaaaaagaagatgttaacttaatgatgtcatccggtcagattctcggcatccggttcctggataaactctgctctcagaagcgggacgtgtccagcccggacgaaaacaacggtcagtcgaaaagcaagtactgcctgaagatcaaccgtcccattggggatgctgccgaccctcangatgatgacgtggaggaaatcggagaccaggacgacagcccctcggatgacacggtagaaggcacccccccgagtcaggaggacgggaagtcgcccacgacgactctcagggtgcatgaggccatcctgaaagagctgggcaccgaggaggtactgaaggtcaactgctacggccaggaagtagagtccatggagacccccgagtccaaagacctggggtcc

SEQ ID NO: 10489 - DNA, 234 bp, Bos taurus
  Clone ID: 45-LIB3058-023-Q1-K1-D2
gtcctacatggcgcgcgcgggcggtgcaacgacgttcgttattctgtgcaggaaggagcgcgagagccgtacggacgatcctccggagtctgacatccagctagatgtgagcattgctgatcaggagcccacagctgtgcagatggcacacatagtgacacacatcgacgagaccaatgattaaagtagctatacgcatccgtcccagaagagctttcatgaaattcatgatct

SEQ ID NO: 10490 - DNA, 379 bp, Bos taurus
  unsure (206): unsure at all n locations; Clone ID: 45-LIB3058-025-Q1-K1-D2
ctccaacgagctccaccgccgcctgtccccccgcggggtcacgtcgaatgcggtgcaccccgggaacatgatgtactccgcccttcaccgtggctggtgggtgtacacgctgctcttcaccttggcgagacccttcaccaagtccatgcaacagggagccgtcaccaccgtgtactgcgctgtcgccccggagctggagggcctgngagggatgtccttcaacaggttgtggcggttgcttgccgcgggccgagcccaaagcggaaacttaacgcgggccctgtgggcgctcaatgagccgctggttcaaggggtgcccggtggcccggccttctagaccggcattggcccgacggccaacccgctggacttccccccc

SEQ ID NO: 10491 - DNA, 409 bp, Bos taurus
  Clone ID: 45-LIB3058-027-Q1-K1-D10
gatgaagaaataagcagttaaaaaatatgccgtccctacaaacaaaaccgaaccctctgcccggagtgctcgcaggcgccgaccgccttggtccctttgctgacccctcctccctctaccgactcccccagctctgcacgcccggccggcactgtcgccgctgcgttctcgtgtttggtgatgccctcttcttctagattgaaacaaaagaatgcattgttcattgatttttatttctttaagagtcccttctacgtgtatcctggaggagacgtttgtaactagggccatgctgccatcaggttcctggaaccgtttaaggtgaatggacacctacttcccattagtcaggattttatgaccttgtacatagcccatcttgacgtgtgcacatttgctcgcatatggg

SEQ ID NO: 10492 - DNA, 409 bp, Bos taurus
  Clone ID: 45-LIB3058-029-Q1-K1-D10
cgaacttcacacaccaggcttccctgtctttcaccatctcctggagtttgctcaagctcatatccatcgagtcagtgatgccatccagccatctcatcctctgtcgccccttgtcctgccctctatctttcccagcatcggggtcttttcccctgagtcagctcttcacatcatgtggccaaagtatcggagcttcagcttcaccactagtccttccagtgaatattcaagactgatttgttttaggaaatatatatatacagaaataggtcatgtcacatggcaaggcggggtcatttatattcctgtctcctatgtcttcaaagggatgaaagtataggaatatgtgttcctctgggctgagactgtgttgccatgtgtgcagttttccgcatttttggcacttgag

SEQ ID NO: 10493 - DNA, 372 bp, Bos taurus
  Clone ID: 45-LIB3058-032-Q1-K1-D2
aagaatttatataactttttttccagttaacatgacaagaagctgcagcttattattagatgtccaaaatacactggagccttattttaaaataatgtgctgtaacttgtaatttgttctgtaatgagtctgttttgaattctcatctaataaactgtagtctaaaaaaggacccaggtgtcttataaaatgtgttttcatgtagtgtgaattttgatgactatattgtgtctgtattatattagattatttatattctttttttttttttttattcttgttttttctattttttttattattctttaattttttcattttttttttctttttattttttttttttaaatttttttttttttttgtgtttta

SEQ ID NO: 10494 - DNA, 448 bp, Bos taurus
  Clone ID: 45-LIB3058-035-Q1-K1-D2
cctggccaaagtacagcgagctgtgtgtatgcttagcaacaccacagccatcgctgaggcctgggctcgcctggaccacaaatttgacctgatgtatgccaagcgtgcctttgttcactggtacgtgggtgagggcatggaggaaggagagttttctgaggcccgtgaggacatggctgcccttgaaaaggattatgaagaggttggtgtggattctgtggaaggagaaggagaggaagaaggagaggaatactaaagttaaaatgtcacaaaggtgctgcttttacagggaagcttattctgtttcaaatattgaaaaggtgggggctgatcagtaaattgtaatgttgcagtgtatacgctcttatccaattactgacctatgctttaaaccatgatgctttgttacagacccaagctatccgtttctccgatgggtttgaataaa

SEQ ID NO: 10495 - DNA, 415 bp, Bos taurus
  Clone ID: 45-LIB3058-036-Q1-K1-D10
cggacgcgtgggcggacgcgtgggatttaaagaattatcttaaattagagacagtagagatctgatacattcagagtggaaaaagaaattctattacgattatttaagaaggtaaaattatttcctgggttgttcagtattgtcacctagcagatagacactattgttctgcactgttattactggcttgcactttgtggtatcctatgtaaaaatacatatattgcatatgacagacttaagaatttctgttagagcaattaacatctgaactatctaatgcattacctgtttttgtaaggtactttttgtaaggtactaaggagacgtgggtttaatccctaggtcatgtaaatcccctggaggaggaaatagcaacccactccagtattcttgccaggagaatcccatgggc

SEQ ID NO: 10496 - DNA, 422 bp, Bos taurus
  Clone ID: 45-LIB3058-036-Q1-K1-D2
ggggtatcctcaattttaggagccatctactcttgtacaacaattatcaacataaagccccccgcaatgtcacaataccaaacccctctgttcgtatgatccgtaataattaccgccgtactactactactctcgctccctgtattagcagccggcatcacaatgctattaacagaccggaacctaaatacaaccttcttcgacccggcaggaggaggagaccctattctatatcaacacttattctgattctttggacaccccgaagtctatattttaatcttacctgggtttggaataatctctcatatcgtgacctactactcacgaaaaaaagaaccattcggatatatgggaaaagtttgggctataatgtcaatcggatttctaggtttcatcgtatgagcccaccatatattcac

SEQ ID NO: 10497 - DNA, 248 bp, Bos taurus
  Clone ID: 45-LIB3058-040-Q1-K1-D10
gtgccctactgcatcatcaagggcaagtccttgctggggcgcctggtgcacaggaagaggtgcaccaccgtagccttcacacaagtcaactcggaggacaagagtgccctggctaagctggtggaagccatcaggaccaattacaacgacagatacgatgagatccgtcgtcactggggaggcaacgtcctggggccgaagtcggtggcgcgcatcgccaagctggaaaaggcgaaggccaaaaagct

SEQ ID NO: 10498 - DNA, 328 bp, Bos taurus
  Clone ID: 45-LIB3058-040-Q1-K1-D2
acagggagacgcacgcggaccccagagcgaacggcgcaggaaagacaaagccacatggagatggcaccgcccagcggaacacccgggaccgtatggagccacggcccgcgcccggaagcaaagacagctaacatgggctaaacaaccctctggacacataccccaacgatgagaccacagagcgcgagggcccgaacatgagccaacaaggcgaacaatggcagcctgtactacgaccacaggaaggaccgacgctggactgcgccggcgggctgcacggatgacatgcgcaaacgcgatcacgacaccttcctggaagcgcgctact

SEQ ID NO: 10499 - DNA, 392 bp, Bos taurus
  Clone ID: 45-LIB3058-042-Q1-K1-D2
ccggctccaccatcgtctcgcgctccgtttcgcgcaccggctctcgggctggctccggtcgcggcagcttctatgccacgggctcaggctagtacatgaccttgtcctcctagacctactcctactcaagctatgggcgccgctactcctcggggaccacgttctccctggggggccctgagtacactgggagtctgacccctactgctccatgcctaccgctctgcatgtggcctcctgcccaggcgctggggtctctctaacattgaaaggtgtcttgctcccaagcggtgcctaaagtttaaccaaagagactagactaacatatgaatatatacatgctgtccagacaggctgttgacggcgacggcgccagcccagccgcactgacc

SEQ ID NO: 10500 - DNA, 356 bp, Bos taurus
  unsure (45): unsure at all n locations; Clone ID: 45-LIB3058-043-Q1-K1-D2
cttccgatcgcgagccggcggccttttttttttttttttttcccnttttttttcgaaaagcaatttttattgaagaatttggagggaaagtctcataatagtaaaattactaaagttgagtataaaaaaacgccttggtgcaacgcagcgtctggccaggaggcgcacagggcgcagcaacggcccctgcagagggcgccaggcagggccggggcaacagcgggagtgaagcttctagaaggacaagtgctaccggggggagccatcggagagacggtcccagtgggaaaggggtgcagggagggctttctcctgagatcagaaaccccagtacgcacagacagcgataggtggca

SEQ ID NO: 10501 - DNA, 439 bp, Bos taurus
  Clone ID: 45-LIB3058-045-Q1-K1-D2
tacccctgtaattctaggtctccctcttttaacccttatcgtactattcccaagcctggtattcccaacatcaaaccgactagtaagcaatcgctttgtaactcctccaacaatgaatacttcaacttgtatcaaaacaaataatgagtatccacaattctaaaggacaaacatgaacattaatattaatatctctgatcctatttattggatcaacaaacctactaggcctattaccccattcattcacaccaacaacacaactatcaataaacctaggcatagccatccacctgtgagcaggagccgtaattacaggattccgcaataaaactaaagcatcacttgcccatttcttaccacaaggaacacccactccactaatgccaatactagtaattattgaaactatcagcctttatattcaacctatagccct

SEQ ID NO: 10502 - DNA, 287 bp, Bos taurus
  Clone ID: 45-LIB3058-046-Q1-K1-D2
ttaaacccaagcccttgacctcttacttgatctttgtctgccctcttaataacatccggcctaaccatgtgatttcactttaactcaatgaccctgctaataattggcctaacaacaaatatactaacaatataccaatgatgacgagatgttatccgagaaagcaccttccaagggcaccataccccagctgtccaaaaaggccttcgttatggaattaatactttttattatctcctaagtactattctttaccggatttgtctgagctttctaccactcaagcc

SEQ ID NO: 10503 - DNA, 401 bp, Bos taurus
  Clone ID: 45-LIB3058-048-Q1-K1-D2
gttgtagatcgcgagcggccgccctttttctttttcttttttttttttttttttttttgggtttttttttttttttttttttttttttttttttttattacactaggaaatttaatttatttcataaaaattaattttgttacaataggaatgctaaatgttttttaccggttggagtacaaaataaacaaaggggggactggggtctttgggtaggcctttttgaccacctttaccggtgggcacccctccatgtccgggggggcttccttttccccttccggctcctgtttttccttttcctcctcctggggtgcgggctaattttcgatgggccccttttcaaacctccaggggttttccagggactgggggctggttttttcctccggccttttttc

SEQ ID NO: 10504 - DNA, 435 bp, Bos taurus
  Clone ID: 45-LIB3058-049-Q1-K1-D2
cgtataaatttgaattagagacccaggttgatgaatgcctgggcaaaccatgtgaaaacctgggtgggttttgcacttaagagttggtaaaattgatctcttgagtttaggtaactgtatagttcaagggaatgggcaagaaatccatccttagactgataaaagggaaattttgacctaagaactctgaaacaacattgttttcagtctaccctggattgctttctcgtaggccacagtccaactatcttaaggttttttgctgtgtaaacttcaaccagccaacaagccaatgaaaaagcaagctttggtcttgtttgtttctgggaagggttttatttcattactctgatagttgattagtaacttggtaattatgagaaacttaggtctgctagcactgtttgaagtaaaatgtgatttggggccagcagc

SEQ ID NO: 10505 - DNA, 416 bp, Bos taurus
  Clone ID: 45-LIB3058-051-Q1-K1-D10
cggacgcgtgggcggacgcgtgggcggtacgcgtggggttctagatcgcgagcggccggccttttttttttttttttttgataatacttctgctttaatagactgtttgcacatatatagatatccaggggaaaaggtaatgcaacatgaagtattgagaacacaactgtgctttaatttaggtgttgagtttctaaatgtggcagcaatcacacttctaagcaagcaatgtccactagctcgcaaacacatttgatggtgatattagaacagtaaacttcatactgtaaaacatgtgaaatacctcttatgtacattcatggtatgttgagtctgtgtctttatacaaaaaagaggcatatctagattttgtaatcagagtcaactgtatgacaacttatatatgaaaaactgct

SEQ ID NO: 10506 - DNA, 399 bp, Bos taurus
  Clone ID: 45-LIB3058-051-Q1-K1-D2
ccgagatccatgagaaagaagaggaagagttcaatgagaagagtgaacacgattctggaatcactgaggagcctctactcacagcagatcaggtgattgaagagattgaggaaatgatgcagaattcccccgaccctgaagaggaagaggaggtcctggaagaggaggatgggggagaaacctcctcccaggcggactcggtcctcctgcaggagatgcaggccttgacccagaccttcaacaacaactggtcctacgaaggtccttccgggccccaggagcctctcccgtgggctggaggcagtgaccctgcaggatggtcttcccctgcaggcctgaggcacatgtctgggtctgagctgatggagctcctggatcaagtagagggagccatccgag

SEQ ID NO: 10507 - DNA, 244 bp, Bos taurus
  Clone ID: 45-LIB3058-052-Q1-K1-D2
gacagtgcggccgctcccggggcggttgtacgcatatggcggcccagaagagaccctcccagagatccaagtacctggcctcggcgagcaccatggaccacgccaggcacggcttcctccccagacacagagacacgggcatcctcgacttcctcggccgcttctttggctcggacaggggtgcgcccaagcggcgctcatgcaaggatggacaccatgcggccagaaccacccactatggctt

SEQ ID NO: 10508 - DNA, 397 bp, Bos taurus
  unsure (30): unsure at all n locations; Clone ID: 45-LIB3058-053-Q1-K1-D2
gaaccagttcgcgatgaaaagaagatttgngtcttcttgggtctttatgagaagctttcagagaaacactcccagaatggctttattgtccctcctccacctgagaagagcctaataggaatgacaaaagtaaaagttggaaaggaagattcttcttctgcagaatttcttgaaaaacggagggctgctctagaaaggtaccttcagaggattgtgaatcatcctaccatgttacaggaccctgatgtcagagagttcttggaaaaagaagagctgccacgtgctgtgggtacccagacattgattggcgctggtcttctcaagatgttcaacatagctacagatgcggtcagcaaatagaccatcaggatgaaatgaatctgacatttggtttgaa

SEQ ID NO: 10509 - DNA, 332 bp, Bos taurus
  Clone ID: 45-LIB3058-056-Q1-K1-D2
ataaggtcatggatcagaaagaacatattttgaatgggaaggtgattgatcctaagagggccaaagccatgaaaacaaaagagcctgttaaaaaaatttttgttggtggcctttctccagatacacctgaagagaaaataagggagtactttggtggttttggtgaggttgaatccatagagctccccatggacaacaagaccaataagaggcgtggattctgctttattacctttaaggaagaggaaccagtgaagaagataatggaaaagaaatatcacaatgttggtcttagtaaatgtgaaatcaaagtagctatgtcgaaagaacag

SEQ ID NO: 10510 - DNA, 467 bp, Bos taurus
  Clone ID: 45-LIB3058-057-Q1-K1-D2
tataacgtgctggtctgcgttaatcgcaccagcgcgcagcaaccgttgcaggtatatgattttttgtgcgatgcgggagtcgaattcatccagtttattccgggggtcgagcgcctggctgatgaaacaactgcccgcgatggacttaagttacatgcgcctggtgatattcagggtgagctaacggaatggtcggtgcgccccgaggagttcggcgagtttctggtggcgatattcgaccactggatcaaacgcgacgtctgcaagattttcgtgatgaatatcgaatgggcgtttgccaattttgtcggtgcgccgggtgcggtttgccatcatcagccaacctgtgggcgctcggtgattgttgagcacaacggcgacgtttacgcctgtgatcactatgttcatgcggaatatcagctggagaatatgcaccagcatacaatagcagaaatgatcgattcccc

SEQ ID NO: 10511 - DNA, 329 bp, Bos taurus
  Clone ID: 45-LIB3058-058-Q1-K1-D2
cggacgcgtgggcgcgagcggccgccctttatatttttttttgtttttttttttttttttaagaaaaaaaaaattggattctagagcctcgggaatgcatgggcattgcatttttcatattaggggtcagggtagatgaactccttccgaattagggggaaagggctaagctgcaggatttgatcttttaaacctctgtttaacctgccatgggctatgcttgagtccccttgtgtcccctctgcctttctttttctctgaaccacctgcgtccaaaatagaacgaccaagtgtttttcaatgttcaccttcgcgtttgcttttttgcc

SEQ ID NO: 10512 - DNA, 394 bp, Bos taurus
  Clone ID: 45-LIB34-001-Q1-E1-D10
aacggacgcgtgggcggctttgcaccttacaatgtcatctctgacatcctcttccacaaacgctttgactataaagatcagacgagcctgaggctgatgagtctgttcaacgagaacttctacctgctcagcagcccctggatccagctttataataatttctcagactacctacagtacctgcctggaagccatagaaagctactgaaaaatgtgtctgaagtaaaaagttatgctttagaaagagtgaaggatcaccagaagtccctggaacccagctgcccccgaggcttcttggacaccatgctgatagaaatggccaaggaaagacacagtgtggaccctatgtacaccttggaaaacatcgctgtgactgtggccgacctgctctttg

SEQ ID NO: 10513 - DNA, 292 bp, Bos taurus
  Clone ID: 45-LIB34-001-Q1-E1-D2
ctcatcaatactagaagatctgatctgcttgggggcctgtctgctggcccagggccagttttcccctaaatacagccacttggactggggatgaggtggggggactggggggagtgggatgtcttttattttttgaattatgataagatataagggtttttaaacaggggtctgagaaaaattggtttgggcaagccgttttttcggcaatcaattcggtcttcaaaacacacacccaggcctgcccagggacaaattgctgccccagcacgaacacgtaaacccacaagcc

SEQ ID NO: 10514 - DNA, 442 bp, Bos taurus
  Clone ID: 45-LIB34-002-Q1-E1-D10
ccgggtcgggccacgcgtcagacaaaactgaaaagcttctgcacagtaaaggaaaccatcaccacataaaagacaacctattgaataggagaaaatatttgtaggtcatacatctgattaggtgtgaaaccctagatatatagagaacgcatacaaggaacaataaaaaacaaacaacccattacaaatgaatagaagagctgaatagacatttttccaaagaatacatacatatggccaagaagcacaagaaaacagtattttgttactaacgttcatactgtctaaagtgatttatggactctatgcaatccttatcaaaatccaaatagcatttttcacacaaacagaaaaaagcaaaaattaatatggagccacagttcagttcagttcagtcgcttggtcgtgtccgactctttgtgatcccatgaatcacagcacg

SEQ ID NO: 10515 - DNA, 392 bp, Bos taurus
  Clone ID: 45-LIB34-003-Q1-E1-D10
attggaggtggccaaggaattgcggtcatcatcgagaacacagcctgagaagagcaggcagcctgccctggtccatgctcacatgacttgactaggccacagtgaaccaggtgaccttcagagcagatgcaaagccagccatgctctgcactgagagtgactgggtttgggcaaggcatggtaaagcagagacccatttatcataaataagagcccatgccagaataaattctctcgaatttgtaccaaatatgcagcatttctgaactgaaatccaactaatgtaggctttaaagggaattgtattcttgccaaataaccatcacttacaccttaaataatatgattgcagggaaattgaataaatagtgccttaacttccaaaaaaaaga

SEQ ID NO: 10516 - DNA, 399 bp, Bos taurus
  Clone ID: 45-LIB34-003-Q1-E1-D2
aagtcctaattcgaagcagagtcctcagggaaaatggaaaatacattcccaaacagtctttcctgacacgaaaatattacttcaacaacccagacgatggatttttcaaaaaaactaaaaggaaggttgtgccgccttctcctgtgactgatcccaccatgctcacagatatgatgaaaggcaatgtcaccaatgtcctgcctatgattcttattggtggatggatcaacatgacgttttcaggctttgtcacaaccaaagtctcgtatccactgaccctccgttttaagcctatgctacaacaaggaattgaactactaacattagatgcctcctgggtgagttctgcatcctggtaattcctcaacgtctttgggcttcggagcatcctaatctctg

SEQ ID NO: 10517 - DNA, 420 bp, Bos taurus
  Clone ID: 45-LIB34-004-Q1-E1-D2
gcaacttcgacggccaggtgggggcctgtggcttcaacagccgcatcctgtccttcgtgtaccccatccggctggttcgcgtcaacgaggacaccatggagctgatccggggccctgacggcctttgcattccctgcaagccaggtgagccgggccagctggtgggcgtcatcatccaggaagaccccctgcggcgcttcgatggctacctgaaccagggcaccaacgacaagaagattgccagggatgtcttcaagaagggggaccaggcctacctcagcggtgatgtgctagtgatggacgagctgggctacgtgtatttccgcgaccgcacgggggacacgttccgctggaaaggcgagaacgtgtccaccaccgaggttgagggcacgctcagccgcctgctggacatggccgacg

SEQ ID NO: 10518 - DNA, 397 bp, Bos taurus
  Clone ID: 45-LIB34-005-Q1-E1-D2
ctcagattgaaaagacttttgaagttaatatccttgcacatttctggactacaaaggcatttcttcctgagatgatgaagaataatcatggccatattgtcactgtggcttcagcagctgggcatactggggtccccttcttactggcttactgttcaagcaagtttgctgctgttggatttcataaagctctgactgaagaattgagtgccttaaaaagaaccggagtcaaaacaacatgtctctgccctaatttcataaacactggcttcatcaaaaacccaagtaccagtttgggacccaccctggaacctgaggaagtggtaaacaagctgatagatgggatcctgactgaacagaaaatgatctttgttccatcttctctcaactttttgtc

SEQ ID NO: 10519 - DNA, 393 bp, Bos taurus
  unsure (379): unsure at all n locations; Clone ID: 45-LIB34-006-Q1-E1-D10
acagtggatgcctccggcaccgagaaggctttcgagccagcatccggtagggtgatagctactttcacatgttcaggagaaaaggaagtaaatttggctgttcaggatgcaaaggctgcctttaaaatatggagtcaaaaatctggcatggagcgttgccgaatccttttggaggctgccaggataataagggaacggagggatgaaattgccactatggagactatcaacaatgggaagtccatctttgaggcccgctgggacattgacacttcctggcagtgcctggagtactatgcaggcttggcaagatccatggctggcgaacacatccagctcccgggtggatcctttggttacaccagaagggaaccactangggtgtgtgttgga

SEQ ID NO: 10520 - DNA, 375 bp, Bos taurus
  Clone ID: 45-LIB34-006-Q1-E1-D2
caagaaacggactgtccgtatttctccacaccgttgctgctggggaaaaagggcatcgagaagaatctaggcatcggcaaggtctcccctttcgaagagaagatgattgctgaggccatccctgagctgaaagcctccatcaagaaaggagaggagtttgtcaagaacatgaaatgagaaggcgcttagcgagcagtcggtctccttaacttattaaggcatcatgtcactgtaaagccgtttcagatacttttgtcgtttcaatttgcttcgttgaggaggattgtattaacgaaccacccctttgcaatctcggtcagtctgtcggtgcatcaataaaagcaggctttgattttcaaaaaaaagagggttcac

SEQ ID NO: 10521 - DNA, 381 bp, Bos taurus
  Clone ID: 45-LIB34-007-Q1-E1-D2
gcgcactcggcacaagcagaggaagctggaggagaaggcgcgcctgtaggcggaggcgcgggcccggggtcacctgcatctgcgcgaggagcagcggcggcgggccgacgacgagcggctgacggaggagctgcagcggctgcaggagctccagaccctgcgggccgtgaagaagaagaaaaaggagctgctcgggaacgactgcctcacgttggacatgctcgccagcagcttccaggcagccgcagagtcggcgcctgtcgccgagaccatccacaacggctctctggagccaaccgaagagcccgagacctcatctccctgcccttccagacatgcagactactcgggcccggtgccgggggccgacccctccagaca

SEQ ID NO: 10522 - DNA, 381 bp, Bos taurus
  Clone ID: 45-LIB34-008-Q1-E1-D10
cggacgcgtgggcggacgcgtgggcagctggggagtccagctgtgtttgtgtagtaaagcagttggtgcctctgttgtagttacaaatggcagctggtaagtggcagtctaatcccacaattaggggagatgacagtcaccatctgtacagctgagctttgaaaacgggaggactgtaagctgtatttagctcacctagtgcttttaagaaaatccagccaccgtcttaagcatcaggaggtttcacattaaaatcagaatttctggcttctctcaaacaatcagaacatgatgaagcagctctgatctgcattttccaaagtggacaatcagttggaactaaagaggagttgcctctcttgacaatacttgtcctctctc

SEQ ID NO: 10523 - DNA, 425 bp, Bos taurus
  Clone ID: 45-LIB34-008-Q1-E1-D2
ggcagatcttgccaagtacatatgtgataatcaagatacaatctccagtaaactgaatgaatgctgtgataagcctttgttggaaaaatcccactgcattgctgatgtagaaaaagatgccatacctgaaaacctgcccccattaactgctgactttgctgaagataatgatgtttgcaaaaactatcaggaagcaaaagatgccttcctgggctcgtttttgtatgaatattcaagaaggcatcctgaatatgctgtctcagtgctattgagacttgccaaggaatatgaagccacactggaagaatgctgtgccaaagatgatccacatgcatgctaatccacagtgtttgacaaacttaagcatcttgtggatgagcctcagaatttaatcaaacaaaactgtgaccaattccaaaaacttg

SEQ ID NO: 10524 - DNA, 367 bp, Bos taurus
  Clone ID: 45-LIB34-009-Q1-E1-D10
ggtcgagtcaagcgtcggcacagcactttggtccacttcattgggtgacgtataattctcctcgccatcacatcatctgctgtcctacgccatgggtatgtctccacaatagatccacagcagtggcatcgctcatgcatttaaggctcgcgagaagaacaattcctttgcccggcactgactgccgtttctcattaggccaaggattgtccatttgacgaacaggtaagattacagatcgaactaactgattttgcaacatgttgtcctctcagaagactcgcagtactgacagttactgtcacttgataatccctttacagatgatgacttcacatcatgtgaaagcgcgtcaaaaccttcagtc

SEQ ID NO: 10525 - DNA, 404 bp, Bos taurus
  Clone ID: 45-LIB34-009-Q1-E1-D2
aagtttcatcctagaggtaggaaggtaaattctcctatttatgaaagaagctttgtgtgatgctatgtataactcagcttcatccagatggtgtttacatttgatttatttggggctttgttgaagtaatatacttggaagatatttcttttactctgatgaaaataggattcagagtatgaatttaaagctgtttttatgaatatttctgatcagtgataatctctacctactttctcaaccatataggcccattcaagttttttagagcctataatcttactgaaaaatgtttcatcaatatgccttgtttaacgtggattttacaaatattcacaacattaaccacaggatataacaaaagcacttatgtccgtcattaactttcaagttccctttgtttc

SEQ ID NO: 10526 - DNA, 446 bp, Bos taurus
  Clone ID: 45-LIB34-010-Q1-E2-D10
cggacgcgtgggcgagtcagctgatcttaagagttgtgctgcgtgccggccggtccgggccctccggtccagccgccccgccgcagccatgtcgttcttcccggagctttacttcaacgtggacaatggctacttggagggactggtgcgcggcctgaaggctggggtgctcagccaggcggactacctcaacctggtgcagtgcgagacgctcgaggacctgaagctgcacctgcagagcactgactatggcaacttcctggccaatgaggcttcgccactgacagtgtccgtcattgatgaccggctcaaggagaagatggtggtggagttccgtcacatgaggaaccatgcgtatgagccactcgccagcttcctggacttcattacttacagctacatgatcgacaacgtaatcctgctcatcacgggcaagctggaacaac

SEQ ID NO: 10527 - DNA, 379 bp, Bos taurus
  unsure (266),(371): unsure at all n locations; Clone ID: 45-LIB34-011-Q1-E1-D10
agagagacaatccgaaagagtatagaagatttacgtaatactgtggactctgtttcccggacctcttcttccacctttcaatatataactctgctaaaaaacatgtggaaaggaaggcagaatcaagtacaagataatgaaaatgtagtaaacgagtactcctcacatctggaaaagcaccagttatatatagatgagactgtgaagaataatatcccaactaagcttcgtgtgctccgttcaattctggagaatttgagaagcanaatacaaaaattagaatcggatgtctcaactcagatggaatactgccgcaacccgtgtactgttacttgcaatattccctgtggtgttctggcaaagaatgtgangaaaatca

SEQ ID NO: 10528 - DNA, 450 bp, Bos taurus
  unsure (103): unsure at all n locations; Clone ID: 45-LIB34-011-Q1-E1-D2
acccacgcgtccgacgagaatggtcaaacactcaaaacccccgaatgtgaacagttctgagtggaaagggagaaaaaaggggggatttgatggtgccaccgcncagcccacttccatcccgttcccagccttcgcccactcccatcacccccttcctgatcacactcacctgacccttcctgtctccatcccactccccacccgcacccctcccgtcacgcatcctaccccctcccaccctgccatcctcctgccctccccccacactacccgacccctcccccttcacactcccaccctcccgccacacgccaccgcaccttctcgctcctccccctctccccatgcccccctccaccgcaacctctccccccccccttcccgcccccacccttccccccgaccacccccccccccctccccaccccctccccccccaccccttccacc

SEQ ID NO: 10529 - DNA, 409 bp, Bos taurus
  Clone ID: 45-LIB34-012-Q1-E1-D2
gggtccagccacgcgtccggtttgctgtttcaagcatttgtacacattagtagtctgaggagtagcaagttctgaggacttatttcacggctggcattagcatcttcagcctctctccctttctctaaggataaccaggaaagtatgtgtaacacgcaggagccgtgactccagaggaggggttctgctgcttctcaccctccccctggcttgcaggtcttctgtccttgcctccaagggttttcgtgtctagtgtcaacttaggtctccctttcactggtccttcaccttgggttttaaaaagaaagcttctcttttatggtatcctaagacttgtttttagtaaatcctcttccacatggtaatatggatatagcaatatgttggaaatctgcttaaaaagaaacaa

SEQ ID NO: 10530 - DNA, 240 bp, Bos taurus
  Clone ID: 45-LIB34-013-Q1-E1-D2
acgacgcgtgggtcgcgctgcacgacgctatggacatttgccaggcataggtcaataccctgaggcgcagcatctctaaagcaggagacttcctcgaatcccattacattgagttgcgaacaccatatactgtgttcatcgctgccaatgcactgtatttgttttagcatgtctggatggttatcgctccactgacatttctgacatacagtttcgagcaaacatagtcctgaagaggaa

SEQ ID NO: 10531 - DNA, 430 bp, Bos taurus
  unsure (398): unsure at all n locations; Clone ID: 45-LIB34-014-Q1-E1-D2
cgggtccacgcacgcgtccgcacccatgagcattgcttcagcctttgctatgctctccctgggagccaagggcaacactcacactgagatcctgaagggcctgggtttcaacctcactgagctcgcagaggctgagatccacaaaggctttcagcatcttctccacaccctgaaccagccaaaccaccagctgcaactgaccactggcaatggtctgttcatcaatgagagtgcaaagctagtggatacgtttttggaggatgtcaagaacctgtatcactccgaagccttctccatcaacttcagggatgctgaggaggccaagaagaagatcaacgattatgtagagaagggaagccatggaaaaattgtggagttggtaaaggttcttgacccanacacagtttttgctctggtgaattacatttcc

SEQ ID NO: 10532 - DNA, 396 bp, Bos taurus
  Clone ID: 45-LIB34-015-Q1-E1-D10
caaagattgaaactatgagagaaaaagtactgacttcatctgccagacagagactcaggtgtgccagtattcaaaaatttggagaaagagctttaaaagcatggtcagtagctcgcctgagccagaaatttcccaaggctgagtttgtagaagttaccaagctagtgacagatctcacaaaagtccacaaggaatgctgccatggtgacctacttgaatgcgcagatgacagggcagatcttgccaagtacatatgtgataatcaagatacaatctccagtaaactgaaggaatgctgtgataagcctttgttggaaaaatcccactgcattgctgaggtagaaaaagatgccatacctgaaaacctgcccccattaactgctgactttgctgaag

SEQ ID NO: 10533 - DNA, 338 bp, Bos taurus
  Clone ID: 45-LIB34-015-Q1-E1-D2
gtccacccatccgtccgaacattacgagacaagaagctgaagcaagagatgagctacattgcccttggtgcaccctgaactgacgcaaactttatagcttacttaaacatcttaaactctgccatagcagatttatcttcaattatgtttatcatccaaaaggtgctaggatagatgtttctatcaaccagtgttatgatggctcctatgcaggaaatcctcaggatattcatcgctagcccggatttgcttatagtcgcagtggaccagttagagagaacacctatcagacacattcgtgtgtgcatgccagcaacaacagatcaaatgtcagtgtt

SEQ ID NO: 10534 - DNA, 423 bp, Bos taurus
  Clone ID: 45-LIB34-016-Q1-E1-D2
gtcatgacatcctcttacttttgtgcttctacttaagtttttgtgaggataattttagaaaacgaggaaagtcaaaggcagtgaagaaatcagaggctcaccatgcccctgaagcaagtctgagcaaggagacagaagcttcatctgaagtgaagcccacttcaacacaagacacatctcaaaaagatttcgtggataaaaagtgcttaactgaaaaacacacacatctctcctgcaacaaagtcttctgccaaccgtggcagaaatgcatcgatgggacgtgtctttgtaaacttccttatcagtgcccgaagaatggtaccagggtgtgttcaactaatgggaaaagctactcaacttactgtcagcagaagagttttgaatgttatcgtcctgaggcaaagtttttgaaaagtggagcat

SEQ ID NO: 10535 - DNA, 407 bp, Bos taurus
  Clone ID: 45-LIB34-017-Q1-E1-D2
cgagcagggagctggtggctcttccatccccagaccagccaagcctgtgagtgacaccccagacagaggaaccagagccatgcggagtctcagcggactgctgttgttactgactgcctgcctggcggtaaacgccagctccgtgcccacattgcccgatgacattcaagtgcaggagaacttcgacctgtctaggatctatgggaagtggttcaatgtggccgtgggctccacctgcccatggctgaagaggttcaaggagaagatgaccatgagcacagtggtgttgaaagcggggccgacgagcaaggagatcagcgtcaccaacactcacaggcggaaaggtgtctgtgaatcgatctctggtacttatgagaaaacaagcactgatgggaagtttctctatc

SEQ ID NO: 10536 - DNA, 318 bp, Bos taurus
  Clone ID: 45-LIB34-018-Q1-E1-D10
atttgctatgctctccctgggatccaagggcaccactcacactgaaatcctgaacggccatcgtttcaaactcaatgatcactcacatgctgagatccacagcagcattcaggatcatcacgaaaggctacacgacccaaaccatgaactgctactgatcactgggatttgtatgtacatcaacgtcagtgtcgagctagtcgtcacgtttctgaacgatgatcacaacctgatatcactggacgtcttctgcatcatcttcaaggatactaacgatgccaagaagagcatcacctcttaagtacataagggaatcca

SEQ ID NO: 10537 - DNA, 394 bp, Bos taurus
  Clone ID: 45-LIB34-018-Q1-E1-D2
gttggggaacttgaggtatttaatggatattttgtccacttctttgctcctgagaacatggacccaattcccaaaaacatcctgtttgtcatcgacgttagtggctcgatgtgggggattaaaatgaaacagacggtggaagcaatgaagaccattttggatgacctgcgaactgaagaccatttctccgtggttgatttcaaccacaatgttcgaacctggagaaacgatttagtctcagctactaaaacacaggttgcagatgccaagaattacattgagaaaatccagcccagtggaggcacaaatatcaacgaagccctgctgcgggccatctttattttgaatgaagccaataacttgggaatgttggaccccaactctgtctcgctga

SEQ ID NO: 10538 - DNA, 120 bp, Bos taurus
  Clone ID: 45-LIB34-019-Q1-E1-D2
tccgggtccaccgagcgtcggcaaaggtaatgtgtatcaaagggtactatcttggattccatcaaataaccaccagctacagcttgctggagcattggcaattgcaaattttgccagaaa

SEQ ID NO: 10539 - DNA, 433 bp, Bos taurus
  Clone ID: 45-LIB34-020-Q1-E2-D2
cagattcataaagccctggattgggacaggtttgctgctgttggaggggcagacgtggttccagcaccggcggatgctgaccccagccttccactatgacatcctgaagccctacgtgggaatcatggccgactctgtccgagtgatgctggacaagtgggaggagctcgtcagccaggactcacatctggagatctttggacatgtctccttgatgaccctggacaccatcatgaagtgtgccttcagccaacagggcagcgtccagacggacaggaactcccagtcctacatccaggccatcaaggacgtcagtcatctgattatttcccgactgcggaatgctttccaccagaacgacctcatctacaggctgacccctgaaggccactggaaccaccgggcctgccagctcgcccatcaacacacagat

SEQ ID NO: 10540 - DNA, 377 bp, Bos taurus
  Clone ID: 45-LIB34-021-Q1-E1-D10
gacacagtttctggaggcgaagaacgcggttggccaatcgcaagccagaagatgaaggttctgtgggttgccgtggtggtcgcgcttctggcaggatgccaggcggatatggagggagagctggggcccgaggagcccctgactacccagcagccccgggggaaggacagccagccttgggagcaggcgctgggccgcttctgggattacctgcgctgggtgcagaccctgtctgaccaggtgcacgaggagctgctcaacacccaggtcattcaggaactgacggcgctgatggaggagaccatgaaggaggtgaaggcctacacagacgagctggagggacagctaggccccatggcccaggagacacaggcccg

SEQ ID NO: 10541 - DNA, 407 bp, Bos taurus
  unsure (261): unsure at all n locations; Clone ID: 45-LIB34-022-Q1-E1-D2
caaaactttggcacaatgaagtgggtgacttttatttctcttctccttctcttcagctctgcttattccaggggtgtgtttcgtcgagatacacacaagagtgagattgctcatcggtttaaagatttgggagaagaacattttaaaggcctggtactgattgccttttctcagtatctccagcagtgtccatttgatgagcatgtaaaattagtgaacgaactaactgagtttgcaaaaacatgtgttgctgatgagtcncatgccggctgtgaaaagtcacttcacactctctttggagatgaattgtgtaaagttgcatcccttcgtgaaacctatggtgacatggctgactgctgtgagaaacaagagcctgaaagaaatgaatgcttcctgagccacaaaga

SEQ ID NO: 10542 - DNA, 413 bp, Bos taurus
  Clone ID: 45-LIB34-023-Q1-E1-D10
gggtcgaacaagcgtctgcagacactcgggtcagtttaaagatttgggagaagaacattttaaaggcctggtactgattgccttttcgcagtatctccagcagtgtccatttgatgagcatgtaaaattagtgaacgaactaactgagtttgcaaaaacatgtgttgctgatgagtcccatgccggctgtgaaaagtcacttcacactctctttggagatgaattgtgtaaagttgcatcccttcgtgaaacctatggtgacatggctgactgctgtgagaaacaagagcctgaaagaaatgaatgcttcctgagccacaaagatgatagccgagagctccctaaagtgaaacccagacccaagactttgtgtgacgagtttaacgcaaatgaaaagaagttttggggaaaat

SEQ ID NO: 10543 - DNA, 416 bp, Bos taurus
  Clone ID: 45-LIB34-023-Q1-E1-D2
agacactcgtgcgagtttttcaggcttcagtgtttctcttagaaggttctctgtttacggaaggagttacttagggattttcatctggcgacggaggtgcattcttaaaagtcgaaatgcctcatttggttctcctaaaatcacaaggaagaaaagcgctgcagactattctccaacaactggaacctgtcagatgagcccagttgcttctcccacaagctcaaaagaacaagaaaacagaaatggaccatcaaatgtacttcagccacccttattttctggctatttgtcaatcatgctgagcctgttgcctccacaagaactgcacttgcacttctttcaacctggaatattcttcctctacgaaagagggaaaacttgaatcacctcagtataaacaaaagaatggaatctac

SEQ ID NO: 10544 - DNA, 234 bp, Bos taurus
  Clone ID: 45-LIB34-024-Q1-E1-D2
ttcctcacaacactctagattgagtcggtacatcacgtgccaggggccccccaggactgaagggggacagaggtgatcctggagaaacaggagcaaacggggagagtgggcttgcagaggtcaatgctctcaagcagcgggtgacaatcttagatggacatctgcgacgcttccaaaatgccttcagtcagtacaataaagcggtgctcttccctgatggccaggctgtcgggg

SEQ ID NO: 10545 - DNA, 419 bp, Bos taurus
  Clone ID: 45-LIB34-025-Q1-E1-D10
cggagacgctgacgcggtggcgaaactccctgcagcccagacttatacatcgactcaggctgccaaggttttccatctccagccactaccagctgaaagacatcctttcccagctgggtatcaagaaaatcttcaccagcgatgcggacttctcaggaatcacagatgaccacaagctggcagtttcccacgtgatccacaaggctgtgctcgacgtgggcgaggagggcacggaaggagctgctgtcacggctgtcgtaatggctacctcatcactcttgcacacgctaactgtcagtttcaacaggccctttctgctttccatattctgcaaagagactcagagcatcatctttttggggaaagtcaccaaccccaaggaagcctagagctcccctcctcccaaagagctgggtgcc

SEQ ID NO: 10546 - DNA, 398 bp, Bos taurus
  Clone ID: 45-LIB34-025-Q1-E1-D2
atcgaggggctaccaaatccatcaaggcagtctcactttttaatcactggactgtttggtaatttggagctccttgtaaatgggtggaaatcatgctgaggaagacctgaagatggagaaggtcaagtgggaacaattgggttgagtttcctgtttctcagtcctttagcaaaaaaagaacagaagtttggagtgcactctgttacgaacctgcatggtctcagactcatcatgttaccagttgagctacttctttgctgcttcctgctgcacgctgcagatgccatttcatctggaaaccagatggatgtcttaatacatcttccttcaaccttggaatcgtcgttaacttcctcataccccttgtcttgccaaacccttcttcccaaatccctccc

SEQ ID NO: 10547 - DNA, 397 bp, Bos taurus
  Clone ID: 45-LIB34-026-Q1-E1-D10
ctcaacccgtatccccaagattcagaaacttctccaggacttcttcaacgggaaagaactgaataagagcatcaaccctgatgaggctgttgcatatggtgcagctgtccaggcagccattttgtctggagacaaatctgaaaatgttcaagacttgctgctgttggatgtcactcctctttcccttggaattgaaactgctggtggagtcatgactgtcctcatcaagcgcaatactaccattcctaccaagcagacgcagactttcaccacctactctgacaaccagcctggtgtgctcattcaggtttatgaaggtgagcgtgccatgaccaaggataacaacctgcttggcaagtttgaactcacgggcatacctcctgccccccgtggtgtt

SEQ ID NO: 10548 - DNA, 344 bp, Bos taurus
  Clone ID: 45-LIB34-026-Q1-E1-D2
agagctttactccttttaacagatttcattggcatagctctgggtggctatccagttttttgaaaatgtgctcagccagaaaggcccaaatccacgcagctgtggtaaagttacagttctgtggtttcatgttagttaccttatagttactgtgtaattagtgccgcttaatgtatgttaccaaaaataaatatatctaccccagactagatgtagtattttttgtataattggatttcctaatactgatatttgtcatcttcacagaaagtgtattggttttttttttttttttttttttaaagaaagtgtatttgaaaataaagtcagatggaaaattcagg

SEQ ID NO: 10549 - DNA, 403 bp, Bos taurus
  Clone ID: 45-LIB34-027-Q1-E1-D10
ggagaagaacattttaaaggcctggtactgattgccttttctcagtatctccagcagtgtccatttgatgagcatgtaaaattagtgaacgaactaactgagtttgcaagaacatgtgttgctgatgagtcccatgccggctgtgaaaagtcacttcacactctctttggagatgaattgtgtaaagttgcatcccttcgtgaaacctatggtgacatggctgactgctgtgagaaacaagagcctgaaagaaatgaatgcttcctgagccacaaagatgatagcccagacctccctaaattgaaaccagaccccaataccttgtgtgatgagtttaaggcagatgagaagaagttttggggaaaatacctatacgaaattggtagaagacatccctactttt

SEQ ID NO: 10550 - DNA, 405 bp, Bos taurus
  Clone ID: 45-LIB34-027-Q1-E1-D2
gttctttctggccagcttcctgcttctgccctttctgctcgtctgcatcgtagagtctctcctgaagctttttattcctaagaagagaaaatcagtcaccggagagattgtccttattaccggagctggacacggtattggcaggcagactgcctacgaatttgccaaacttaagtgcaagctggtcctgtgggatataaataagcatggacttgaggaaacagccaccgaatgcaagagactgggtgcaaaggctcatacctttgtggtagactgtagtaaccgagaagatatttacagctctgcaaagaaggtgaaggcagaagttggagatgttagtattttagtaaataatgctggtgtagtctacacatcagacttgttcgctacacaagaccctcagat

SEQ ID NO: 10551 - DNA, 399 bp, Bos taurus
  Clone ID: 45-LIB34-029-Q1-E1-D2
atttctgcagaaagcatccctaaaggcactcagcaagacaccaccaaactgaccgcatcaaagagaaatttcatcatctacagagggctcctcttcaggtgttcctgcaaagcttggtgtgaagacagctttccaggcttacgtgtcttgcatgatgttcctgctgcaaggtgcccagatgctgcagatgctggagaaatccttgaggaagagccttcctatgtccttaaaggtttatgggaccgtcatgcacatgaaccatggaaacccattcaatctaaaggccctggtggacaagtggcctgattttcagaccgtggttatccgccctcaggagcatgacatgaaagatgaccttgatcactacactaatacttaccatgtctactctgaagatct

SEQ ID NO: 10552 - DNA, 386 bp, Bos taurus
  Clone ID: 45-LIB34-035-Q1-E1-D10
taatcaaacaaaactgtgaccaattcgaaaaacttggagagtatggattccaaaatgcgctcatagttcgttacaccaggaaagtaccccaagtgtcaactccaactctcgtggaggtttcaagaagcctaggaaaagtgggtactaagtgttgtacaaagccggaatcagaaagaatgccctgtactgaagactatctgagcttgatcctgaaccggttgtgcgtgctgcatgagaagacaccagtgagtgaaaaagtcaccaagtgctgcacagagtcattggtgaacagacggccatgtttctctgctctgacacctgatgaaacatatgtacccaaagcctttgatgagaaattgttcaccttccatgcagatatatgcaca

SEQ ID NO: 10553 - DNA, 467 bp, Bos taurus
  unsure (429): unsure at all n locations; Clone ID: 45-LIB34-035-Q1-E1-D2
acgggcgaaatccgggacgaccacgcgtcgggcattatataaagggcttccctggtggcttaccattaagaatctgcaatatatagattcagaaatacattttcattgttcaaaatcagctttaacacatggtttctgggaacaaaccatttgttttcattatctgtgtgtaattagaattacaggttcatgatttattttctgacttaatgtgcaatttcttagcactagataactttcagtatctgtgacggttgcttgttactttaagttaaaagtaggatcttataaaaattaataaaatttgccagtaaatattcccataatatagaagaggatatgaaccttgctaatttcagaattaattattcatttttaaaaagtcctttcttttaaggcatctgcctaaggagtggtataatttaacanaatgtctctttttatagtggtcaaagataaaatatctt

SEQ ID NO: 10554 - DNA, 424 bp, Bos taurus
  Clone ID: 45-LIB34-037-Q1-E1-D2
ggctcggagccccgggcccgccgacaccatgagttggtcctcgcaccctccgagtgtaatcttctacattctttcattgctttcttcagcatgcctggcatatgttgctacacgagacatctgctgcatcttagatgaaagatttggtaattattgcccaactagctgtggaattgcagatttcctgaattattaccaaaccagtgtagacaaagatctacgaactttggaaggcatcttatatcaggttgagaacaaagcatcagaaatcagagagctggtctaagcagtccaaatcagctataactctgatcaaccatcacagccagataacatacagagtgctaccaagaattccaagagtatgatggaagaaattatgacatatcaaacactgatatcaagacatgattcaacatttcga

SEQ ID NO: 10555 - DNA, 428 bp, Bos taurus
  Clone ID: 45-LIB34-038-Q1-E1-D2
tactgacatcagtcctggccagcactttgaacagatgaaggatgatgccattgtgtgtaacattgggcactttgacgtggagatcgatgtcacgtggctgaacgagaacgctgtggagaaggtgaacatcaagccccaggtggatcgctacttgttgaagaagggacgccgcatcatcctgctggccgagggccggctggtcaacctgcgctgtgccatgggccatcctatctgtgtgatgagcaactccttcaccaaccacgtcctggcgcagatcgagctctggacccatccagacaagtaccccgtcggagtccacttcctgcccattgccttccagctgctgtccatggctgggtcccacctctcctccccaaaagcaaatggcaccagctttaagattggtctgataatgtcccccagtacct

SEQ ID NO: 10556 - DNA, 321 bp, Bos taurus
  Clone ID: 45-LIB34-039-Q1-E1-D10
ggtccacgcacgcgtccggagagattcacaatccgccttgagtatctgctgttgccactgtctacatctggtatttgtcacaacacggtctgcattcatctgacattgtacagtggagatccgctctttgagtagctgacacggccttttggccgaagaaaatgtcattgaatcttgacagtgacttttgactcaagctgcctgacacgcatcatgtcagcacctcagccccacagaaaccatcaccacttaaagctgaaaaaataaggcgaatgggtgaaaatgaccttcactttaaatatctgaaattggataaattcc

SEQ ID NO: 10557 - DNA, 433 bp, Bos taurus
  Clone ID: 45-LIB34-040-Q1-E1-D2
ctgtaattcacatctcctgccagcagagaaaagaagaaacatgagcacggcaggaaaagtaataaaatgcaaagcagctgtgctgtgggagctcaataaaccattttccattgaggaggtggaggttgcaccccctaaggcccatgaagttcgtattaagatggtggccacaggaatctgtcgctcagatgaccatgtggttaatggatctctggtcacacgtcttcctgtggtcttaggtcatgagggagccggcattgtggagagcattggagaaggggtgactacagtaagaccaggtgataaagtcatcccactctttattccccagtgtggaaagtgcaatgtttgtaaacacccagaagccaacctttgcctgaaatgccagctgaaggagcctcgggggacccttaatgatggtacctgcaggttc

SEQ ID NO: 10558 - DNA, 412 bp, Bos taurus
  Clone ID: 45-LIB34-041-Q1-E1-D10
gtcgacgcacgcctctagaggcagtcgcaagataacatcagtgtcttggctcccaactggctcccaattcctggtgaaactcctaaagggagactgttaaatcatgaaattaatcaccatccttttcctttgttccaggctgctaccaagtttaacccaagagtcttctcaagaaatcgactgcaacaaccaggatgtatttaaagctgtggacgctgctctgacaaaatacaacagtgaaaacaagagtggcaaccagtttgtattgtaccgcataaccgaggttgccagaatggataatcctgacacattttattccttgaagtaccaaatcaaggacggcgactgtccttttcaaagtaacaaaacttggcacgactgtgactacaaagaatctgcaaaagctgccaca

SEQ ID NO: 10559 - DNA, 296 bp, Bos taurus
  Clone ID: 45-LIB34-042-Q1-E1-D2
gcaaaaggatagcagaagcaagtgcctggtcagagatggctcctgctggcctgagcctaggggctgccatcctttgcctcttggcctgggctggcctggctgctggcgaccgggtgtatgtacaccccttccacctcctcgtctacagcaagagcaactgtgagcagctggagaaacccagtgtggagacacctccagacccagctttcagacctgtgaccattcagaccaagtcatccgcagtggatgaggaggccctgtgggaagagctggttccagccaccgagaaactagag

SEQ ID NO: 10560 - DNA, 320 bp, Bos taurus
  Clone ID: 45-LIB34-043-Q1-E1-D2
caaaggacgcggtttctggacgcgatgaacgcggttggccactcccagcccataagatgactgttctgtgtgttgacgtgatggtcacgcttctggaaggaagccaagcggatatggtcggagagctgtggaccgaagaggccctgactacccagcaaccccgggggaatgacatgcaaccttgggaacatgtgctggggagcgtctgggatgatctgagctgggtgcagacgctgtctgaccatctgcacgatgagctgctcaacaaccatgtcactcatggactgaatgctctgatggaggacaccatgctagacgtg

SEQ ID NO: 10561 - DNA, 417 bp, Bos taurus
  Clone ID: 45-LIB34-044-Q1-E1-D2
atgatttcttgcaacttcgaaaaatttaaaaccatgaaacatctattactgctacttttctgtgcatttatagttcaggcccaatttcctactgactatgacgagggacaagatgacagacctaaggtaggtttgggtgcccgcggtcatcggccctatgacaagaacaaggaacaggcccccagcctgagacctgtgccccctcccatcagcggaggtggctatcgggctcgtcccgccacagcaactgtgggccacaagaaagtggagagaaatccccctgacgctgatggctgcctgcacgcggacccggatctgggtgtgttgtgtcctacaggatgtacgttgcaagatactttggtaagacaggagagaccaatcccaggagagtatagaagatttacgtaatacggtgga

SEQ ID NO: 10562 - DNA, 448 bp, Bos taurus
  Clone ID: 45-LIB34-045-Q1-E1-D10
cgacttcttgcacgaccccctgtcactgtgcaaagcttgcacccccaagcccaacggggagaacgccatctcggcccgctccgacctcaaccctgccaacggctcctaccccttccaggctctgcaccagcgctcccacgggggcattgacgtgaaggtgaccagcacggccctggccaaggccctgcgcctcctggcagtcagcggccccacgtgggaccagctgcctccattccagtggagcacttcacccttcagcggcatgctgcacatgggtcaacctgacctctggaagttctcgcccatcgaggtctcttgggactgagctccgtctctgctctgctgccttctgcccccgccgaccccagtggggaacaaccggactggctgccagcctggcgctcccggccgggctccgtccgcaaggggaggggggagtcgttgccct

SEQ ID NO: 10563 - DNA, 192 bp, Bos taurus
  Clone ID: 45-LIB34-045-Q1-E1-D2
catggcggctgggaccctgtacacatatcctgaaaactggaggggcctcaaaggcctcaatggcgcccattaaaccggggctaaggtccgcgtgctctccgcaccaccccacttccattttggccaaaccaaccgcacccccgaatttctccgtaaatttcctgctggcaaagttccagcctttgagggtga

SEQ ID NO: 10564 - DNA, 423 bp, Bos taurus
  unsure (251),(410): unsure at all n locations; Clone ID: 45-LIB34-046-Q1-E1-D2
cagcagggcttggactctcacccaccatctctctcacagccttccagcccttcttcctggaactcactcttccctattctgtggttcgaggagaagccttcacactcaaagccactgtgttcaactatctgtcccattgcattcgggtgagcatacagctggaggcctcttctgccttcttggccatcccagtagagaagaatgaagaatctcagtgtgtctgtggaaacaagcagagaaccgtgtcctgngctgtgaccccaaagtcactgggagaggtgaatttcacagctactgcagaagccttgcggtctcaggaactatgtggcaataaggtgcctcacttcccagaaattggacagaaggacaccgttatcaagcctttactagttgagcctgaaggaataganagagaagaaactt

SEQ ID NO: 10565 - DNA, 430 bp, Bos taurus
  unsure (324),(365),(408): unsure at all n locations; Clone ID: 45-LIB34-047-Q1-E1-D10
aagttctgaaaccctagaggacgcaactgtgagtgtctctgtcctagcctctcaacttgctttcctgtgtccaatagcactgcagactccagtactagcctgtccagagcagcaagtgagaggaaacaagccagcattgtaagaggacatgcttctcctccctctctccgtgctgctcctgctcacacagccctggagatccctgggagcagaaatgacaaccttttctcagaaaatactggccaatgcctgtaccctggttatgtgtagccccctggagagtggcttgcctggtcatgatggacaagatgggagagaatgtcnccatggagagaagggggatccaggttcaccaggacctgcanggcgagcaggaaggcctggatgggttggccctattgggccganaggagacaatggctttgttgga

SEQ ID NO: 10566 - DNA, 393 bp, Bos taurus
  Clone ID: 45-LIB34-047-Q1-E1-D2
cccaggctgggcgcagagcggcggtgcacccacaggccccgagatgcaggccctcgtgctactcctctggactggagccctgcttgggtttggccgctgccagaacgccggccaggaggcgggctctctgacccctgagagcacgggggcaccagtggaggaagaggatcccttcttcaaggtccctgtgaacaagctggcggcagccgtctccaacttcggctacgacctgtaccgcgtgagatccggtgagagccccaccgccaatgtgctgctgtctccgctcagcgtggccacggcgctctctgccctgtcgctgggtgcggaacagcggacagaatccaacattcaccgggctctgtactacgacctgatcagtaacccagacatcca

SEQ ID NO: 10567 - DNA, 329 bp, Bos taurus
  Clone ID: 45-LIB34-049-Q1-E1-D2
agcacaccagactttggcatcctgaattccgagagcttcaactctcatctccctcgcgtgagtccagcttactccagcggtgtgtatgcgttctacatcttcatggcagtgcgaatgctcaacagctcctagattttcgagatgaacatttccaacgactcgtatgtattgccttttcacacttgctgtatgaatatccagttgatgaacaggtggtatcagtgatcaatggaattgatctggtgctccaatttgttgctgatgacacacacgtcggcagtgataagtcacttcaaagtctcctgtggaatttatctgtctaatgttgc

SEQ ID NO: 10568 - DNA, 244 bp, Bos taurus
  Clone ID: 45-LIB34-051-Q1-E1-D10
gcaaaatcctaattcaactattatttttgctaattagtttctaaatgtgatgatcgtttagctcagtagacctcaagtaaagcagattaccctctgtaacgtgggtgcgtctcatctaatcagttgaagaacccaaggggaaagactgagtcccctgaagtagaaattctgcctcaggttgccttcagattcaagacagcagtgccagctcttctctgggtctccagcctgccgacctgtcctg

SEQ ID NO: 10569 - DNA, 242 bp, Bos taurus
  Clone ID: 45-LIB34-052-Q1-E1-D2
aactgggtaacctgcaggagaaggaggtgatacaggacgtggtggcagaaaaatgaagaggatcctggttttcctccttgctgtagcctttgtgcatgctctagagagaggccgagattatgagaaagataaagtctgcaaggaccttgccagcctgggaagagatgacttcacatctttgtcaatggtcctatacagcagaaaatttcccagtggcacctttgaacagatcagccatcttg

SEQ ID NO: 10570 - DNA, 349 bp, Bos taurus
  Clone ID: 45-LIB34-055-Q1-E1-D10
caactggttccgaaaggacaaggccggcaggttcctctggcccggcttcggtgagaactcccgggtgctggagtggatgttcaaccgcgtggtcggggaaggcggcgccaagctcacgcccatcggctacatccccgatgaggatgccctggacctccggggcctgggggatgtcgacgtgaaggagctcttccacatctccaaggagttctgggaggaggaggtggaggaaatacagaagtaccttgaggagcaagtgaacgtcgatctacccccagagatcaagaatcaggtcctggccctgaagcagagaatcagccagatgtaatcaggtttgcctgactgtcca

SEQ ID NO: 10571 - DNA, 369 bp, Bos taurus
  Clone ID: 45-LIB34-056-Q1-E1-D2
acggacgcgtggggtctcaagttcaacctcacagagacccccgagacagaaatccaccagggcttccagcacctcctgcagacgttcaatcagcccagcaaccagctgcagctgagcgtgggcaacgccatgtttgtgtcagaggagctgaagctgctggacaaattcaggaaagatgccgaggctttttacgcctctgaggttttatccactaacttcaaggattctgaagctgccgtaaagcttatcaatgaatatgtgaagaataaaactcatggaaaaattgagaagctcttcaatgatcttgacgtgctcacaaatttaatcttgttgaattaaatcttccttaaagcccagtgggagacgcca

SEQ ID NO: 10572 - DNA, 230 bp, Bos taurus
  Clone ID: 45-LIB34-057-Q1-E1-D10
cgttgcaacaccctagagtgagtcgtattacaaggaatctcttctcgattaatatatgtgcatcttaggtatcgggtttcagaacatcttcgtgtttaccaataagaagtgggccttcgaaatgtccggactcgtcctaagttggcactgagagtacatcctcagatatgacacatgtggcagtttaggctggtggcccggtgagcgttactctgtcccaactttcacat

SEQ ID NO: 10573 - DNA, 223 bp, Bos taurus
  Clone ID: 45-LIB34-057-Q1-E1-D2
gttcaagggcttgatggcctttctgaacgctgtgctcagtataagaaagatggtgctgactttgggaagtggcgtgctgtgctgaagattgacaaccagtgtccatcccatcttgctatccaggaaaacgccaacaccctcgcccgctatgccagcatctgtcagcagaatggtctggtacccattgttgagccagaggtaattcctgatggcagccatgaca

SEQ ID NO: 10574 - DNA, 227 bp, Bos taurus
  Clone ID: 45-LIB34-058-Q1-E1-D2
tacagccgcataccccttccccagccccagtctgtagctgcctcgagcagggagctggtggctcttccatccccagaccagccaagcctgtgagtgacaccccagacagaggaaccagagccatgcggagtctcagcggactgctgttgttactgactgcctgcctggcagtaaacgccagctccgtgcccacattgcccgatgacattcaagtgcaggagaacttc

SEQ ID NO: 10575 - DNA, 207 bp, Bos taurus
  unsure (196): unsure at all n locations; Clone ID: 45-LIB34-059-Q1-E1-D2
aatgaagtgggtgacttttatttctcttctccttctcttcagctctgcttattccaggggtgtgtttcgtcgagatacacacaagagtgagattgctcatcggtttaaagatttgggagaagaacattttaaaggcctggtactgattgccttttctcagtatctccagcagtgtccatttgatgagcatgtaaanattagtgaact

SEQ ID NO: 10576 - DNA, 322 bp, Bos taurus
  Clone ID: 45-LIB34-060-Q1-E1-D10
tcgacccacgcgaacgtgtaaaggtagaaaaactttgggacttattttgggctattcataaatattcaacacaatgatttacacttttctgggttgtttctatctactcacacgctaacctttggtaattttgattcctcttatccttttaaaagtacttttcttgtaagcagtggatattttaaacgaagccttcaatttaatgtggaggaagaaaattaccttttagttgtttatagtaaataaagttttgtttttaagaaaaccaattgtgattaactgtagcccaagccctattcctgcattgtttaattttatgagg

SEQ ID NO: 10577 - DNA, 394 bp, Bos taurus
  Clone ID: 45-LIB34-061-Q1-E1-D10
ttcccgaagggccccacgggcccgcgaacgcgtgaggtaatggcacccttgaattcctcaagtggtcctaaacctcccagcaaacttccctccctgccccagtacttttcagtgatcattgaataaattacgttcagaacgtccaagttacccatgtgaatgtaaccctaaagagcagtggagattaattattcattaagtggtcaacaatttcctatggaaagcccatgaaatttcaaaggttctgcgagatcctatgaactctgggaaaacggtaggtcaggaaacaagggctggttgaggctggggagacaggaaagtcatcccgccttttgtttttttctgatagtttttcaccagagggaaaagcatagtcgtgatcacaggcctcgac

SEQ ID NO: 10578 - DNA, 340 bp, Bos taurus
  Clone ID: 45-LIB34-061-Q1-E1-D2
agagtatttcaagaatgctgccaaggctgaagatagacgtgcctgcctgctaccagagattgtgactatgagagacaaagtactgacatcatctgccagacagagacacaagtgtgccagtattcataaatttggtgaaagagctttaaaagcatggtcagtagctcgcctgatccagaaatttcccaaggctgagtttgtagaagttaccaagctagtgacagatctcacaaaagtccacaaggaatgctgccatggtgacctacttgaatgcgcacatgacagggcagatcttgccaagtacatatgtgataatcaagatacaatctccagtaaactg

SEQ ID NO: 10579 - DNA, 210 bp, Bos taurus
  Clone ID: 45-LIB34-062-Q1-E1-D10
gttgtgtccaagctgagtttcctcttccagggtgaggctagaactatgcctttttcaacttccatcccctccatctgtgatgtcaatcagctccactaggaaaagtctcgctggaaatgtttcttaaactttcacctaatttctttacactttaaagcaaacacctttttctaaagaactgcttctcagatgattatataaaatatataa

SEQ ID NO: 10580 - DNA, 211 bp, Bos taurus
  unsure (11): unsure at all n locations; Clone ID: 45-LIB34-062-Q1-E1-D2
tcccgggtcanccaacgcgtccgctaattgctatgattcgcgagcggccgccttttttttttttttttaagcttggcaaaagtagttatttttatttacaactgcatgtattaaggttacaagagaaacactagtgataccatctgaacaaaagcaatgatttattggcaatggaaatgaatgaaatattgaaagtctctggcgagaatca

SEQ ID NO: 10581 - DNA, 395 bp, Bos taurus
  Clone ID: 45-LIB34-063-Q1-E1-D2
tgggtcccaaaacctggggaaatggtttgcggaggctttccctgcccaaaaaatgcgctctgcgcgctcaacgtggtctacatgctggtaggcttattgctcattggattggctgcatgggctaagggcctgggtctggtgtccagcatccatatcatcggaggagtcattgcagtgggagtcttccttcttctcatcgcggttgctggactggtaggtgctgtcaaccaccaccaagtactgcttttcttttacatgatcatccttggtttggtcttcatcttccagtttggaatctcttgctcatgtctggctattaacctaagcaaacagacagatgtcatcaatgcttcttggtgggtcatgagcaacaagaacccgggatgaactggaaa

SEQ ID NO: 10582 - DNA, 368 bp, Bos taurus
  Clone ID: 45-LIB34-064-Q1-E1-D10
gcatcaaccaattaaaattgacccaaatttccttattccgccaaattggcacaatctacctcgcgccgacctcctgaccgggaccgccccactaggtctctctctgaaatccctgtaccgtcctgtctgcgggctcccctgccccggcctctgtgccccaacctccccacgtcaggcgaatccccctcggccccctccatctggctgaggggatcagaacaacatctctaaaaatgtacaaaaccaattggctttaaatatccccccaaattatcaccccccaaattaccccaaattacacaaccaaattgcaatcatgaaccccttcattcaccccccttaaaccgaatgggctttttagcaccacc

SEQ ID NO: 10583 - DNA, 389 bp, Bos taurus
  Clone ID: 45-LIB34-064-Q1-E1-D2
cctcggatcatgtctggtggctccgccgattataacagcagagaacattgcggcccaaagggaatggaccccgattgtgtcctcgacagccactggaatgagattgttgataactttgatgatctgaacttaaaggaatctcttcttccgggcatctatgcttatggttttgagaagccatcagctattcagcagatagctattattccatgtcttatacggtacgatgtgattgctcaagctcagtcaggttatggcaagacagccacatttgctagttccaaccctgcatcatttgagattcagttcaaggagacccaagcactagtattggcccccaccagagaactggctcaacttattcataaggtaattctggcacttggaga

SEQ ID NO: 10584 - DNA, 217 bp, Bos taurus
  Clone ID: 45-LIB34-065-Q1-E1-D2
ggttctgaaaccctagaggacgcaactgtgagtgtctctgtcctagcctctcaacttgctttcctgtgtccaatagcactgcagactccagtactagcctgtccagagcagcaagtgagaggaaacaagccagcattgtaagaggacatgcttctcctccctctctccgtgctgctcctgctcacacagccctggagatccctgggagcagaaatga

SEQ ID NO: 10585 - DNA, 204 bp, Bos taurus
  Clone ID: 45-LIB34-066-Q1-E1-D10
gccattgaaagtgtaactccatagccaatggcttacagattgcagaacccatcatccaatgattttctaaaaattctgtacttccaatttataatgaatccttttatgattttaagcgggagggaagcagagaaattaagatagagaaaacccaatctgcatattaatgccaccaatagcctttattcttattttgtatttaca

SEQ ID NO: 10586 - DNA, 262 bp, Bos taurus
  Clone ID: 45-LIB34-066-Q1-E1-D2
gctgaggagcgcccgtggctctgggtggtctacattttgactgtggctctgcccgtgtttcttgtcatcctcttctgctgttctggaaagaaacaggccagccctgtggaatacaaaaagactgatgctcctcagccagatgtgaaggaagatgaagaagaaaaggaagaggagaaggaaaagggagatgaagaggaggacggtgaagagaaacttgaagagaagcagaaaagtgatgttgaagaagatggtgacactgtca

SEQ ID NO: 10587 - DNA, 198 bp, Bos taurus
  Clone ID: 45-LIB34-068-Q1-E1-D10
cggggtgcctaggtccagccgtcttcttccaaggcttcggtctgagacaggccgacccgtcagttcttgttcttgtttggcgtgttccatgttccatcatgttgagggctaagactcggctttttttgctttcacctaatcacctgaggcagctgaaagggtcatcaggctccaggcttatctggcaacgacttctgc

SEQ ID NO: 10588 - DNA, 222 bp, Bos taurus
  Clone ID: 45-LIB34-068-Q1-E1-D2
aggctctttcaaagctaatttacagcacccgtattatttttttcgcacttctaggacaaccccgattccctaccctagttaatattaacgaaaacaacccccttctgatcaactctatcaaacgcttactaattggaagcctcttcgcaggatacatcatttccaacaatattcctccaacaacaattccccaaataactatgccctactacctaaaaacaa

SEQ ID NO: 10589 - DNA, 218 bp, Bos taurus
  Clone ID: 45-LIB34-069-Q1-E1-D2
aggccggccagccgctgctggagcgtgccgaggcctggcgccagaagctgcacgggcgcctggaggaggtgggcgtccgggcccaggaccgcctggataagatacgccagcagctagaggaggtgcacgccaaggtcgaggagcagggcaaccagatgcgcctgcaggccgaggcattccaggcccgcctcaggagctggttcgagcccctggtggaa

SEQ ID NO: 10590 - DNA, 244 bp, Bos taurus
  Clone ID: 45-LIB34-070-Q1-E1-D10
acgagaagctccacactcagaggcaggcagagggcagcacacacagctgaaaggaaactcagaagaaggaatcgccaagaaaagtggccatggagctaatcctgagcttttccacggaaacctgggttctcctggctaccggtctggtgctcctctatctatatggaacatattcctatgggctttttaagaagttgggaagttcctggaccaagacctctaaccttaattttggaaacattct

SEQ ID NO: 10591 - DNA, 386 bp, Bos taurus
  Clone ID: 45-LIB34-071-Q1-E1-D2
aaactttggcacaatgaagtgggtgacttttatttctcttctccttctcttcagctctgcttattccaggggtgtgtttcgtcgagatacacacaagagtgagattgctcatcggtttaaagatttgggagaagaacattttaaaggcctggtactgattgccttttctcagtatctccagcagtgtccatttgatgagcatgtaaaattagtgaacgaactaactgagtttgcaaaaacatgtgttgctgatgagtcccatgccggctgtgaaaagtcacttcacactctctttggagatgaattgtgtaaagttgcatcccttcgtgaaacctatggtgacatggctgactgctgtgagaaacaagagcctgaaagaaatgaat

SEQ ID NO: 10592 - DNA, 165 bp, Bos taurus
  Clone ID: 45-LIB34-072-Q1-E1-D10
ggtcagaataccgggccgagccacgcgtcaagaaaaccccacaaaacctatcacgaaaataacgcttagaataaatacaatgtatagtatcattattcttacatggaatctaaccatgactaatgatatgaaaaaccatcgttgtcattcaactacaagaacact

SEQ ID NO: 10593 - DNA, 383 bp, Bos taurus
  unsure (238),(290),(309): unsure at all n locations; Clone ID: 45-LIB34-073-Q1-E1-D2
agggctgccctcgccagggctatggctgaagaggctctgggtcctctttcaggtggccctgcatgtggccataggcaaagtgctcctgacgctgtttcccaggagggtcaagcagaacatcctggccatgggcgagaagactggcatgaccaggaacccacacttctcccatgaaaactggatccctaccttcttcagtacccagtaattctggtttatcctgaaggtcggttggcanagactggaggacatgactgaacaagggggtctggccccaaactgtcctgtantccgcctgtcaggaaaaangtgcagcatctgggacttcatgcaaggcaacagacccttggtgctgaattttggaagttgtacctgaccttcat

SEQ ID NO: 10594 - DNA, 434 bp, Bos taurus
  Clone ID: 45-LIB34-074-Q1-E1-D2
gggccgagccacgcgtccaggagcacccgggcccgccgacaccatgagttggtcctcgcaccctccgagtgtaatcttctacattctttcattgctttcttcagcatgcctggcatatgttgctacccgagacaactgctgcatcttagatgaaagatttggtagttattgcccaactacctgtggaattgcagatttcctgaataattaccaaaccagtgtagacaaagatctacgaactttggaaggcatcttatatcaggttgagaacaaaacatcagaagccagagagctggtcaaagcaatccaaatcagctataaccctgatcaaccatcaaagccaaataacatagagagtgctaccaagaattccaagagtatgatggaagaaattatgaaatatgaaacactgatatcaacacatgaatcaacaa

SEQ ID NO: 10595 - DNA, 391 bp, Bos taurus
  Clone ID: 45-LIB34-075-Q1-E1-D10
acgcgtcaattaagcgtcgactaatctcaaccaaccataaagatattggtaccctttatctactatttggtgcttgggccggtatagtaggaacagctctaagccttctaattcgcgctgaattaggccaacccggaactctgctcggagacgaccaaatctacaacgtagttgtgaccgcacacgcatttgtaataatcttcttcatagtaataccaatcataattggaggattcggtaactgacttgttcccctaataattggtgctcccgatatagcatttccccgaataaataatataagcttctgactcctccctccctcattcctactactcctcgcatcctctatagttgaagctggggcaggaacaggctgaaccgtgtaccc

SEQ ID NO: 10596 - DNA, 388 bp, Bos taurus
  Clone ID: 45-LIB34-075-Q1-E1-D2
tgagtcgcagtatgacttaagtaagctgaaataatcggctccttgaaaaatgttgtaccatcatttaacctgataggattgttggagcctgttagatattaggtgccgagactttaatgaggtcctttagcagaatgtgaacataaacttacaaataccttactcagtcattagggaatacatagtgctttttaagtcttacctctggtccctgaaattggcatctgatgatgtgtgtgcttcccgtgccgaggtggacagatgatcaaatggcagtgcagcacctttatctcaccaagaagcgaaaatgacctgagtgtcctataaacttaagagcaggttttgaaacttgaattgtgtttgttttttaaaagtctaaacttgcccc

SEQ ID NO: 10597 - DNA, 232 bp, Bos taurus
  Clone ID: 45-LIB34-076-Q1-E1-D2
ttggcagaaaccgaagcacctgcatgcacgacaagagctgcatgccctacacagatgctgtgctgcatgagatccagagatacagtgaccttgtccccagcagtatgccccatgcagcaactcaggatgttaagttcagagaatacctcattcgcaagggcacagtcatattaacatctctgacgtctgttctgcatgatgataacgagttttccaacccagggcagtttga

SEQ ID NO: 10598 - DNA, 239 bp, Bos taurus
  Clone ID: 45-LIB34-077-Q1-E1-D2
tccttctcttcagctctgcttattccaggggtgtgtttcgtcgagatacacacaagagtgagattgctcatcggtttaaagatttgggagaagaacattttaaaggcctggtactgattgccttttctcagtatctccagcagtgtccatttgatgagcatgtaaaattagtgaacgaactaactgagtttgcaaaaacatgtgttgctgatgagtcccatgccggctgtgaaaagtca

SEQ ID NO: 10599 - DNA, 392 bp, Bos taurus
  Clone ID: 45-LIB34-079-Q1-E1-D2
cgcggtttctggaggcgaagaacgcggttggccaatcgcaagccagaagatgaaggttctgtgggttgccgtggtggtcgcgcttctggcaggatgccaggcggatatggagggagagctggggcccgaggagcccctgactacgcagcagccccgggggaaggacagccagccttgggagcaggcgctgggccgcttctgggattacctgcgctgggtgcagaccctgtctgaccaggtgcaggaggagctgctcaacacccaggtcattcaggaactgacggcgctgatggaggagaccatgaaggaggtgaaggcctacaaggaggagctggagggacagctaggccccatggcccaggagacacaggcccgcgtgtccaaggagctgc

SEQ ID NO: 10600 - DNA, 401 bp, Bos taurus
  Clone ID: 45-LIB34-080-Q1-E1-D10
ctcctcgcatcctctatagttgaagctggggcaggaacaggctgaaccgtgtaccctcccttagcaggcaacctagcccatgcaggagcttcagtagatctaaccattttctctttacacttagcaggagtttcctcaattttaggagccatcaacttcattacaacaattatcaacataaagccccccgcaatgtcacaataccaaacccctctgttcgtatgatccgtaataattaccgccgtactactactactctcgctccctgtattagcagccggcatcacaatgctattaacagaccggaacctaaatacaaccttcttcgacccggcaggaggaggagaccctattctatatcaacacttattctgattctttggacaacccgaagtctatat

SEQ ID NO: 10601 - DNA, 439 bp, Bos taurus
  Clone ID: 45-LIB34-080-Q1-E1-D2
gggtcggcccacgcgtccacaaaattaagcatcttgtggatgagcctcagaatttaatcaaacaaaactgtgaccaattcgaaaaacttggagagtatggattccaaaatgcgctcatagttcgttacaccaggaaagtaccccaagtgtcaactccaactctcgtggaggtttcaagaagcctaggaaaagtgggtactaggtgttgtacaaagccggaatcagaaagaatgccctgtactgaagactatctgagcttgatcctgaaccggttgtgcgtgctgcatgagaagacaccagtgagtgaaaaagtcaccaagtgctgcacagagtcattggtgaacagacggccatgtttctctgctctgacacctgatgaaacatatgtacccaaagcctttgatgagaaattgttcaccttccatgcagatatatgcac

SEQ ID NO: 10602 - DNA, 443 bp, Bos taurus
  unsure (238),(279): unsure at all n locations; Clone ID: 45-LIB34-084-Q1-E1-D10
ccacgcggccaagcagagtggaaaataagacaataggtgtttggagtccaagccctccttcttgtaaaaaagtcatttgtgttcaaccagtggttaaagatggaaaaataacctctgggtttggacccatctacacttatcaacagtctattgtatatgcctgtaataaaggttttcggcttgaaggcgatagtttaatccattgtgaagctgataatagctggaatcctcctcctcncacttgtgaactcaatggttgtctttggcttacacacatcnctcatgccctgtgggaaagatatgaccaccagacacaaacagaacaacaagtgtatgatattgggtttgtattgagctacaagtgccattttggctataagccagagacagatggacctacaactgtgacttgtcagagcaatttggagtggagcccatacata

SEQ ID NO: 10603 - DNA, 425 bp, Bos taurus
  Clone ID: 45-LIB34-084-Q1-E1-D2
aatacgacttctacaaaccagatgtgacttcagagtacccactggtggatgggaagctctccatccagtgctacttacgggccctggacaaatgctacgcattctaccgtcaaaagatcgagaaacagtggaagcaagctggcatcgatcggcctttcactctcgatgatgtgcagtatatgatttttcacacgcctttctgcaagttagtccagaaatccctggcccgcctgatgttcaatgacttcctgttggccagtggtgacacacagactggcatctacaagggcttggaggccttcaggggattaaagctggaagacacctacaccaataaggatgtagataaagcatttcctaaaaccctctctgaacatgttcaataagaaaaccaagaactccctctacctctccacgtacaacgg

SEQ ID NO: 10604 - DNA, 417 bp, Bos taurus
  Clone ID: 45-LIB34-085-Q1-E1-D2
ttcctagccgacccacgcgtccagcggagaaatttaggcagttctgcacaggagaattcagaaaagatggggttccgataggatacaaggggagcaccttccacagggtcataaaagatttcatgattcagggtggagattttgttaatggagatggtaccggagttgccagtatctaccgggggccatttgcagatgaaaattttaagcttagacactcagctccaggccttctttccatggcaaacagtggtcccagcacaaatggctgccagtttttcatcacctgctctaagtgtgattggctagatgggaagcacgtggtgttcggaaaaatcattgatggacttttggtgatgagaaagattgagaatgttcccacaggccctaacaataaacccaagctgcctgtggtga

SEQ ID NO: 10605 - DNA, 315 bp, Bos taurus
  Clone ID: 46-BOVMS1-002-Q1-E1-D10
cttcgatgctggggctggcattgccctcaacgaccactttgtcaagctcatttcctggtacgacagtgaatttggctacagcaacagggtggtggacctcatggtccacatggtctccaacgagtaaggtccctggacccccagccccagcaggagcacgagaggaagagttcctcagctgctgaggagtcctgccccatctccgccacactgagaatctcctgacttccacatgtttccatctctaatgccctgatgaaggggaggggcttacggagccctgccttgtgtaccatcaatacaagtaccctatac

SEQ ID NO: 10606 - DNA, 378 bp, Bos taurus
  Clone ID: 46-BOVMS1-002-Q1-E1-D6
atgcgacgtcatagctcttctatagtgtcacctaaattcaattcactggccgtcgttttacaacgtcgtgactgggaaaaccctggcgttacccaacttaatcgccttgcagcacatccccctttcgccagctggcgtaatagcgaagaggcccgcaccgatcgcccttcccaacagttgcgcagcctgaatggcgaatgggacgcgccctgtagcggcgcattaagcgcggcgggtgtggtggttacgcgcagcgtgaccgctacacttgccagcgccctagcgcccgctcctttcgctttcttcgcttcctttctcgccacgttcgccggctttccccgtcaagctctaaatcgggggctccctttaaggttccga

SEQ ID NO: 10607 - DNA, 429 bp, Bos taurus
  Clone ID: 46-BOVMS1-005-Q1-E1-D6
gaggatgaaaaggctgagaagccagatactaaggagaaaaaacctgaagccaagaaggctgatgctggcaagaaggctaaaaaggtggaaaaggtgaagaaagttaagaaggggaagccccactgcagccgaaatcctgtcctggtcagaggaattggcagatattcccgatcagccatgtactccagaaaggccttgtacaagagaaagtattcagcagctaaatccaaggtcgaaaagaaaaagaaggttcgtgttcttgctactgtcacaaaaccagttggtggagacaagaatggtggtacccgagtggtcaaacttcgcaaaatgcctaagtattaccctactgaagatgtgcctcgaaaactgttgagtcatggcaaaaaacccttcagtaagcatgtgaggaagctgcgtgccagcatcact

SEQ ID NO: 10608 - DNA, 377 bp, Bos taurus
  Clone ID: 46-BOVMS1-006-Q1-E1-D10
cgggtcgggcacgcgtccggaagcaagcagctggaagatgagctggtgtcgctgcaaaagaaactcaaggccaccgaagatgaactggacaaatactccgaggctctcaaagatgcccaggagaagctggagctggcggagaaaaaggccaccgacgctgaagccgacgtagcttctctgaacagacgcatccagctggttgaggaagagttggatcgtgcccatgagcgtctggcaacagctctgcaaaagctggaggaagccgacaatgcaacagatgagagtgagagaggcatgaaagtcattgagagccgagcccaaaaggatgaggagaagatggagattcaggagattcagctgaaagaagccaagcacat

SEQ ID NO: 10609 - DNA, 296 bp, Bos taurus
  Clone ID: 46-BOVMS1-006-Q1-E1-D6
gaattactatgccagagcagtgtcaactcttggaggttcaggggtgcagccaacgccttcgtgtggtagttctaaatttaaaccagaaactggggcaactaagcaatgagccacagcaggaagtaaagaacaaaataaagctgtcgttaaatttaaaaacaacaaaatattactaactgcccaaaatatcaatttgatgtagttcttttcatgcaagtttaaattcaattgttagttataattgttggacctccttgagatagtaacaacaaaataaagcaagctatctgcacctc

SEQ ID NO: 10610 - DNA, 437 bp, Bos taurus
  Clone ID: 46-BOVMS1-007-Q1-E1-D6
catcaagattgaggggcgtgcggttgttcctggagtgaaaccccaggactggatctcggcggcccgagtgctggtagacggagaagagcatgtcggctttctgaagacggatgggagttttgtggttcatgatataccttctggatcttatgtagtggaagttatttctccagcttacaggtttgatcctgtccgagtggatatcacttcaaaaggcaaaatgagagcgagatacgtgaattacatcaaaacatcagaagtggtcagactgccctatcctctccaaatgaaatcttcaggcccaccttcttactttattaaaagggagtcttggggctggacagactttctgatgaacccaatggttatgatgatggttcttccattattgatatttgtgcttctacccaaagtggtcaacacaagtgatcctgaca

SEQ ID NO: 10611 - DNA, 372 bp, Bos taurus
  unsure (326): unsure at all n locations; Clone ID: 46-BOVMS1-008-Q1-E1-D10
atgcatctacaaccacgactgtgatagacagcaagaatggatctgtgcccaaggcctctggaaaagtgctgaagaggacagtcacagaggacctagtgacgacattcagctccccagcagcctggcttctggtcatcgctctcatcatcacatggtcagctgtggccgttgttatgtttgacttagtggattacaaaaacttatcagcaagctctatttccaagattggctcagatcctctaaaacttgtacatgatgctgtggaggaaaccacggactgggtctatggcttcttttctttgctgtctgacatcatctcatccganggtgatgaagaagatgatgatgatggagaagaggacactgataaag

SEQ ID NO: 10612 - DNA, 257 bp, Bos taurus
  Clone ID: 46-BOVMS1-008-Q1-E1-D6
ataagtgtacggccccatcccgcacacctttgaagaggagtgggtggccaagcagaccaagaggatgctcgacatgaaggtggcccccatccagggcttctcggccaagtgggactacgacaagaacgagtggaagaagtaaggacccgcggtcccgagtctgcacctcacctgtccagtcacccgcatgcagctccgcgtgctcactggaggcgctctgttgcagcaccagtgctaataaacgcgcagttcacgtg

SEQ ID NO: 10613 - DNA, 128 bp, Bos taurus
  Clone ID: 46-BOVMS1-009-Q1-E1-D6
tagaactacaacagctctaattacattcaccattctaatcctactaacaattctagagtttgcagtagctataatccaagcctatgtattcactctcctagtcagcctatatctgcatgacaacacat

SEQ ID NO: 10614 - DNA, 410 bp, Bos taurus
  unsure (342): unsure at all n locations; Clone ID: 46-BOVMS1-010-Q1-E1-D10
atcaacaggctgacataaagtttacaaggactactacaacatctgaaaatgctgacccagcaaagaaacatttagttgatggtgcttgatatttttggtgggtcggggagaatctttttctctccatcaatcctttgcagttatcctctgcaagacttagaaacacgttggctctgtcagcatttgtaattgtacattactcatcaggtatttagagtgaatcatactgtaaaaagaggtagcatgatatgctggaaagcatactaggctaggaatcaagacctggtttctagtctgggttttgctattaatgtgctgcatgaccttgggaaaatcatctcncctacaagagggtggtggactagactatctcaaagaacccttttcaactctaaaaatttatcctgtca

SEQ ID NO: 10615 - DNA, 460 bp, Bos taurus
  unsure (425): unsure at all n locations; Clone ID: 46-BOVMS1-010-Q1-E1-D6
cttaaataacagaaacaatttctgggtggcttggagacagtggtatttgctgagtcttttgacctcctaaacattgtctgttattcttttcctgaaaagaaactgaatttgtctggttcacctgtgttattctactgagtattgataaactttaaatttttaaaaattgccttcagttgggagagaaaggaactttatatttctaagagatacatttgatagtttcttaaagcagcacacaaaaaaggaaaaacctttgcaaacttttgcacattctccccacagtgcctgtaaatctcattagtattttcaatttgcacttatttttgttgttagcatttggaaaacgatgcctcacgtgttcttcagtgttctgatttctcatgacccctttcctcttggacttgtggactgtgtttgatgtntctctgggttgttgtttataagtcagtcataaaat

SEQ ID NO: 10616 - DNA, 365 bp, Bos taurus
  unsure (274): unsure at all n locations; Clone ID: 46-BOVMS1-012-Q1-E1-D10
gcacgtaccggcgtgtccttgggcttagaaagcgggacgttcggcttgtgagcgggaacttctcggtcgcgcacagagaaagaacgatttaaaaatgggtgatgttgagaagggcaagaagatttttgttcagaagtgtgcccagtgccatactgtggaaaagggaggcaagcacaagactgggccaaacctccatggtctgtttggacgaaagacaggtcaggctcctggattctcttacacagatgccaataagaacaaaggtatcacctgnggagaggagacgctgatggagtacttggagaatcccaagaagtacatccctggaacaaagatgatctttgctggcattaagaagaaaggag

SEQ ID NO: 10617 - DNA, 451 bp, Bos taurus
  Clone ID: 46-BOVMS1-012-Q1-E1-D8
gtaaaaatgacagaaatgtatggtttgttttaccttcatttctgttacaattaaaacttgttagtctaatcttttactcctccccacctcacccctacctctttttttttttttcttttatgtactgcattcttattttctaactgttaaacactgtattggagtttttttttaatttacagatcatatttattttactatttttgtagaaaattattaattttgattgtatttttgtattttcaaagcttcttcacttgtgttccctaaatgttcatattgctgcccaaaagtatgactgtggaggaaaaaaaaaaaactttaaaaatccacactttttgttaagaaggaaacatttaacatttatatatttgtgtatggaagacacttgacattttatccctgttgcatctggctgcacagagcctctcctcaaagatgctacaaaact

SEQ ID NO: 10618 - DNA, 167 bp, Bos taurus
  Clone ID: 46-BOVMS1-014-Q1-E1-D10
tggaaactcctggccgtgtcactccggaggcaccctttgaaccatcgcagcccccagtcattgaaggctttagccccagtgtatacagcacttcggacagcttcaaggaaaagtttattcgcaagacccgcgagaacccattggtacccataggctgcctgggcact

SEQ ID NO: 10619 - DNA, 422 bp, Bos taurus
  unsure (309): unsure at all n locations; Clone ID: 46-BOVMS1-014-Q1-E1-D6
aacatgactgacaatgatcttatcaatattcttgaccctttttatcatctttcaactaaaagtttcaaaacacaacttttatcacaatccagaactgacaccaacaaaaatattaaaacaaaacaccccttgagaaacaaaatgaacgaaaatttatttacctcttttattacccctgtaattttaggtctccctctcgtaacccttatcgtactattcccaagcctactattcccaacatcaaaccgactagtaagcaatcgctttgtaaccctccaacaatgaatacttcaacttgtatcaaaacanataatgagtatccacaattctaaaagacaaccatgaacattaaaattaaaaccccggatccaattaatgggatcaccaaaccaacaaggccaattacccaatccattcaaacc

SEQ ID NO: 10620 - DNA, 201 bp, Bos taurus
  unsure (123): unsure at all n locations; Clone ID: 46-BOVMS1-016-Q1-E1-D6
cggaaggtcgtccctgtgaccggcttgggttttggagctgctgtcgccatgttgtcggttgccgcccgctcgggcccattcgcgcccgtcctatcggccacgtcccgcggggtggcgaaaacnctgaagtaacagaacttagacgccgtgcaccacatccagctttcgccagctagcgtaataacaaagatgccaacaccg

SEQ ID NO: 10621 - DNA, 365 bp, Bos taurus
  Clone ID: 46-BOVMS1-017-Q1-E1-D10
atgcgacgtcatagctcttctatagtgtcacctaaattcaattcactggccgtcgttttacaacgtcgtgactgggaaaaccctggcgttacccaacttaatcgccttgcagcacatccccctttcgccagctggcgtaatagcgaagaggcccgcaccgatcgcccttcccaacagttgcgcaccctgaatggcgactgggacacgccctgtagcggcgcattaagcgcggctggtgtggtggttacgcgcagccttaccgctacacttgccagcgccctagcgcccgctccctacgctttcatcccttcctttcctgccacgttcgccggctttccccgtcaagctctaaatcaggggctccc

SEQ ID NO: 10622 - DNA, 404 bp, Bos taurus
  Clone ID: 46-BOVMS1-017-Q1-E1-D6
tgcaggctgagatcgatgagctgagggccaccctggagcagacagagaggagcaggaagatcgcagagcaggagctcctggatgccagtgagcgcgtccagctcctgcacacccagaacaccagcctgatcaacaccagagaagaagctagagacagacatcacgcaaatccagggagagatggaggacattctccaggaagctcgcaacgcataagagaaagccaagaaggccatcactgatgcagccatgatggctgaggagctgaagaaggagcaggacaccagcgcccacctggagcggatgaagaagaacatggagcagacggtgaaggacctgcagaaccgtctggatgaggctgagcagctggccctgaagggcgggaagaagcaaatccagaaact

SEQ ID NO: 10623 - DNA, 443 bp, Bos taurus
  Clone ID: 46-BOVMS1-018-Q1-E1-D10
gtgaacatcaagaatggagatgattatgcattttaacccttaaataaaccaataagaagtgcatcatttattaacatttaaaaccgctgtagaggtctcctggttttgattatcaatgaaagtaaaacacactgaccaggaattttttttaaaaatttgacccattatttgaatgttttcttcatgaaggtagttgactttatcctgatatttttctttacctgaaggagggccatttatttttcattttactacttttatctttgcatgcttcttaaggtaaaaaatgtctctgatgtatttccaatgtgagggtgggattaacaagtcctagaactcgcaggagtgaatgactgcacttgaaataaaagcagtgtactgatcatccaacctaataaagacatgaatgcagaaaaaaaaaaaaaaaaaaaaaagggcggccg

SEQ ID NO: 10624 - DNA, 378 bp, Bos taurus
  unsure (364): unsure at all n locations; Clone ID: 46-BOVMS1-018-Q1-E1-D6
taaaaaggtaggacttggtttaaagtaccctattttgtaaatcattccatttgaaactttttaactgtgctgacatctgttgttttagtgagactctaaaatgagcagaaatagacttttagagtagaatgagtataaaaagcatctctgattttccaggagctgtaaatcaaggttttaaaaagatgtttggacatatttgagtattcagatcatgaaaatagaaattgctgtgctaactgaaaggacagactgatgggaaactgtacaactggtagacttaacctttaagcagacagtgctgtaaaaactaatggcttctttgatatttattgtaagttttagtactgatctttttttcaanagcttgcacactcc

SEQ ID NO: 10625 - DNA, 366 bp, Bos taurus; identical to SEQ ID NO: 1154
  Clone ID: 46-BOVMS1-020-Q1-E1-D10

SEQ ID NO: 10626 - DNA, 244 bp, Bos taurus
  Clone ID: 46-BOVMS1-020-Q1-E1-D6
tgacaactcagatcatcatggatgtactgaaacaatatggtggactgtatagcctgagtttagggaatgaatttggatacgactctgctaccgtggatatacatattcaatccatttaagacggcctgtgctctcacactcagactcattcttaagctttcccagatgattcacatagactaatccatccatctatctgatatgtgaagacttacccggaacagtcatttagtatcatgctaat

SEQ ID NO: 10627 - DNA, 448 bp, Bos taurus
  Clone ID: 46-BOVMS1-021-Q1-E1-D6
ccaggcccaacagcgccggccctaccgcaggcggaggttcccaccttactacatgcggagaccctatgggcgtcgaccacagtactccaaccctcctgtgcagggagaagtgatggagggtgctgacaaccagggtgcaggagaacaaggtagaccagtgagacagaatatgtatcggggctacagaccacgattccgcaggggccctcctcgccaaagacagcccagagaggacggcaatgaagaagataaggaaaaccaaggagatgagacccaaggtcagcagccacctcaacgtcggtaccgccgcaacttcaattaccgacgcagacgcccagaaaaccctaaaccacaagatggcaaagagacaaaagcagccgatccaccagctgagaattcgtccgctcccgaggctgagcaaggcggggctgagtaaatgccggcttac

SEQ ID NO: 10628 - DNA, 386 bp, Bos taurus
  Clone ID: 46-BOVMS1-022-Q1-E1-D10
attaggtacagctgttgctccttagcaggctatgaagtttcaatgcttcatgtctcttcactacataaagtgccatttcatgcattcatttcttttgcagtaaagcttcagttttttccctgagcgtaattttcccactgtggattttaagaatagatcacacatggacaatgaaacaggacattgtttggccattgcatattgactatgaaaattgcatttaccactgtatcatttatcagcacactttgataaatcatatcattcaacgttaagttcatatttttaggaacaatatccaagcgtggatttaagttgacgacacacattgtgtacctgaataacaatacacatatatacttactatctcatgcatacctacaaaa

SEQ ID NO: 10629 - DNA, 399 bp, Bos taurus
  Clone ID: 46-BOVMS1-022-Q1-E1-D6
aaaaaaaaaaaaaaaaaaaaaaaaaaaaaaaaaaaaaaaaaaaaaaaaaaaaaaaaaaaaaaaaaataaaaaaaaaaaaaaaaaaaaaataaaaaaaaaaaaaaaaaaaaaaaaataaaatataaaaataaataaaaaaaaaaagggggggcccctcaaagggttcaacttttactttcccttgattgaaatttaaaatcctttcaaaggtttccctaaatttaatttcaggggccttctttttaaacatttttaatgggaaaacccctggttttaccaaatttaacccctttgaaaaaaacccccttttcccaagttggtttaatagcaaaaaggcccacattttttgcctttccaaaaatttcccaaccttaaatggaaattggaacccccctttta

SEQ ID NO: 10630 - DNA, 450 bp, Bos taurus
  Clone ID: 46-BOVMS1-023-Q1-E1-D10
ggggccacccacgcgtccggatcctacagttttgaattcatcctacagaagtaaccataaaactcaagaggggtaggtgaacaggcgccagaactgtcattgacaacggatatgacatttcccagcagtgacaagtggaatcccttgtaacatagtatttgtctgctctgtgtcggtgtgttaaccaggcctgccagttcccttctcttgtgattctgaggactgttcctccagagcttagctggctctaggggagcatggaggccactgtgcccacaggcagaaccagagttccacgcaatgctcacctgagtcacaggatcccctattactgtattctagctacaatgttatattacatagtataatgagacgatatcaagagtacacatgtaatgatgatgcatattaacattctcataggagtggttagagaagccgatgcctcat

SEQ ID NO: 10631 - DNA, 253 bp, Bos taurus
  Clone ID: 46-BOVMS1-023-Q1-E1-D6
ccacgcgaccgaaaaacatggagcagacggtgaaggacctgcagaaccgtctggatgaggctgagcagctggccctgaagggcgggaagaagcaaatccagaaactggaggccagggtgcgtgagctggaaggagaggtagagagtgagcagaagcgcaatgtggaagctgtcaagggtctgcgcaaacacgagaggagagtgaaggaactcacttaccagacggaagaagatcggaaaaatattctcagact

SEQ ID NO: 10632 - DNA, 339 bp, Bos taurus
  Clone ID: 46-LIB188-001-Q1-E1-D10
accagagcgcggcggtgagcagggccccgatgaggaaggcaccaaaggtgatgcccagcacggcaggtaggacgaggcctttgtcatgcaggctggtgctgatgatgttcaggcgtgtggagacagtcttgtggacttccagggaccgaatcctgggatgcatagtcacagagcagctgaggatgccagtcgtgggcatgggcaccatgtagccgcggaggaggaagctgaagcgtatgtcaccactagggctcggggacagcaggctcacgcagctgctcttggcttcctggccctggatgagttccacgatttccatgtcgggccccaggttcagtt

SEQ ID NO: 10633 - DNA, 411 bp, Bos taurus
  Clone ID: 46-LIB188-002-Q1-E1-D10
actgatgtagaagtcaaatgaacaaaaatacacaatacagctcaacagcagaggagtatctctcctcaaattctcctagcaccatcaagattcttcaagtatctgaaatactgttaattagcaccttcgtattttgaacaaacaagcacaaatacctcagctcatctctggtcagcagctcacggtgtggatcacactcacaggaaagtgttttgaggtagtttaaacctttggaagtttgggttttacacttcactccgtggaagatattcaaaagccacaagtggtgcaaatgttcatggtttttatttttcaatttgtactttagatttcttacaaaggttgacattttccacaacacgtgtcagagtgttgaaaaggagaattccacatcttttggataggggaaag

SEQ ID NO: 10634 - DNA, 430 bp, Bos taurus
  unsure (341),(347)...(348),(354)...(355),(361),(392),(411): unsure at all n locations; Clone ID: 46-LIB188-002-Q1-E1-D6
acacaactgcaactctacataaatgccacagatgcagaatactgttttcttgctctatttacacagcggatatacctactctaacaaaggaggtggggggaaatgcacaggaaactcaggccaatggggagcgagaagagaacgaagaagtgcagcgcatgcgtcagtcgatgtgtaacagtcagaagcggaacagttcagaacaaagcctgccctgtcaaaggaagagctaaaagacagttatataaaaatcaaggtgggctttcagactggctaacacaacaacattccatgagtagatggtattgtctgattgtatttttgtttatccatttcattgngagcannggacannatgtanaatctacaccttgcttatcaggactgttganagagtgctctgccttttanaaaaatttggggggggggt

SEQ ID NO: 10635 - DNA, 290 bp, Bos taurus
  Clone ID: 46-LIB188-003-Q1-E1-D6
ggatactcaagagacaaagtgtttcacatcatagattccacttccaaatccttggaatgttcatttctttggctataaagagggactagccgggaaagccaggtaatgcgtaggaaactaaactaacaaaagagcgggtggggcgggcagcgctaatgtcatcctcccggggacgggcacaggggctgttagccgcgggctgactgcggagaactgttagctggagcacggagcagccgtcctcgatgcttgggctgtcgcggggcttcagtcatccccaccacacaggt

SEQ ID NO: 10636 - DNA, 256 bp, Bos taurus
  Clone ID: 46-LIB188-004-Q1-E1-D10
actggcgtcagcgtctgctgagctcacggggcgacttactgaaatcctgcttacacccccagcccagatgacggatactccatctccattgggtcttttggtggaccctcaaagggcttctcctccagcgagttcttgctcatttcaaacaagagccactgatgcagccagctctcaaagagcttccagtccaagccatccatggagtccttaaggtgtttcaggttttctggcagactccccttcagctgcgggt

SEQ ID NO: 10637 - DNA, 364 bp, Bos taurus
  Clone ID: 46-LIB188-004-Q1-E1-D6
gatacttcattgaggaagagttagcactaagcaggaaacctttccatgctgtgaagaagctgggacagaaggttcttccttgagtgtgaccatcttcacttcagctcaggagccctgttggctgaagtgtagggcgtcctttctgattcctgaagtagatgaagagccccaccgcaaggaagagcagacccagaacgaagcccccgactccactcatcatcttgctctgagcagagtcagaccgtgccctccattctactgtgatagggcttgtctggctggggtgctccacttggcaggtgtagacctctccactctgaggaactgtttcaagcatcaccatggtctggaaggtccagtctcc

SEQ ID NO: 10638 - DNA, 390 bp, Bos taurus
  Clone ID: 46-LIB188-005-Q1-E1-D6
accggctggagcatggcaggcggctctggcttcccacccttctgttcagagatgggggtggtgggcagtatttcatctttgggttccacaatgctcacgtgatcaggcagaggcttcttaaggccaatcttaccagtcgggtcccaaggcagcatgatctttaccttgatgcccaccacaccctgtctgagcatcacatggcgcacggcggtgtccacatagtagttaacagggtccccactgtggatcatgaggccatccacaaacttcatggatttagccctctgtcctctaagtttcccagacaccacgacctcgcagcctttggccccactctccatgatgaaccgcagcacaccatagcaggccctccgcacagcaatgcctcct

SEQ ID NO: 10639 - DNA, 390 bp, Bos taurus
  Clone ID: 46-LIB188-006-Q1-E1-D10
acagttgcatctggaaaaaggtgctagaacagacttaagaaacaatgagaagaagctggccctggacatggctactaatgctgcctgtgcatctctcctgaaaaagaagcagggaacagatgcagtccgatcattaagcaatgctgaggactatcttgatgatgaagactcagattaattcccttccggagctttgagatctaaaacttctgttgcttttgccattccaaaaccttgtctttgtcagaagagtgttgataactgtaaaaaaaaaaaagaaaagtctatatgaacgtggcagtattgcactgtgtttgaataaaacctgtaagtgactagttctcaccttcagtttgccaataagtgactggatattttgctgtataaagt

SEQ ID NO: 10640 - DNA, 401 bp, Bos taurus
  Clone ID: 46-LIB188-006-Q1-E1-D6
catgctacctaccgcgatgggcgcgggatactgagtgtcctggggcctccggaggaagaaccggtcctggaagagctcgtccatgatgctggacgcccgggtgaagctgtcctccatgacgtccatcacgtggctctgctcccggtcattctccatcagggaatcgatgcggtcaccgttgatccagaagtagaagggggagctctggtttaggaactcctcaagctggtggccaaccagtcccgatccgcttctgcacacccgcgcgtagaacttcatgcaggtctgcttgaggcagggcttacattcctcccaaagggctgtcatggcctcattgcacaccccctgggacgccttcagcttgttttcagaatccctggtgtcattcagggcgtcctctt

SEQ ID NO: 10641 - DNA, 385 bp, Bos taurus
  Clone ID: 46-LIB188-007-Q1-E1-D6
gggcccgggatacatcatgttgggatcatgccggacacccatgaagttgtagttccacgaggactgggcaggcaccataaagaagccaaggaagcgatccgacagtagcatctggaccctctcgtagtgcgagggtaggtagcctttggggttgttgcccttgtctgtgttctggcggccccattcatagccactgggggtcagcttgtaggctgtcagggtgcaggagcctggtgtgaagctgcaccctttatctactatttggtgcttgggccggtatagtaggaacagctctaagccttctaattcgcgctgaattaggccaacccggaactctgctcggagacgaccaaatctacaacgtagttgtaaccgcacacgcatt

SEQ ID NO: 10642 - DNA, 422 bp, Bos taurus
  Clone ID: 46-LIB188-009-Q1-E1-D6
accgtgccttgtttttgacactctcctggtcgtcatacgccacccactggttgcccttggtggcataggggacctgctggtcacggaatctgtgggtggtggctccgtggaggaagtcacagatctcataataggcaaggatccctttctccttggtgaactggcctggaattcctggccctgagatgggggctcccacatctgtcttggaagaggccacagtgtagctcctcccaaaagtggggatacccatcaccagcttattggctggagcccccagcctcagcatgtagctcacagcgtagtcagcgttactgaatctgtcagaacttgcatcttcctggcctcgaaacagggggctgtggtgtccgactgtctggcgccaggctccgtgaaagtcataggtcaaaaagctgatgaag

SEQ ID NO: 10643 - DNA, 423 bp, Bos taurus
  Clone ID: 46-LIB188-010-Q1-E1-D10
accagcagaagccgggccagggccctactagagtcatttataaaaataacattcgaccctcgggggtctctgatcggttctctggctccaactcaggcgacaccgccacgctgaccatcagtggggcccagccagaggacgaggccgactactactgtcaatcaagtgataacaatgagaatgctgttttcggcagcgggaccgcagtcaccgtcctacgtcagcccaagtccccaccctcggtcaccctgttcccgccctccacggaggagctcaacggcaacaaggccaccctggtgtgtctcatcagcgacttctacccgggtagcgtgaccgtggtctggaaggcagacggcagcaccatcacccgcaacgtggagaccacccgggcctccaaacagagcaacagcaagtacacccaac

SEQ ID NO: 10644 - DNA, 408 bp, Bos taurus
  Clone ID: 46-LIB188-010-Q1-E1-D6
actgcgatccgaatcaccacttgaacagaaataatccgcctcgtcctcagcctggagcgaggtgatggtcagggtggctgtgttcccagacttggagccggagaagcggtcggggaccccagaggctcgactggtcgcaccatagataatagttctgggggccgatcctggaatgtgttggaaccagcttactttattgccacgcccaacgttgctgctgcttccagagcaggtgatggagaccctctggcccagggacccggacacggaggacggctgagtcagcacagcctgggcccaggatcctgtgcagagagcgaccagggtgaggagcagagggggagtatttctgtgcatattgagacagtggtagtaatgatgttcttttcggcagcgggaccacactga

SEQ ID NO: 10645 - DNA, 449 bp, Bos taurus
  Clone ID: 46-LIB188-011-Q1-E1-D6
gccacgggcgcgggatacttatgatcggccagcccaccgggcactttgacaagcttgttgttgttcaaatgaagttccctcaaatgaggagtgttggccaaagagccattgtcaaccgcagagatgctgttgaaactcagtcccaacttagccaaattattcagtcctttcaggctagctgcatcaactttggtgattttgttgccatcgagatgtaattcagtaagggaaggaggaagaccttgagggatggtagttatatttgtgtcagcaatgcggatgtaggagagcttcttcattccctgaaaggctccattttcaatgcctgagctcttcagcgggttggtgccaatttcaaccacgatgaactggttcaatccattgatcacagactttcgcactttggtgatctcgttctcatggaaacgcagctcctgaagagttttggg

SEQ ID NO: 10646 - DNA, 429 bp, Bos taurus
  Clone ID: 46-LIB188-012-Q1-E1-D10
acctgctgcccttcctgtccctgcacatcatggacttcctcctgtgcctgctcaccctgatgggctcttacatcgaactgcccgcctacctcaagtttgcctcccggagcagcaggcgggtgagcccctccaaggtcccactgatgaccctacagctgttggacttctgcctgagcatcatgaccctctgcagctcctacatggaggtgcccacctatctcaacttcaagtccatgaaccacatgaattaccttcccagccaggacggtatgactcacaaccagttcatcaacataatgatcatcttttccatcgctttcatcaccgtcctcatcctgaaagtctacatgttcaagtgtgtgtggagatgctacagactgatgaagtgcacgaactccgctgaagaaatgactggttccaagatgctac

SEQ ID NO: 10647 - DNA, 443 bp, Bos taurus
  unsure (423): unsure at all n locations; Clone ID: 46-LIB188-012-Q1-E1-D6
gccatgggcgcgggataccaaaagaccttcctcctgatactgcgctgctggacctgcaaaacaacaaaataactgagatcaaagatggagactttaagaacctgaagaaccttcatacactgattctcatcaacaacaaaattagcaaaatcagccctggggcatttgctcctttggtgaaattggcacgactttatctttccaagaatcaactgaaggaattgccagagaaaatgcccaaaactcttcaggagctgcgtgtccatgagaacgagatcaccaaagtgcgaaagtctgtgttcaatggattgaaccagatgatcgtcgtataacttggcaccaacccgctgaagagctcaggcattgaaaatggagcctttcatggaatgaagaagctctcctacatccgcattgctgacacanatataactaccatccctcaa

SEQ ID NO: 10648 - DNA, 385 bp, Bos taurus
  Clone ID: 46-LIB188-013-Q1-E1-D6
acttatgatcggccagcccaccgggcactttgacaagcttgttgttgttcaaatgaagttccctcaaatgaggagtgttggccaaagagccattgtcaaccgcagagatgctgttgaaactcagtcccaacttagccaaattattcagtcctttcaggctagctgcatcaactttggtgattttgttgccatcgagatgtaattcagtaagggaaggaggaagaccttgagggatggtagttatatttgtgtcagcaatgcggatgtaggagagcttcttcattccctgaaaggctccattttcaatgcctgagcccttcagcgggttggtgccaagttctacgacgatcatctgggtcaatccattgaacacagactttcgcac

SEQ ID NO: 10649 - DNA, 270 bp, Bos taurus
  Clone ID: 46-LIB188-014-Q1-E1-D10
acttctccttagagttgggcacacacttgtccaggccctggtcatcgccagcacacaaggcacagagtctggatttcgagtcagccccaagggcacagctctgactacacaattcatcatgtgcgcaggagcctgtctggttgaccatcaggcccatggggatgttccagcctgcactcctgtccacggcggtgtgggacgacgtcgtgtctttcagagaattccatgtgagcccctcatttgctttcttgacaactgccacggcaaggt

SEQ ID NO: 10650 - DNA, 418 bp, Bos taurus
  Clone ID: 46-LIB188-014-Q1-E1-D6
acaagcttattttttttttttttttttttttttttttttttttttttttttttttttttttttttttttttttttttttttttttttttacaaaagcaggtttattggtcgggctgctcaccaagacacagcaacacgagaggctccccaaagcccacaggaaactgtatctgcccaaaactcaggccccttcagcaccaaggaacctcgtcccaaaatccccatcctccctcagctgatgtgtccccaaccatttggaaaagagaagggaaccaagggtggggggggagcaaagctttgtgttgtaaaaaaggtgtgtccccggactccctccctccagcccttaaaacaattagctgcaattttccaaaatgcagagcaaggaagataaggcaaaaggggttaagggaaaaagggg

SEQ ID NO: 10651 - DNA, 369 bp, Bos taurus
  Clone ID: 46-LIB188-015-Q1-E1-D6
acacgcgcggcaaccactgggctgtcggccacgtagtgggaaaaatgagtgtggcagagtccccacaacttcatgaggaggagagccggaaggagcagctgagggagtatgcccagtgggaagaagcgacatggaacttgctaagcctcctacaagcaaagggggcccgatgccaccagatgcctccatgggagcccctgagcattcaccaggctgcctgggattccgaggacgtcagcaacttcaaagacacaggtcctcagcatgaaagaaggtacccccagctgaactgacaatgacgatggtcgcctccctcaaagacgcacttcaaaatccttatgaaactgcgttctatgggcatcagttcta

SEQ ID NO: 10652 - DNA, 374 bp, Bos taurus
  Clone ID: 46-LIB188-016-Q1-E1-D10
acatgaataattaaattatttgtgccctcgaagttgtgtgacaattcaatacccatgtatgaacataccaatgcaatattccaaatgactgcgcatcgccccataggaggacgcggccatcatcgatgacacctctaaatgacaggatcgatcctgaatacagactaactgtgtcccagggggtgtgcacttacaccatgacagacctttgctaggaatgtaagccctgcctcaagcagacgtacatgatgttctacgcccggctgtgcatatacgaatctgaactggttggttatcaccttgacgaattcctaatacacagttaccccttctacctcgggctcaacggtaaccgcatctattcactgatggac

SEQ ID NO: 10653 - DNA, 413 bp, Bos taurus
  unsure (321): unsure at all n locations; Clone ID: 46-LIB188-016-Q1-E1-D6
gccatggcggcgggataccgtgcctagtttttgacactctcctggtcgtcatacgccacccactggttgcccttggtggcataggggacctgctggtcacggaatctgtgggtggcggctccgtggaggaagtcacagatctcataataggcaaggatccctttctccttggtgaactggcctggaattcctggccctgagatgggggctcccacatctgtcttggaagatgccagagtgtagctcctcccaaaagtggggatacccatcaccagcttattggctggagcccccagcctcagcatgtagctcacagcgtantcagcgttactgaatctgtcagaacttgcatcttcctggcctcgaaacagggggctgtggtgtccgactgtctggcgccaggctccgtgaaa

SEQ ID NO: 10654 - DNA, 248 bp, Bos taurus
  Clone ID: 46-LIB188-017-Q1-E1-D6
acaagctttatttttttttttttttttttttgtttttttttttttttttttttttttttttttttgttgatttttatttatttttattatttgaataatctcccccaacaattgagggccacggttcatcagtcagatctcggggaaatcaggctctggaccagaggaagaagacgcgcccccatcacaggaggggcaacaggtccaccacacgggcccaaaacctccaacccaaggccagggcaagg

SEQ ID NO: 10655 - DNA, 346 bp, Bos taurus
  Clone ID: 46-LIB188-018-Q1-E1-D6
catgatcccgagcgcgatggcggcgggatactgaagacagccctcatccacgatggcttagcacgtggaattcgcgaagctgcgaaagctttagacaagcgccaagcccatctgtgtgtgctcgcatccaactgtgatgagcctatgtatgtcaagttggtggaggccctttgtgctgagcatcaaatcaacctgattaaggttgatgacaacaagaaactaggggaatgggtaggcctctgtaaaattgacagagaggggaaacctcgtaaagtggttggttgcagttgtgtggtggttaaggactatggcaaagaatctcaggccaaggatgtcatcgaggagt

SEQ ID NO: 10656 - DNA, 427 bp, Bos taurus
  Clone ID: 46-LIB188-019-Q1-E1-D6
acagcgccgaatctaccttcgaggggatcctcaaaaacccaagagcagagtctttgaacagcaggtccctctggccgggtggagagccaaagagctggaagctccgagacttgttttttccaaatttctcctgcgccttgctgagaagcttccagatcaagtcttccttgccatccacacttcgggccacgacagcatgagaagggacctgggccaggtggcactccttgaacgcatccactggcgcccgactgttgttcaggcagagaagctcatactggtccctgtcagccttctctggcaagttctcaaacactgtcgtctctttaacaaaagccacgtctccagccccgtcctgcagacacttgaaggcaccagaataaccgaagtatggttcccgggaggagcaagcacactgggtcctccc

SEQ ID NO: 10657 - DNA, 373 bp, Bos taurus
  Clone ID: 46-LIB188-020-Q1-E1-D10
gccatcatggccttctttctgtctctgggcctggcgctgggggccgtcttctccttcctgttccgggcaatcgtgtgaccgcggatggacggcaggatggcaccggctgcctgttcctgccttcccctttaggggtgggcaggggtcctctggaggttttcttgtctagccatcttctgcttgctcatggcctgtgctgggcccggcatccaggccccgaggagagagcctctgtggatggacatggggacactgtgggctggagggtcagagccaagggaggggatgcagtctcttggccctgaccagtgcctgcccgggcaggggttcctaggctcagagagtgagttgtgtgtcctgtctgtctgcctgt

SEQ ID NO: 10658 - DNA, 438 bp, Bos taurus
  Clone ID: 46-LIB188-020-Q1-E1-D6
catgcaccctaccgccatgggcccgggatacaaaataaagtttttctcatacaaaaagatatacaattaaaaaacaaaaaatgaaaccaccttcagcccacatactttttcagaaaagggtagagcgagctcagagctctgacacaggacagtgaacaaagtgctaaggcggagagtgactgaccaagtgctagaggctgcagtgagacaggagctgtcaacaaccctgtctcctaacactgggcaggagtgagcccttggggcttctgtgaagatctgccttccggtttctcatggcaacatctggatgctctcatcacagtgttggggcattttatctagggttcctccttgggtttggagaagtcacagtgggcaaggctgatagcagcaacccttacgtaatcagtgtcagaactgcagaattccgtacgatgg

SEQ ID NO: 10659 - DNA, 427 bp, Bos taurus
  Clone ID: 46-LIB188-021-Q1-E1-D6
gggatacttatggaggggactgggacctggggatataagggtcccaggaggacactgccagggggccagtgcagtgctctggggagagggggctcaggaagagaggaggataagaacagtgagaaggaaggatccctgggttgggaggcaggcccagcatgggtcagccatgcttcctcctggctgtgtgaccctgggcaagtcccttcccctctctgcgaaacagtagggtgagacaatccattctctaagaccccttttagatccaagtccccatagttctgtggagtcccaggagaggccaccgagggtccctggcccccttgggcgcagagctgacactgagtccctcagtggccccctgagtatacccccttagccggagccccttccccattcctacagccagaaggggacctggcctcaa

SEQ ID NO: 10660 - DNA, 366 bp, Bos taurus
  Clone ID: 46-LIB188-022-Q1-E1-D10
accgggatagccacgtgaattcacacctgcatacacggcagcactgctcgctctttgacgtgtcccacatgctgcagaccaagatatttggctgtgaccgggtgaagctgatggagagtctagtggttggagatattgcagagctgaagccaaaccagggaacactgtcgctgtttaccaacgaggctggaggcatcttagatgacttgattgtgaccagcgcctccgagggacacctgtatgtggtgtccaatgctggctgcagggagaaggacctgaccctcatgcaggacaaggttagggagcttcagaacaagggcagtgatgtggccctggaggtgatggataatgctctgctagccctgc

SEQ ID NO: 10661 - DNA, 445 bp, Bos taurus
  Clone ID: 46-LIB188-022-Q1-E1-D6
actgagtgtactggggcctccggaggaagaaccggtcctggaagagctcgtccatgatgctggacgcccgggtgaagctgtcctccatgacgtccatcacgtggctctgctcccggtcattctccatcagggaatcgatgcggtcaccgttgatccagaagtagaagggggagctctggtttaggaactcctcaagctggtggccaaccagtcccgatccgcttctgcacacccgcgcgtagaacttcatgcaggtctgcttgaggcagggcttacattcctcccaaagggctgtcatggtctcattgcacaccccctgggacgccttcagcttgttttcagaatccctggtgtcattcagggcgtcctctttcttcttcttggcttcctctagggagctgagcagtaatttgcgctcttcattggtttgttctatttgggtcct

SEQ ID NO: 10662 - DNA, 403 bp, Bos taurus
  Clone ID: 46-LIB188-023-Q1-E1-D10
gccacggcggcgggatacaacgccgaatctaccttcgaggggatcctcaaaaacccaagagcagagtctttgaacagcaggtccctctggccgggtggagagccaaagagctggaagctccgagacttgttttttccaaatttctcctgcgccttgctgagaagcttccagatcaagtcttccttgccatccacacttcgggccacgacagcatgagaagggacctgggccaggtggcactccttgaacgcatccactggcgcccgactgttgttcaggcagagaagctcatactggtccctgtcagccttctctggcaagttctcaaacactgtcgtctctttaacaaaagccacgtctccagccccgtcctgcagacacttgaagggcacagaataaccga

SEQ ID NO: 10663 - DNA, 424 bp, Bos taurus
  Clone ID: 46-LIB188-023-Q1-E1-D6
ggccgccggataaaggccctacatagaacatacagctgagtgggagtaaacaaaaagacaaacacgcgtgttaacggctgtgcgcgagcactcgggatgaaagcctgagcaggaacggcctcaccgcagcgttgatgctgggcaaatagatggtgatggcaacggtgtagaacacgtgttcaaagactaaccctaaaacccagagtaaacatctatgctcagagttagcataatttggagctattcaggaattgcagagaaatgcattttcacagaaatcaagatgttatttttgtatactatatcacttagacaactgtgtttcatttgctgtaatcagtttttaaaagtcagatggaaaaagcaactgaagtcctagaaaatagaaatgtaattttaaactatccaataaagctggaagaag

SEQ ID NO: 10664 - DNA, 399 bp, Bos taurus
  Clone ID: 46-LIB188-024-Q1-E1-D6
acttctccttagagttgggcacacacttgtccaggccctggtcatcgccagcacacaaggcacagagtctggatttcgagtcagccccaggggcacagctctgactaaagaattcatcaaatgcgcaggagcctgtctggttgacgatcaggcccatggggatgttccagcctgcagtcctgtccacggcggtgtggcacgacttcttgtctttcagagaattccatgtgagcccctcatttgctttcttgacaactgccacggcaaggtactgcccgcagtgcaaacagcaccgcgaggcctccaagcagctgctgctgtggcgcctgcccaacgtgctcatcgtgcagctcaagcgcttctccttccgcagcttcatctggcgtgacaagattaacg

SEQ ID NO: 10665 - DNA, 270 bp, Bos taurus
  Clone ID: 46-LIB188-025-Q1-E1-D6
acatctccatagagttgggcacacacttgtccgggccctggtcatcgccagcacacaaggcacagagtctggatttcgggtcagccccaggggcacagctctgactaaagaattcatcaaatgggcaggagcctgtctggttgacgatcaggcccatggggatgttccagcctgcagtcctgtccacggcggtgtggcacgacttcttgtctttcagagaattccatgtgagcccctcatttgctttcttgacaactgccacggcaaggt

SEQ ID NO: 10666 - DNA, 412 bp, Bos taurus
  Clone ID: 46-LIB188-026-Q1-E1-D10
acattgaatcttctccacaaacaggatggtaattaatcatggttcctcttctccaatgtatcagatttaagttaattttatgacttacggagctcaagcctagctggtctgaatgaatcaagcactgaggggtttggggcaaagctcagtggagaagaggccctaggtctgggctccaggtcctacctgtgtcacctacctgctggctgactgaccccgatcctacaagtgtcaggtttccaaggctgcatttgtctgtacagcgccgaatctaccttcgaggggatcctcaaaaacccaatagcagagtctttgaacaccaggtccctctggccgggtggatagccaaagagctggaagctccgagacttgttttttccaaatttcgcctgcgccttgctgataagcttcc

SEQ ID NO: 10667 - DNA, 249 bp, Bos taurus
  Clone ID: 46-LIB188-026-Q1-E1-D6
ccgcgggatacctaatatctggtttacatcaaggaatccttcgatatgatcgcgtctcctcatgtgttgttgcaggaccatctcacatcggggtcgtcaccatcagtacatccttcgaggttgtcttcctcacgaagtcagctgtcctgtcttgtctggtcagaaaccggtcctcctatgatggtgtgcacatcatttggtcacatcagaacggcaacgacctatagacccacacttattttgagcgac

SEQ ID NO: 10668 - DNA, 398 bp, Bos taurus
  Clone ID: 46-LIB188-027-Q1-E1-D10
acagcgcagaatctaccttcgaggggatcctcaaaaacccaagagtagagtctttgaacagcaggtccctctggccgggtggagagccaaagagctggaagctccgagacttgttttttccaaatttctcctgcgccttgctgagaagcttccagatcaagtcttccttgccatccacacttcgggccacgacagcatgagaagggacctgggccaggtggcactccttgaacgcatccactggcgcccgactgttgttcaggcagagaagctcatactggtccctgtcagccttctctggcaagttctcaaacactgtcgtctctttaacaaaagccacgtctccagccccgtcctgcagacacttgaaggcaccagaataaccgaagtatggttcc

SEQ ID NO: 10669 - DNA, 428 bp, Bos taurus
  Clone ID: 46-LIB188-027-Q1-E1-D6
accaccgaacacagcgacacagagacctacacactcttcaccacggggacatttaatggcatctcccaacactccgttgtcttgggaagacagctccaccgaaaaacgtaaaaagtgcagcacagcaagaaggcaattagcctcaaagaagcaacaagtgtaagtttatcagatggcacgagcaagggagacaggtcgcgggtcctctctctccatgacagaggcgttagctcgctgtcaaccgcaagagaggccgtctgccacgtcaggctgacgagacaagtcttcttcctgagcccctacgttcgtggagtgagattaactaatatttcctgcagaaacgtcatgcaacttaaagcgaaaaacaaatcaagcctgtgaatactgctgtgtgagtaaggggtctgtcagtttatcctcagcattcg

SEQ ID NO: 10670 - DNA, 385 bp, Bos taurus
  Clone ID: 46-LIB188-028-Q1-E1-D6
acttcgaagctctggattgccttccagaagatggggacccctttcccaaccctgaggactgtgcaccgagacgctgccgctatgatgggcaaaccgcagtgttcgggaccaattttcaggagaagctgagccaccagcactacctcctgctgggtgctggcgctgttggctgcgagctgctcaaaagctttgccctgatgggcctgggggccggggacggtggaggcgtgactgttgccgacatggaccatgtggagctctccaacctcagccggcaattcctcttcaggtcccaggacattcataggaaaaaggcagacgtggctgcagaggccactcgccgcctgaatgcagacttgcaggttaccccactcaaactccaact

SEQ ID NO: 10671 - DNA, 362 bp, Bos taurus
  Clone ID: 46-LIB2809-003-Q1-E1-D6
atgcaccggaagcatggccgcgcgatacagcagaaaggcctgaatgggcatatctctctggggatagggcactgctttctggggaacaggcatgactttggactgagaaagggacatcaccgactgaggaggaaacatgacacttggaggaacaggctggtgatgctggtgcatccaagactggaccagaggcagatgaaggtgcagattttcaacatcaatgagagtcaggctctggctttcagtaaaaggctcaactggatatttaaggaacggcatttctttgtgcttaggaaccatatcctccttcactttgaatactcccattacttcaggctgagtgaaacgttgcaccaccacag

SEQ ID NO: 10672 - DNA, 434 bp, Bos taurus
  Clone ID: 46-LIB2809-004-Q1-E1-D6
ccggacgccatggccgcccgatacagcagaaaagcctgaatgggcatatctctctggggatagggcactgctttctggggaacaggcaggactttggactgagaaagggacagcacggactgaggaggaaacatgacagttggaggaagaggctggtgaggctggtgcatccaagactggagcacaggcagaggaaggtgcagattttcaacatcagtgagagtcaggctctggctttcagtaaagggctcaactggatatttagggaagggcatttctttgtgcttaggagccatagcctccttcactttggagactcccattacttcaggctgaacgaaaggcggcaccaccacaggggtttgagtaagaggagggatgttttgtgggaggctgttatggattggcccagggaagggatagactagagactg

SEQ ID NO: 10673 - DNA, 442 bp, Bos taurus
  Clone ID: 46-LIB2809-005-Q1-E1-D6
acactaccaaaatgttaattgagaaaagctgaaaagttttagtttactcaatatcacatgctagaagaaagtttgcatgagaaaacactgaagaggtaattttttaatccagatttcacaaactcatggtgcaaattgggtcccatagcttcctctagagtaataactgcttttcactgcttgttggctgcctgtgaaaatttgaaataactcaaaagctactaacaaaactagtcatatccacccatgctgttctggccaccatagccagccccgtaacagccgctcacagactggctctcaaggccactgtaagtggactgggttgacacccccatgccttgcatcatctggctgctatatgccccgttgctggcccctgttgtggaatttaagaaaagttctatgtatcgatgttgcatattggccctgtctttggaca

SEQ ID NO: 10674 - DNA, 434 bp, Bos taurus
  Clone ID: 46-LIB2809-008-Q1-E1-D6
gcatgctaacaaccgccatcggcgcgggatacagcagaaaggcctgaatgggcatatctctctggggatagggcactgctttctggggaacaggcaggactttggactgagaaagggacagcacggactgaggaggaaacatgacagttggaggaagaggctggtgaggctggtgcatccaagactggagcagaggcagaggaaggtgcagattttcaacatcagtgagagtcaggctctggctttcagtaaagggctcaactggatatttagggaagggcatttctttgtgcttaggagccatagcctccttcactttggagactcccattacttcaggctgaaggaaaggcggcaccaccacaggggtttgagtaagaggagggatgttttgtgggagactgttagggatgggcccagggaacggatacact

SEQ ID NO: 10675 - DNA, 403 bp, Bos taurus
  Clone ID: 46-LIB2809-009-Q1-E1-D10
accccagatggaaattgttcccaatagtgctgaggaacgacttcacagtatgaaagagggaatccatgcccaacagaaagaacctatgataggagtgaatcaggaactggcctacttctaccctgagcttttcagacaattctaccagctggatgcctatccatctggtgcctggtattacgttccactaggcacacaatacactgatgccccatcattctctgacatccctaatcccattggctctgagaacagtgaaaagactactatgccactgtggtgaagagtcaagtgaattctgagggactccacagttatggtctttgatggttctgaaaattccatgctctacatgtcttttcatctatcatgtcaaaccattctatccaaaggcttcaactgc

SEQ ID NO: 10676 - DNA, 294 bp, Bos taurus
  Clone ID: 46-LIB2809-009-Q1-E1-D6
gggatacctgttgagattgtggaaagcctttcaagcagtgaggaatctattacacgcatcaataagaaaattgagaagtttcagagtgaggaacagcagcaaacagaggatgaactccaggataaaatccacccctttgcccagacacagtcactagtctaccccttccctgggcccatccataacagcctcccacaaaacatcccgcctcgtactcaaacccctgtggtggtgcctcctttccgtcagcctgaagtaatgggagtctccagagtcaaggacgctatggctcct

SEQ ID NO: 10677 - DNA, 399 bp, Bos taurus
  Clone ID: 46-LIB2809-010-Q1-E1-D10
acaatgaggagagctgtctgggaaagggagaaccatagccttggctcagagccttgaggcacagcctgaagacttcctacttaacatctaggaaggctgctttagtgtttttctaggccacgggcctgtctggaatggagagccaatggcctcctatagataccaatgtgtcatctagaaaggatatgctggattcagtttgccacatctcactaggccgactttgtaaccttgtttgtcacctgtctacactgcttaagcatttgatattgaatgaataatgtagagttgatgaaaactttaaaattaaacatgttttcagtcacatgttatttctttgaaactgaggactctgaattttcaacttattgaatctctaataaacactgttactccaat

SEQ ID NO: 10678 - DNA, 451 bp, Bos taurus
  Clone ID: 46-LIB2809-010-Q1-E1-D6
gcatgcatcccaccgccatgggcccggggtacagcagaaaggcctgaatgggcatatctctctggggatagggcactgctttctggggaacaggcaggactttggactgagaaagggacagcacggactgaggaggaaacatgacagttggaggaagaggctggtgaggctggtgcatccaagactggagcagaggcagaggaaggtgcagattttcaacatcagtgagagtcaggctctggctttcagtaaagggctcaactggatatttagggaagggcatttctttgtgcttaggagccatagcctccttcactttggagactcccattacttcaggctgaaggaaaggcggcaccaccacaggggtttgagtaagaggagggatgttttgtgggaggctgttatggatgggcccaaggaagggatagactagagactgtgtctgggc

SEQ ID NO: 10679 - DNA, 285 bp, Bos taurus
  Clone ID: 46-LIB2809-012-Q1-E1-D6
acagcagaaaggcctgaatgggcatatctctctggggatagggcactgctttctggggaacaggcaggactttggactgagaaagggacaccacggactgaggaggaaccatcacagttggaggaacaggctgctgaggctggtgcatccaggactgtagcagaggcacaggaaggtgcagattttcacgatcagtgagagtcaggctctggctttcagtagaggcctcatgtggatatttagggaagggcatttctttgtgcttaggagccatagcctccttca

SEQ ID NO: 10680 - DNA, 145 bp, Bos taurus; identical to SEQ ID NO: 763
  Clone ID: 46-LIB2809-013-Q1-E1-D6

SEQ ID NO: 10681 - DNA, 434 bp, Bos taurus
  unsure (316),(336): unsure at all n locations; Clone ID: 46-LIB2809-014-Q1-E1-D10
acagcagaaaggcctgaatgggcatatctctctggggatagggcactgctttctggggaacaggcaggactttggactgagaaagggacagcacggactgaggaggaaacatgacagttggaggaagaggctggtgaggctggtgcatccaagactggagcagaggcagaggaaggtgcagattttcaacatcagtgagagtcaggctctggctttcagtaaagggctcaactggatatttagggaagggcatttctttgtgcttaggagccatagcctccttcactttggagactcccattacttcacgctgaangaaaggcggcatcaccacangggtttgagtaatacgagggatgttttgtgggaggctgttagggatgggcccagggaagggatagactagagactgtgtctgggcaaaggggtggatt

SEQ ID NO: 10682 - DNA, 148 bp, Bos taurus
  Clone ID: 46-LIB2809-015-Q1-E1-D6
gataccaccttagagctaactcgtctctgagccctgggccctgtagtgacaatggacatgtaaggactaatctccaggggtgcatgaatggcgctctggacttttgacccttgctcgatgtccctgatggcgcttttaatgcaacagt

SEQ ID NO: 10683 - DNA, 407 bp, Bos taurus
  Clone ID: 46-LIB2809-016-Q1-E1-D6
gggatacaacacatagggaataacctttgtcttaggttgaatccatggcttcatagctttctgatgctgataaacagtcttgagatactggggcaaggcgaatttctggtaacgctggctgatttttttcagaaaatttaggcgattcttttcttcttcagtcagtttagttttcttagtgaatacttctgttgattccatgtcaacggtcttctttgaattttcctcactggtggagagctgctctctgttcagagtgggagtaatgggaacagcatttctcttaacctgatcccatgggttcaaaacaattggaccttgatacagatactggagatactgggggaacttctgataaaactgattgatttcattcagtgctttctggtagtgcttatcgtccacag

SEQ ID NO: 10684 - DNA, 399 bp, Bos taurus
  Clone ID: 46-LIB2809-017-Q1-E1-D6
ggataaagaaccacctgccaagcaagagctgacggtcacaaggaaaggtgcaatgatgaagagttttttcctagttgtgactatcctggcattaaccctgccatttttgggtgcccaggagcaaaaccaagaacaaccaatacgctgtgagaaagatgaaagattcttcagtgacaaaatagccaaatatatcccaattcagtatgtgctgagtaggtatcctagttatggactcaattactaccaacagaaaccagttgcactaattaataatcaatttctgccatacccatattatgcaaagccagctgcagttaggtcacctgcccagattcttcaatggcaagttttgtcaaatactgtgcctgccaagtcctgccaagcccagccaactaccat

SEQ ID NO: 10685 - DNA, 388 bp, Bos taurus
  Clone ID: 46-LIB2809-018-Q1-E1-D10
acaaggaaccgggggcctcagaaagcaagattttccctggtaacatggacaataattcccacaagaagaacatatttgagacgccgttccaggctcgcttcgtgcggatccagcccgtggcctggcacaaccgtatcaccctgcgagtggagctgctgggctgttagtggtaggcctggccgaagtgaccggaggggccccggggcagctgctcctttctgtggacctgctgcctcctccgcccgccctcctgattgtagctgacctgggggcaggcagtgtctccctcccagtcacctctccctccctcctcttcctcgcccccgcccaggggtctctggcacccagtcctcaagccatcccgttttcttaggcacggtgggagctg

SEQ ID NO: 10686 - DNA, 422 bp, Bos taurus
  Clone ID: 46-LIB2809-018-Q1-E1-D6
acctcacaaagggaataacctttgtcttaggttgaatccatggcttcatagctttctgatgctgataaacagtcttgagatactggggcaaggcgaatttctggtaacgctggctgatttttttcagaaaatttaggcgattcttttcttcttcagtcagtttagttttcttagtgaatacttctgttgattccttatggaaaaaaaaatgaaaatcagctttacttgaatagcccaccagtaattttgtctgcatcattacagtagaaaactagagctaattatttttaacaattcaaggctaaatcactgctatcaagtaacaaagtgctattttatagaaatttattatgaatttaatgagtttgaatatgcattatcagagcattctctgtgtccatatgacaattgactgaaagtat

SEQ ID NO: 10687 - DNA, 410 bp, Bos taurus
  Clone ID: 46-LIB2809-019-Q1-E1-D10
acctggagagattgtggaaagcctttcaagcagtgaggaatctattacacgcatcaataagaaaattgagaagtttcagagtgaggaacagcagcaaacagaggatgaactccaggataaaatccacccctttgcccagacacagtctctagtctatcccttccctgggcccatccctaacagcctcccacaaaacatccctcctcttactcaaacccctgtggtggtgccgcctttccttcagcctgaagtaatgggagtctccaaagtgaaggaggctatggctcctaagcacaaagaaatgcccttccctaaatatccagttgagccctttactgaaagccagagcctgactctcactgatgttgaaaatctgcaccttcctctgcctctgctccagtcttggatgc

SEQ ID NO: 10688 - DNA, 370 bp, Bos taurus
  Clone ID: 46-LIB2809-020-Q1-E1-D6
actttgactgttcatcttatctaaattacccaggaatttgtggctaaaatcagtttaccacagataagctatgatgtgtctggttaattagcatttttatcttgaatgtaaattaatgtcataaaactaacaatacatgttttttattttttaaggaaattgttcccaatagtgttgaggtgagatatatctactaaatttaaaatatattaacatcatccaggatatcttaaaatttaattaaactttttattttttgaattttttagcagaagcacattcaaaaggaagatgtgccctctgagcgttacctgggttatctggtaaaatttaattaaaagttaatcaaagaccaatgtatcagggaatg

SEQ ID NO: 10689 - DNA, 388 bp, Bos taurus
  Clone ID: 46-LIB2809-022-Q1-E1-D6
gtgtaagtgggggttgtccactgagtaaggatactgtttttaaggttctaaagctaaattcaaatgatgcattaatgacccaaaaactcagatctgatggtgtctgaatttctaacagtccttgctttgtgggtatgctgacaacttatctggatgccttacatcttttctaaacagtgttgcctctgaacgtgctctgctccctccctgctccctctttggagcccctttgcaccccagagcctgcagaagtggctggtataaaagggggcctggctagagaaatgttcagtgtacctgtttgcaggacccccttcggggcttcaatttggaaactttgcttagggccattttcccaaattgcccacattttgacggcgggtaaaag

SEQ ID NO: 10690 - DNA, 276 bp, Bos taurus
  Clone ID: 46-LIB2809-023-Q1-E1-D6
tctgccaccgtgggctgtctcctccgtctttgaactccttggctgtgagttgaatgggtgcactgatcccctaggcctgaaggattataccatccccaacaatcagattacagcctccagctactacaatacctgcggcctgaatgcctttatctggtttccctagtacacattactggcttatctcggcatgttcatctccttttccgtccatatctacactgcctcttactggatgtacatttacttgtgcttacacacgctagtcaccgtcat

SEQ ID NO: 10691 - DNA, 388 bp, Bos taurus
  Clone ID: 46-LIB2809-027-Q1-E1-D6
gggataacagcatgctgcttcttcccagtcttgggttcaagatcttgacaaccatgaaacttctcatccttacctgtcttgtggctgttgctcttgccaggcctaaacatcctatcaagcaccaaggactccctcaagaagtcctcaatgaaaatttactcaggttttttgtggcaccttttccagaagtgtttggaaaggagaaggtcaatgaactgagcaaggatattgggagtgaatcaactgaggatcaagccatggaagatattaagcaaatggaagctgaaagcatttcgtcaagtgaggaaattgttcccaatagtgttgagcagaagcacattcataaggaacatgtggcctctgagcgttacctgggttatctggaaca

SEQ ID NO: 10692 - DNA, 388 bp, Bos taurus
  Clone ID: 46-LIB2809-029-Q1-E1-D10
accccagatggaaattgttcccaatagtgctgaggaacgacttcacagtatgaaagagggaatccatgcccaacagaaagaacctatgataggagtgaatcaggaactggcctacttctaccctgagcttttcagacaattctaccagctggatgcctatccatctggtgcctggtattacgttccactaggcacacaatacactgatgccccatcattctctgacatccctaatcccattggctctgagaacagtgaaaagactactatgccactgtggtgaagagtcaagtgaattctgagggactccacagttatggtctttgatggttctgaaaattccatgctctacatgtcttttcatctatcatgtcaaaccattctatcc

SEQ ID NO: 10693 - DNA, 436 bp, Bos taurus
  unsure (378),(402): unsure at all n locations; Clone ID: 46-LIB2809-030-Q1-E1-D6
acagcaaaaaggcctgaatgggcatatctctctggggatagggcactgctttctggggaacaggcaggactttggactgagaaagggacagcacggactgaggaggaaacatgacagttggaggaagaggctggtgaggctggtgcatccaagactggagcagaggcagaggaaggtgcagattttcaacatcagtgagagtcaggctctggctttcagtaaagggctcaactggatatttagggaagggcatttctttgtgcttaggagccatagcctccttcactttggagactcccattacttcaggctgaaggaaaggcggcaccaccacaggggtttgagtaagacgagggatgttttgtgggacgctgttanggatgggcccaagggaaggaatanactagagactgtttctgggcaaaggggtggattt

SEQ ID NO: 10694 - DNA, 334 bp, Bos taurus
  Clone ID: 46-LIB2809-031-Q1-E1-D6
cgtatgtgtatgatacataaggttatgtattaattgtagccgcgttctaacgacaatatgtacaagcctaattgtgtagcatctggcttactgaagcagaccctatcatctctctcgtaaactgccgtcagagtcggtttggttggacgaaccttctgagtttctggtaacgccgtcccgcacccggaaatggtcagcgaaccaatcagcagggtcatcgctagccagatcctctacgccggacgcatcgtggccggcatcaccggcgccacaggtgccgttgctggcgcctatatcaccgacatcaacgatggggaagatctggctcgccact

SEQ ID NO: 10695 - DNA, 345 bp, Bos taurus
  Clone ID: 46-LIB2809-032-Q1-E1-D6
gccatgggcgcgggataaaagacaatgacagcacagcacacggacgcattccagatagatattctgatttggtggaaagacgatgagaagcctcactcgagcaacatctgtaacatcgcctgtgacaagttcctggatgatgatcgtactgatgacattacgtgtgtcaagaagattcaggatgaaagacgaattatctacaggatggaccatcaagcactcggttctgataagcgggataagtggctctgtaagaaatggtgaatacctgctgtcatgactgcttacgtcctctatctgtgccaggcacaccactgcaccgtggctaaaacgttttgcctcatt

SEQ ID NO: 10696 - DNA, 383 bp, Bos taurus
  unsure (370): unsure at all n locations; Clone ID: 46-LIB3057-001-Q1-K1-D10
gcagcggaccgggctggcagttcctttctcggaaggagaggttcttctgccatggagtcctacgatgtaatcgccaaccagcctgtcgtgatcgacaacggatccggtgtgattaaagctggttttgctggtgatcagatccctaaatactgcttcccaaactatgtgggcagacccaagcacgttcgtgtcatggcaggcgccctcgaaggtgacatcttcattggccccaaagccgaggagcaccgagggctgctctccatccgctaccccatggagcacggcatcgtcaaggactggaatgacatggagcgcatctggcagtacgtctactctaaggaccagctgcagactttctcagaggagcatnctgtgctcctgac

SEQ ID NO: 10697 - DNA, 378 bp, Bos taurus
  Clone ID: 46-LIB3057-001-Q1-K1-D6
ggatgaggagaaggtacgcatagctgctaaatttatcactcatgcaccgccaggggaattcaatgaagtattcaatgatgtccggctactacttaacaatgataatctcctcagggaaggggctgcacatgcgtttgcccagtataacatggatcagttcacgcctgtgaagatagaaggatatgaagatcaggtcttaattacagaacacggtgacctgtgtaatagcagatttttagatccaagaaacaaaatttcatttaagtttgatcacttacggaaagaagcaagtgacccccagccagaagaagcagacggaggtctaaagtcttggagagaatcctgtgacagtgctttaagggcctatgtgaaagatca

SEQ ID NO: 10698 - DNA, 419 bp, Bos taurus
  Clone ID: 46-LIB3057-002-Q1-K1-D6
gcagcggatgctttgagctgcctacccttatcctaaaggaccaaaacatccaagatgtgtgtgggtacatgtgcgtaggctgcagaccaccacgggagaccctactgatctctgctctcctgagaaggggagctccaggaatggagagggctggggcctgtcaccactcagacctgtattctacatctggttccataagtcttattcactctcacttaacttacagacacgtgtgtgctttcccgtttaataattttataattctctatatgctttttctttcttttaaatctttgtttactgtttttctttttggtattttattttatatgtttttttttttcttattgctattttttttctttttattttttttttctttgttcattgttatattttttttttttttttttttattt

SEQ ID NO: 10699 - DNA, 335 bp, Bos taurus
  Clone ID: 46-LIB3057-003-Q1-K1-D10
cggacgcgtgggctggatcgtgttcttttcgacgtccgcgaagatgcagcggacagcaatgtatataaaccccgagatgctgaacaaagtgctgaccctgctgggggtcgccgtccagaggagcttctaggatgttactgggactggaggaagcgtctctgggctcgatgccagcgtccgactgcgcgctgctactgctatttccgctcactgctcagaaatagaactttaggaaaaaacaaattgaagagctgaaggcacaagaagtcaagcttaaagtgtacttaatgaagcagaccattggcaactacttgggaaccatcagactcattcat

SEQ ID NO: 10700 - DNA, 356 bp, Bos taurus
  Clone ID: 46-LIB3057-003-Q1-K1-D6
cggcgttgtcttgaattcccgtcgtaacttaaagggacgctttcacaatgtgcggagcccttgatgtcctgcaaatgaaggaggaggatgtcctcaaattccttgcagcatgaacccacttaggtggcaccaaccttgacttccaaatggaacagtacatctacaaaaggaaaagtgatggcatctacatcataaatctgaagaggacgtgggagaagcttctgttggccgctcgggccattgtcgccattgaaaacccggctgatgtcagtgtcatatcctgcaggaatactggccagcgagctgtgctgaagtttgctgctgccactggagccacttcctatcgctggcacgct

SEQ ID NO: 10701 - DNA, 369 bp, Bos taurus
  Clone ID: 46-LIB3057-005-Q1-K1-D10
attcgtactgaaaatcaagatcaagcgagcttttgcccttctgctccacgggaggtttctgtcctccctgagctcgccttaggacacctgcgttaccgtttgacaggtgtaccgacccagtcaaactccccacctggcactgtacccggagcgggtcgcgcccggccggcgcgcggccggtctcttgtcgccagaagcgagagcccctacgcgctcggccccactactcacctgatcagtgataaaacgagcacagcaaaggtgtttcaccggctgcccacagcgccggctgaattagcatggccctctacagctaaactacctgctgccttgctactcctgcttattctgcacatgtcatgcatattc

SEQ ID NO: 10702 - DNA, 453 bp, Bos taurus
  Clone ID: 46-LIB3057-005-Q1-K1-D6
gtttagcaccaggcgccccacgaacgtgcggtgcgtgacgggcgagggggcggccgcctttccggccgcgccccgtgtcccgggacgaagggctctccgcaccggaccccggtcccgacgcgcggcgggggcgcgccgcgccgcgccccgggggacgcgggcgacggcccgccggcggagacggcgggggaccggctatccgaggccaaccgaggctcccgcggcgctgccgtatcgttccgcctgggcgggattctgacttagaggcgttcagtcataatcccacagatggtagcttcgccccattggctcctcagccaagcacatacaccaaatgtctgaacctgcggttcctctcgtactgagcaagattaccatggcaacaacacatcatcagtagggtaaaactaacctgtctcacgacggtctaaacccagctcacgttccctatta

SEQ ID NO: 10703 - DNA, 417 bp, Bos taurus
  Clone ID: 46-LIB3057-006-Q1-K1-D6
cccacccactaataaaaattgtaaacaatgcattcatcgaccttccagccccatcaaacatttgatcatgatgaaatttcggttccctcctgggaatctgcctaatcctacaaatcctcacaggcctattcctagcaatacactacacatccgacacaacaacagcattctcctctgttacccatatctgccgagacgtgaactacggctgaatcatccgatacatacacgcaaacggagcttcaatgttttttatctgcttatatatgcacgtaggacgaggcttatattacgggtcttacacttttctagaaacatgaaatattggagtaatccttctgctcacagtaatagccacagcatttataggatacgtcctaccatgaggacaaatatcattctgaggagcaacagtca

SEQ ID NO: 10704 - DNA, 417 bp, Bos taurus
  Clone ID: 46-LIB3057-007-Q1-K1-D10
cccacgcgtccgaatttccccattcctatacagccttagattcaacgtcgatcgctacactcttctctccgattcgtacgattccgtattcgatattcgtttgtttgattcactcctcctctctctcgctttcgattcgttggtgattgctgcttgaacaattaaacatggaacctaatcagctcttctccacgcatttccgcgatggtactattgcctcatgcattgagggccaacacagaggagctatcccttccgttattgtgattggtgctggaatatctggacttgctgcagcacgaagtctccacgatgcatcttttaaggtgactgtactggagtcacgagataggcttggtggtcgcattcatactgacttctcatttggttgtccagttgacatgggagcctcatggc

SEQ ID NO: 10705 - DNA, 345 bp, Bos taurus
  Clone ID: 46-LIB3057-007-Q1-K1-D6
ctgctacgtacgaaaccccgacccataagcaggtcttctactaatggtttaggaggaggctctctacgaacgtgcggtgcgtgactggctatgtggccgtcggcttttctgccgggctcagtgtacacatacgaatgtatctaattactttaatcagtctatattcatttgttggcatatttgatatatcttatttttattgactgtattatccgattgtaaaaattatttttcttaattgtttcttggagttgtttatttaattcaggtcttctgtttcattattatgtgggtattgaatgatttgacatgtttatttttttttctatgttatttttttcttta

SEQ ID NO: 10706 - DNA, 414 bp, Bos taurus
  Clone ID: 46-LIB3057-009-Q1-K1-D10
ttcttgaaatcatcaccaccatggacttcaaaggttcgtcgcagaaagcagggtcccgcctgctcctgctgctggtggtgtcaaatctactcttgtgccagggtgtggtctccacccccgtctgtcccaatgggcctggcaactgccaggtatcccttcgagacctgtttgaccgggcagtcatggtgtcccactacatccatgacctctcctcggaaatgttcaacgaatttgataaacggtatgcccagggcaaagggttcattaccatggccctcaacagctgccatacctcctcccttcctacccctgaagataaagaacaagcccaacagacccaccatgaaatccttatgagcttgattcttgggttgctgcgcttcctgaatgaccctctgtatcacctagtcaccg

SEQ ID NO: 10707 - DNA, 424 bp, Bos taurus
  Clone ID: 46-LIB3057-009-Q1-K1-D6
gccctatgctgtcagtgaattagcaggtcatcaaaccagtgctgagtcttggggtaccggcagagctgtggctcgaattcccagggttcgaggtggcgggactcaccgttccggtcagggcgcttttggaaacatgtgtcgtgggggccgcatgtttgcgccaactaagacctggcgacgttggcaccgcagagtgaatacgacgcagaagcgatacgccatctgctctgcactggctgcctcagccttaccagcgctggtcatgtctaaaggtcatcgtatagaggaagttcctgaacttcctttggtggtggaagataaagttgaaggctacaagaagaccaaggaggctgtgttgcttctgaagaaacttaaggcctggaatgatatcaaaaaagtctatgcctctcagcgaatgagagct

SEQ ID NO: 10708 - DNA, 417 bp, Bos taurus
  Clone ID: 46-LIB3057-012-Q1-K1-D10
gcagactcctgagatctgggcacaggcaacgcattcagatctggaccaagtcgggacagcaccatcccagccccgcagccatggccatgccagcaggccgcaccacagagatccagacaactacaccagccagcataatggacattccaacatcaccagccgaagccctgaatctcggtgcagcagacgagcgacaactctgtgcctgtgtggcaggactggagggcagagggtgaggggagagggttaagaagcagagcatggccctcactgacctttgcctacggcatgtgcattccagcctagctgcctatgctcgctcgattcccctttctgactcactgccaccacaaagaaatgtgtcactcaattaggacctactgagcacgaagacgaatcccatctttatcaaaacac

SEQ ID NO: 10709 - DNA, 409 bp, Bos taurus
  Clone ID: 46-LIB3057-012-Q1-K1-D6
tggtttagcaccaggcgccccacgaacgtgcggtgcgtgacgggcgagggggcggccgcctttccggccgcgccccgtgtcccgggacgaagggctctccgcaccggaccccggtcccgacgcgcggcgggggcgcgccgcgccgcgccccgggggacgcgggcgacggcccgccggcggggacggcgggggaccggctatccgaggccaaccgaggctcccgcggcgctgccgtatcgttccgcctgggcgggattctgacttagaggcgttcagtcataatcccacagatggtagcttcgccccattggctcctcagccaagcacattccccaaatggctggacctgggggttctctcgtactgagcaggattaccatggcaacaacacatcatcagtagggtaaaa

SEQ ID NO: 10710 - DNA, 255 bp, Bos taurus
  Clone ID: 46-LIB3057-013-Q1-K1-D6
gcccagtgttggtaggagattgttacaaaactgggcccatggaatggcaggagaggagcccttcctgtaagatgccagccctgtggccagcgctcacgaaaccctgtgacgatctatattcacccatgataggacgacatggacacacagacagcttctcaaaaggaagaggtcccttgagtcaacatctttataacgacagtaaacaatgcttctctagatagacagcactcatcgtatagtgacacttttata

SEQ ID NO: 10711 - DNA, 466 bp, Bos taurus
  Clone ID: 46-LIB3057-015-Q1-K1-D6
aaactttcaaaaagactctggatgatgtctttttccctttcatcatcctggacgccatgaatgacagagttagacgtttggaccagttttggagtgcagcaaaaaccaagggatttgaggtgtatttggctgaaatgagtgcagataaccagacttgtggcaagaggaatattcatggacgaaagcttaaagaaataaataagatggctgatcactgggaagctgcacctcgtcatatgatgcgtttggacatttgttctttgttgcaggattctgtttttgaagatgttgatgttggtagagtgtgggtgctattttttttatattttttgttttattagatagtttctctttttattatttttgttaatttttatttttttttatatttgttatattttttttatttcatttcttatttttatttttattttttttttttattgtttatttgttttttaaattt

SEQ ID NO: 10712 - DNA, 422 bp, Bos taurus
  Clone ID: 46-LIB3057-016-Q1-K1-D10
tagcattcacagtatctcttgtaggactactaatataccgatcccacctaatatcctcgcttctatgcttagaaggaataatgctatccctattcgttatagcagccctaacaatcctcaactcacattttacattagctagcataatacctattatcctactagtcttcgcagcctgtgaagcagccctaggtctatctctactagtaatagtatcaaatacatatggtactgattatgtacaaaacctcaacttactccaatgctaaaatacattattccaacaattatacttatacccctaacccgggtaatcaaaaattattttaattggggtaacttcaccagacaacaccctctaattagctttacaaggcctctcctcataaaccagtttggcgacaacagccttaatttttcac

SEQ ID NO: 10713 - DNA, 246 bp, Bos taurus
  Clone ID: 46-LIB3057-016-Q1-K1-D6
gccgccgggacacaggtgtcgttaaaaccaccgttaaacctaatccaaaatgggaaagtagaagacccacgtcaggatcgttgtcattgggcacgtagattcagggaagtctaccacgactggccatcttatctataaatgtggctggatcgacaagagaacaattgaaaagttcgagacggaagctgccgagattgcaaagggctcctacaaatatgcctggcacttgcacatacttaaagctta

SEQ ID NO: 10714 - DNA, 362 bp, Bos taurus
  Clone ID: 46-LIB3057-018-Q1-K1-D6
tgatcctgaccagatgaggataggaaacgatgggattttcatgttaactttcttcgtggcgttcctctttaactggattgggttcttcctgtctttttgcctgaccacttcagctgcaggaaggtatggggccatttcaggatttggtctctctctaattaagtggatcctgattgtgaggttttccacttacttccctggatattttgatggtcagtactggctctggtgggtgttcctggttctaggctttctcctgtttctcagaggatttatcaattatgcaaattttcggaagatgccggataatttctcaaatcttcccatttccagagttcttcttttattattatagatgtttt

SEQ ID NO: 10715 - DNA, 367 bp, Bos taurus
  Clone ID: 46-LIB3057-019-Q1-K1-D6
cggacgcgtgggagagcttcctggtgaagtgtgtttcttgaaatcatcaccaccatggacagcaaaggttcgtcgcagaaagggtcccgcctgctcctgctgctggtggtgtcaaatctactcttgtgccagggtgtggtctccacccccgtctgtcccaatgggcctggcaactgccaggtatcccttcgagacctgtttgaccgggcagtcatggtgtcccactacatccatgacctctcctcggaaatgttcaacgaatttgataaacggtatgcccagggcaaagggttcattaccatggccctcaacagctgccatacctgctcccttcctacccctggaagataaaggaacaaagcccaaa

SEQ ID NO: 10716 - DNA, 425 bp, Bos taurus
  Clone ID: 46-LIB3057-020-Q1-K1-D10
acagtccctaatttctgctgctatagaaccagataagaaagaagaaaaacgaagactctcggggtcaagatcacgttctaggaggaggaggactccctcgtcttctaggcacaggcggtcaagaagcagatcaagaaggcgatcacattctaagtcaaggagtagacgacgatccaaaagtccaagacggagaagatctcattccagagagaggggtagaaggtcaaggagcacgtcaaaaaacagagataaaaagaaagaagacaaagaaaagaaacgttccaaaacgccaccaaaaagttatagcacagccagacgttccagaagtgctagcagagagagacgacgacgaagaagcagaagtggcacaagatctcctaaaaagcctaggtctcccaaaagaaaattgtctcgctcaccatccc

SEQ ID NO: 10717 - DNA, 361 bp, Bos taurus
  Clone ID: 46-LIB3057-021-Q1-K1-D6
acggtatgcccagggcaaagggttcattaccatggccctcaacagctgccatacctcctcccttcctacccctgaagataaagaacaagcccaacagacccaccatgaagtccttatgagcttgattcttgggttgctgcgctcctggaatgaccctctgtatcacctagtcaccgaggtacggggtatgaaaggagccccagatgctatcctatcgagggccatagagattgaggaagaaaacaaacgacttctggaaggcatggagatgatatttggccaggtaattcctggagccaaagagactgagccctaccctgtgtggtcaggactcccgtccctgcaaactaaggatgaagat

SEQ ID NO: 10718 - DNA, 324 bp, Bos taurus
  Clone ID: 46-LIB3057-022-Q1-K1-D6
gccagctggactcagtttagatgatgccaattttgttggcaacatccaaaggatcataggcaggagccagtcgaacatatgccttcttctctccatcaggcctgatcagagtattgaccttagccacgtcaatgtcatagagcttcttcacagcctgtttaatttggtgcttgttggccttgacgtccacaatgaataccagtgtgttgttgtcttctattttcttcatggctgactcggtggtgagggggaatttgatgatggcatagtggtcaagtttgtttctcctaggcgcgctcttccgaatataaaagttttcactat

SEQ ID NO: 10719 - DNA, 237 bp, Bos taurus
  Clone ID: 46-LIB3057-023-Q1-K1-D10
ctgccaagcacagccttctcgtgatcatcactttccgataaggtcctggttcaggtctacataatgggcgctgtgatcatgtggttgcactgtcaaatgaatctacagtgacgcggatataacgtactctatagacctgatggccagcatgatggcaagctgtattcaactcataaacactccatagaagtcccaatccccagggatggagaatatgttgtagaggttcgtgcacac

SEQ ID NO: 10720 - DNA, 411 bp, Bos taurus
  unsure (404): unsure at all n locations; Clone ID: 46-LIB3057-025-Q1-K1-D10
cgagaagctcaaaggggaacttgaaagttctgatcagttgaggcagctcttaggagaggctcagtctcagctggatgcggccaaaagtgaagcccagaaacaaagcgacgagcttgccctggtcaggcagcagctgagtgagatgaagagccatgtggaggatggtgacgtggctgaggccccccgagcagagcaggaccccgccgagctgaagacgcagctggaacggacggaagccctgctgggggacgagcagacgcggcggcagaaactcacagccgagtttgaggaggctcagctcgtggcgagtcagctgcaagcggagtttggagaaactccgttgcaccagcgcccttgggtcttcgggaggtgatgaggctgcacagctgaaagagaggctagangaagaga

SEQ ID NO: 10721 - DNA, 337 bp, Bos taurus
  Clone ID: 46-LIB3057-025-Q1-K1-D6
gcgagcgaccgccctttttttttttttttttcaaaccaccacatctctacatattcggggtttatttaatattaacaccattagaacaataacttcactaaatattattaatttctaaaaaaacctttattaaaacacatactatcttaactattcacataatgtaaccatatcatcttaaaaatattcctcctagttaaaattctttatttataactctaggtttggtcacaatataatatttccataataacttaattctttacaattattttgactactgattatatcttttttggataaaatttatattactatcctgctcaaaataccatta

SEQ ID NO: 10722 - DNA, 425 bp, Bos taurus
  unsure (399): unsure at all n locations; Clone ID: 46-LIB3058-003-Q1-K1-D10
gggacgcgtgggcgcagggtctggagcatgggaagccggggctgcccgggcggagacagtgagagcgcgtctcgcggaggcggtgtgcgcccggctgtcaccatgagcgatcaggctctgagctttctgaaggacttcttggccggcagcgtggccgctgccatctccaagactgctgtcgcgcccatcgagagggtcaaactgctgctgcaggtccagcatgccagcaaacagatcagtgctgagaagcagtacaaagggatcattgattgcatggtgagaatccacaaggagcaaggctttctctccttctggacgggtaacctgaccaacgtgatccgttactttcccacccaagctctcaacttcgccttcaaggacaagtacaagcagatcttnctggggggcgtggaccggcataagca

SEQ ID NO: 10723 - DNA, 443 bp, Bos taurus
  Clone ID: 46-LIB3058-004-Q1-K1-D6
cctcccgcagggtcgcagcccttccgctgcctgtactgtgcggccaccttccgcttcccgggggcccttcagcaccacgtcaccaccgagcacttcaagcagtcggagagcaccttcccctgtgagctctgcggggagctcttcacctcccaggcccagctggactgtcacctggagtctgaacacccgaaggtgctgggcgcggaaacccagtcgcagatggtgcaggtgatccagaccccagagccagtggccccgatggagcaggtggtcacgctggaggagacccagcttgccggctcacaggtgttcgtgacgttgccggattcacagacagcccagaccagctctgagctcgtggccgtgaccgtggaggacttgctggacgggaccgtgaccctgatctgtggggaggccaaatgagtggctgctcatggctaggg

SEQ ID NO: 10724 - DNA, 439 bp, Bos taurus
  Clone ID: 46-LIB3058-005-Q1-K1-D10
ctgggctacatcctcacctgcccgtccaacctgggcacggggctccgggccggggtgcacatcaagctgccccacctgggcaagcacgagaagttccccgaggtgctcaagcggctgcggcttcagaagcgaggcacaggcggtgtggacacggccgccgtgggcggggtcttcgacgtctcaaatgccgatcgcctgggcttctcggaggtggagctggtgcagatggtggtggacggtgtgaagctgctcatcgagatggagcagcggctggagcagggccaggccatcgatgacctcatgccggcccagaagtgaagccctggccacacctgccgccgtcaccagctcctcagctgcttcctaacttattgcccgggccgtgcccaccacgtgccctggaggctcgctgtgtggtggctgagcccttaaccttact

SEQ ID NO: 10725 - DNA, 450 bp, Bos taurus
  Clone ID: 46-LIB3058-005-Q1-K1-D6
atcgcgagcggccgcccttttgattgcccacggcctcacatcctccatacttttctgtctagcaaactcaaactacgaacgaatccacagccgaaccataattctagctcgaggcctacaaacgctccttccactaatagccacctgatgactactagcaagtctaaccaacttagctctacccccaacaatcaacttaattggagaactatttgtagtaatgtcaaccttttcatgatctaacattacaattattctaataggagtaaatatagtaatcaccgccctatattctctatacatgctaattataacccaacgaggaaaatatacctaccacattaataatatctcgccttcctttacacgggaaaatgcactcatatcattacacatcctacccctactactcctaaccctaaacccaaaaattattctaggacctctata

SEQ ID NO: 10726 - DNA, 435 bp, Bos taurus
  unsure (414): unsure at all n locations; Clone ID: 46-LIB3058-007-Q1-K1-D6
tgcagttatcatttatatatccattttgatgaatgtagctattattcatattttatattctatatatgaatacactatattcttgaaagaaacaaaaaaaaaaaaaaaaaagtgtcctgatcctgcagcaggccactgcagacccacgcctccaccagagactcctggacactcacgggcaagtttgggtcagtctcttggagggtcactgctcctttcccctgggtcctgatgcacacaaggtttatttgtgtgtgtgtgtttcccagagtctgtttccttggtcttgtgtaacttttggcagctctatagtggtgttaatggcgacctcctccaagagggcttatgccacatgcaagtctgctgcacccagagcccctgcccctgtggcaagccactgctgacccgtacctntgcaggagacactcaaacaca

SEQ ID NO: 10727 - DNA, 368 bp, Bos taurus
  unsure (49),(71): unsure at all n locations; Clone ID: 46-LIB3058-008-Q1-K1-D6
ccgtccgcgtaatagatgtgccgagcatacgtacgaactgcattacacnttactcgcacaaggagagcatngagacatcgcacgacacactggcgagcatacctttcagaccagaaggcacagcattctatagagtgctcgatattgcgcaatgaccatagtagattaccgctcacctcgctgacactctaggaagagagactagtagttcaccgaagtcatacatattaggaattcactgaccatcatgggaagaccgacaccagagtctccgtgcagaggacacaggccccagctgtagccagcacataattgtataaagggaataataaagtgaatgaaacctgggatattttaggcaagagtac

SEQ ID NO: 10728 - DNA, 421 bp, Bos taurus
  Clone ID: 46-LIB3058-009-Q1-K1-D6
ttttctttaaatcctcggactttaaactctgcatatgattcaatagggtttgagacgtatgcgcgacaccaacaggtaaaacagtgctagcgccttagtttcctgccactttacaaaagagttctctgatcgctggattttattggaagagttttaaataacccagctaaagctacatgaaagctcaaagtagaggaaaaggcattagaaagtggtagcaccttggtgcctgctgttcagagagttctgtgcttaccctgacactgagcacagatacaatgattatgctactcttcatacacaaaggacagtgctttgtttttctattgatggtacgctctgtagtctcaaacagtccttcaggtgtccaggagcacatttgcgatgagggacacagatatcgggtgcatttcatagctga

SEQ ID NO: 10729 - DNA, 410 bp, Bos taurus
  Clone ID: 46-LIB3058-011-Q1-K1-D10
gtagccttagtggatttggggaagactcgaagtagatcctagaactattttgcatgcttatgtctaaatgataattaaaaggaaatttcgtggattaaactatggatttaatgcagcaagcaagtcttacaaagtccttttttatataacatgcattttgttttgaatttgtgtcatttttaatacagttgattgactttacagaatgcaaccttttctgaattcttatacacaggtgtatatttggtattcttttgacgtcttttcagcttataacactatatacagttctttctaaagcacagattatggtccacatatttttaaataaccatgattcactgttatactgataatgtgctcactaaccattatatgtatgaacattgtttattcttagctatagcatg

SEQ ID NO: 10730 - DNA, 432 bp, Bos taurus
  Clone ID: 46-LIB3058-011-Q1-K1-D6
gaaaaaaatatttttttaagaatgctcataagaaattgataatctgtgtgaatatgttttagatgtttataataccttttgaagagacccagtagcccatagcacaaatctcgtggaaatctgatatgtcttaatgtggctacctaggttaaggttcacattagtcccccactcatctagaagtccattttgaaagattcttgtaaattattttagcactgatgttcagccttgtctttgtgtcagttaagctcaatggcgaacatgggaaccaccttgcgccttccctgggggagaaaccctcttggctgatggcttttccccggaatcataaagcagccaccgggtgactctttggcttctagatccatctgcctggggcccccagactcctctgctcccactcgggggagagtgggcacataagcttct

SEQ ID NO: 10731 - DNA, 424 bp, Bos taurus
  unsure (384): unsure at all n locations; Clone ID: 46-LIB3058-012-Q1-K1-D10
ctcgagcggccgccctttttaatttttttaatagtctccttagttgtgagaaaagcttttgttttggtgtagtctgatttgtttattattgcttttgttccccttgcctgagttgttgttcagttgctaagtcgtgtctgactcattgtgacccccatggactgcagcgcactaggcttccctgtccttcaccatctcctggaacttgctcaaactcaagtccattgagtcagtgatactatccaaccatctcatcctgcgttgcctccttctcctgccctcaatctttcccagcatcagtgtcttttcccaacaagctggctctctgcttcaagtggccaaagtattggagcttcagcatcagtccttccaatgagtattcanggcagattctctttagaattgactggtttgatctccatgc

SEQ ID NO: 10732 - DNA, 449 bp, Bos taurus
  Clone ID: 46-LIB3058-015-Q1-K1-D6
gtttcaatgttttattcacttgggcttttcttcttcccccctcattctttcaagaactgcttaatactcaatctattgtgaagaacctgatttgcactctgtagtgtttaaaggaaaaaaaaaaaaactctaatattgaatctcttaaatttagtgtatgtaaacagcttacagtatgtattgtctaaatgcatttaaatctcttttattcaaagaaaagctaaagcaaaaatactggtatatgaccatgcaagactgtcaatgccaacaaagacaacactaatgagcatatcctccgtgggatcgcagtgctctccaaattgtttaaaaaatgcattacagacaacttgcctgacttttaaatgagcataaaaggccctctaacctatgcaggtttcctcattacgcatatagaaaatgctagtgtttttgctcacttcatatgtaac

SEQ ID NO: 10733 - DNA, 444 bp, Bos taurus
  Clone ID: 46-LIB3058-016-Q1-K1-D10
gtggagcagaagaagcagtggcagctgccactccaacatgggcaggtggtcctgtgcctggaatgaacagaggcccatttgtgaaatctgtgggtcaacctcttgaggatgatctgtttgattctggagatatcttttccaagggcattgcatctcagtccgcaggaagaaaagccaaggtgaaggcagccagcagcctggccaacctggcagagggaagtaaagacagaagccccatgttccctgctctcggtgagacaggcagtgatgatgatctctttcagtccattaaaccaaaaccagcatagaaaacaaatcctttccctttcctggaagatgaggacgatctgtttacagaccagagaggcaagaagaatgggtcaaaatccaacagtcaacaggatattatctcaaaagcacaagatatatttgaggatgatatat

SEQ ID NO: 10734 - DNA, 275 bp, Bos taurus
  Clone ID: 46-LIB3058-016-Q1-K1-D6
gagccagaagccaggattcggctatggaggcagagcgtctgactacaaatcggctcacaagggactcaaggggcacgacgcccagggcacgctttccaaaatcttcaagctgggaggacgagacagccgttccgggtacccgatggcaagacgctgaagcccagctgcccttccagaaccccgtccgcagcttcttaatacaaccggctcgacgctaaccattgtctaaattcccaagtgcagcatgcatccacgcaaccctggccacatgcgcg

SEQ ID NO: 10735 - DNA, 314 bp, Bos taurus
  Clone ID: 46-LIB3058-017-Q1-K1-D10
agtaattgatggggtaaacaatagaatggaatgaaattacattaagttgtatgcaaatggctctagaacaccttaacaattatgacaaggcaattataaataactatgtttttacttagtcatatatatttgctatttaaagtacattacagagctgtcatatctacggttagctaggaaagagcaaatggcaccatctgggagccaccaccctgaaagtttagactgcaattctgaaaatctgatggtttactattccataatgtttagtcaagcagagggcgacttgggttgaaagtatgtattcttgaaac

SEQ ID NO: 10736 - DNA, 424 bp, Bos taurus
  unsure (387): unsure at all n locations; Clone ID: 46-LIB3058-020-Q1-K1-D10
gctgtcagttatctaaagcatgttgtttggtgctacaaagttttaatttttgtgaaatgttttgttgtgttcctattacaatatagctgtgaaaactatcagaattgttaactaagacaatattttcttgaaataaaacaaagttcctgaaatatcaatgcaagtgttttttttccagaccggaagactaaggctttaaacctgctttgtactagctgttccttcatttgctacagaaatacaatattatactcttgaacagcacattgtggaatttgactgcttgaaaaaagattagcatatttaataatgtccatcgaatcatgtatgatatgactgagcatgttaatgtgacatagtgatttataaatttaagtataatgaagntactgtttactgctgctgctaagtcgcttcagtcatg

SEQ ID NO: 10737 - DNA, 410 bp, Bos taurus
  Clone ID: 46-LIB3058-024-Q1-K1-D10
ctggacatataatatgtaaataaatgacttttataagaggcatctgttttaatttttcaaggttttacttttcaaattggggtgtttctgaagtggacagcctcacaattcattagctttttcatttttgatgctagtggctaggtgagtttccccaccctctcctttccccagttgctggtgtagttacatagggtccgggaagggtttagctgcttcatagtctcccaggactcacgccttctcttctcgaagctgtgtttccacgccaagaaagaaactggaagaaacctattttgttttttattactaagccagtatcaaatggcctcagctcagatccggagaaacactgctagaaattgaattcctccctatgtgttgacaatagggattcgaactggattctt

SEQ ID NO: 10738 - DNA, 427 bp, Bos taurus
  Clone ID: 46-LIB3058-026-Q1-K1-D10
cttccagtggatgaagaaaacagctgtgtttgtcaacatcagcagaggagaagtggtagaccaggatgacctgtaccaggccctggccagcggtcagattgcagctgccggactggacgtgacgaccccagaaccactgcctaccaaccaccctctcctgaccctgaagaactgtgtgatcctgcctcacattggcagtgccacccacaggacccgaaacatcatgtctgtcttggcagctgacaacctgctggctggcctgcgaggggagccgatgcccagtgaactcaagctatagccacacggggactctgggggccagaggaaagtctgatctgtacccattctgtggagggaagactggtactaacagatgtgctgcacttttgtggttggaagcatctgagccccacgtgtgtaattttat

SEQ ID NO: 10739 - DNA, 420 bp, Bos taurus
  Clone ID: 46-LIB3058-027-Q1-K1-D6
gcaggacccccgagggcgcggcaccctgctctccggccccgagggagccagaggctggcacctcggccaacgggtgggcgggaggctgccagccgcggcgggacatcgtgttcatgaagacgcacaagacggccagcagcacgctgctcaacatcctgttccgcttcggccagaagcacgggctcaagttcgccttccccaacggccgcaacgacttcgactaccccgccttcttcgcgcgcagcctggtgcaggactaccggcccggggcctgcttcaacatcatctgcaaccacatgcgcttccactacgacgaggtgcggggcctggtggcgcccaacgccaccttcatcaccgtgctgcgcgaccccgcccgcctcttcgagtcctccttccactacttcggctccgtggtgccct

SEQ ID NO: 10740 - DNA, 369 bp, Bos taurus
  Clone ID: 46-LIB3058-030-Q1-K1-D10
cggacgcgtggggtgcacaacagcaaaatactggacggccaagtccggagtggacaagtgcacgacagtcaagtacaagtcggacaagtacacagaggtacagtaaacagaggcaccgaggcaaacgatgtgaagagagttcggcaaacacggatgaacctgatgcggagagcgctgtcagctgtggaggaagtgaaactcagacaataagcttgtgctgcaagccgaatacagcaggagatggtggcggaagaccacagggaccgggactattttccattgatgaaaaggctgaaagtgtcgatgagcagactgaagatgcttgccataagagcacagtcgcacgaccacgtaagctgattccccaga

SEQ ID NO: 10741 - DNA, 328 bp, Bos taurus
  Clone ID: 46-LIB3058-031-Q1-K1-D6
agctcctggttcaatgaggcaattgacttcatagactccatcaagaatgctggtggaagggtgtttgtgcactgccaggcgggcatttcccgatcggccaccatctgcctcgcttacctcatgaggactaatcgagtcaagctggatgaggcctttgagtttgtgaagcagaggagaagcatcatctcccccaacttcagcttcatgggccagctgctgcagtttgagtcgcatgtcctggccctccactgctcggcagaggtctggtgtgagccccgccatggctgtgcttgactgcagcaccttcaccatctacctcttcatcttc

SEQ ID NO: 10742 - DNA, 436 bp, Bos taurus
  Clone ID: 46-LIB3058-032-Q1-K1-D10
ccttgaccattcagcacaaattgctgatcagccggctggcgagcagtttcaggaaacgagtaagaatgagcctttaggtcatgacttatgcctgtctccttggtttgttcttctgcacagatcataagtctgttttgacctgcttaaccactttatgttccctgatgactttatgttttaatttcctctgcttttttatatgatgaatgatttgtttatgatgcttttttttattttttctttcttttttttcttttatctttttattgtcttttttttttttttttatttttttttgtttttgtcttcttattatatttctatctttttttctttattttttttttattttttttgttttatttcttttatattttttatttatttttttttttatttttattgtctgttttttctttcttttttctattttttt

SEQ ID NO: 10743 - DNA, 433 bp, Bos taurus
  Clone ID: 46-LIB3058-035-Q1-K1-D6
ctcagcagtcctcaaccctggcctgtctacccatttctctcggagtggagagggagaggtcccacccagactcacagaatctgaggctctgggcctctgggtgagcagggcctggagatctgcgttaagaggccgcccagggacctccctggtggtccggtggctaagactcctcgctcccaacacaggggacccatccctggtcagggaactagatcctgcatgatgcaactaagacccgaggcagccagaaaaataaataaaataacagtgttagtcactcagtcgtgtccaactctttgcgaccccatggactgtagcctgccaggctcctctgtccttggaatttcctgggctgccattcccttctccaggggatcttcccaacccaaggatcaaacccaggtctcatgcattgcaagtggattctttt

SEQ ID NO: 10744 - DNA, 444 bp, Bos taurus
  Clone ID: 46-LIB3058-037-Q1-K1-D6
ctgaggcttacagctaggaggtataatttggaagagggctatggtaagcattgtgtttagatttgctgtttgtgaggctcatggcagtggtaggaggagtgcaatttctaggtcaaataagaggaatgtgatggctaccagaaagaattttatagagaagggaaggcgggctgatcctatggggtcaaatccacattcgtatgggcttgttttctcagagtatacatttagttggggaagtcagaatgcgatgatgacgagtagggtggctagtgtaaaattggtcaggagggctgctcgcaagggacaggacccatacaatatacttgccccaaaggcaacctcaggtaccaaggaggaccctaatttagtcccctccatcaccaacaagcggatagtgggctgcatctgtgaagaagacaacagtactgtcatctggttctg

SEQ ID NO: 10745 - DNA, 429 bp, Bos taurus
  Clone ID: 46-LIB3058-038-Q1-K1-D6
tgaagtctggtacctttaaccccactacattcattttggggccctgttgagctgccgtagcatgtgctgggcacgtttcagtgccacgagtgttctgtgtgtgcgctgacccactgtcaacagtgaattacctccccaggaagagtggctgtatttgcaacagtttttcatctgctacctgctcttctatttagtccaagttgatgcattccatgtagtttgagtttgtggaagagatgcagctgaaggcaggacagaatttttttttaaggaatcaacactggccctgtagtcattagccagagctttacatagttattggctaaatatagtgaaactcttatcatgactgggattttgaagaagagaattaacagaaccaatggcagatgctctgaagttttcctgcaagttgatgcttccaaagac

SEQ ID NO: 10746 - DNA, 272 bp, Bos taurus
  Clone ID: 46-LIB3058-039-Q1-K1-D10
tgcacatctgcttccactgtgttcccatgggtgccatgaagtgtgtgaggagcctcgtccggaggaatctaacgctgcattgactactgctgtcaggattgtgttgtgtgaaataatcatcaacataaattttatatgcacaagtgatttcccttttatatgtcaggtaaatatttgtaaaagttatactcacacaaatgaaattattataatgattactaatatattttttccatgtttcattgcctgaataaaaactgtttaccactgtt

SEQ ID NO: 10747 - DNA, 437 bp, Bos taurus
  Clone ID: 46-LIB3058-039-Q1-K1-D6
acccaatggatcaccaaaccagtgcatttgcacagggagatgcgggggctgacgtctgcaggcagaaagagccgcggcctgggcaagggtcacaagttccaccacactattggtggctctcgccgcgcagcgtggagaaggcgcaatactctccagctccaccgctaccgctaacacgtgatgtttgtaaagtccttacctaataaacaatttaggacgttcctgtctgcttaaaagtgtttttaatttgtctgttaaagctagtctgcagattgcttcattgaatgcattgtcaaattatgaaagttaaagtgcaataatgtttgaagacttattgaagttacttacacatataagtgtatatgaagtgatggtgtatcttgtctttaataagggaaatgcctttgtggttgctttattagggagttgatgtgtct

SEQ ID NO: 10748 - DNA, 328 bp, Bos taurus
  Clone ID: 46-LIB3058-041-Q1-K1-D10
gacccactcgtccgtcgcgagctgccgcccttttttttttatcattattccttttttttttttttttggtatgttttttttaaattttttttgtcccttccaatcacatctttaataaaaaacctaaaaaaaacacaaacaaacaataaaaaaatcaaaaataatcctactcaaataatataaaaatataccactatcaataaaaaccaacaataaaattctactcaaaacaatcaaacaacacacaaaacaacacataccaatcatacaaaccaaccaaaaacatcatcaacacaactaaaccaataacctatactacaattacaaa

SEQ ID NO: 10749 - DNA, 375 bp, Bos taurus
  unsure (40),(49)...(63): unsure at all n locations; Clone ID: 46-LIB3058-042-Q1-K1-D10
gacccacgcgtccggtgctagatcgcgagcggccgccctnttttttttnnnnnnnnnnnnnnnttttttttggactgaaaaagagtcaactttaattgtaactgaccagcctgtacctaggaatgtctctgaacaattgaacaaaatcaacacgataaaactgtcctatcgaagaaaccaaaagcatccattggcctcaaaggttctgagggctaggctcaaagcagcccgttcccattcctgcggctggttctgtgccccacagaagtttctcattccacagggagggcccgggtgggtgagggaccagttcccttcttctaaaatgctaagggattttaaagttaccaagggggggtggcttttcccaaaccc

SEQ ID NO: 10750 - DNA, 442 bp, Bos taurus
  Clone ID: 46-LIB3058-043-Q1-K1-D6
ctccccgcgaggggggcgttccccgcggtgcgcgcgccggtgtctccgggggggccgggccgcccctcccacggcgcgaccgctctcccaccccggcccgcctcctcaccggggtgggtcggggcggggcggactgtccccagtgcgccccgggcgggtcgcgccgtcgggcccggggggtcgcgcctcggtcgccacgaagcgagcgcacggggtccgcggcgatgtcggccacccacccgacccgtcttgaaacacggaccaaggagtctaacacgtgcgcgagtcaggggctcgcacgaaagccgtcgtggcgcaatgaaggtgaagggccgcctcgccggcggccgaggtgggatcccgaggcctctcccagtccgccgagggcgcaccaccggcccgtctcgcccgccgcgccggggaggtggagcatgagcgcacg

SEQ ID NO: 10751 - DNA, 404 bp, Bos taurus
  Clone ID: 46-LIB3058-044-Q1-K1-D10
atcgcgagcggccgcccttttttttttttttttttttttttttttttttttttttttttgtttttttttttttttttttttttttttttttttttttttttttttttttttttttttttaggtttaaaaaggcctttaaatgggttgtttccgggtttaccaaaccatgcccgggctttaggggtttccccccccccttaaagggggggggtccccacttgggaaaggggccaaaagggggcccaattaggcaggaatttcccccccaaggggttcctaaccctttgggccccaaccaaaaagggggcccctttaggaccccctttttaatgggaaaagcccggcccccttttttttcccaccagggggcaaaacccccccaaagggggggccacaaagggggg

SEQ ID NO: 10752 - DNA, 439 bp, Bos taurus
  Clone ID: 46-LIB3058-046-Q1-K1-D10
agaatataaaccactttacaaaaaattttaactattgggctctctcctaccctgtcgcccactgtttttctttctcctgtctccccctacccccgaccccaatccagccagtctttagaacccagtgcagacaccaggggagggatggaggtttcagccctttcttacaataggtcattagtgctttaagcaaatgatattcgcagctttgactgcagcattagcaattaggaaaaaaattaagttccctgcggacatgtaactttgccatcagttttgatgtggaaacactgtgatgtataaatgttgttggacaacagtagtttaagagtaaaatatgaaaggcttaaaaaggctagctctgtcctttacttactgagatttcacttttctcctttgtatttccattgtattagataaataaatgtgaatgtaaaat

SEQ ID NO: 10753 - DNA, 419 bp, Bos taurus
  Clone ID: 46-LIB3058-048-Q1-K1-D6
ctcttgggagtcccttggactgcaagatatcaaaccagtcaatcctaaaggaaattaaccctcaatattcattggaaggactggtgctgaagctgaagctccaatactttggtcacttgatgtgaagagctgactcattagaaaagaccctgatgctgggaaagattgaacacaggaggagaagagcatgacagaggatgagatggttggatggcatcatcgactcaatggacatgagtttgagcaaactccaggagatgatgaaggacaggacgtttggtgtgctacagcccatggagtcgcaaagagttgaacatgactgggcaactgaacaactacagcaacgcaaagtatcttctctgaccacagtataatgaagttaaaaatcagtaacaagaaaaactgaaaaactcacaaat

SEQ ID NO: 10754 - DNA, 406 bp, Bos taurus
  unsure (322): unsure at all n locations; Clone ID: 46-LIB3058-049-Q1-K1-D6
ggccacagccccgagggctccacattctcgtaccacctgctgggcccccaggaggagggcgagggggtggtagacgtcaagggccaggtgaggatggaggtgcagggcgaggaggagaagagggaggacgaggaagatgaggaggacgaggatgtgagccgcgtggacgaggaggactgcctgggggtgcagagggaggaccgccggggtggggacgggcagatcaacgagcaggtggagaagctgcggcggccggagggtgccagcaacgagagcgagcgggactaggtggcctgtggggcggggcccggagtggggcggngcccagcgggtggggtggggccttgaggcgggcggtgcccgggcgactgaaggcggagcctggccacccaacccggcccggaca

SEQ ID NO: 10755 - DNA, 432 bp, Bos taurus
  Clone ID: 46-LIB3058-050-Q1-K1-D10
cgtgcgtgccggtccccgccgcccctcgtcatcatgccgatgttcgtggtgaacaccaacgtgccccgcgcctccgtgccggacgggctcctctccgagctcacgcagcagctggcgcaggccacgggcaagccggcacagtacatcgcggtgcacgtggtcccagaccagctcatgaccttcgggggctccagcgagccctgcgcgctctgcagcctgcacagcatcggcaagatcggcggcgcgcagaaccgctcctacagcaagctgctgtgcggcctgctgaccgagcgcctgcgcattagcccggacaggatctacatcaacttctgcgacatgaacgcggccaacgtgggctggaacggctccaccttcgcctgagggccgggcctcgggttcccagggcccgcagccctggcgcgcacagatttc

SEQ ID NO: 10756 - DNA, 356 bp, Bos taurus
  unsure (5),(23)...(24),(44): unsure at all n locations; Clone ID: 46-LIB3058-050-Q1-K1-D6
agagnaccagaggggagggccanngcgcttctacgaacaacggnctactgagtgccaattactctagtgtttaggaattaccattccaagtgtagtagatgaaatcacagaaatgtacatggcctccgagagagagaaggccaggaacagaacactgaagaacaaaaatttaaagatgtgacagcaaagaaacagtcaatactgatcagttcagtcgctcagttgtgtctgactctttgtgacctgacggactgcagcatgccaggcttttcctgtccatcaccagctcctgacacttgctcaaactcatgtttgagtcagtgatgccatccaactgtctcactgtatcgtcttct

SEQ ID NO: 10757 - DNA, 442 bp, Bos taurus
  Clone ID: 46-LIB3058-051-Q1-K1-D6
gaccccaacttcaagaacaggctgcgagaacgaagaaagaaacagaagcttgccaaggagagagctgggctttccaagttacctgaccttaaagatgctgaagccgttcagaaattctttctagaagaaatacagcttggtgaagaattactagctcaaggtgaatatgagaagggtgtggaccatctgacaaatgcgattgctgtgtgtggacagccacagcagttactgcaagtattgcaacaaactcttccgacaccagtgttccagatgcttctgactaagctcccaacaattagtcacagaattgtaagtgctcagagcttggctgaagatgatgtggaatgagaaacacatgtcaacatactgatctcaattaaaacatatttttaaaatcttatctcagaagatgatcggctcttgggagtaagggcagataatc

SEQ ID NO: 10758 - DNA, 413 bp, Bos taurus
  Clone ID: 46-LIB3058-053-Q1-K1-D6
gtgccatctttgtcaggtttttgtattagggtgatggtggcctcatagaatgaggttggaagtttaccttcctctgcaattttctggaagagtttgagcaggataggtgttagctcttctctaaatttttggtagaattcagctgggaagccgtctggacctgggcttttgttcgctggaagatttttgattacagtttcaatttccgtgcttctgatgggtctgttaaggttttctatttcttcctggtcgagttttggaaagttgtacttctctaagaatttgtccatttcttccacgttgtccattttataggcatataattgctgatagtagtctcttatgaatgctttgtatttctgtgctgtctgttgtgatctcttcattttcgtttcaaattctattgatttcat

SEQ ID NO: 10759 - DNA, 373 bp, Bos taurus
  Clone ID: 46-LIB3058-056-Q1-K1-D6
cctctttcccttggaattgaaactgctggtggagtcatgactgtcctcatcaagcgcagtactaccattcctaccaagcagacgcagactttcaccacctactctgacaaccagcctggtgtgctcattcaggtttatgaaggtgagcgtgccatgaccaaggataacaacctgcttggcaagtttgaactcacgggcatacctcctgccccccgtggtgttcctcagattgaagtcacttttgatattgatgccaatggcatcctcaatgtttctgctgtggataagagcacaggaaaagagaacaagattaccatcactaatgacaagggccgcttgagcaaggatgacttgaacgcatggttcaagaagc

SEQ ID NO: 10760 - DNA, 305 bp, Bos taurus
  Clone ID: 46-LIB3058-057-Q1-K1-D6
ggcgaggaggagggaagaggcacttggttttatacctcgttagagaagagaaacagggtgtagtcagcatcttcttactcccttctccctgataacatctaccatgacaacgctgatgttttcaaggatcttgttatagatagtaactaatttatataaattttatactggtcttattagcttcaggtacttgtgtctaacattgtatactgggccagtcctctggtagacacatgattgattactttttggatagcttgtatttttctgttatgtttttgtgtacttattgtctttgtcatatt

SEQ ID NO: 10761 - DNA, 194 bp, Bos taurus
  Clone ID: 46-LIB3058-058-Q1-K1-D10
cagagcactgtatagctatcaggaaactgctctataagtgacattttccccaactagacgttttggtgaattttggaatgtagtttattcagcatatgactctatcacaggtaccagtaatgcatctaatttttatgtttcctttaagtggcaaaccgaatgcttgaactacttcttgaactgagtgattggga

SEQ ID NO: 10762 - DNA, 388 bp, Bos taurus
  Clone ID: 46-LIB34-003-Q1-E1-D6
gatcaatcatgacgacttacagcgacaaaggagagaagcctgaaagaggccgattcctccactttcactctgtgaccttctgggttggcaatgccaagcaggctgcgtcatattactgcagtaagctgggctttgagcccctagcctacaagggcctggagaccggttcccgggaagtggtgagccatgtggtcaagcaagggcagatcgtgttcgtcttctcctctgccctcaacccctggaacaaagagatgggcgatcacctggtgaaacacggcgatggagtgaacgacattgcgttcgaggtggaggactgtgactacattgtgcagaaagcccgggaacgatgcgccaagattgtgctggagccttgggtacaacaagataa

SEQ ID NO: 10763 - DNA, 411 bp, Bos taurus
  Clone ID: 46-LIB34-004-Q1-E1-D6
ggttctgaaaccctagaggacgcaactgtgagtgtctctgtcctagcctctcaacttgctttcctgtgtcctgacatgcttcccctccctctctccatattgctcctgctcacacagtcccagagtttcctgggcgaagaaatggatgtctattctgagaaaaccctcagcgatccctgcaccctggttgtgtgtgctccaccagcagatagccttcgtggtcatgatggacgagatgggacagagggccccagggagagaagggggatcaggcctcaaggtatgcctggaccagctggaagagagggcccctcagggaggcaggtgagcatgggacctccaggcacaccatgccccaaaggagaacctgagcccgaaggaagagtgggtgccccaggcatgcccgggtcc

SEQ ID NO: 10764 - DNA, 410 bp, Bos taurus
  Clone ID: 46-LIB34-005-Q1-E1-D10
ctcactctcactagttactttactcttactaactatacccattataataataagctttaacacctacaaaccttccaactacccactctacgtaaaaacagctatctcatacgccttcattaccagcataattcccacaataatatttatccactcaggccaagaactaattatttcaaactgacactgactaaccatccaaactcttaaattatccctcagctttaaaatagactatttctcaataatatttatcccagtagcactattcgtcacatgatctattatagaattctcaatatgatatatatactcagaccccaatattaacaaattcttcaaatatctactcctattcctcattactatgctcatccttgtaaccgcaaacaacctcttccagctattca

SEQ ID NO: 10765 - DNA, 403 bp, Bos taurus
  Clone ID: 46-LIB34-005-Q1-E1-D6
ggctgaacttagttcttggataatctagttcatgtgcattaggctgccacatatactactatgataatgagctgcagtatcaatgtggcataaatactgcagtagtattcttggaaaaccaaatttccaagtctttacctggaatcagtgtgggcctgttataaaactaaatcatgatacaagaagcagtcttgaaaaagttatttccttttgtagtaccataaaaaaacagaatattatgttcatcttactactactgtggaaacaggttctagatttcacacttcatcgaaagtcacttttcagttaaatgtaagtatttttcactgctgttgggatctattccttagatattcaaattcttttttacttactttaaatttaaaatgcatatctttaaatc

SEQ ID NO: 10766 - DNA, 388 bp, Bos taurus
  Clone ID: 46-LIB34-006-Q1-E1-D6
ggaaatatttgatatctgctctgttcaatatagtaatcactagacataagtctctgacatgacactgagtgagtgaatgtgaagtcactcagttgtgtccgattctttgtgacccatggactgtagcctaccaggatcctccatccatgggattttccaggcaagaatactggattgggttgccatttccttccccaggagatcctcccaacccggggactgaacctgcgtctcccgcattgtacgcagacgctttagtatctgagccaccagcgaagtcccatgacatgtgactagtgctactgttacctgaatgataagttgtatttacgttgacttaattaaaacttgatgactcatatgttacacagcacagctctaaactttg

SEQ ID NO: 10767 - DNA, 399 bp, Bos taurus
  Clone ID: 46-LIB34-007-Q1-E1-D6
aggttctgaaaccctagaggacgcaactgtgagtgtctctgtcctagcctctcaacttgctttcctgtgtccagtgagtatcttcctgcctgaatgggcgctttatcctactggtgctgaggaaggcagggtctgtacagctgttccagtctaggaggatagcactgcagactccagtactagcctgtccagagcagcaagtgagaggaaacaagccagcattgtaagaggacatgcttctcctccctctctccgtgctgctcctgctcacacagccctggagatccctgggagcagaaatgacaaccttttctcagaaaatactggccaatgcctgtaccctggttatgtgtagccccctggagagtggcttgcctggtcatgatggacaagatggga

SEQ ID NO: 10768 - DNA, 424 bp, Bos taurus
  Clone ID: 46-LIB34-008-Q1-E1-D6
gattgttccatgctgactatacaacggatctcccagtccaatagtgactacggctaaaaggctcacgataggtagaaagagctcatcgtcatgacaggaaagtttctgtggtttgaatggatacccttcccaagtgtggattactcacctgaactcctgagagaggtacaggagagttttcttattaaagatgaagatgtcttactgctgactttccccaaatcaggaacgaactggttgattgaaactgtctgcctgatttactccaaaggggatcccaaatgggtccaatctgagcccatttgggaccgctccccctgggtagagactaagcatgggtatgaattactaaaagagaacgaaggcccacgtctcatcagttctcagctcgccatccaactcttccccaagtctttcttcaaat

SEQ ID NO: 10769 - DNA, 415 bp, Bos taurus
  Clone ID: 46-LIB34-010-Q1-E1-D10
agcggacgcgtgggcgagtcagctgatcttaagagttgtgctgcgtgccggccggtccgggccctccggtccagccgccccgccgcagccatgtcgttcttcccggagctttacttcaacgtggacaatggctacttggagggactggtgcgcggcctgaaggctggggtgctcagccaggcggactacctcaacctggtgcagtgcgagacgctcgaggacctgaagctgcacctgcagagcactgactatggcaacttcctggccaatgaggcttcgccactgacagtgtccgtcattgatgaccggctcaaggagaagatggtggtggagttccgtcacatgaggaaccatgcgtatgagccactcgccagcttcctggacttcattacttacagctacatgattgacaacg

SEQ ID NO: 10770 - DNA, 422 bp, Bos taurus
  unsure (345): unsure at all n locations; Clone ID: 46-LIB34-011-Q1-E1-D6
acgagcaacgtggggatctctcatagttcatgaggtcctttatttcttgttctgtttacctggatttttgtttcaatttataccttacatgaaaaagtacaaaattcaaaaggataaaccagaaacatgggaaaaccaatggaaatgttttaaagtgcttctctttaatcacttttgtatccagcttccgttgatttgtggaacttattattttacagagtatttcagtattccctatgattgggaaacaatgccaagatggtacatgcttttggcaagatgttttggctgtgcagtgatcgaggatacttggcactatttcttgcataggcttttacatcacanaagaatatataaatacattcataaagttcatcatgagtttcaagctccattttggatggaagctgaatatgcacatc

SEQ ID NO: 10771 - DNA, 401 bp, Bos taurus
  Clone ID: 46-LIB34-012-Q1-E1-D10
aaagatcacagcaaagagcccccctatggtgctgacgtgcttcgctggtgggttgccgagtccaacgtcttcactgaagtcacaattagtccatctctactgaacgctgccagagatgacattagcaagcttaggaatacactccgctttcttttgggaaatgtggctggtttcaacccagaaacagattccatccctgtcaacagcatgtatgtcatagaccagtacatgctacacttactgcaggatttggcaaacaagattaatgattcatataagcagtatgactttggaaaggttgttcggcttttacaagcattttaatacaagggaactctccaatttttatttcagcataatcaaagacaggctttattgtgaaaatgcagatgatccaaacg

SEQ ID NO: 10772 - DNA, 414 bp, Bos taurus
  unsure (346): unsure at all n locations; Clone ID: 46-LIB34-012-Q1-E1-D6
agccaggaggagcgcgcgggcagcggtgaccgaggcgtgctgggattccagaagtggagaaggaggcaagatgaagactctactgctgttgatggggctgctgctcagctgggagagtggctgggcaatctcggacaaagagctccaggaaatgtccaccgaggggagtaagtacgtgaataaagaaattaaaaatgccctcaaggaggtgaaacagataaagacccaaatagaacaaaccaatgaagagcgcaaattactgctcagctccctagaggaagccaagaagaagaaagaggacgccctgaatgacaccagggattctgaaaacaagctgaaggcgtcncagggggtgtgcaatgagaccatgacagccctttgggaggaatgtaaaccctgcctcaagcagacctg

SEQ ID NO: 10773 - DNA, 388 bp, Bos taurus
  Clone ID: 46-LIB34-013-Q1-E1-D6
cggcggtcgacccacgcgaccgggaaacagaaatgtagtatgtcagaatggagagtggtcacaactaccaaaatgcttagaggcatgtcgaatttcagaagaagcaatgagaaaacatcacatacagttaagatggaaacacgataaaaaaatttactcgaaaacagaagatactagtgaatttatgtgtcaatatggttatcgtcaactgacaccaaaacatacatttcgagcaacttgtcgggaacgaaaggtggtgtaacctcgatgtggataaatcattgactaaatgcagttgtaaaactgaaatatgtacatgtattcagatttttccttattaattcaagtctgtttcttgtatcaagtacattttaactcatcttgaatc

SEQ ID NO: 10774 - DNA, 383 bp, Bos taurus
  Clone ID: 46-LIB34-014-Q1-E1-D10
aagagcggacaggggacctccgcgatggcaagcgaaaatatcttcctgtttgtgcctaacctcatcggttatgctcggattgtcttcgccatcatttctttctacttcatgccctgctgccccctcacggcctcgtccttttacctgctcagcggacttctggactctttcgatggacatgctgctcgagtccttaatcaacggacccggtttggggccatgctggccatgctgacagactggtgctctacgatgtgtctgctggtcaatctggccctgctgtaccctcgcgccacccttctcttccatctcagcatgatcctggatgtggctagccactggctgcatctcgacagttctgtggtcctacgcagtgaaagtca

SEQ ID NO: 10775 - DNA, 422 bp, Bos taurus
  Clone ID: 46-LIB34-014-Q1-E1-D6
aaagcagagatactatggaggtggttatggctccacgcaggccactttcatggtgttccaagccttggcccaataccagaaggatgttcctgatcacaaggagctgaacctggatgtgtccatccaactgcccagccgcaactctgcggtcaggcatcgtatcctctgggaatctgccagcctcctgcgctcagaagagactaaggaaaatgagcgtttcacagtaaaagctgaagggaaaggacaaggcaccttgtcggtagtgaccgtgtaccatgccaagctcaaaggcaaagtctcctgcaaaaagttcgacctccgggtttccatacgcccagcccccgaaacagtcaagaagcctcaggacgccaaacgttccatgatccttgacatctgtaccaagtacctgggagaccaggatg

SEQ ID NO: 10776 - DNA, 358 bp, Bos taurus
  Clone ID: 46-LIB34-015-Q1-E1-D6
ggcggcggcggcagcaggctggatttggcgctggggctggggccggcggtgcccagggaggtctgggcttcgcggccccggcccaggccccacaatacttaagcttttcctcttgttgctggggccggtggctgcggatataactgacggcaacagtgaacatctcaagcgggagcattcgcttatcaagccctaccacgggatcggttccagctccacgctcctctgggacttccaaggaagcacaatgctcacgagccagtatgtgcgtctgacccctgacgagcgcatcaaatagggctctatctggaaccacctgccttgcttcctcaaagactgggaaatgcacgttcacttc

SEQ ID NO: 10777 - DNA, 410 bp, Bos taurus
  unsure (383): unsure at all n locations; Clone ID: 46-LIB34-016-Q1-E1-D6
cgccttcgccgctccgccttcgccgccggtcgacaccgcaaccagttcgccatggatgatgatattgctgcgctcgtggtcgacaacggctccggcatgtgcaaggccggcttcgcgggcgacgatgctccccgggccgtcttcccgtccatcgtggggcgcccccggcaccagggcgtaatggtgggcatgggccagaaggactcgtacgtgggggatgaggctcagagcaagagaggcatcctgaccctcaagtaccccattgagcacggcatcgtcaccaactgggacgacatggagaagatctggcaccacaccttctacaacgagctccgtgtggcccctgaggagcaccccgtgctgctgaccgaggcccccctganacccaaggccaaccgtgagaacatgac

SEQ ID NO: 10778 - DNA, 406 bp, Bos taurus
  Clone ID: 46-LIB34-017-Q1-E1-D6
gtaaactgaaggaatgctgtgataagcctttgttggaaaaatcccactgcattgctgaggtagaaaaagatgccatacctgaaaacctgcccccattaactgctgactttgctgaagataaggatgtttgcaaaaactatcaggaagcaaaagatgccttcctgggctcgtttttgtatgaatattcaagaaggcatcctgaatatgctgtctcagtgctattgagacttgccaaggaatatgaagccacactggaggaatgctgtgccaaagatgatccacatgcatgctattccacagtgtttgacaaacttaagcatcttgtggatgagcctcagaatttaatcaaacaaaactgtgaccaattcgaaaaacttggagagtatggattccaaaatgcgctcat

SEQ ID NO: 10779 - DNA, 312 bp, Bos taurus
  Clone ID: 46-LIB34-018-Q1-E1-D6
aggggctacagagtggtcacagggggttctgacaaccacttgatcctcgtggacctccgctccaaaggcacagatggcggcagggcagagaacgtgctggaagcctgctccattgcctgcaataagaacacctggccaggtgataaaagcgcgctacggcccagtgggctgcgcctggggaccccagcattgacctctcgagggctcttggaataagatttccaaaaggtcgcccatttcattcacagaggcatacagctgaccctgcagatccaggacgccctaggggtgaaggccaccctgaaggagttc

SEQ ID NO: 10780 - DNA, 345 bp, Bos taurus
  Clone ID: 46-LIB34-019-Q1-E1-D6
acagtgtccactgcctcccagagaatgtggtggtgaacgaccatcacagaatggtggatggccacacgttaacctccaacaacaccgacttcgccttcagcctccaaaagcagtttgctttgaagaaccccaataagaatgtcatcctatccccgctgagtgtctccatagccttgggcttcctgtctctgggggcccgtggctccaccctgacagagatcctggaaagtcaagttcaacctcacagagatccaggagaacgaaatacaccatagctttcagcacctcctgcaagcgctcaatcaacccagcaaccagctgcacctgaacgtgggcaaagccatg

SEQ ID NO: 10781 - DNA, 425 bp, Bos taurus
  Clone ID: 46-LIB34-020-Q1-E2-D6
ggatgaagtagataagattggcagtgtgccaggcattcatcagttacgggatgtaggtggagaaggcgttcagcaaggcttattaaaactattggaaggcacgatagtcaatgttccagaaaagaattcccgtaagctacgtggagaaacagtacaagtggatacaacaaacattctgtttgttgcatctggtgctttcaatggtttggacagaatcatcagcaggaggaaaaatgaaaagtatcttggatttggaacaccatctaatctgggaaaaggtagaagggctgcagctgctgctgaccttgccaatcgaagtggagaatcatatactcaccaagacattgaagaaaaagatcgtctattacgtcatgtggaagccagagatctcattgagtgtggcatgattcctgagtttgtgggac

SEQ ID NO: 10782 - DNA, 351 bp, Bos taurus
  Clone ID: 46-LIB34-021-Q1-E1-D6
ctggctgtctgcaaggctggtgctgtggagaagggggtgcccctctaccgccacatcgccgacttggctggcaatgctgaggtcatcctgccagttccggctttcaatgtcatcaacggtggctctcatgctggcaacaagctggccatgcaggagtttatgatccttcctgttggggccgaaaacttccgggaggccatgcgcatcggagcagaggtttaccacaacctgaagaatgtcatcaaggagaaatatgggaaggatgccaccaacgtgggagatgagggccgctttgcccccaacatcctggagaacaaagaagccctggagctgcttaagaatgccatcggc

SEQ ID NO: 10783 - DNA, 328 bp, Bos taurus
  Clone ID: 46-LIB34-023-Q1-E1-D6
gatgatttcttgcaacttcgaaaaatttaaaaccatgaaacatctattactgctacttttctgtgcttttatagttcaggcccaatttcctactgactatgacgagggacaagatgacagacctaaggtaggtttgggtgcccgcggtcatcggccctatgacaagaagaacgaagaggcccccagcctgagacctgtgcgccctcccatcagcggaggtggctatcgggctcgtcccgccacagcaactgtgggccagaagaaagtggagagaaagccccctgacgctgatggctgcctgcactccggacccggatctcggtgtgtt

SEQ ID NO: 10784 - DNA, 395 bp, Bos taurus
  Clone ID: 46-LIB34-024-Q1-E1-D6
gggaggtcttcttcactctacggattcaaattttaatcacttccagagataccctcacagatatgtatggaaataatattttaccatctatctgggcatccccattcaagttgatttgtaaaattaagcatctcacacagctagtgaacagttgagctgaggttggattccagtttttctcttcccttccttcttttcctcctcctgtttcattcttgcacacaaaaaaactattaaattgaattttaggagaacttgacagagagaagtagaggtgagcttgaagttaatgacctttaggtaaatatgtcttcgagtgtataatgatgatcataatgtacctttcttgtagctccgttgcacagaatccgtgagacatgtataaagcagtttga

SEQ ID NO: 10785 - DNA, 394 bp, Bos taurus
  Clone ID: 46-LIB34-025-Q1-E1-D6
ctgcctcgagcagggagctggtggctcttccatccccagaccagccaagcctgtgagtgacaccccagacagaggaaccagagccatgcggagtctcagcggactgctgttgttactgactgcctgcctggcagtaaacgccagctccgtgcccacattgcccgatgacattcaagtgcaggagaacttcgacctgtctaggatctatgggaagtggttcaatgtggccgtgggctccacctgcccatggctgaagaggttcaaggagaagatgaccatgagcacagtggtgttgaaagcggggccgacgagcaaggagatcagcgtcaccaacactcacaggcggaaaggtgtctgtgaatcgatctctggtacttatgagaaaacaagcact

SEQ ID NO: 10786 - DNA, 412 bp, Bos taurus
  Clone ID: 46-LIB34-026-Q1-E1-D6
agctctcctgctgcctttagggccttaggctcgctgagttaagaaatggccgaggagtccagcaaagccgttaagtactacaccctggaagagatccagaagcacaacaacagcaagagcacctggctgatcctgcactacaaagtgtacgatttgaccaaatttttggaggagcatcctggtggggaggaagtcttaagggaacaagctggaggtgatgccactgaaaactttgaggatgttggacactctacagatgctcgagaattgtccaaaacgttcatcattggggagctgcacccggatgacagatcaaagataaccaagccttcggaaagtattagtactaccattgattcagatcccagctggtggaccaactggctgatcccagctatctcagcgctgtttg

SEQ ID NO: 10787 - DNA, 420 bp, Bos taurus
  Clone ID: 46-LIB34-027-Q1-E1-D6
ttagtatataaaatatgtacataccattggatgactaactatcaaatagatggatttgtatcaataccaaatagcttctgttttgttgtgctgaaggctaaattcacagtgctatgcaattcttaattttcactgttgttatctgttttaaatgtaccttcagaataagcttcccctgccccagtttttgttgcttgaaaatactgtccctgattttttttttgttaatattcattttgttactcatttcctttttttttttaagaaatgtacaggatgccagtttaaaaaaaaaatggcttcagaattaaaactatgaaatattttacagtctttcttgtacagagtacttggctgttagcccaaggttaaaaagttcataacagattttttttttttttggactaaagttttgttggg

SEQ ID NO: 10788 - DNA, 393 bp, Bos taurus
  Clone ID: 46-LIB34-028-Q1-E1-D6
ggcaacccactccagtattcttgcctagaaaatcccatggacggaggagcctgggaggctacggtccatggggtcgtgaagagtcagacacgactcagcgacttcacttttgcctagagcccacatccgtgaatctggattctggctaagtaagattccatgtttgtattagtgtcaagatgcagaggccaaggttcttgctatcaatttcaacctggaagaaatactaatagccaccacttattaagtgcctactgtgtgccaggctctgaacttggtgcttcatatacattattctaaattctcacaaccagtaaggtaagtgttttaattcccattttatagaaccccaaactaagtcttaagtggtgtgcctagaaccacatggctaat

SEQ ID NO: 10789 - DNA, 421 bp, Bos taurus
  Clone ID: 46-LIB34-029-Q1-E1-D6
attgtccctcttcgttacgttaagtttcagaacgttaacagtgtaaccatatttgttcagtccaatcaaggtgaagaagaaacaacaagaatttcatattttacttttattgggactccagtccaggcaacaaatatgaatgacttcaaacgagtagttggaaaaaaaggagaaagccactaaaggtacagaagacactggaagaccatgttgcaatcagagctacagctcctggataattgcttgattctcgccagagactttcaatatttcattcatttccattaccaataaatcattgcttttgttcagatggtatcactagtgtttctcttgtaaccttaatacatgcagttgtaaataaaaataactacgtttgccaagcttaatttttgttgttctaaataagtagtttctcttt

SEQ ID NO: 10790 - DNA, 388 bp, Bos taurus
  Clone ID: 46-LIB34-030-Q1-E1-D6
gctataactgttagacctctcgtcagtgtgatacttgttacacttggacagactctgatgtctctctttctttgccaacagactaccttatatccattttaattgttcgctaggaaaagaagttttttttaaaaaaatgcagaattcttgctttttaaggaggccgtagtaccgtaaaactggaataaagaaaacttaacttcaattttcttacgaaaatcaaggcacttagaatgatcaaggcactggtgttttttctctgaaagctgtatccttcctgtactcactttttcagaaattcatggaaatttccatcaaaggtggaaatattttcccctcctgttctgcaacgtcttagtttgagtaaagcaatttacctgaagttcta

SEQ ID NO: 10791 - DNA, 402 bp, Bos taurus
  Clone ID: 46-LIB34-031-Q1-E1-D6
tatttacctgctgcctcaggcacgccggagcaaccactggctccgggcacacggggcctgggcagtggtgacaggagccaccagcggcattggcaaggcttacgcacatgagctcgcccggagaggtctgaacgtcgtcctcatcagtcgagacctgagcaagttgaagcacgaggcaaaggagatagaggggctttacggcaaaagaacacgagtgattcaggtggatttcaccgggggcttggaaatctacgagaccattgaggcaggactgaagggcctggaggtcggagtactggtaaacaacgtgggccaaaaatatacaccccgcttgagtaaactgctcgactgtgaggacacggccaaaaaactccaggatattataaactgcaacatggtgtc

SEQ ID NO: 10792 - DNA, 394 bp, Bos taurus
  Clone ID: 46-LIB34-033-Q1-E1-D6
ggactgcaccactactcatcaccccacggcatgatccctgctcttaggtgctgggcagagggaggggcggtcagggtaaggatggggacagaggagcggtgagggcccaagcgggggagaggagctgtgttgccatgaagcagtttcatttacgtggagtagaactcttaaaagcataagcaaaggggaaaattaattttttaaaacacttgattggagggtataaatagaaacaaggagatgcaatattatttctaaggaatcatgctttcatttactttggactggtgacaactggacaggtctcagtgccctgagacctcagctttgatcagaacctcatgccagcccaggaatgcgggaaatcacactgttgtccctgtctgacccatag

SEQ ID NO: 10793 - DNA, 434 bp, Bos taurus
  Clone ID: 46-LIB34-034-Q1-E1-D10
gacccagttcccatctttggacattgaggtggatggtggagtaggtcctgacactatccataaatgcgcagaggcaggcgctaacatgattgtgtctggcagtgccattatgaggagtgaagaccccagatctgtgatcaacctgttaagaaatgtttgctcagaagctgctcagaaacgttctcttgatcgatgaaacaacaaggaccccagtgtttctgcttaggagctctcctttttactggaaaacaagaatattaactaccaaatcataccacaattgatgcagtgctgcttttctgagcaattactcatcccagtgactaaaatccattatgcagaatgttccaagatgttagaaattggtgtgtataactacatttttagtgatggaattgaaagattaatgtgataaaataccatttttactggga

SEQ ID NO: 10794 - DNA, 334 bp, Bos taurus
  Clone ID: 46-LIB34-035-Q1-E1-D6
aatacacttagggaatgttctgataagacttggatggcatgatatcagtgcatagctgcagtaccaatgtatggcagtctcgacacactgtggccattgagtgctgagcttggtcactatgtggatgttagcagacactatcaagaattaaacgatgtcttcttgagcacctgtttgttagaccattcatcaacggaacctaaatagaccgtcttactgctattaacacttgccagagaatacttaacaatacttcacggattatgtttgagaggtaattgacatgcatgccaatctacagtgtatgactgactaaatcatcttgtacgatgac

SEQ ID NO: 10795 - DNA, 372 bp, Bos taurus
  Clone ID: 46-LIB34-036-Q1-E1-D6
ctctctcaatagtattttatttaaaagttcacaattagagacttgtaataacacaaaaagtttaaaagtgacaaaggctgccctgtacgaaagatttttcttgtatggagaaggaacaaggactttgtgcctaaaatgtacaaaacttaacattgcatcaggggactcagaagatcaacggactctgtactctgaaaggaatgaacataatttccaagttattccaaagtgggcagaaaggaggagggtggcagagatggcataaatctgaagatttcacttggctcacgttaaaaatccaaagagaaacaagaaccaaacctcactagtatctaccatctgctgaaatactacaaaacaccaaattgcaaa

SEQ ID NO: 10796 - DNA, 413 bp, Bos taurus
  Clone ID: 46-LIB34-037-Q1-E1-D10
caaaactttggcacaatgaagtgggtgacttttatttctcttctccttctcttcagctctgcttattccaggggtgtgtttcgtcgagatacacacaagagtgagattgctcatcggtttaaagatttgggagaagaacattttaaaggcctggtactgattgccttttctcagtatctccagcagtgtccatttgatgagcatgtaaaattagtgaacgaactaactgagtttgcaaaaacatgtgttgctgatgagtcccatgccggctgtgaaaagtcacttcacactctctttggagatgaattgtgtaaagttgcatcccttcgtgaaacctatggtgacatggctgactgctgtgagaaacaagagcctgaaagaaatgaatgcttcctgagccacaaagatgatag

SEQ ID NO: 10797 - DNA, 422 bp, Bos taurus
  Clone ID: 46-LIB34-037-Q1-E1-D6
cagacgcgtgggctggacttcaagggaaatgcagagcagtccagattgactatcaaccaatggatatccaataagactgaagggcgtatcactgatgtcattcccccacaagccatcaatgagttcactgtcctggtgctagtcaacaccatttacttcaagggcctgtggaagtcaaagttcagtcccgagaacacaaggaaggaactgttctacaaggctgatggggagtcatgttcagtactcatgatgtaccaggaaagcaagttccgctatcggagagtagcagaaagcacccaggtgctcgagttgcccttcaagggtgatgacatcaccatggtgctcatcctgcccaagctggagaagaccctggccaaggtggaacaggaactcaccccagacatgctgcaggagtggctgga

SEQ ID NO: 10798 - DNA, 284 bp, Bos taurus
  Clone ID: 46-LIB34-038-Q1-E1-D6
ggtccacccacgcatccgaccgcggctctggatctaatgcccataacccgctctcttaagcacacatgatgacacacagaacttccttcctcctggctctggggctcctggtgtctgggttctgcgccagggtccactgcatcccatagaatatgactctagaagaccatgcacatttgggattccgtggacggccactcaatagcctccagcacaaccgaattcgccttcaacctctacaaacaatttgcttttaacgatcccaactttgaatgtcatcttct

SEQ ID NO: 10799 - DNA, 436 bp, Bos taurus
  Clone ID: 46-LIB34-039-Q1-E1-D6
agagcttttcgagcaaggtcagtagctcgcctgagccagaaatttcccaaggctgagtttgtagaagttaccaagctagtgacagatctcacaaaagtccacaaggaatgctgccatggtgacctacttgaatgcgcagatgacagggcagatcttgccaagtacatatgtgataatcaagatacaatctccagtaaactgaaggaatgctgtgataagcctttgttggaaaaatcccactgcattgctgaggtagaaaaagatgccatacctgaaaacctgcccccattaactgctgactttgctgaagataaggatgtttgcaaaaactatcaggaagcaaaagatgccttcctgggctcgtttttgtatgaatattcaagaaggcatcctgaatatgctgtctcagtgccattgagacttgccaaggaatatg

SEQ ID NO: 10800 - DNA, 153 bp, Bos taurus
  Clone ID: 46-LIB34-040-Q1-E1-D6
gatctagatcgcgaacggccgcccttttttttttttttttttttatgctgcaaaaagctttattgtttccatatggtccaaggcttgagagagggctccaaggtgttaaaaaaaagctgcctagtagctgcagaaaagggcttcaagcaaccc

SEQ ID NO: 10801 - DNA, 444 bp, Bos taurus
  Clone ID: 46-LIB34-041-Q1-E1-D6
ctcgcgggtcgacgcaagcctctatagtgagtcatatgaatgcgcagatgacagggcagatcttgccaagtacatatgtgataatcaagatacaatctccagtaaactgaaggaatgctgtgataagcctttgttggaaaaatcccactgcattgctgaggtagaaaaagatgccatacctgaaaacctgcccccattaactgctgactttgctgaagataaggatgtttgcaaaaactatcaggaagcaaaagatgccttcctgggctcgtttttgtatgaatattcaagaaggcatcctgaatatgctgtctcagtgctattgagacttgccaaggaatatgaagccacactggaggaatgctgtgccaaagatgatccacatgcatgctattccacagtgtttgacaaacttaagcatcttgtggatgagcctcaaaattt

SEQ ID NO: 10802 - DNA, 243 bp, Bos taurus
  Clone ID: 46-LIB34-042-Q1-E1-D10
aattactgtcttccaggaagtgtctgggcattccactccgggagctatctcgctagtgcaaatgtctgccggccagaggttcgcctttgcagtacgcattctagaaatgggtcgcctgagagcggggtccactctcagctacgatcctgcagagtcacctggtacaccagtgcccacgacaggcaggaggagctgttggagtgactgtgctatcggtaccccttgccgtgttcggatgtcacg

SEQ ID NO: 10803 - DNA, 238 bp, Bos taurus
  Clone ID: 46-LIB34-042-Q1-E1-D6
ggtcgacccacgcgaccaccctgacctaggacagtgaatcgataatggcactctccatcacgcggggccttctgctgctggcagccctgtgctgcctggcccccatctccctggctggagttctcgagggacacgctgtccaagacacagatgatacatcccagcaagaagcagtaggccacaagattgcccccaagctggggaactttgccttcggcatataccaccatttggctca

SEQ ID NO: 10804 - DNA, 454 bp, Bos taurus
  Clone ID: 46-LIB34-043-Q1-E1-D6
taccggacaagaattcggcggcgacccacgcgtacaggaggtcactctggaggaccggctggacaaggcttgcgagccgggcgtggactatgtgtacaagaccagacttatccagaagaagctggaagatgactttgacgagtacatcatggtgatcgagaacatcatcaaatcgggctcggacgaggtgcaggttaaacaggagcgcaagttcatcagccacatcaagtgcagggaagcccttaaactgaaggagggggcacactatctcgtgtggggcgtgtcctctgacctgtggggcgagaaacccaagatcagctacatcatcgggaaggacacctgggtggagctgtggcccgaggctgaagaatgtcaagatgaagagaaccagaaacagtgcgaggacctggccaacttcaaagagaacatggtcgtctttggctgccccaactga

SEQ ID NO: 10805 - DNA, 407 bp, Bos taurus
  Clone ID: 46-LIB34-044-Q1-E1-D6
acgcgagcgccatggccgccttacgtgccctgctgccccgcgtccgcgccccgctgcggccctggctcttctgcccggtgcagcgctccttcgcctcgagcgcagcctttgagtacatcatcacagcaaagaagggaaggaacagcaacgtggggttgatccagctgaaccgccccaaggccctcaatgcgctctgcaacggcctgatcgtggagctcaaccaggcactgcaggccttcgaggaagacccagccgtgggggccattgtcctcacaggcggggagaaggtatttgcagctggagccgacatcaaggaaatgcagagcctcacgttccagaactgttactctggcgggtttttgagccactgggaccagctcacacgtgtcaagaagccagtcatagct

SEQ ID NO: 10806 - DNA, 341 bp, Bos taurus
  Clone ID: 46-LIB34-046-Q1-E1-D10
taccccacctcccgctctcacaggcagggcccccggccaagctaactgtcaggtacgtctattcggcattggagacacaggcttctcagaggcagaggccaccctccaaccagaacagacatgagggcagagacactgtcccccctcctggctctggggctcctggtggctgggatccgcagtgtccactgcctcccagagaatgtggtggtgaaggaccagcgcagaagggtggatgggcacacgttaacctccagcaacaccgagttcgccttcagcctctacaagcagttggctttgcagaaccccaatacgaatgtcatgttctcgccgctgagtgt

SEQ ID NO: 10807 - DNA, 269 bp, Bos taurus
  Clone ID: 46-LIB34-046-Q1-E1-D6
aggacgcgtgggcgcgagcggccgccctttttttttttttcagaagcaattgctgtctttcttactgtgactttgttgctgtgtaagattgaagatataaatgaatattagtgtgagataaaaagtcagtgtgaaaattcattgacgatactttaaaatgtcatctttgcttgtaccagatttcttagtttgaatttttaaaaatcacgttcccatttaaagttttataatgactacatttatttcaggatagctaagtctgtgatttt

SEQ ID NO: 10808 - DNA, 419 bp, Bos taurus
  Clone ID: 46-LIB34-047-Q1-E1-D6
gtagctgcctcgagcagggagctggtggctcttccatccccagaccagccaagcctgtgagtgacaccccagacagaggaaccagagccatgcggagtctcagcggactgctgttgttactgactgcctgcctggcagtaaacgccagctccgtgcccacattgcccgatgacattcaagtgcaggagaacttcgacctgtctaggatctatgggaagtggttcaatgtggccgtgggctccacctgcccatggctgaagaggttcaaggagaagatgaccatgagcacagtggtgttgaaagcggggccgacgagcaaggagatcagcgtcaccaacactcacaggcggaaaggtgtctgtgaatcgatctctggtacttatgagaaaacaagcactgatgggaaagttctctatcac

SEQ ID NO: 10809 - DNA, 431 bp, Bos taurus
  Clone ID: 46-LIB34-048-Q1-E1-D10
cgcttcctcctttcctcaggcatcaaagcagagaccacgggaacctagttcaccaggctcgaggctggaggccccgccatgacatccctaaggccccttctgatgctggccctgctggcgtgggttgttgtggctgaccaagagtcctgcaagggccgctgcaccgagggcttcaacgccaccaggaagtgtcagtgtgacgagctctgttcttactaccagagctgctgtgccgacttcatggctgagtgcaagccccaagtgactcgtggggatgtgttccatctgccagaagatgagtacgggttccatgactacagcgacgcgcagaccgtcaacagcaacgtggaagcacagcccgagagcaacaccctggcccctgttctgcaggctcagaccctagagactcctgtccaggcaccagttctcaa

SEQ ID NO: 10810 - DNA, 423 bp, Bos taurus
  unsure (301),(326): unsure at all n locations; Clone ID: 46-LIB34-048-Q1-E1-D6
gtcacaacccccgactctgcctggtacccttgatcctgggcctcttgtgtggaggtgtgggcatgacgccattgcctgaggctgggccccaaagcccctgctctctggagggagtagagatcaaaggtggctccttccggcttctcaaggcgggccaggtgctggagtacttgtgtccttctggcttctacccataccccacgcagattcgcacctgcagatccacagggtcctggagcaccctgcagactcaagacagaaagattgtcaagagggctgaatgcaaagcaattcgctgtcncagaccacaggattttgagaatggngagtactggcccgggctgcctactacaatttgagcgatgagatctctttccgctgctatgatggctacactcttcggggctctggcaatcgcacctg

SEQ ID NO: 10811 - DNA, 341 bp, Bos taurus
  Clone ID: 46-LIB34-049-Q1-E1-D10
acgtcgcctggatgttcatggacaagcactcagaaacgcatcctgagaatgccgctaccactgcgatcgcaatctactaaggaattaaagaccataatgtgcgaatcgctgcgctacaacatcatcaatatgcatgacattccacagtgtatgcacatcattaaccatcctagcgcatgagccccatgatgaattcacataaaatggtgaccaaatcgactgacatagagagtgaacgctctaaatgtcacccatagttcgtaatcataacaatagtagtccagatatcaactcgacatctcgtagatgtttccagattcctacgtttggtgggtactaag

SEQ ID NO: 10812 - DNA, 434 bp, Bos taurus
  Clone ID: 46-LIB34-050-Q1-E1-D6
cagctatacaggacacgtgatcaaaagacaatggccccgacgcgatgtaaggggtacgagtcctccacagttactggcatgataatgtctcatgctttgatgacattgtatctcacacagtcacacctctctggcactatatgcctagtggttttgagtaactctctagaattcatcattaagacattcgtccttgtatccagggtattgatgtcattcacacattgctcaattctaggactgtagaaaacaagtcacttttgccgatgacatgttcggcagtcagatgtacattagattctattcgccatgcattgcgatgaactttcacatctacgaaaagagttgtgacgtcaaatacaatcatgtgtatatggtcctaggagattacatgggtgcctcgttgcatgcctgcattgggggtaccaatgtac

SEQ ID NO: 10813 - DNA, 225 bp, Bos taurus
  Clone ID: 46-LIB34-051-Q1-E1-D6
ctttatgtcttctttggaggaatgtctgttcaggtcttctgcctattttttgattgtttttttgttttttttaatattgagctgcatgagctgattatttttaggggtttatttttaggggttaatcccttgtcagttgctttatttgcaaatatttgctcccattctgagggctgtcttttcatcttatttatgatttcctttgctgtgcaaaatcttttaagt

SEQ ID NO: 10814 - DNA, 241 bp, Bos taurus
  Clone ID: 46-LIB34-052-Q1-E1-D10
cacagctaaagttcaggaagaaattgatcgtgtggttggcagaaaccgaagcccctgcatgcaggacaagagctgcatgccctacacagatgctgtgctgcatgagatccagagatacattgaccttgtccccagcagtatgccccatgcagcaactcaggatgttaagttcagagaatacctcattcccaagggcacagtcatattaacatctctgacttctgttctgcatgatgataac

SEQ ID NO: 10815 - DNA, 237 bp, Bos taurus
  Clone ID: 46-LIB34-052-Q1-E1-D6
cattatttcccaggaagtcataatacaatatttaaaaacatgactgagcaaagaaagtttattttggaggaaataaagaaacaccaagaatccctggacctcaataaccctcaagattttattgattactttctgattaaaatggaaaaggaaaaacacaataaacattctgaatttaccatggacaacttgatcaccaccgtatgggacgtgtttagtgctggaacagagacaaca

SEQ ID NO: 10816 - DNA, 236 bp, Bos taurus
  Clone ID: 46-LIB34-054-Q1-E1-D6
ccaggggtcaccacagcagcatggctgaatcgagcaagcccatcctgtattcctatttccgaagctcctgctcatggagagttcgaatcgctctggccttgaaaaacatcgactatgagacagtagccatcaacctcacaaaggatgggggccagcagttctctggagaattccaggccctgaatcccatgaagcaggtgccagccctgaagattgatgggatcaccatcggccac

SEQ ID NO: 10817 - DNA, 351 bp, Bos taurus
  Clone ID: 46-LIB34-055-Q1-E1-D6
gtttgtgtcctacagagaagaatgttgacctttccacattttatcaaaacagagctgctgcctttgagcaattgcaaaaatggaaagaggtggcacaagattgtacaaaggctgttgaacttaatcccaaatatgtgaaagctctctttagacgtgcaaaagcccacgagaagctagacaataagaaggaatgtttagaagatgtcactgctgtatgtatattagaaggattccaaaatcaacaaagcatgctgttagctgataaagttcttaaacttcttggaaaagagaaagccaaagaaaaatataagaatcgtgaacctctgatgccatctccacaatttatcaaat

SEQ ID NO: 10818 - DNA, 329 bp, Bos taurus
  Clone ID: 46-LIB34-056-Q1-E1-D10
ggaccgggctacaggctaccacttccatgccctgacttgtgagggctgcaagggtttcttcaggcgaacagtcaacaaaagcaccagtctcacgtgccccttcgctggaagctgtgaggtcaacaaggcccagaggcgccactgccctgcctggaagctgcaaaagttcctggaagccggcattaagaaagacctgattctaacgacagaaaccctggcaatgccgcgaacaagacaggcccaaccacgggcacagcaaggatcgatgcagctgactaaggagcacaaagagctaatccggacactcctgggggcccacgctcgccatg

SEQ ID NO: 10819 - DNA, 372 bp, Bos taurus
  Clone ID: 46-LIB34-056-Q1-E1-D6
tgataatcaagatacaatctccagtaaactgaaggaatgctgtgataagcctttgttggaaaaatcccactgcattgctgaggtagaaaaagatgccatacctgaaaacctgcccccattaactgctgactttgctgaagataaggatgtttgcaaaaactatcaggaagcaaaagatgccttcctgggctcgtttttgtatgaatattcaagaaggcatcctgaatatgctgtctcagtgctattgagacttgccaaggaatatgaagccacactggaggaatgctgtgccaaagatgatccacatgcatgctattccacagtgtttgacaaacttaagcatcttgtggatgagcctcagaatttaatcaa

SEQ ID NO: 10820 - DNA, 219 bp, Bos taurus
  Clone ID: 46-LIB34-057-Q1-E1-D6
ggcaggaggaggagaccctattctatatcaacacttattctgattctttggacaccccgaagtctatattttaatcttacctgggtttggaataatctctcatatcgtgacctactactcaggaaaaaaagaaccattcggatatatgggaatagtttgggctataatgtcaatcggatttctaggtttcatcgtatgagcccaccatatattcactgt

SEQ ID NO: 10821 - DNA, 252 bp, Bos taurus
  Clone ID: 46-LIB34-058-Q1-E1-D10
gtccggaactcgcgggtaaacccaagcctctacacaaattgctttggaaaaagtgataccatacagacggattatgttgtttatatggatgagcttgcctccttcattggggcaaagcccaacatcccatggctgtttctcacagatccaaagttggcattggaggtctactttggcccttgcaccccataccagtttaggctggtgggcccaggaaagtggccaggagccagaaacgccatcctgacccag

SEQ ID NO: 10822 - DNA, 206 bp, Bos taurus
  Clone ID: 46-LIB34-059-Q1-E1-D10
gttctgtgttttatggggcaccacgtaagagcaaactcttgtccacgttgtgctctgcggatgtctgccagtgtgctgaggggaagtgccctcgacagcgccgggccctggagcgtgggcagcaggacttggagggttaccggatgaaattcgcctgctactctccccgagtggactatggcttccaggttaaggttctccgagaa

SEQ ID NO: 10823 - DNA, 205 bp, Bos taurus
  Clone ID: 46-LIB34-059-Q1-E1-D6
gcacggacaaggcgtgtgcatggagctggcagagatcgaggccatccaggaaagcctgcagccctctgacaaggacgagggcgaccaccccaacaacagcttcagcccctgcagcgcccacgaccgcaagtgcctgcagaagcacttggccaaaattcgagaccggagcaccagtgggggcaagatgaaggtcatcggggcgccc

SEQ ID NO: 10824 - DNA, 234 bp, Bos taurus
  Clone ID: 46-LIB34-060-Q1-E1-D6
ggagaaaatgtccttgtggagaccctaaaccatgaattgtacgaggctaagtacgtgattagcgctgttcctcctgttctgggcatgaagattcacttcaatccccctctgccaatgatgagaaatcagctgatcactcgtgtgcctttgggttcagtcatcaagagtatagtttattataaagagcccttctggagaaatatggattactgtggaagcatgattattgaagga

SEQ ID NO: 10825 - DNA, 405 bp, Bos taurus
  Clone ID: 46-LIB34-061-Q1-E1-D6
acggacgcgtgggcacccacggaggcacggagaggcttctgggactacttcagccagagcagcggggacaaaggcaaggtggagcagcagcagaagctggcaagggagcccacgagcctgaaagaaagacttgagccagacctcagcgatatggacaagttcctggaaaagctgggccctctgaacgggcaggggagggagattcccaggctcccacgcgacccggtgggcatgtggcagcagctgcaggaggagctggaggaggtgcgggcgcgtctggagccctacatggcggaggtgcacgagcgcgtgggctggaacctggaggggctgcggcggcagctgcagccctacacggtggagctgaaggaacaagttggccctgcccgtgcacgagctgcagga

SEQ ID NO: 10826 - DNA, 225 bp, Bos taurus
  Clone ID: 46-LIB34-063-Q1-E1-D10
aaaggatgcaatacctgaaaacctgccccaattaacggcggactttgctgaaaataaggatttttgcaaaaacaatcaggaagcaaaaaatgccttcctgggctcgtttttgtatgaaaattcaagaaggaatcctgaatatgctgtctaactgctattgagacttgccaaggaatatgaacccacactggatgaatgctgtgccaaagatgatccacatgcatg

SEQ ID NO: 10827 - DNA, 200 bp, Bos taurus
  Clone ID: 46-LIB34-065-Q1-E1-D10
ctgcgaggagccggtggatggagacctgggagacaggctgggtgaggacccggacccggacgcggccatcgagggacgcacgtctgaggaccatttccagcccttcttcaacgagaagacctttggcgccggggaggccgactgtggcctgcgacccctgttcgagaagaagcaggtgcaggaccaaacggagaaggagc

SEQ ID NO: 10828 - DNA, 260 bp, Bos taurus
  Clone ID: 46-LIB34-066-Q1-E1-D6
ctcagatctagatttctagcagcagacatgaatgaagcctttatatcttgtcattatgccagtcttgaaagatagatgggaaaagataaaagaatgttgtctaactcatcattgactatggaaatactttctaagcaatcaagagttagacaacatttccatagtcaatgatggttcaataggcaaaccaggtcctataaacctgaattttttttatggtcaatactgttaagcagaaatgtagaacaggactggcaaat

SEQ ID NO: 10829 - DNA, 206 bp, Bos taurus
  Clone ID: 46-LIB34-067-Q1-E1-D10
gtgactgccagtcaattgcccctatctacgctgacctctcgctcaaatacaactgtacggggctgaattttgggaaggtggacgttggacgctacactgacgttagtacacggtacaaggtgagcacgtcacccctcaccaagcagctgcctaccctgatcctgttccaaggtgggaaggaggttatgcggcggccgcagatcgac

SEQ ID NO: 10830 - DNA, 234 bp, Bos taurus
  Clone ID: 46-LIB34-067-Q1-E1-D6
ccggagttcgaggcggtggtgcggcaggccgagttggccatcgagcgtggcatcttccccgagcgcatctatcagggctccagcggaagctacttcgtcaaggaccctcaggggaagatcatcgctgtgttcaaacccaagaatgaagagccatacgggcaacttaatcctaagtggaccaagtggctgcagaagctgtgctgcccctgctgctttggccgtgactgccttgtc

SEQ ID NO: 10831 - DNA, 213 bp, Bos taurus
  Clone ID: 46-LIB34-068-Q1-E1-D6
ggcacaatgaagtgggtgacttttatttctcttctccttctcttcagctctgcttattccaggggtgtgtttcgtcgagatacacacatgagtgagattgctcatcggtttaaagatttgggagaagaacattttaaaggcctggtactgattgccttttctcagtatctccagcagtgtccatttgatgagcatgtaaaattagtgaacgaa

SEQ ID NO: 10832 - DNA, 273 bp, Bos taurus
  Clone ID: 46-LIB34-069-Q1-E1-D10
accggtacggcaattcggcgtcgacacacgcgtacgctagttctagatcgcgagcggccgcccttttttttttttttttagaacaactcagcaaaataaaattccggtttattgttggacaacattgtttcacacatacatcaaacaggccaaaaaaataaacagcaacttcatagacaaaaaaaggaaaaaaaagaaaccttttatctttggcctttttaaccatcatcatacaaaccaactacttatagctacagcctagagtacactaca

SEQ ID NO: 10833 - DNA, 212 bp, Bos taurus
  Clone ID: 46-LIB34-069-Q1-E1-D6
cgatgttcttcaccctggaaaggcaacagtacctaaaacagaaattcgggaaaaactggccaaaatgtacaagaccacaccagatgtcatctttgtatttgggttcagaacgcattttggtggtggcaagacaactggctttggcatgatttacgattccttggattacgcgaagaagaatgagcccaaacacaggcttgcgagacatggcc

SEQ ID NO: 10834 - DNA, 168 bp, Bos taurus
  Clone ID: 46-LIB34-070-Q1-E1-D6
ctggaaggtctcaagttcaacctcacagagacccccgagacagaaatccaccagggcttccacacctcctgcagacgtcatcagccacaccactgactgactggcaccatgttgttcaagctaactgcgaaattcagaaatgccagctttacctctgagtttatcact

SEQ ID NO: 10835 - DNA, 366 bp, Bos taurus
  Clone ID: 46-LIB34-071-Q1-E1-D10
agggagccgcgcggaggcggaggctcgggtgcattcaagattcggctccacccgtaacccaccgccatggccgaggaaggcattgctgctggaggtgtaatggacgttaatactgctctgcaagaggtactgaagaccgccctcatccacgatggcttagcacgtggaattcgcgaagctgcgaaagctttagacaagcgccaagcccatctgtgtgtgctcgcatccaactgtgatgagcctatgtatgtcaagttggtggaggccctttgtgctgagcatcaaatcaacctgattaaggttgatgacaacaagaaactaagggaatgggtaggcctctgtaaaattgacagagaggggaaacct

SEQ ID NO: 10836 - DNA, 406 bp, Bos taurus
  Clone ID: 46-LIB34-071-Q1-E1-D6
atggggctataaggatccattcttgagttcggttccatactctattcctaccacagttggtgtgttttatccttacaacaacactgcagatggagtttataaagttttcaatggaaaagatgacataagcaaagttgccagaattgacacatataaaggcaaaaagcatctctcctattggccaagttattgtggcatgattaatggtacagacggagccacatttccacctttcattgagaagaatcgggtactccaattcttttctgctgacatttgcaggtcattttacgctgtgtttggagccgaaattaatctaaaaggaatccctgtgtatagatttgttcttccatccaggatttttgcatctccacttcaaaatccagacaaccaatggttccggcac

SEQ ID NO: 10837 - DNA, 411 bp, Bos taurus
  Clone ID: 46-LIB34-073-Q1-E1-D6
acaaaaatcttaatgaaccccaaaagagacagttcccatccatttgttggcctggcttttaaactggaggctggtcgatttggccagttaacgtacgttcgcaattatcaaggagagttgaagaaaggtgataacatctataatacgaggacgagaaagaaagtgcgggtgcagcgactggttcgcatgcatgccgacatgatggaggatgttgaggaagtgtttgctggagacatctgtgcattgtttggcattgactgtgccagtggagacacattcacaaacaaagataatagcggcctttctatggagtcaattcatgttcctgatcctgtcatttcaatagcaatgaagccatctaacaagaatgatctggaaaaattttccacaggtattggcaggtttacaaga

SEQ ID NO: 10838 - DNA, 449 bp, Bos taurus
  Clone ID: 46-LIB34-075-Q1-E1-D6
ccgggtcgacacacaagtctaaaatctttggcacaatgaagtgggtgacttttatttctcttctccttctcttcagctctgcttattccaggggtgtgtttcgtcgagatacacacaagagtgagattgctcatcggtttaaagatttgggagaagaacattttaaaggcctggtactgattgccttttctcagtatctccagcagtgtccatttgatgagcatgtaaaattagtgaacgaactaactgagtttgcaaaaacatgtgttgctgatgagtcccatgccggctgtgaaaagtcacttcacactctctttggagatgaattgtgtaaagttgcatcccttcgtgaaacctatggtgacatggctgactgctgtgagaaacaagagcctgaaagaaatgaatgcttcctgagccacaaagatgatagcccagacctccctaaa

SEQ ID NO: 10839 - DNA, 410 bp, Bos taurus
  Clone ID: 46-LIB34-076-Q1-E1-D10
gacccacacgtcagcccaaactctgtcaactgtgtgcggggaaagggacagacaagtgtgcctgctccaaccacgaaccatacttcggctactcaggggcctttaaatgtctgatggagggcgctggggatgtggcctttgtcaagcactcaacggtattcgacaacctgcctaacccagaagacaggaaaaactatgagctgctctgcggggacaacacccggaagtctgtagataattaccaagaatgctacttggcaatggttccttcccatgcggttgtggctcgaactgtgggcggcaaggaggatgtgatctgggaacttctcaatcacgcccaggaacattttggcaaagataaaccagacaatttccagcttttccaatcccctcatgggaaggacctgctg

SEQ ID NO: 10840 - DNA, 473 bp, Bos taurus
  unsure (340): unsure at all n locations; Clone ID: 46-LIB34-076-Q1-E1-D6
cgggtcgacccacgaatccgcggacgcgtgggttatacatcaaaacctaagattatctttgtataataatttgtttttcttagttgagagtaactgcatagatactactcgcaaggagtttacatgatgcatacaataaaaattgggtgttttcccagagatggatctagtttctgatttgatttaataatgatatacttaagataccactttataaagaagtgaaattccacactatagaaactccttaacaggtttaaaatacctttttgacaaaaatgccaactccatctttaatatcagagaaatctgattgtccagaatggtacatatatctgtntaatatgtaacatattaataaggtaacctgctatgtaaaatttgtttataagccaatattttagaggtttaaaaactacttaatgtgttccatttgtgatataacctttaacatttctgacctgttgtgggat

SEQ ID NO: 10841 - DNA, 462 bp, Bos taurus
  Clone ID: 46-LIB34-077-Q1-E1-D6
gtccgggaagttatggctccacgcaggccactttcatggtgttccaagccttggcccaataccagaaggatgttcctgatcacaaggagctgaacctggatgtgtccatccaactgcccagccgcaactctgcggtcaggcatcgtatcctctgggaatctgccagcctcctgcgctcagaagagactaaggaaaatgagcgtttcacagtaaaagctgaagggaaaggacaaggcaccttgtcggtagtgaccgtgtaccatgccaagctcaaaggcaaagtctcctgcaaaaagttcgacctccgggtttccatacgcccagcccccgaaacagtcaagaagcctcaagacgccaaaggttccatgatccttgacatctgtaccaagtacctgggagaccaggatgccactatgtccatcctggatatatccatgatgacaggcttctcacctgatgttg

SEQ ID NO: 10842 - DNA, 463 bp, Bos taurus
  Clone ID: 46-LIB34-078-Q1-E1-D10
gtcgacacacgcgaaaggtgacttgcatcacagtgccactgagattgtgggccaccgctgggtgaaggggggcaaggtgctgaaggaggacgccctgcctgacctgaagacggagtatgaggtggactcagaagaccgctcaggccagtactcctgcatcttccttccggagcacgcgggccgcaccgatctggaagtgaagggaccccccagcatcaaggccgtgaagaagtcggagcacgccacggagggggagactgtgatcctggtctgcaaatcggactccttcccgccagtcaccaactggctgtggtacaaggaaagcgaatctggggaccaggtcatcaccaacagcacccagagcaagttcttcgtggtctcctcagagagccgcacagagctgcacatccccaacgtggacctgaaggatgaccccggcaagtacgtgtgcaacggcaccaac

SEQ ID NO: 10843 - DNA, 413 bp, Bos taurus
  Clone ID: 46-LIB34-079-Q1-E1-D10
gtgcctgcctgctaccaaagattgaaactatgagagaaaaagtactgacttcatctgccagacagagactcaggtgtgccagtattcaaaaatttggagaaagagctttaaaagcatggtcagtagctcgcctgagccagaaatttcccaaggctgagtttgtagaagttaccaagctagtgacagatctcacaaaagtccacaaggaatgctgccatggtgacctacttgaatgcgcagatgacagggcagatcttgccaagtacatatgtgataatcaagatacaatctccagtaaactgaaggaatgctgtgataagcctttgttggaaaaatcccactgcattgctgaggtagaaaaagatgccatacctgaaaacctgcccccattaactgctgactttgctgaagat

SEQ ID NO: 10844 - DNA, 415 bp, Bos taurus
  Clone ID: 46-LIB34-079-Q1-E1-D6
gacattccaggctcggagccccgggcccgccgacaccatgagttggtcctcgcaccctccgagtgtaatcttctacattctttcattgctttcttcagcatgcctggcatatgttgctacccgagacaactgctgcatcttagatgaaagatttggtagttattgcccaactacctgtggaattgcagatttcctgaataattaccaaaccagtgtagacaaagatctacgaactttggaaggcatcttatatcaggttgagaacaaaacatcagaagccagagagctggtcaaagcaatccaaatcagctataaccctgatcaaccatcaaagccaaataacatagagagtgctaccaggaattccaagagtatgatggaagaaattatgaaatatgaaacactgatatcaaca

SEQ ID NO: 10845 - DNA, 426 bp, Bos taurus
  Clone ID: 46-LIB34-082-Q1-E1-D10
actggagtatttgtgtgaatgtaccactgggaaaatctaacatgttgatgttaatcaatgtccttctcaccttgtggttttacactgctcatggacaggggaaacattgtaattatccagtaataagacatggacggctatatcagtcatacagtggatactttccagcacgtgtaaatcagcagtttctctataactgtgatcagtattttgtgcctccttcactatattcctcggattacctgacttgcacagcacaaggatggtttccagaagaaccatgccttagagaatgtattttcaataatttggaaaatggatataccccaagtagtgaaagaaaagctgtacatggtgaaacactaagggttcgctgctattatggctacagtcttcaacataatcagaacacaatgacctgcacag

SEQ ID NO: 10846 - DNA, 311 bp, Bos taurus
  Clone ID: 46-LIB34-082-Q1-E1-D6
atgcaggagaatgtagtggtacatgacgtggtggcagtaacatgaaaaggatccggcgtttccaccatgctgtatcctttgtacatgctcgacacagatgccgaaattatgatcacgatgtattctgcatggaccttgccagccagtgaagaaatgacttcatctctttgtcagtcgtcctattcagcagacattttcccagtggtacgtctgaccagatcagctatctagtgaatgaagttgattccttcacagtatgctgccgtgagtaaagggccgatgctgactgctatgagcacaggacttcagca

SEQ ID NO: 10847 - DNA, 395 bp, Bos taurus
  Clone ID: 46-LIB34-083-Q1-E1-D6
aaaagatgaccatgagcacagtggtgttgaaagcggggccgacgagcaaggagatcagcgtcaccaacactcacaggcggaaaggtgtctgtgaatcgatctctggtacttatgagaaaacaagcactgatgggaagtttctctatcacaaagccaagtggaatatcaccatggagtcctatgtggtccacaccaactacgatcagtacgccatttttctgaccaagaaattaagccgtcgccatggacccaccattactgtcaagctctatgggcgtgagccgcagcttcgggaaagcctgctggaggaattcagggaggtggccctgggtgtgggcatccccgaagatgccatcttcacaatgcccgacagaggtgaatgtgttcctggagag

SEQ ID NO: 10848 - DNA, 394 bp, Bos taurus
  Clone ID: 46-LIB34-084-Q1-E1-D6
gtcccgggactgatactcagttttgcctgacttctgcatgttgtcatctcgtgtacgcctggtcgccacgacagcccgcctggtccattccctgatctacagttcttcccgttccttcatggatctgaaggctctcctttcctccttgaatgactttgcatccctctcatttgctgagagctgggacaatgttggattactggtggaaccgagcccaccacacactgtaaacacgctcttcctgaccaatgacttgactgaggaagtgatggaggaggcgctgcagaagaaggcggatctcatcctctcctaccatccgcctattttccgacccatgaagcgcatcacctggaaaacatggaaggagcgcctggtaatccgggcactggagaac

SEQ ID NO: 10849 - DNA, 387 bp, Bos taurus
  Clone ID: 46-LIB34-085-Q1-E1-D10
agtgaatgcgcagatgacagggcagatcttgccaagtacatatgtgataatcaagatacaatctccagtaaactgaaggaatgctgtgataagcctttgttggaaaaatcccactgcattgctgaggtagaaaaagatgccatacctgaaaacctgcccccattaactgctgactttgctgaagataaggatgtttgcaaaaactatcaggaagcaaaagatgccttcctgggctcgtttttgtatgaatattcaagaaggcatcctgaatatgctgtctcagtgctattgagacttgccaaggaatatgaagccacactggaggaatgctgtgccaaagatgatccacatgcatgctattccacagtgtttgacaaacttaagcat

SEQ ID NO: 10850 - DNA, 393 bp, Bos taurus
  Clone ID: 46-LIB34-085-Q1-E1-D6
aggcgtgacccacccgccatgctccccccagcgctcgtcttgctgttggggtttctctgccacgttgctatcgcaggacgaacctgccccacgccagatgagctaccgttttccacggtggttccactgaaacggacctatgagcccggggagcagatagtcttctcctgccagccgggctacgtgtcccggggagggatccggcggtttacatgcccgctcacaggactctggcccatcaacacgctgaaatgcatgcccagagtatgtccttttgctgggatcttagaaaacggaacggtacgctatacaacgtttgagtatcccaacaccatcggcttttcttgccacacggggttttatctgaaaggagctagttctgcaaaatgcact

SEQ ID NO: 10851 - DNA, 468 bp, Bos taurus
  Clone ID: 46-LIB34-086-Q1-E1-D6
ccgggtggcccacgcgtccgaacattttagcgctgtcattctacaaggtcatcctgggtgcacacaacgagaaagtccgggaacagagtgtccaggaaataccagtgtccaggctgttccgggagccctctcaggcggacattgccttactcaagctgagcagacctgccatcatcacgaaagaggtaatcccagcttgtctgccacccccgaactacatggttgcagcccggacagaatgttacatcactggctggggagaaacccaaggcacttttggtgagggcctcctgaaggaagcgcacctgcctgtgatcgagaacaaggtgtgtaatcgcaacgagtatctcgacgggagggtcaagcccacggagctgtgtgccggccatctgattggagggactgacagctgccagggtgacagccgcgggcctctggtctgctttgagaaggacaaatacattctgc

SEQ ID NO: 10852 - DNA, 400 bp, Bos taurus
  Clone ID: 47-BOVMS1-001-Q1-E1-D12
atttatagcctttacaatacggacttctgtgtatatgttatactgattctactctctgcttttatcctttggagactgggagactccccaaaaaggtaaatgctatcaagagtagaactttgtagctgtagattagttctgtttaaaacgcctacttgcaagtcttgcttctttgggatatcaaaatgtattttgtgatgtactaaggatactggtcctgaagtctaccaaatattatagtgcattttagcctaattcattatctgtatgaagttataaaagtagccgtagatgattaggaattatgtcatttgtattaaacccagatctatttctgagtatgtggttcatgctgttgtgaaaaatgttttaccttttacctttgtcagtttgtaacgag

SEQ ID NO: 10853 - DNA, 432 bp, Bos taurus
  Clone ID: 47-BOVMS1-001-Q1-E1-D4
cccacgcgtccgatcttacctccttgtgacattggtgcctgctgttgtctgtgtacgctaactccaccgtttccagcctactgccaataaacagctatttaagggggaaaaaaaaaaaaaaaaaataacaacaaaaaaaaaaaaaaaaaaaaaaaaaaaaaaaaaaataaaaacaaaaaaaaaacataaataaaaaaacaaaaaacaaaaaaaaagggcagcccccctaaaggttccaaccttacttacccttaaatccaaattaaaaacccttcaaaagtgtcaccaaatttcaattaaatggccttcttttaaaaagttcttaactggaaaaacccttgagttacccaacttaacccccttgaacaaaatccccctttctaaagctggcttaaaaccaaaaaggcccgaaccattaccccttccaaaaat

SEQ ID NO: 10854 - DNA, 121 bp, Bos taurus
  Clone ID: 47-BOVMS1-002-Q1-E1-D4
aggactatctggcatgcctcgacgatactccgactacccagatgcatacacaatatgaaatactatctcatcaataggctcattcatttccctaacagcagttatactaatagttttcatc

SEQ ID NO: 10855 - DNA, 366 bp, Bos taurus
  unsure (97),(311): unsure at all n locations; Clone ID: 47-BOVMS1-003-Q1-E1-D4
ctggaaggcaagtccaaactcctccaaaagggtcaccaaaattcaattcacgggccgtcgtttacaacgtcgtgactgggaaaaccctggcgttacncaacttaatcgccttgcagcacatccccctttcgccagctggcgtaatagcgaagaggcccgcaccgatcgcccttcccaacagttgcgcagcctgaatggcgaatgggacgcgccctgtagcggcgcattaagcgcggcgggtgtggtggttacgcgcagcgtgaccgctacacttgccagcgccctagcgcccgctcctttcgctttcttcncttcctttctcgccacgttcgccggctttccccgtcaagctctaaatccggggct

SEQ ID NO: 10856 - DNA, 411 bp, Bos taurus
  Clone ID: 47-BOVMS1-004-Q1-E1-D4
ggtcggcctcacgggtcgacgacgcgttcgggccaacagctgcaggctgagatcgaggagctgagggccaccctggagcagacagagaggagcaggaagatcgcagagcaggagctcctggatgccagtgagcgtgtccagctcctgcacacccagaacaccagcctgatcaacaccaagaagaagctagagacagacatcactcaaatccagggagagatggaggacattatccaggaagctcgcaacgcagaagagaaagccaagaaggccatcactgatgcagccatgatggctgaggagctaaagaaggagcaggacaccagtgcccacctgtagcggatgaagaagaacctggagcacacggtgaaggacctgcagcaccgcctggacgaagctgagcagctggcc

SEQ ID NO: 10857 - DNA, 417 bp, Bos taurus
  Clone ID: 47-BOVMS1-005-Q1-E1-D4
gaaaaaggagtatttaaatgaagatgtgaatggattcatggaatatttaagacaaaactcacagatgcttcacaatggtgaggtgatagcaacagacagtcagaaagtaagggaagaaattgaagttgctttaaagaaagacagtcgccgggaaggaagacgattaaaaagacaagcagcaaagaaaaatgcaatggtatgtttccattgtagacagcctggccatgggattgcagattgccctgctgcccttgagaatcaagaaatgggcactggaatatgttacaggtgtggatccacagagcacgagataaccaagtgcaaggctaaagtagacccagctcttggtggtggctgcagactgtgtggctctgtggaacatatgaagaaagattgtcccgaaagtcagaactcaga

SEQ ID NO: 10858 - DNA, 313 bp, Bos taurus
  Clone ID: 47-BOVMS1-006-Q1-E1-D4
cgtccgagcatataattacccagatctggacaatttcacattgttaaatcagaaccttgactagttcaaacccaaatttaaacttctttgtccattatgtttaaattcttttaacattaaattcaagcattgttcagagcctctaaaaaagaaggttgcagtcatctgtttttatgctatgcatggggtctgatctcagatacactaaatacggggcgtaggaactaaaacctgatgtatgaaactgctttcacttatggttcattggtttttgtacaaatatttttttatacacttcagtgcaagtcttgtc

SEQ ID NO: 10859 - DNA, 443 bp, Bos taurus
  Clone ID: 47-BOVMS1-007-Q1-E1-D4
gacaggtaccattggtgatgagaaggcggaaatgttcagaaatcaagtgactgggaaaataaacctcctgggcctggtagaaattgtcttgctcagtgttggtgtggtgatgtttattgctttcatgatttcatattgtgcatgcagatcaaagagagtaaattaaggagtaaaagagtctctacatttatgaaccagctatgtcaggacctttcttaatatcaccttacaaaagtcaagattttcatgctttatttttgcaaaacacaccttatcttacagttcaagaactggtgacactccctcccacctgcccccataagcagcagcacatttcaaaaggattattaagacatcattaaattccacacttcgaacgaaaaaccagcacttttaaaaattcaacatgttcacaatggaatggacttcagtttctacagatg

SEQ ID NO: 10860 - DNA, 473 bp, Bos taurus
  Clone ID: 47-BOVMS1-009-Q1-E1-D12
cgggtcgatcacgcgtccgtcaaaatcttaatacaaattattcccatcctattggccgtagcattccttacgttagtggaacgaaaagttctaggctatatacaactccgaaaaggtccaaatgtcgtaggtccatatggcctacttcaacccatcgccgatgcaatcaaacttttcattaaagaaccactacgacccgctacatcttcagcctcaatatttatcctagcacctatcatagctttaggcctagccttaaccatgtgaattcccctaccaataccctatcctcttatcaacataaacctaggagtcctatttatactagccatatcaagcctagccgtatactccattctctgatcaggctgagcttccaactcaaaatacgcactaatcggagccctacgagcagtagcacaaacaatctcatacgaagtaacgctagcaattatcctgttatcagtactcct

SEQ ID NO: 10861 - DNA, 409 bp, Bos taurus
  Clone ID: 47-BOVMS1-009-Q1-E1-D4
atgcgacgtcatagctcttctatagtgtcacctaaatcaaatcaacgggcgttcgtttaacaacttcttaacggggaaaaccctggcgtaacccaacttaaccgccttgcagcaaatccccctttcgcaagctggcgtaataccgaaaaggcccgcaccgatcgcccttcccaacagttgcgcagcctgaatggcgaatgggacgcgccctgtaccggcgcattaagcgcggcgggtgtggtggttacgcgcagcgtgaccgctacacttgccagcgccctagcgcccgctcctttcgctttcttcccttcctttctcgccacgttcgccggctttccccgtcaagctctaaatcgggggctccctttagggttccgatttagtgctttacggcacctcgaccccaaaa

SEQ ID NO: 10862 - DNA, 460 bp, Bos taurus
  Clone ID: 47-BOVMS1-010-Q1-E1-D4
aaaaaaaaataatggggaatccaaaggaaacggcatttgccaccgctagccgtctgggattatattccaaaacctcccattcagtctcaggagaagaaatagatgcaatggatgtccagcagctttcacaaatagtgccaaaggttgcagtattttacagagctagcccaaggcataagatgaaaattatcaagtctctgcagaagaatgggtcagttgtggccatgacaggagatggagtaaatgatgcagttgctctgaaggctgcagacattggagttgcgatgggtcagactggcacagatgtttgcaaagaggcagctgacatgatcctggtggatgatgatttccaaaccatcatgtctgcaattgaagaaggtaaaaggatttataataacattaaaaattttgttagattccagctgagcacgagtatagcagcattaactttaatctcact

SEQ ID NO: 10863 - DNA, 275 bp, Bos taurus
  unsure (16): unsure at all n locations; Clone ID: 47-BOVMS1-011-Q1-E1-D12
gtcgaccagcgtccgnaaattgaatatgcaatgggagctgcaaacaagggtcaaccacaattggtccgaaatcaaaaactcatgcagtgttgggtgcattgaagagagcacagtcagaacttgcagctcatcagaaaaaaattctccatgttgataaccatattggtatctcaattgcgggacttactgctgatgctcgactattatgtaattttatgcgccaggagtgtttggattccagatttgtatttgacagacctcttcctgtgtctcgt

SEQ ID NO: 10864 - DNA, 167 bp, Bos taurus
  Clone ID: 47-BOVMS1-013-Q1-E1-D12
tggagactcctggccgtgtcactccggaggcaccctttgaaccatcgcagcccccagtcattgaaggctttagccccagtgtatacagcacttcggaaagcttcaaggaaaagtttattcgcaagacccgcgagaacccattggtacccataggctgcctgggcact

SEQ ID NO: 10865 - DNA, 277 bp, Bos taurus
  Clone ID: 47-BOVMS1-014-Q1-E1-D4
atgcgacgtcatagctcttctatagtgtcacctaaattcaattcactggccgtcgttttacaacgtcgtgactgggaaaaccctggcgttactcaacttaatcgccttgcagcacatccccctttcgccagctggcgtaatagcgaagaggcccgcaccgatcgcccttcccatcagttgcgcagcctgaatggtcaatgggacgcgccctgtagcggcgcattaagcgctgccggtgtggtggttacgcgcaacgtgaccgctacacttgccagcg

SEQ ID NO: 10866 - DNA, 337 bp, Bos taurus
  Clone ID: 47-BOVMS1-016-Q1-E1-D12
atttggatgacagcttggaatgcgcagatgaaatgtgcacattgttacacatatagtgtgaacaatatggacacggccgtgcatgcatagacagagttttatagaagctacagacaactgtggaacaagacagagaatagttaggtagtcatagtatgatgaaacacagaagactattattcacatacagttgtcatacacatctttggagcaagagctacataggttcagaagacagcattgtgatattgaaaatcagcgaacacagcgatagcatttggtaacggagctagagaaagcagaaatggtacgatatacctacgttacacaagtcaga

SEQ ID NO: 10867 - DNA, 368 bp, Bos taurus
  Clone ID: 47-BOVMS1-016-Q1-E1-D4
ccaagccttgggtctaacccaacttcacggtgtcccaaccaacaatgaaaccctgtacatttgccattttacggccttttttatactcaaaccaggtgccttcaaaggctgattaaataaacttttttttttttcaaaaaaaataagcaaaataaaaaaaaaaaaaaaaaaaaaaaaaacaaaaaaacaatgaaaaaaagaaaaaaaaaaaaagaattagaaaaaaaaaaaagcagaaaaagaaaaaaaaaacaagacaacaaaaaaaaaaaaaggggggggccccccaaagggattaaacttaattacccctgaaagggaacttaaagtccctccaagagggtccccgaattcaaatcaaggggcca

SEQ ID NO: 10868 - DNA, 389 bp, Bos taurus
  unsure (368): unsure at all n locations; Clone ID: 47-BOVMS1-018-Q1-E1-D4
tgaaaatagagcctttcaaggaatgaagaagctctcctacatccgcattgctgacacaaatataactacaatccctcaaggtcttcctccttcccttactgaattacatctcgatggcaacaaaatcaccaaagttgatgcagctagcctgaaaggactgaataatttggctaagttgggactgagtttcaacagcatctctgcggttgacaatggctctttggccaacactcctcatttgagggaacttcatttgaacaacaacaagcttgtcaaagtgcccggtgggctggccgatcataagtacatccaggttgtctaccttcacaacaacaatatctctgcaatcggctctaacgacttctgcncacccggatacaacaccaaaa

SEQ ID NO: 10869 - DNA, 368 bp, Bos taurus
  Clone ID: 47-BOVMS1-019-Q1-E1-D12
ccctggtggatttccagtgcaaggcagtaaatacgcagcagaccgtaaccattacagacgctatccacgtcgcaggggtcctccacgcaattaccagcagaactaccagaatagtgacagtggggaaaagaatgagggatcggagagcgctcccgaaggccaagcccaacagcgccggccctatcgcacgcggaggttcccaccttactacatgcggagaccactacgggcgtcgaccatagtactccaacgctcctgtgcagggagaagttatggaccggtgctgacacacagggatgcaggagaacaaggtggaccactcagacagaatatgtatcagtgccacagaccacgataccgcaagggcc

SEQ ID NO: 10870 - DNA, 355 bp, Bos taurus
  Clone ID: 47-BOVMS1-019-Q1-E1-D4
aacatgactgacaatgatcttatcaatattcttgaccctttttatcatctttcaactaaaagtttcaaaacacaacttttatcacaatccagaactgacaccaacaaaaatattaaaacaaaacaccccttgagaaacaaaatgaacgaaaatttatttacctcttttattacccctgtaattttaggtctccctctcgtaacccttatcgtactattcccaagcctactattcccaacatcaaaccgactagtaagcaatcgctttgtaaccctccaacaatgaatacttcaacttgtatcaaaacagataatgagtatccacaattctaaaggacaaacatgaacattaatat

SEQ ID NO: 10871 - DNA, 416 bp, Bos taurus
  Clone ID: 47-BOVMS1-021-Q1-E1-D12
gatgatccagaattattagaagagtctgcccaggcagtaggagcagaaggaattgtgatttccagatccacaagcccaaccttcagcaaacaaatagaccaagttagctggtctgggagtaatttggggggacagtgtcctactgggaaaattctgactggaacacctatggttatgtcatcagaggactgtgcgtctacttcttccactttcaaaacagtaaagaaatgtgagaacagttttgctgctcactgataaatatgagtcctcatcactgacagtacatacatcatttggagcatgccctcaatcagaaaccattgttccatctacaaacgttgatgctgctaatctgaattcagaagatccagcaattcagttgtctgtagtaagtgaagaagctgaaccttctcctt

SEQ ID NO: 10872 - DNA, 431 bp, Bos taurus
  unsure (210): unsure at all n locations; Clone ID: 47-BOVMS1-022-Q1-E1-D4
atcacctgctgcagctacagaaccagagacaaataaatttgatagtactgggtatgataaggacttagtagaagctttggaaagggatataatttctcagaatcccaatgttcgatgggatgatattgctgatttagtagaagctaaaaagttgcttaaggaagctgtggtgttaccaatgtggatgccagaattctttaaaggcattangagaccatggaaaggagtgttaatggtgggcccacctggcacaggaaagaccctccttgctaaagcagtagcaacggaatgtaagacaacattcttcaatgtctcttcatcaactctgacttccaaatacagaggagagtctgagaagcttgttcgtcttctgttcgaaatggctcgattttactcttcagctactatatttattgatgagatagactcca

SEQ ID NO: 10873 - DNA, 210 bp, Bos taurus
  Clone ID: 47-BOVMS1-023-Q1-E1-D4
atgcgacgtcatagctcttcaaaagtgtcacctaaattcaattcactggccgtcgttttacaacgtcgtgactgggaaaaccctggcgttacccaacttaatcgccttgcagcacatccccctttcgccagctggcgtaataccgaagaggcccgcaccgattgcccttcccaaaaattgcgcagcctgaatgggaaatgggaccccccc

SEQ ID NO: 10874 - DNA, 423 bp, Bos taurus
  unsure (89),(233): unsure at all n locations; Clone ID: 47-LIB188-003-Q1-E1-D4
tggccgccggatacacgcgcggaaaccactgggctgtcggacacttaatgggaaaaaagagtgtggcagagtccccacaacttcatgangaggagagcctgaaagagcagctgagggagtatgcccagtgggaagaaacgacaaggaacttgctaagcctcctacaagcaaagggggcccgaggccaccagatgcctccatgggagcccctgagcattcaccagccagcctgngattccgaggacgtcagcaacttcaaagacacaggtcctcagcatgaaggaaggaacccccagctgaactgacaatgacgatggccgcctccctcaaagaagcaaaacaaaatccttaagaaactgcgttctatgggcatcagttctactggatcatcaacaaattttcctttgtgcaaaatacttaact

SEQ ID NO: 10875 - DNA, 332 bp, Bos taurus
  Clone ID: 47-LIB188-004-Q1-E1-D4
gacactcctggttagaggtcaaggccacgatgcggtccaggtcttccacagctgcttgaaggtggtccctgaaagggaacccttgcaagcattctctcatcatcatgtaaacctcgttggtgcatttactgggcttgtccatacaatgaccctccttcagcagcttgaaaagctcctcaacggggaccccagggtatggggagccgcccaaagtgaagatttcccagaggagcaccccaaaagaccacacgtcgctctggtgggtgtagatccggtcaaacaaggcctccggtgccatccatttgacgggcagtcggccgttggttgtcttt

SEQ ID NO: 10876 - DNA, 363 bp, Bos taurus
  Clone ID: 47-LIB188-005-Q1-E1-D4
tggcggcgggataccaaatttaacttggcaaactttctatggcctgtcccatgtgcatcttatttaaaatttcccccctggaaatcactctcctgtttaatatttccagagctctagttgtttaggcagcgtgtggtttctcaagaggccagagcggcattatgggctgatttttattactgggttacccagaaccagattggagggtctgcttcctgctgccgctctgcagcctggacctgtggaccctggttgtaaagagtaaattgtatcttagaaaaccagtgtcacctttttttcaccttttagttttatattatttgtgtcatacatttcctataatggaagtgttaattttactgt

SEQ ID NO: 10877 - DNA, 410 bp, Bos taurus
  Clone ID: 47-LIB188-006-Q1-E1-D4
ctcccgagcgtaatgggcgcgggctacgggggtggtgatgggcccccttccggaaccttgtatggcagagacacggcttcctcataagacggcaggaccaccttctgtagcatcttggaaccactcctctcctcagccgagttcgtgcacttcatcagtctgtagcatctccacacacacttgaacatgtagaccttcaggatgaggacggtgatgaaagcgatggaaaagatgatcattaacttgatgaactggttgtgagtcataccgtcctggctgggaaggtaattcatgtggttcatggacttgaagttgagataggtgggcacctccatgtaggagctgcagagggtcaggatgctcaggcagaagtccaacagctgtagggtcatcagtgggaccttggaggg

SEQ ID NO: 10878 - DNA, 366 bp, Bos taurus
  Clone ID: 47-LIB188-007-Q1-E1-D4
gacactgctacaaccccagccaccaccccgaggagcagctctcctccaaggacctggtgtcctgcgcccacaagtggcccaaggcaggagtacttgctccaaaaatgcatccaccgggacctggccgccaggaacgtcctggtgacggaggacaacgtgatgaagatcgcggacttcggtcttgctcgagacatccaccacatcgactactataaaaagacaaccaacggccgactgcccgtcaaatggatggcaccggaggccttgtttgaccggatctacacccaccagagcgacgtgtggtcttttggggtgctcctctgggaaatcttcactctgggcggctccccataccctggggtcccc

SEQ ID NO: 10879 - DNA, 304 bp, Bos taurus
  Clone ID: 47-LIB188-008-Q1-E1-D4
actgtctcggaaaattgctattgacattagcaatgacatcgccgacagatcaccagtcctggacatcatcaaccttttgacctaagactttcaaagtcccagacgtgacacagtctgttccaatatttgcctgcatcaaggccaatcacattgtgcttcggacacatccagtaactctgactacacagtgatcgatataccgaagctgtaggcaccatgcaataaactagttagggatatccgtacttgtgacacgagctacattctgaccacatcgatgacagatataggatcccccatctca

SEQ ID NO: 10880 - DNA, 398 bp, Bos taurus
  Clone ID: 47-LIB188-009-Q1-E1-D12
tggcggcgggataccttgccgtggcagttgtcaagaaagcaaatgaggggctcacatggaattctctgaaagacaagaagtcgtgccacaccgccgtggacaggactgcaggctggaacatccccatgggcctgatcgtcaaccagacaggctcctgcgcatttgatgaattctttagtcagagctgtgcccctggggctgactcgaaatccagactctgtgccttgtgtgctggcgatgaccggggcctggacaagtgtgtgcccaactctaaggagaagtacaaacgctacagaacaaggggagcagacacgcgtagggtaagaggggctcggtgggagaacgtcacggggcagatggtgcactggagccaagagagcagcacacagggcatatct

SEQ ID NO: 10881 - DNA, 271 bp, Bos taurus
  Clone ID: 47-LIB188-010-Q1-E1-D4
tggcggccggatacaaagtctacaatggtgcaggcaccatgtcggtctccctcgtggctgacgagaaacccttcgcccaggggggcctgagggcaaaggactgcttcaacctggaacaagggaaaaacgggaagattcttggccggaaaaggaaggaaggccacaaccaggaaaaggaaggcgcccccaaaacaacgttccaactcaaccccaaaaatggctaacccaaggagaacccaggtcccggtcctctccaagggcggaaaaaccc

SEQ ID NO: 10882 - DNA, 383 bp, Bos taurus
  unsure (207): unsure at all n locations; Clone ID: 47-LIB188-011-Q1-E1-D12
ccatggacgcgggatacttcatgtagggatcatgccggacaccatgaagttgtattccacagacgcgcagcacataaaaagcaaagaagcgatcgacagtatcatctggacccctcctcgtactgcgaaggtacgtagcctttgaggttgttgcccttgtctgtgttctggcggccccattcatagccactgggggtcagcttgtangctgtcaaggtgcaagagcctgctgtgaagctgcaccctttatctactatttggtgcttgggccggtatagtaggaacagctctaagccttctaattcgcgctgaattaggccaacccggaactctgctcggagacgaccaaatctacaacgtaattgtaaccgcacacgcatttg

SEQ ID NO: 10883 - DNA, 451 bp, Bos taurus
  unsure (279): unsure at all n locations; Clone ID: 47-LIB188-011-Q1-E1-D4
tggccgcgggatacaacgtcatcaagatccactggctcatggcagccctgactttcaccaagagcgtctctctcctcttccacagtatcaactactacttcatcaacagccaaggccaccccatcgaaggcctcgctgtcatgcactacatcacgcatctgctgaaaggtgccctcctcttcatcaccattgccttgatcggctccggctgggccttcgtcaagtatgtgctgtcagacaaaggagaagaagatctttgggatagtgatcccactgcangtcctggccaacgtggcctacattgtcatggagtcccgcgaggagggtgccagcgactacggtatctggaaggagatcctcttcctggtggatctcatctgctgtggcaccatcctgttccccgtggtctggtccatccggcatctccaagacgcgtctggcactgatggga

SEQ ID NO: 10884 - DNA, 241 bp, Bos taurus
  Clone ID: 47-LIB188-012-Q1-E1-D4
acatttcggaaccagtactgaaaatcccttatgaatgtcagaaagtgaaggatcagtcggtcaaaaaatccagtcacacttgttcaatccttcatttacgatacgtttccgcctcctgtttccgagtcttacagggatgagaaagtctacctcatgattgctttcattacatttgtgaccgcatcggggcgtacacggctcaacactctgcagaagtcggatgttattgcccgcatacgtg

SEQ ID NO: 10885 - DNA, 404 bp, Bos taurus
  Clone ID: 47-LIB188-013-Q1-E1-D4
acatcttgcaggtggctcttcctccacatcacggctagggtctccaagatgatgcgagtgggagccccagggccgcggtctggaagcggaacttctcggattgttttaagaaaatggcagacaagcccgacttgggggaaatcaacagcttcgataaggccaagctgaagaagactgagacgcaggagaagaacacccccttgtaatcttgagcctcactcactacagatggcttagagccagcctcttctccacccctaggcacagcctcccctctctacctgatcaatgttaaatagaagcacccctgatcctgggacagaaggaaagatgcccagtctccgttttgtttttttttttttgtagcctacaaagtggctcgttggtcattttcccacaaagaa

SEQ ID NO: 10886 - DNA, 438 bp, Bos taurus
  Clone ID: 47-LIB188-015-Q1-E1-D12
acgcctattacaacctggatgaaacttgtatccgcttctatcacccggataaagaggacggaatgctgagcaaactctgccacaaagatacctgccgctgtgcagaggagaactgcttcatgcaccacacggagaaggaggtcactctggaggaccggctggacaaggcttgcgagccgggcgtggactatgtgtacttctcgttgctagcggccccagtgcctctcctagtgacagtgccccgagcctcggaactgtcaggtcagcactcattttaagagaagcaactttagtttcaaagatacttttaggcttctgaattgatcatttaaactatgtcttttaagtaagagcgctaaattagaggcccagactttagtttgccaagttaacgaattttttaaagggaaatttctaagcccatgtttggggtaaata

SEQ ID NO: 10887 - DNA, 131 bp, Bos taurus
  Clone ID: 47-LIB188-015-Q1-E1-D4
gatacacgcgcgacaaccactgggctgtcggacacttaatgggaaaaaagagtgttggcagagtccccacaacttcatgacgacgagagcctgatagagcagctgagggagtatgcccagtgggaagaacc

SEQ ID NO: 10888 - DNA, 380 bp, Bos taurus
  unsure (80): unsure at all n locations; Clone ID: 47-LIB188-016-Q1-E1-D4
ccatagccgccggataccagagctgagagctgatctatgcccgggcccagctggagctggaagtgagcaaggcccaacanctggctgaggtggaggtgaagaagttcaagcagatgacagaggccctggggcccagcaccatcagagacatggctgtggcaaggccggagatgcaggtaaaattgctgcagagcctgggcctaaaatccaccctcatcaccgatggttccacgcccatcaacctcttcaacacagccttgggtttgctggggctcggggctgaggcccagcccccagccaagaagcccaccgggggacccagcgtccaagagggcttgcttcccatctccactgctgcccccctaactcttggaaacaac

SEQ ID NO: 10889 - DNA, 223 bp, Bos taurus
  Clone ID: 47-LIB188-017-Q1-E1-D12
gactgattcacacttctctccaagcacagcgcacattccattgcagtcagcccattctcccagtcatcacggtctggtttcttgatatcctgaaggaatattcggtcgcctcgctggttctgcagcttcaacagtctctcagcatgttccctctcctcatgagattggtgaacaaagtatttggcaaagttcttcaaaaccacatcatcacggtcaaaatagt

SEQ ID NO: 10890 - DNA, 348 bp, Bos taurus
  Clone ID: 47-LIB188-019-Q1-E1-D12
gccaaggccgcgggatacttgctgatgctcagtttggaggcccgggtggtctccacgttgcgggtgatggtgctgccgtctgccttccagaccacggtcacgctacccgggtagaagtcgctgatgagacacaccagggtggccttgttgccgttgagctcctccgtggagggcgggaacagggtgaccgagggtggggacttgggctgacccaggacggtcagtgtggtcccgccgccgaaaacaccagtgccgcgactcgtgtcccaagctgcacagaaataatccgcctcgtcctcagcctggagggagctgatggtcagggtggctgtgttgccagacttggag

SEQ ID NO: 10891 - DNA, 416 bp, Bos taurus
  Clone ID: 47-LIB188-019-Q1-E1-D4
gccatgggcgcgggatactggaaaaagcgaaagcacagcatttctatcaacttatccttccaatggaacgatagatttaaaatattttccatattatgggaaaaaactgcatgggaactacctgcagccactagttgccgtccaggtcggctttggtagtgatgctgacgtaagagaagtaatggttgagtgcaagattgatggatcacccaacctaaaaacccagaatgaccgtgacaagtttttaggacgagttgcattcaagatcaccatgcatgcatagtaggagttaggatgtctctacagagtaaacgttgtgttgtctgtcttcattttgtatcagcgggacctgccattccagaattatgagaccaccttgaggaaaggtggagtggtacacacacacacatatgggg

SEQ ID NO: 10892 - DNA, 228 bp, Bos taurus
  unsure (127): unsure at all n locations; Clone ID: 47-LIB188-020-Q1-E1-D4
catacacagacaacaccaggcaccaatgtcacaaggaggcaagagtgacgggaaagagcagcctggagccccagatgaaccccccccctcttcttcaagagtgagtgtgggaggggacggggcctgnagtgttgagggggcagccttagaacacgtcggcttagtaggcgtggttagagatgaagagggactcgctggctgcagcccctgccttaccacttggggtgt

SEQ ID NO: 10893 - DNA, 377 bp, Bos taurus
  Clone ID: 47-LIB188-021-Q1-E1-D12
tggccgcgggatacgttccccacgtgtgaagtttagtggcgtccgtttctaatttatgcattcgtccaacagttatttattggcccaagatgaaaagtcacactatctgacaggccttaagggcctccgctgcccgtccctggggacccgtcccccatgtgcaatgtattatcaccagcagacactgccgggacttctcctcccatgggtgcagtggccgccacttcctcccggccccgcacccgctgctggctggtgtcccagctaggcatggcaatgccactgaattatgtgtccgtggaactggtcatagccacagtgtgacagtcttgccttctgtctgtcttggggaggggaggtgggcagtcctgcgggca

SEQ ID NO: 10894 - DNA, 371 bp, Bos taurus
  unsure (283): unsure at all n locations; Clone ID: 47-LIB188-021-Q1-E1-D4
gataccttgaccattgtcctcagtctagacagaaggtctattccctacaatagggaacctgaggggtaccaggaaaccaattgaaaccaattccaaaaactgaaacttgcaaggttcccctttacccttcccaaggtccttcaaccggaaggacttcaaagggcaagccaactttggcttgattgcttggcaactgagaccctgctctgggaaagggaagaggtcaaatgaagccctgcagagggctggggaggtggggcccatctctgaccaatcagagtangaggaaagaatgtatgtgcctgatggagaaagggatcggcatgctgggaggtgagggacttatctggggtgctccttcctcctccgtt

SEQ ID NO: 10895 - DNA, 444 bp, Bos taurus
  Clone ID: 47-LIB188-022-Q1-E1-D4
ccatgtacgccggatagcccagctagaaattgatcccaatagtgctgaggaacgacttcacagtatgaaagagggaatccatgcccaacagaaagaacctatgataggagtgaatcaagaactggcctacttctaccctgagcttttcagacaattctaccagctggatgcctatccatctggtgcctggtattacgttccactaggcacacaatacactgatgccccatcattctctgacatccctaatcccattggctctgagaacagtgaaaagactactatgccactgtggtgaagagtcaagtgaattctgagggactccacagttatggtctttgatggttctgaaaattccatgctctacatgtcttttcatctatcatgtcaaaccattctatccaaacgcttcaactgctgttttagaatagggcaatctcaaat

SEQ ID NO: 10896 - DNA, 374 bp, Bos taurus
  Clone ID: 47-LIB188-024-Q1-E1-D12
gataccacgtttcataccaatggttatgacacacaagccatagcacaaaacaatgacagcacagaatatggactcttccagataaataataaaatttggtgcaaagacgaccagaaccctcactcaagcaacatctgtaacatctcctgtgacaagttcctggatgatgatcttactgatgacattatgtgtgtcaagaagattctggataaagtaggaattaactactggttggcccataaagcactctgttctgagaagctggatcagcggctctgtgagaagttgtgaacacctgctgtctttgctgcttctgtcctctttctgttcctggaactcctctgccccgtggctacctcgttttgcttctttgt

SEQ ID NO: 10897 - DNA, 429 bp, Bos taurus
  unsure (386): unsure at all n locations; Clone ID: 47-LIB188-024-Q1-E1-D4
ccatgaccgccggatactcactgaattttcccacggggaaactgttgaagggacaggatggcatggctgggcatggggagccatggcttggttttcctccatccagtgaatgaagtgacagaggaaggacataactaaagagagtgaccaaggggaccatcactacgtggactgagatgcatcgtgcagtgacttcagacaacctgagtccttccgtccggaaatgcaatgtcatagtggaaaagtaaaaaaacacaaagatccaaagaaaagaacaaagtgcatacaaagcaaactgctaatgtagggatagttctaaggcagccagcagggagaaggccaaatgtctgggggtgtcacctgacggtgccccactcccactgtcncatgccagaccaggctgtcgggccaccggtgccctctcgacgt

SEQ ID NO: 10898 - DNA, 414 bp, Bos taurus
  Clone ID: 47-LIB188-025-Q1-E1-D12
caataaagaagtataaaacaataaaaaactaacaggtaatgcttagctccacattttggacacctgattgaatttacctctaaaaatgtagataaaaaattatatactccttgtttgtgatacttaatttccaaagcaccaaggcaaaataaagagaggcccacctctcatttaagtatgaattgccaatggcaaacatctgcacaatatcatataaaaagtcaagcaaataaaattacataataagcaaatgcaaatcacagtgctttaaaatatataatcattggtaatcttcagagaaggcattgcttcattaacattctggtcaagacgatgatattccactgttttggaacaaaaaccatcacgccatttcctgctttgaaccagaaggaaaatcttccttttgttgtg

SEQ ID NO: 10899 - DNA, 325 bp, Bos taurus
  Clone ID: 47-LIB188-025-Q1-E1-D4
gcaatggcggcgggataccagctgactcttcaagatcactatgaactagctcttctttggaaaaagatttgctttttcctgggtttggaaaaaaacacataacggtcttccattccattctcctgaagaacctcctggggcatttgctttttcttcattttgggtctttcacctgtcaccacacactcttccggggcactgctattttcttaagaagccacggcaatcgcagccatccttttcttttccttcttaaaccgtttcttctcctgtttctcgagcttcctagtaaactcatcagccgcttcctctgcctgaaacattg

SEQ ID NO: 10900 - DNA, 418 bp, Bos taurus
  Clone ID: 47-LIB188-026-Q1-E1-D4
gcatacagacacattaagatgcagctgcagaaagaggggtccagtgatctgaagtcacatagcgggatgcagcattactcagtccccacaaggcagctgtctcaaactttaggaaccgtgagagacacatcagagccctggtcactgtcaccacttgcagcctgggtgtaggtctgtcttttttcacctgagcgcttcttcctccagatcacagctccagccaccacagctactacgaggagaaccaggccaacaatgatgcccatggtgaggaaggaggtctgaggaggttcccatctcagggtgaggggctcctgaagcccttcgtgctgcacatggcacgtgtatctctgctcctctccagaaggcaccaccagggccgcccacttctggaagtttccgtcccctgaaggcctgg

SEQ ID NO: 10901 - DNA, 414 bp, Bos taurus
  unsure (8): unsure at all n locations; Clone ID: 47-LIB188-028-Q1-E1-D12
gccatagnccgggatactttgaatggaaaaacccatggatggaggagcctggtaggctgcagtccacagggtcacgaagagttggacacgactgagcgacttcactttcacttttcactttcatgcattggagaaggaaatggcaacccactccaatgttcttgcctggagaatcccagggacgggggagcctggtggctgccgtctgtgggatcacacagagtcggacatgactgaagtgacttagcagtagcagcagcagcagcagcagcagcagctcattcctattctgtatgtaggttccttttgatccttcacagaatggagaattggggctgattgcattttacttctctagaaagtgtatgtgtgtgtgtgtgtgtgtgtgtgtgtgtgattctttggaggtatatg

SEQ ID NO: 10902 - DNA, 413 bp, Bos taurus
  Clone ID: 47-LIB2809-002-Q1-E1-D12
actgaagaaactgggcaaggactcgaaagataagtgtggtaaactggaccccacctacaccagcgccactttactctttcagaaagaccctccagccaacatccagctcttccaagaggtgcccagtggtcagtccaaggaggacacagtgggccggcccctgccccacctggccgcggccatgcaagcctctgtggaggccgtatactgtgacgacatccctcgctacgagaatgagctgttcctccggctggtcaccagcacccgggcccacgccaagatcaagtccattgatgtttcagaagctcagaaagtgccaggatttgtttgctttctctctgctgatgatattcccgggagtaatgaaaccggactctttaatgatgagacagtctttgcgaaagatacggtga

SEQ ID NO: 10903 - DNA, 428 bp, Bos taurus
  Clone ID: 47-LIB2809-002-Q1-E1-D4
actcttgcctagagaatcctgtggacagaggagcctggtggacagctgtccatagggtcgtacagagtcagacacgactgaagtgacttagcatgcatgcatgcattggagaagggaatggcaacccactccagtattcttgcctggagaatcccagggatggaggagcctggtgggctgccatctatggggtcgcacagagtcggatacgactgaagcgacttagcagcagcagcagcatatatacacacattcatttcatttgtctccttttcctttttaccgagtgtccctgcttttgctattgtcttctttctctttccactaatttatcactagaattagtttgaggtccaggctaagcccattctgaagttcatcctgtctccatcagaggctttttctgatgctgacatgtctggttttgt

SEQ ID NO: 10904 - DNA, 483 bp, Bos taurus
  Clone ID: 47-LIB2809-005-Q1-E1-D12
tgctcgccgtagccatggccaccggatacctgctgagaatgtggaaagcctttcaagcagtgaggtaagatagtgttcattcagaggcaatttcccaaatttagagcaataaaatgctgtattatctttttgggttgccattgccatctccaaagatccttataggagggtatgtatttcttataattcattagaagcctaaacataaccagggaactaagaatgattaacaagttcatgcgtggttattattatatattttcaatgactattattcttttagaaccagatgaaaatattagagatcatttgttgtcctaaggagagaacaggatgattgagagacatgtatgcatgcaaagttacttcagccctttccaactctgtatgaccctatggactgtaacctgccaggttcctctgtctatgggattctccaggcaagaatacaggagtgggttgtcatctcctccaaggcctgaa

SEQ ID NO: 10905 - DNA, 376 bp, Bos taurus; identical to SEQ ID NO: 10189
  Clone ID: 47-LIB2809-007-Q1-E1-D12

SEQ ID NO: 10906 - DNA, 271 bp, Bos taurus
  Clone ID: 47-LIB2809-007-Q1-E1-D4
ccttgagaataactcatctctgagccctgggccctgtaatgacatggaaatgttagggataatccccaagggttccataaatgcccccctgaacttttaaccctgccccaatttccctaagggccttttaaagccacaattccaaccgccccccgggccagttgccgttgccccttgcaagccctaaactcctatccagcaccaagggatccctcaagaacttccccattaaaattttacccaggtttttgttgccacttttccaaaaatt

SEQ ID NO: 10907 - DNA, 394 bp, Bos taurus
  unsure (319),(329): unsure at all n locations; Clone ID: 47-LIB2809-008-Q1-E1-D12
tgggcccgggatacttgtaattgtgtaggtgggggttgtctactgagtaaggaatactgtttttaaggttctaaagctaaattcaaatgatgcattaatgacccaaaaactcagatctgatggtgtctgaatttctaacagtccttgctttgtgggtatgctgacaacttatctggatgccttacatcttttctaaacagtgttgcctctgaacgtgctctgctccctccctgctccctctttggagcccctttgcaccccagagcctgcagaagtggctggtataaaagggggcctggctagagaatgatcagtgtanctgtttgcangattcctttctgggcttcattttggaaactttgcttaaggctatttttcctaattgcccacattt

SEQ ID NO: 10908 - DNA, 258 bp, Bos taurus
  Clone ID: 47-LIB2809-008-Q1-E1-D4
actgtccgggaaaggtatacacacaaccttggctcaaaaccttgacgcacacctcaacgacttcctacgtaaattcttcgatggcagtcacagtctattccaggtcaaggtctatcagtaatagatatccacagcgatcctaaaaatgccaatatgtcatcaagaaacgagattctcgatacatttttccaaagtgcaatatgccaactttgtaacccaggatgtcacctgtcttcaatgcataagcatttaatattt

SEQ ID NO: 10909 - DNA, 397 bp, Bos taurus
  unsure (66),(168),(308): unsure at all n locations; Clone ID: 47-LIB2809-009-Q1-E1-D4
cagcagaaacgcatgaatgggcatatctctctggggatagggcactgctttctggggaacaggcangactttggactgagaaagggacagcacggactgaagaagaaacatgacagttggaggaaaaagctggtgaggctggtgcatccgaaactggagcagaagcanaggaaggtgcagattttcaacatcagtgagagtcaggctctggctttcagtaaagggctcaactggatatttagggaagggcatttctttgtgcttaggagccatagcctccttcactttggagactcccattacttcangctgaaggaaacgcggcaccaccacaggggtttgagtaagacgagggatgtgttgtgggaagctgttacggaatggcccagggaaggga

SEQ ID NO: 10910 - DNA, 407 bp, Bos taurus
  unsure (44),(70): unsure at all n locations; Clone ID: 47-LIB2809-011-Q1-E1-D12
gatacaccagaaaggcctgaatgggcatatctctctggggatanggcactgctttctggggaacaggcangactttggactgagaaagggacagcacggactgaggaggaaacatgacagttggaggaagaggctggtgaggctggtgcatccaagactggagcagaggcagaggaaggtgcagattttcaacatcagtgagagtcgggctctggctttcagtaaagggctcaactggatatttagggaagggcatttctttgtgcttaggagccatagcctccttcactttggagactcccattacttcaggctgaaggaaaggcggcaccaccacaggggtttgagtaagaggagggatgttttgtgggaggctgttacggatgggcccagggaagggatagact

SEQ ID NO: 10911 - DNA, 325 bp, Bos taurus
  Clone ID: 47-LIB2809-011-Q1-E1-D4
agcagaaacgcctgaatgggcatatctctctggggatagggcactgctttctggggaacaggcaggactttggactgagaaagggacagcacggactgatgaggaaacatgacagttggaggaagaggctggtgaggctggtgcatccacgaccggaccacaggccccacgacggtccacccctgtccccgcagttccattcccgccctggctttcactcctaggcctcacccccactccccgcgaccccctccctccttgcgctccccccccctcccccgcgcgccctcccctctcccccccccgccctcttgtccgctccccc

SEQ ID NO: 10912 - DNA, 443 bp, Bos taurus
  Clone ID: 47-LIB2809-013-Q1-E1-D12
gatacagctcacatgaaacacattatctgcttctgaaaacccttcttgaggtctcctttctcaatcttcagctcagatccataaaaggaattattttttatagcatcctcaattgtgataatggcaggaagatcctcataggtgactttcactacatgggcagctctctctgcatgttctggggtgtcagcgaccacagcaccaatgatgtgaccaacacaagtcaccgtatccttcgcaaagactgtctcatcattaaagagtccggtttcattactcccgggaatatcatcagcagagagaaagcaaacaaatcctggcactttctgagcttctgaaacatcaatggacttgatcttggcgtgggcccgggtgctggtgaccagccggaggaacagctcattctcgtagcgagggatgtcgtcacagtatacggcctcccc

SEQ ID NO: 10913 - DNA, 137 bp, Bos taurus
  Clone ID: 47-LIB2809-013-Q1-E1-D4
gccatggcggcgggatacctcacataaggaataacctttgtcttaggttgaatccatggcttcatagctttctgatgctgataaacagtcttgagatactggggcaaggcgaatttctggtaacgctggctgatttt

SEQ ID NO: 10914 - DNA, 421 bp, Bos taurus
  Clone ID: 47-LIB2809-014-Q1-E1-D4
ccaaggcggcgggatacactaccaaaatgttaatttgagaaaagctgaaaagttttagttttactcaaatatcaacatgctagaaaaaaattttgcatgagaaaacactgaagaggtaattttttaatccagatttcacaaactcatggtgcaaattgggtcccatagcttcctctagagtaataactgcttttcactgcttgttggctgcctgtgaaaatttgaaataactcaaaagctactaacaaaactagtcatatccacccatgctgttctggccaccatagccagccccgtaacagccgctcacagactggctcccaaggccactgtaagtggactgggttgacacccccatgccttgcatcatctggctgctatatgccccgttgctggcccctgttgtggaatttaagaaaag

SEQ ID NO: 10915 - DNA, 361 bp, Bos taurus
  Clone ID: 47-LIB2809-015-Q1-E1-D4
cagcagaaaggcatgaatgggcatatctctctggggatagggcactgctttctggggaacaggcaggactttggactgagaaagggacagcacggactgaggaggaaacatgacagttggaggaagaggctggtgaggctggtgcatccaagactggagcagaggcagaggaaggtgcagattttcaacatcagtgagagtcaggctctggctttcagtaaagggctcaactggatatttagggaagggcatttctttgtgcttaggagccatagcctccttcactttggagactcccattacttcaggctgaaggaaaggcggcaccaccacaggggtttgagttagaggagggattttt

SEQ ID NO: 10916 - DNA, 407 bp, Bos taurus
  Clone ID: 47-LIB2809-017-Q1-E1-D12
gatacggcgttcccaatcatcacaattgcaaatttaaacttttcaaactccttttcctggatgtccagcagactctgaatccgcttcatcacttctctgaaatgctcgccctggtgtatcctcagcaagaacgggatcccgaacgtcccgaacacctccttgtggaaatgagccaccgtgatgagcatctcattctccttgtcgatgtctacctggtccaaaggtatttcctctattcgaaacgttcgactcgtcgcaggagataaacattctaatagttcatcttcttgatgcacaccaataattttgtagcttacaatttctagccctaagtttccctgatgccttctcgccgagctccacagcctttttacattcctctaacaggttcccggacgcacccgtgc

SEQ ID NO: 10917 - DNA, 319 bp, Bos taurus
  Clone ID: 47-LIB2809-017-Q1-E1-D4
cactgcattctggtgaacaagcaggagttgcgcccatacagtgcacagcaccgcctgtcaagggaacatgtgtatttgtcgaggatgctgataagacttggtcaggccttactgccttctcggcgcacgacagttcacctgttcaaggttctctgacagtcacgactcggctttcgtgctgggctgagctggataattatggaacgtcatgaccatgtgctggagatcgatcacctccgtcactttagccacgcgcactacttcaagctgcttgcttagcggcaccatcagcagagtttcagtctaaagacggatgttt

SEQ ID NO: 10918 - DNA, 457 bp, Bos taurus
  Clone ID: 47-LIB2809-018-Q1-E1-D4
catgctgcgtatcgccatggacgcgggatagactattatttaaaattttctttttaaattgaaagccaacaactctgcctttatgatgctaagctcatgttcttatttcttctcctatcttctttctcttctgttcccattatccttccctttgttttgtccctgtcaccttcctttctccttctcctcattgccccccaggcaagcaggtggtcagtcattggtgggtttccagcttccaaagcctagacaaccctgctgtagtctcaaactagtggtctttgccccggctgaccctttccttgagctgtctgagctttaaggtggatggctcaagctagagatatgacagaatcttctgggaagggccttgatgatcttcagcccagacttttgctaaatgaaatggaacaataactttattttggcaccaaactgaaaaaacaggtcaattgtc

SEQ ID NO: 10919 - DNA, 338 bp, Bos taurus
  Clone ID: 47-LIB2809-019-Q1-E1-D4
caaaaacgactgaatgggcatatctctctggggatagggcactgctttctggggaacaggcatgactttggactgataaagggacagcacggactgatgaggaaacatgacacttggacgaatatgctggtgaggctggtgcatccaagactggagcatacgcacaggaaggtgcagattttcaacatcagtgagagtcatgctctggctttcactaaagggctcaactggatatttagggaacggcatttctttgatgcttaggagccatagcctccttcactttggagactcccattacttcaagctgaatgacatgctgcaccaccacacgggtt

SEQ ID NO: 10920 - DNA, 441 bp, Bos taurus
  Clone ID: 47-LIB2809-021-Q1-E1-D4
catgcgccgtaccgccatgtgtccgggatactccagagctgccttcactttggtttttcaagtcttcctcctcacactgaggatctttggtggccatggtctgggtcttttctgggctggaggaggtagtcacttcaaccgtgtccatgggagagggctccattaactcctggctgggtttcttgatcctaatcagagtagagttcaccagcttgagattcgattctggaaacttctttctgcacaccctggtcttcaggacactcttggcatcaccacagatgaccttctgagaacgcagattccggccaatttgtttccaataggcgttgtttttgtgcaactctaggcatgaggttggattgccagtgaagaaacaggaaaacgtgttgtcccgttgggtgcactcgaccttcagcacgatgccctcctcctgcttgg

SEQ ID NO: 10921 - DNA, 410 bp, Bos taurus
  Clone ID: 47-LIB2809-022-Q1-E1-D12
ctggtgagatagtggaaagcctttcaagcagtgaggaatctattacacgcatcaataagaaaattgagaagtttcagagtgaggaacagcagcaaacagaggatgaactccaggataaaatccacccctttgcccagacacagtctctagtctatcccttccctgggcccatccctaacagcctcccacaaaacatccctcctcttactcaaacccctgtggtggtgccgcctttccttcagcctgaagtaatgggagtctccaaagtgaaggaggctatggctcctaagcacaaagaaatgcccttccctaaatatccagttgagccctttactgaaagccagagcccgactctcactgatgttgaaaatctgcaccttcctctgcctctgctccagtcttggatgcac

SEQ ID NO: 10922 - DNA, 335 bp, Bos taurus
  Clone ID: 47-LIB2809-024-Q1-E1-D12
ctaactcgtctctgagccctgtgccctgtagtgacaatggacatgtaaggactaatctccatgggtgcatgaatggcgctctggacttttgacccttgctcgaggtctctgatggcgcttttaatgcaacagtaactgcccgggcggccgctcgaacagaaagaggtgggggtgggcagtatctggatccagagtcacatccactgcatgcaatgtagcccttttccatttgagctcttccatgagtttctctggaaaacaaacagaaatactttaatgaccttctagcctttagagctgaattcattcctcgtctgtctggatctttcctgtgt

SEQ ID NO: 10923 - DNA, 346 bp, Bos taurus
  Clone ID: 47-LIB2809-025-Q1-E1-D4
atgggcatatctctctggggatacggcactgctttctggggaagaagcacgactttggtctgacatatggacatcacggtctgatgaggaaacattacaattcgtggaacacgctggtgacgctggtgcatccaacactgcgacacatgctacaggaggtgcagattttcaacatcagtgatagtcaagctctggcgttcaataaagggctcaactggctctttagggaaatgcatttcattgtgcttacgagccatatgctccttcacatttgagatccccaatatttcaggctccatggaaatgctgcaccaccacacgggtttgagtaacaggacggatgttt

SEQ ID NO: 10924 - DNA, 362 bp, Bos taurus
  unsure (198): unsure at all n locations; Clone ID: 47-LIB2809-027-Q1-E1-D12
aaaggcataattggccaaaccccccggggaaaaggccccgccttcctgggaaacaggcaggcctttggcttaaaaaaggaacaccacggcctgaggaggaaccataccatttggaggaaaaggctggtaaggctggtgcatccaaaactgaagcaaaggcacacgaacgtgcaaattttcaacatcagtgagagtcangctctggctttcagtaaatggctcaactggatatttacggaagggcatttctttgtgcttacgagccaatagcctccttcactttggagactcccattacttcatgctgaaggaaacgcggcaccaccacacgggtttgagtaataggacggatgttttgtggg

SEQ ID NO: 10925 - DNA, 320 bp, Bos taurus
  Clone ID: 47-LIB2809-028-Q1-E1-D4
gaaagcacagaatatggactcttccagataaataataaaatttggtgcaaagacgaccagaaccctcactcaagcaacatctgtaacatctcctgtgacaagttcctggatgatgatcttactgatgacattatgtgtgtcaagaagattctggataaagtaggggttaactactggttggcccataaagcactctgttctgagaagctggatcagtggctctgtgagaagttgtgaacacctgctgtctttgctgcttctgtcctctttctgttcctggaactcctctgccccgtggctacctcgttttgcttctttgt

SEQ ID NO: 10926 - DNA, 406 bp, Bos taurus
  unsure (380): unsure at all n locations; Clone ID: 47-LIB2809-030-Q1-E1-D4
gccaagggcgcgggatacccaggcatcccatggtctcggcaacgctgtaagttgatagcagccaggtcaaagccgtggatcttgtgagtgggctggaaaagcttgttgcgcagtcactcgtcaccattttatcctgattcatcagtttggacttcttggccagcagaccccgcaccagagggtcaattccaccgtctttgattatcctccaggtgttgaagaagagggtgtgtagggggagctctgcttccggactccatggctggtaattctcatccaggcgggacacagtggagggaacctccatgtggccaaagcggaaggcaaaggtgaagacattggaaattcggggatccacagagttattatagccttggtanggcgggatccacttctgcatctcact

SEQ ID NO: 10927 - DNA, 389 bp, Bos taurus
  Clone ID: 47-LIB2809-031-Q1-E1-D4
acttcataatcaggaacagctgcccaaatcaacgtgattccaccatctccgtggaagagaatggggtgtcagcagaaagccggttctcagttcagatgttcaagtttgctggaaattatgacctagttttcctgcattgtgaggtttctctctgtgatttcattaaagaagagtgccaaccgtcttgctcaagaagtcaactccgcagtgaaggggtggctattgatccaacccgagttctagatctgggacccatcactcgcaaaggtgcccagtctcttggtgtcatgagtggaacacccaacactgcagggttcctggtggcctggcccctggttctcctgcctgtcctcctggctgggctgttctgagagctcagctgggcatct

SEQ ID NO: 10928 - DNA, 358 bp, Bos taurus
  Clone ID: 47-LIB2809-032-Q1-E1-D12
gccatgaggcgcgggataccgcagaaacgcctgaatgggcatatctctctggggatagggcactgctttctggggaacaggcatgactttggactgataacgggacagcacggtctgatgatgaaacatgacagttggacgaatatgctggtgaggctggtgcatccaatactggagcataggcacaggaaggtgcagattttcaacatcagtgagagtcatgctctggctttcactaaatggctcaactggatatttagggaacggcatttctttgtgcttaggagccataacctccttcactttggagactcccattacttcaagctgaatgaaatgctgcaccaccacacgggtt

SEQ ID NO: 10929 - DNA, 360 bp, Bos taurus
  Clone ID: 47-LIB3057-002-Q1-K1-D12
cgggtttgccgccgggacacaggtgtcgtgaaaaccaccgttaaacctaagccaaaatgggagaggagaagacccacatcaacatcgttgtcattgggcacgtagattcagggaagtctaccacgactggccatctgatctataaatgtggcgggatcgacaagagaacaattgaaaagttcgagaaggaggctgccgagatgggaaagggctccttcaaatatgcctgggtcttggacaaacttaaagctgaacgtgagcgtggtatcaccattgatatctccctgtggaaatttgagaccagcaagtactatgttaccatcattgatgccccaggacacagagactttatcaaaaaca

SEQ ID NO: 10930 - DNA, 342 bp, Bos taurus
  Clone ID: 47-LIB3057-003-Q1-K1-D4
acgagagcttcctggtgaagtgtgtttcttgaaatcatcaccaccatggacagcaaaggttcgtggcataaagggtcccgcctgctcctgctgctggtggtgtcaaatctactcttgtgccacggtgtggtctccacccccgtctgtcccaatgggcctggcaactgccaggtatcccttcgagacctgtttgacctggcagtcatggtgtcccactacatccatgacctctcctccgaaatgttcaacgaatttcgtaatcggtatgcccaatgcaaagggttcattaccatggccctctacaactgccataccttctaccttgctacccctgaagataaa

SEQ ID NO: 10931 - DNA, 135 bp, Bos taurus
  Clone ID: 47-LIB3057-004-Q1-K1-D12
ggcgccccacgaacgtgcggtgcgtgacgggcgagggggctgccgactttccggcctgtccgggtgtcccggaacgaatggctctacgtacctgaccccgttcccgactcgctgttgtatcgcgcctcaccattc

SEQ ID NO: 10932 - DNA, 394 bp, Bos taurus
  Clone ID: 47-LIB3057-004-Q1-K1-D4
gacctcaagaataagcgccttacgaaaggaggttaaacgggagccacgaagaaagtgcgtgagccattttctaaaaaagattggtatgatgtgaaagcaccagctatgttcaacataaggaatattgcgaaaacattggtcacgagaactcaaggaaccaaaatcgcgtctgatggcctcaaaggtcgtgtcttttgaagtgagtcttgctgatctgcagaatgatcaagtagcgtttagaaaattcaagctaattactgaggatgttcagggcaaaaactgcctgactaattttcatggtatgtatcttacctcgtacataatgagctccatggtcaaaaagtggcacaccatgatcgaagctcacgttgtattcacgactaccgatggttac

SEQ ID NO: 10933 - DNA, 463 bp, Bos taurus
  Clone ID: 47-LIB3057-005-Q1-K1-D4
gacaccggctccgcattgtgacgctcttactggtgacactgtgaccgggcaccctgggccggtcaccgagctgtgtatagaggaacaagactgcttgaagtgaaggatatctactaataccagcactttgaatgaaaatttgattttctgccacaaactgaactcttttgagtgtatctaggggggaattgaaacatacctaattttgaggcatagcatgtatgcagcttgaaatccaagtagcactaaattttattatttcatatctgtataataagcttaccagatgacgtgtcaacatttttggcgaacagcttgaaagacttcttatgaagaaatatgaagggcactggtatcctgaaaagccatacaaaggatcatggtttagaagtatacacgtacgggagaaagtggacccagtgattgaacaagcatccaatgagagcggtttgaacattgatga

SEQ ID NO: 10934 - DNA, 295 bp, Bos taurus
  Clone ID: 47-LIB3057-006-Q1-K1-D4
cggacgcgtgggtgctgctgcaggtgttcaggtactccctgcagaagctggcatacacggtgtcgagaaccggacggcacgtgctgttagagcgccgccagcgggccctcaactgaggccctatcctcctcccttgggcggccgtgtcaccaggtgctcctgtgccattccaccagcatgggagccagcgccgtgcaggaatggggcgtccactgtgccctctcgccagatgagcacttgccaaggtcagtgtggggctggtatgcccctggagaagcagcaccgaccatgacga

SEQ ID NO: 10935 - DNA, 451 bp, Bos taurus
  Clone ID: 47-LIB3057-009-Q1-K1-D4
gaatggtttagcaccttgcgccccactatacgtgcggtgcgtgacgggcgagggggcggccgcctttccggccgcgccccgtgtcccgggacgaagggctctccgcaccggaccccggtcccgacgcgcggcgggggcgcgccgcgccgcgccccgggggacgcgggcgacggcccgccggcggggacggcggaggaccggctatccgaggccaaccgaggctcccgcggcgctgccgtatcgttccgcctgggcgggattctgacttagaggcgttcagtcataatcccacagatggtagcttcgccccattggctcctcagccaagcacatacaccaaatgtctgaacctgcggttcctctcgtactgagcaggattaccatggcaacaacacatcatcagtagggtaaaactaacctgtctcacgacggtctaacccagcttacgttt

SEQ ID NO: 10936 - DNA, 426 bp, Bos taurus
  Clone ID: 47-LIB3057-015-Q1-K1-D12
gtttcttgaaatcatcaccaccatggacagcaaaggttcgtcgcagaaagggtcccgcgtgctcctgctgctggtggtgtcaaatctactcttgtgccagggtgtggtctccacccccgtctgtcccaatgggcctggcaactgccaggtatcccttcgagacctgtttgaccgggcagtcatggtgtcccactacatccatgacctctcctcggaaatgttcaacgaatttgataaacggtatgcccagggcaaagggttcattaccatggccctcaacagctgccatacctcctcccttcctacccctgaagataaagaacaagcccaacagacccaccatgaagtccttatgagcttgattcttgggttgctgcgctcctggaatgaccctctctatcacctagtcaccgaggtgcggtgtat

SEQ ID NO: 10937 - DNA, 355 bp, Bos taurus
  Clone ID: 47-LIB3057-015-Q1-K1-D4
cttcctggtgaagtgtgtttcttgaaatcatcaccaccatggacagcaaaggttcgtcgcagaaagggtcccgcctgctcctgctgctggtggtgtcaaatctactcttgtgccagggtgtggtctccacccccgtctgtcccaatgggcctggcaactgccaggtatcccttcgagacctgtttgaccgggcagtcatggtgtcccactacatccatgacctctcctcggaaatgttcaacgaatttgataaacggtatgcccagggcaaagggttcattaccatggccctcaacagctgccataccttctcccttcctacccctgaagataaagaacaagcccaacagaccca

SEQ ID NO: 10938 - DNA, 300 bp, Bos taurus
  unsure (23): unsure at all n locations; Clone ID: 47-LIB3057-017-Q1-K1-D4
acccacgcgtccggcttggtcancttgatgcaactgcgttacctgtttcacgaagtacagcgtcgcatgcgggcgcacaagaactagtgggcgagtggtcggaaacatggaagccaggtttgcagtggcaactccagaggagctggctgtcaataacgatgactgcgccatctgctgggactccatgcaggctgtgaggaaactgccctgtggacatcttctccacaactcctgtcttcgtacctggctagaacaagacaccttttgccctacaagcgggatgtcgcttaacattgctga

SEQ ID NO: 10939 - DNA, 381 bp, Bos taurus
  Clone ID: 47-LIB3057-018-Q1-K1-D12
ccgaatcgacccatgcatccacgcatgacgttaacattctaaggtaattcgacacttgaagcaaatgggaaaagtgaaaaagctgagataagtgagtgcctcaatagctgaccacaaatcaaaagtatcttctttttgaagtgtcttctcttattctatgcaacagcaatgaaccatttgtcatttagattgtgatgtgcaatgaaaaggggtttttatatgacaaccagtgatgcctagctcagtggttggaccaagaagaagctccaaagtacttcccaaagcaaacatgtaccaaaaaaaggtcatggtttggtgacatgcttccagtctcatccactatagctttctgtgtgcaccctaaattgcttcagtcatgtc

SEQ ID NO: 10940 - DNA, 221 bp, Bos taurus
  Clone ID: 47-LIB3057-019-Q1-K1-D4
gttctagatcgcgagcggccgacctttattttttttatatttttttttatttatttattgggtgggaataattttttttttttttaaaagttttataatttattatttttttttaggttaaattttaatttgattttaaagttatgattttatatttgagttttaaaaagttttaaaaaaagggatttttataaaaaatattttataaaaaaagagaaaag

SEQ ID NO: 10941 - DNA, 394 bp, Bos taurus
  Clone ID: 47-LIB3057-021-Q1-K1-D12
tcggtcgccgtggtgcgcatgcgcagccgtcggtgggtcccgggttcggctgcgtgagaggtgctgaagctcccaggcgtgtgtcctcccacctcacgatggacatcaagaagcgtctggcctactccatcatccgcttcctgcacgaccagctccggcatggggagctctcgtctgatgcccatgaaagcctggaagttgccatccagtgcctggagaccgcttttggggtgacggtggaggacagtgacctcgcgctcccccagactcttccggaaatatttgaagcagctgccgcggtcatggagctgccgccagatctgatgagccctcaggaaaccccgccttcggaggaggactcggccgaggcagaacgcctcaaaactgaagaaat

SEQ ID NO: 10942 - DNA, 356 bp, Bos taurus
  Clone ID: 47-LIB3057-021-Q1-K1-D4
ataatactaaattcagaaatagctaccaacggagagacgccagacactctgaacagcattgcctcgcaaggttccacataaatgacgaaggaagagctgaatgccctcaaggcaatgggggacggggccctcggaagagccaatgaagtggaggtgaaaaatgaaatggtggagcatgaggggaaaagagcaatcttgcagagcactgagcaaagacagcacatggaggacccaggagagagctgtgtggacacagaggcgtcacatcctggtgacagtgctgaggaccagagagcctctgcggacggtgccccctccccgggaacactagtcaattccgagagcgagggagaggt

SEQ ID NO: 10943 - DNA, 257 bp, Bos taurus
  Clone ID: 47-LIB3057-022-Q1-K1-D4
ctgatctgtcacagtcgacacgtactaagtgcaagatgtatagaatatttttcaacacgtattagcttttcagataacataatctatttatagattaagatttcagggatttggaaatcttttatctttctctgatattgtttgttttgttacttccatttcttttggtcgcgaacgttgtgtccttgatttcagtaccaatttcacgttatacagcacttcccaaacaatccttcccctctcatgctagtagccca

SEQ ID NO: 10944 - DNA, 314 bp, Bos taurus
  Clone ID: 47-LIB3057-023-Q1-K1-D4
cagacccctctgttcgtatgatccgtaataattaccgccgtactactactactctcgcgccctgtgttagcatccggcatcacaatgctattaacagaccggaacctatatacaaccttcttcgacccgtcatgaggaggagaccctattctatatcaacacttattctgattctttggacaccccgaagtctatattttaatcttacctgtgtttggaataatctctcatatcgtgacctactactcatgaaaaaaaagaaccatttcttatatatgggtattggtttggctataatgtcaatcggatttcta

SEQ ID NO: 10945 - DNA, 300 bp, Bos taurus
  Clone ID: 47-LIB3057-024-Q1-K1-D12
cgacccacgcgtccgcagagccacgtctgtttgcgacccgattttactttgactaatccagcctcggtatgaggaggggttacatttcgacgtgtgcatacaactactaagataatatcatacgtcttccgcttgattatacaaaatacttcattgaaggagcatacaacgttatctccaatcatatccagcatatccgcatgttccttcacaggaacgctgtactgctgatatgcaagaacacgataatgcgctatgccatcctatggcatctagaaaacaaccctaccttgcataaac

SEQ ID NO: 10946 - DNA, 376 bp, Bos taurus
  unsure (49): unsure at all n locations; Clone ID: 47-LIB3057-025-Q1-K1-D4
gtgagtgacatcgtctttaaaccctgcgtggcaatccctgacgcaccgncgtgatgcgcagggaagacagggcgacctggaagtccaactacttccttaagatcatccaacttctggatgattatccaaaatgcttcattgtgggagcagacaacgtgggctccaagcagatgcagcagatccgcatgtccctccgcgggaaggctgtggtgctgatgggcaagaacacgatgatgcgcaaggccatccgagggcatctggaaaacaacccggctctggagaaactgttgcctcacatccgggggaatgtgggcttcgtgttcaccaaggaagacctcactgagatcaaggacatgctgctggccaacaaggtgcc

SEQ ID NO: 10947 - DNA, 398 bp, Bos taurus
  Clone ID: 47-LIB3058-001-Q1-K1-D4
tcggtttacaaccttctcttccacaaaagaagctctgacgaaagagatgcataaatcagttactctgacagtttcccaaagattcagaatctgctttgagtagctgctgttgccactgtcgacatctggtatttgaaaaaacagggtctgcaatcacctgacagtgtacagaaaagctcccctctttgtgtagctgactgtgaacagagctggtatagtccagaaaatctcaaatatttactctctacctctgcagctgcctgacaggcagcaagtcagcagctcaacccctcagaagcctgcacctagtgaagctgcaagaatactgccctaatgtgcaaatgaccttctaatataatatctgtaattggatatatttccccagtcaatctacacaa

SEQ ID NO: 10948 - DNA, 264 bp, Bos taurus
  unsure (101): unsure at all n locations; Clone ID: 47-LIB3058-002-Q1-K1-D12
cctgccatatgcaagactgctgtcgcgcccatcgagagggtcaaactgctgctgcaagtccagcatgccagcaaacagatcagtgctgacaagcactacanagggatcattgattgcatggtgagaatccccaaggagcaaggctttctctccttctggacgggtaacctagccaacgtgatccgttacttgcccacccaagctctcaactacgccttcaaggacaagttcaagcaagatcttctggggggcgtggaaccgcat

SEQ ID NO: 10949 - DNA, 279 bp, Bos taurus
  Clone ID: 47-LIB3058-004-Q1-K1-D4
agctctagcattatcctgaagttcacgtcaggtgctttgactacatcctcagcatacgcttggagcacagctttagtagtttggttgttcatagcccttctaggcatctgccttcccattatgatctatctctgtcaaatcatagagatagctgactctatttacgaagctatatcgtgaaaagctacattactttcagcatatagcgcattcctgttggaatcatgagcatgtagaacactatgtataagtgatgaactattaatatctatctgtatg

SEQ ID NO: 10950 - DNA, 400 bp, Bos taurus
  Clone ID: 47-LIB3058-005-Q1-K1-D4
attcccgcgacgacaccacgcgtccgaaagattttttttaaccttacatatcatagtgaatggtttccccagtgtatatgaatggtttaagagtctccaatagcttacacagtttaggagcttttcaatactcatttaataagggttaatcatttgctaatggaaattttaccacttcccattttccttgttaccaaatttcagctctcaggagctgttctgcaattctgaaattgcttttcttgcctctttagtcacctgtcacatgaggttcttgctcagtaatgatatggtgagttagattaataactgttttttgcacttcagatttagaagaaaggatcctgtttccatttgaaaggaactgtaaagctagtttatgatttaaccaactgaacaa

SEQ ID NO: 10951 - DNA, 377 bp, Bos taurus
  unsure (309),(331): unsure at all n locations; Clone ID: 47-LIB3058-006-Q1-K1-D4
aaaagattctttgggggcgtattcagggagtcaaatttgtttgtggcagtgataggccttttctcattcacatttctgtcaactgttaccttgtgaaacagatttgcatcgaccagctggctttattaccttagtcagtcagtagagggcaacccagctgccagaaagagttaagcagcttggttctacatctttaccagaagataatagctattcctgctaatttctagcaaacatctagccaagagagcacacatgttgacacactggaaaactgctttagagaagagtcatggttttggtttgttntattgggaaacagaagtaattntacaaattctagacaaatgagtcattgaactctttcaatcctatca

SEQ ID NO: 10952 - DNA, 382 bp, Bos taurus
  Clone ID: 47-LIB3058-009-Q1-K1-D12
gttctagatcgcgagcggccgccctttttttttttttttttttttaaggacaaaggtggggtttgtttttattataaaagaaaaaaaaatagtaactcctcaggaatcttaacaaaggaagggaatatttcacactcagagaacagacaccaagatacaaaattacaactgtttggactccagacttgtcccatctcctccagagcagagatggggaggagacagctgaagcaaacaagcaattctgtaaaacaaagacttagaaaccctaacaaatatgattaaaatctaaaattctgttttgctttaaaaaaaaaaatctttttttttttaatattatcaaaaggcctgctttagtgacatgctagtcccaccggaaaaa

SEQ ID NO: 10953 - DNA, 411 bp, Bos taurus
  Clone ID: 47-LIB3058-009-Q1-K1-D4
gcgagcggccgccctttttttttatatttttttttttttttttttttttttgtaccagcgtggtaattatttcccaactggtgtttttataaacattcattataaatggccattaaaaaggtacacttattcatgttaaaattaatccaagcatgcccaattctacaaggcatggacatctgaacactctctttgccatgcatactccttttctaatttaatcttcaaaatgacccgtcaaaagtccataaactgaaaggttatgtatcactaatttacaaatcttttgatggaactcaagttcattactctagacgtgtgttaagttataggttttaaatttatgcataaaatatctttatgaagacaacctttataaaaaatattactatagaatttatcatataactt

SEQ ID NO: 10954 - DNA, 348 bp, Bos taurus
  Clone ID: 47-LIB3058-010-Q1-K1-D12
acgcgtgacaacgacgcttaccagagccgcgtggtgcgcgtggtgcgcgccctcaagcagggcgtgtcaaggatgaactatttcttggacgtggagcttggccggactacatgtaccaagtgccaggccaacttatacagctgtcccttacataaccaggcgcacctgaagagggaaaagctgtgctcattccaggtttacgtcgtcccatggatgaacaccatcaacctggtgaagtttagctgccaggattaacaggcaggccactgaccgcctctcactcatgctcctgcagagtgcccacacttgtggtgggtgactgcctactggccgtgcctttcccatgcc

SEQ ID NO: 10955 - DNA, 383 bp, Bos taurus
  Clone ID: 47-LIB3058-013-Q1-K1-D12
ccgggtcgaaccaagccttccgatagaactgaaagcccttgaagcttttggcctcggccgagaaaagctgcaaggagaagctgcggtccctgactcaggccaaggaggaatcggagaagcaactcagcctgacggaggcccagaccaaggaggccctgctggccctgctcccggggctccccacctccaccaaccagagttacgctgagtggttgcaggagctcaaagagaatgcctgtttggagttgtcgaagcggccgcaggcgatcccggagccctcggacttggccgccaagctgagggaggcggaggagacgcagagtggcctgcaggccgagtgtgaccagtaccgcagcattctggccgagacggaggccatgctc

SEQ ID NO: 10956 - DNA, 385 bp, Bos taurus
  Clone ID: 47-LIB3058-015-Q1-K1-D12
gcccaaggctgcctgtgccgtgccccaaccagtgtggcgtgggcaccgtggctcgggaggacctgccaggccacctgaaggacagctgtagcaccgccctggtgctgtgcccgttcaaagactccggctgcaagcacaggtgccctaagctggcgatggcacggcacgtggaggagagtgtgaagccgcatctggccatgatgtgtgccctggtgagccggcagcggcaggagctgcaggagctacgaagagagctggaggagctgtcggtgggcagtgatggcgtgctcatctggaagattggcagttacgggcgccggctccaggaggccaaagccaagcccaacctcgagtgcttcagccctgccttctacacgcacaagta

SEQ ID NO: 10957 - DNA, 397 bp, Bos taurus
  Clone ID: 47-LIB3058-015-Q1-K1-D4
ttgaatcttgtctcaatgctcataacggatcagaaatacagattttgatagcaaagcgacattagtcgtgagctcttgtgaggaaaggcattggctttatcctctttagagttagactgttggggtgggtataaaagatggggtctgtaaaatctttctgtcttagaaatgtatttcctagttctgtagaaatggttgtattagatgttctctatcatttaataatatacttgaggactaaaagatataagtgctgtataaaatcagccaattatgttaaactagcatatctgcctctattgtgtttgtcattagcctgaatagaaaggccttcaaaattgattttttaattagcatctgaatgcatgttcgctgggattatattgattcactaaag

SEQ ID NO: 10958 - DNA, 425 bp, Bos taurus
  Clone ID: 47-LIB3058-016-Q1-K1-D4
cgggtttgccgccgggacacaggtgtcgtgaaaaccaccgttaaacctaagccaaaatgggaaaggagaagacccacatcaacatcgttgtcattgggcacgtagattcagggaagtctaccacgactggccatctgatctataaatgtggcgggatcgacaagagaacaattgaaaagttcgagaaggaggctgccgagatggaaagggctccttcaaatatgcctgggtcttggacaaacttaaagctgaacgtgagcgtggtatcaccattgatatctccctgtggaaatttgagaccagcaagtactatgttaccatcattgatgccccaggacacagagactgcatcaaaaacatgattacaggcacattccaggctgactgtgctgtcctgatcgttgctgctggtgttggagaatttg

SEQ ID NO: 10959 - DNA, 188 bp, Bos taurus
  Clone ID: 47-LIB3058-017-Q1-K1-D4
ccttcaggtgaggcgtgtgtgtgcaggggccgtcgggcaccccaaagcattctgctcgcacagggcgaatggcaggcagggccagcgcttcaagccccgcatccgagaactagcaagacccgtcagagtgtgcacagtagggactgtgatgatcagttcagtgtcaggacctgaggcttcctggagcc

SEQ ID NO: 10960 - DNA, 408 bp, Bos taurus
  Clone ID: 47-LIB3058-018-Q1-K1-D12
cgccccgccgcggcccggccacgaccccgcccactcgaggctctgcgccctgagccgccaaggcagcacctggcccatgggcggtaccatcgcccaggcccctcctctgcggccagggcaccgagcgccctgggcgctgggccggcttcggccgggtcgcgggcccctggacccagaggcgcccggcccagcggggagagcgctcaccgtcgggaccccgctcggcgcccagtcactcgggcgctgcaggcggacgcacagggaggcctgcggcggcgggagggagacagacccccatccggggccggtgtggtgaccccgccgtcccgcacgccgggaggtccccagctacttcgaggccctggtgaagaagatctgcaagtacctgctccatgtgctggcgcatat

SEQ ID NO: 10961 - DNA, 447 bp, Bos taurus
  Clone ID: 47-LIB3058-019-Q1-K1-D4
gttctagatcgcgagcggccgccctttttttttgttttttttttttttttttttttttttttttgttttttttgatattcattttttgatttttgagcttttctgctctagggtacgggagatgaactttatttacaatactttgatttggccggttttcttctacttttggtctgcctggaactgtttccatatgatgtaaaaagcaggtgtagtgtcccattattatgtggtttggggatttttcatttgttttttaaaattaaccatgtcagctgggattagactccctagaatctatcagtggaaaagtaacattgaaaaaatgcttttggaaattcaaatttcagacaaaaagtgcttaaaagctggtattttttctaagtgcttctatttataccagaagcattaaagtaacccagtgccaagtaccattcttgaaaaatt

SEQ ID NO: 10962 - DNA, 322 bp, Bos taurus
  Clone ID: 47-LIB3058-020-Q1-K1-D4
cgaacggctggctcgagatgtgatgaaggagatgggtggccatcacattgtggccctctgtgtgctcaaggggggctataagttctttgccgacctgttggattacatcaaagcactgaacagaaatagtgacaaatccattcctatgactgtggattttatcagactgaagagctactgtaacgaccagtcaacaggcgacataaaagtaattggtggagatgatctctcaactttaactggaaagaatgtcttgattgtcgaagatataattgacactgggaagacaatgcagactttgcttgccttggtcaagaagcat

SEQ ID NO: 10963 - DNA, 356 bp, Bos taurus
  Clone ID: 47-LIB3058-021-Q1-K1-D12
gcgagtcatgttcataagggatcataccttgtttaccaccatccatcagatgtcacccgggatggagttactgggcagcaccttgtgctaaccagcactgtgaggagacatagacctttgctctgaattcgataggacccagccacctattcagcattacagaatccattgtgatgccacacacataggcctgtaccctggctccagcaatctttcaccaacttacattagttcctatttctcaccagctagagaacataatagaccgctacagcatcaacagctgtattatagtcaagatgactcctacagaaagaactctgatgcatacagattgtattagcagactactcata

SEQ ID NO: 10964 - DNA, 472 bp, Bos taurus
  Clone ID: 47-LIB3058-021-Q1-K1-D4
ggctcgcggcggcaagatggccgtgcatatttccaaaaagaggaagtttgtcgctgatggcatcttcaaagctgaactgaacgagtttctcactcgggagctggctgaagatgggtactctggagttgaggtccgagttacaccaaccaggacagaaatcattatcttggccaccaggacacagaatgtacttggtgagaagggccggcggatccgggaattgactgctgtggttcagaagagatttggctttcctgaaagcagtgtagagctttatgctgaaaaggtagccacaagaagaccgggtgccaatggccaagccgaagcttttgcgttacaaactcctaggaggcctgctgtgcggagggcctgctatggtgtgctgcggttcatcatggagagtgttgccaaaggctgcgaggtcgtggtgtctgtgaaacttcgaggacagagggctaaatccatgaagttt

SEQ ID NO: 10965 - DNA, 221 bp, Bos taurus
  Clone ID: 47-LIB3058-023-Q1-K1-D4
aggaaacaggcctccggccctgagcgcaccattcccatcacccgtgaagagaagccggctgtcactgcagcccccaagaagtagatgccctttctctaaacgcattttttaaaacaagaagttccccaccagtgaatgaaaaccttgtgactagtgctgaagcttattaatgctaagggcaggcccaaattattaagctaataaatatcattcagcaacag

SEQ ID NO: 10966 - DNA, 428 bp, Bos taurus
  Clone ID: 47-LIB3058-025-Q1-K1-D12
cttccagtggatgaagaaaacagctgtgtttgtcaacatcagcagaggagaagtggtagaccaggatgacctgtaccaggccctggccagcggtcagattgcagctgccggactggacgtgacgaccccagaaccactgcctaccaaccaccctctcctgaccctgaagaactgtgtgatcctgcctcacattggcagtgccacccacaggacccgaaacatcatgtctgtcttggcagctgacaacctgctggctggcctgcgaggggagccgatgcccagtgaactcaagctatagccacacggggactctgggggccagaggaaagtctgatctgtacccattctgtggagggaagactggtactaacagatgtgctgcacttttgtggttggaagcatctgagccccacgtgtgtaattttatt

SEQ ID NO: 10967 - DNA, 266 bp, Bos taurus
  Clone ID: 47-LIB3058-027-Q1-K1-D12
acataatctggttcacagaaaatacccgaaacacccacacaaaaaaagagctgataaacaagttcaacaggttacatgatacccaatcattattgtaaaaatgaattgtatttctatacactagcaatgaacaatctgagaaattaagaaaacaattccactgacaacagcagcaataatctttaaaaaaaaaaaaaaaaagttaatttaagagatgaaagacttgtatacagaagagtacagaatgtcactgaaagaaattaaag

SEQ ID NO: 10968 - DNA, 384 bp, Bos taurus
  Clone ID: 47-LIB3058-027-Q1-K1-D4
gtccggttggacagagccagttttcacgtgctgcaggtgggagtgtgctaacgtgtttgctcttgggtgatggacaaggtagaggccatggagtaaaaatagtcaacggtgagaggagagaagagcttggtgtctgattcagtcactttcctttgtgtgaagttgagagtaacagcctctccctcgctttagggttctcagactttggacacctctcttctcagagcccagatgtcttacaggtgagctctgatgtggaagaaaacaggaggtgttggaaaggagtgggattttggcgtttgcattaatgtgtgtagcttcaggccttgggagttggcaagaacgagaaaagggaaggaagccaaatcttttgaaagtgttgtt

SEQ ID NO: 10969 - DNA, 439 bp, Bos taurus
  Clone ID: 47-LIB3058-029-Q1-K1-D4
gggacttatgaccactgtccacgccatcactgccacccagaagactgtggatggccgctccgggaagctgtggcgtgacggccgaggggctgcccagaatatcatccctgcttctactggcgctgccaaggccgtgggcaaggtcatccctgagctcaacgggaagctcactggcatggccttccgcgtccccactcccaacgtgtctgttgtggatctgacctgccgcctggagaaacctgccaagtatgatgagatcaagaaggtggtgaagcaggcgtcagagggccctctcaagggcattctaggctacactgaggaccaggttgtctcctgcgacttcaacagcgacactcactcttctaccttcgatgctggggctggcattgccctcaacgaccacttttgcaagctcatttcctggtacgacaatgaaatt

SEQ ID NO: 10970 - DNA, 428 bp, Bos taurus
  Clone ID: 47-LIB3058-034-Q1-K1-D12
ggcggaggttgctgtgttggtgcggaatccccttgagcaggtctccgggctgctgaggaggcggttccaccggaccgcgccggctgcactgcaggtgacagttcgtgaggctataaatcaaggcatggatgaggagctggaaagagatgagaaggtatttctccttggggaagaagttgcccagtacgatggggcatataaggttagtcgaggcctgtggaagaaatatggagataagaggatcatagatactcccatatctgagatgggctttgctggaattgctgtaggtgccgctatggctgggttacggcccatttgtgaattcatgaccttcaatttctctatgcaagccatcgaccaggtcataaactcagctgccaagacgtactacatgtcagggggccttcagtctgtgcccatagtct

SEQ ID NO: 10971 - DNA, 326 bp, Bos taurus
  Clone ID: 47-LIB3058-035-Q1-K1-D12
tttggaccacaactgggagaaaaaaccttttcaattcagtacttttctagtagttaagtgaaagatgagcctggggagagaatctttaaatattttgctatcaagaaaatttttcaataaatttctgttgaaagcaagaagctacagaaaaggctccacttgcctgccggagaggtggagcagaaagcatgagcaacatgactgtgccaggtgccctttggagaatttctggctgtcagtctgttcgacgatgatgggcatgtgaaagggcccaccgtgggaagagggaagaggatgactgaaaatgttttattatctattcttgc

SEQ ID NO: 10972 - DNA, 432 bp, Bos taurus
  unsure (380): unsure at all n locations; Clone ID: 47-LIB3058-036-Q1-K1-D12
cagcgccaaaggctgtatggattgggctgcgcacatgctaacaggtctcacctcttacatttcggagatgatccttggacatctcttcagccaggaagagctgtccggaaattctgagttgatacaaaagtatagaaatatcattgcacatgcccacaacctggataacattgaactgtactggaacagctacaacaatcgacgagacctgaactctgtgcgtggaggcgataccaccctcaagtgccctgtgatgctggtggtaggagaccaagcaccccatgatgatgcagtggtggaatgtaactcaaaactggacctcacccagacttctttactcaagatggctgactctgggaggcagccccagctgactcagncaagcaagctgaccgaggccttcaagtactttctgcagggcatgggctatat

SEQ ID NO: 10973 - DNA, 172 bp, Bos taurus
  Clone ID: 47-LIB3058-036-Q1-K1-D4
cggacgcttgggctgtcctcattctgctcgacgtcgaggtgacggtcacggaggatgagatcagtgccctcattaaagcagccggtgtaaatgttgagcctttctggccaggtttgtttgcaaaggctttggccaatgtcaacatcgggagcctcatctgcaatgggggggc

SEQ ID NO: 10974 - DNA, 321 bp, Bos taurus
  Clone ID: 47-LIB3058-037-Q1-K1-D12
ccgagtcattgtgaagggatggggatgactatatctgagtggttactgagtcggggagcgggatgttggaatctgcggagagatccgaaggtgggatgaagcactcatgactatgagtaaaggagaaaaggctcgactggagattgaaccagaatgggcttatggaaagaaaggacagcctgatgccaaaattccaccaaacgcataacttatttttgaagtggaattagtcgatattgactgaaatagttaagaaaccatcaacaataaaacatggccatgaagaaacttatgtatctaattagaactgattactatagt

SEQ ID NO: 10975 - DNA, 197 bp, Bos taurus
  Clone ID: 47-LIB3058-039-Q1-K1-D4
ctcgatggcggcagactacaaggacagtggaatggggacgcccaacgctgaccctgagccccttaaactagaatcaagccagagagcgagcggatgcagacagtgtccctgggtgaccacagactgactggctcattagctagctctgctgttgctttacaagttctgagcattctctgctagcctatggaagctgc

SEQ ID NO: 10976 - DNA, 427 bp, Bos taurus
  Clone ID: 47-LIB3058-040-Q1-K1-D12
tcggcagtgttgaagggcaaatgtaaacgatattggtctgtcttggcttttagaaaacaagagacttgaagatctaagtcgttatttttctttcacttttgttgaggacaggaaaatccctgataggtggggaacaaggtatcagggttttgattttactcttttggtacaaaagggttgaacaccaagctaacagagcagccatgggtttattattaaattttctaccaacaaggcactgtgctaggtactgtaaccctgccacgggtaggtaggtattcttccactgtaagtcactgggggttggtataaagctgtttcctgtgagttagccgctccccccaccccaatctaagtagtcttggggttggggggtcacctctgagattcctagagccataattctcttaccaaggtgttgtattgg

SEQ ID NO: 10977 - DNA, 444 bp, Bos taurus
  unsure (358): unsure at all n locations; Clone ID: 47-LIB3058-043-Q1-K1-D4
aaatggtggaggttttagtgaagaaagtatgcttatatacatcgggtggttaggaggaaaggaccagccctaatgctggctggcaagtatgaatcagcaaatgttgtcagacttcttcttcagcagggtgttgacatcttttctcaagatgtttttggatggactgcagaagaatatgccgttattagtggttttaatatgagatccaaccagtccgtcctaaaggaaatcagtcctgaatattcttgcaaggactgatgcggaagctgaagctccaatactttggccatcttgtgtgaagaaccgactcattggaaaataccgattctgggaaagtttgaaggcgggaggagacggngacaacagaggatgagatggttggatggcatcaccaactcaatggacatgcatttgtaaaaccttcaggagttgctgatggacagg

SEQ ID NO: 10978 - DNA, 405 bp, Bos taurus
  Clone ID: 47-LIB3058-045-Q1-K1-D12
gtgctagatcgcgagcggccgcccttttttttttttttttttttttgaaaggtttaaacaatttattttgtcccaaaaatggagaccggagaaaaagccacgcgcgttcccgcgccattacccggcgcgcgcccggaggcgggaagggctgcgccgccgtggcgtcctcgcgcgcagggccggggcgggcaggcgcaacccggccattggcgccccggagccggtaaccaaggcgacagcccaggccaagcgcgagagccaataagggcgtcgccagggccgtttcaaaaatctaaagcaaacaataatcggggaaaaaaaaaaaaaaatactcccacgttgggggatgggcaggccggcacggcccgggcccactgttgtcggagcgcgcacggcggttcgggc

SEQ ID NO: 10979 - DNA, 428 bp, Bos taurus
  Clone ID: 47-LIB3058-045-Q1-K1-D4
gtgtcaaaggaacagttaagtgatgaatgaggcagaagggaggttggcatggtggtgtcctaacattgtagcagctgaataccagaacagctttgtgaagcagtcagctaagtgataaatggggaaatgtacacacatcacagtttccagttctgtagaactagcaatattgtcttgtagcttttaaaaaactggctgatacactttgttgtggaaaccatccctggtttcactttcatagctgagtaacatgttggtttagtcttgtttcttttccagtcttttgaaaagcctctactttaaggaccctccagagacttgcccacctctcattacatgtacgttcttgtttgtatcattagcacctacatgctcatggtgacaccaggctcgaagagcagttctcagagaagtacgacatgctgcac

SEQ ID NO: 10980 - DNA, 434 bp, Bos taurus
  Clone ID: 47-LIB3058-046-Q1-K1-D4
gacccacgcgtccgaaatgattaactcctagccccaatacttgactaatctattatagaatagaagcaataatgtcaatatgagtaacaagaaaaattttctccttgcataagtctaagtcagtgcctgataatactctgaccactaacagtcaataaaaataatccaacaataaacaatttattgattatactgataacccaacacacgagtgcatctaaggaaagattaaaagaagtaaaaggaactcggcaaacacaaaccccgcctgtttaccaaaaacatcacctccagcattcccagtattggaggcattgcctgcccagtgacaactgtttaacggccgcggtatcctgaccgtgcaaaggtagcataatcatttggtctctaattaaggacttgtatgaatggccgcacgagggttttactgtctg

SEQ ID NO: 10981 - DNA, 407 bp, Bos taurus
  Clone ID: 47-LIB3058-047-Q1-K1-D4
gtggggtgggctccagtcaaaaccttatgtgttaggttggatgttctgtactcagcgggagacagaacgttccatgacagccaggtgtcctctggaccgtctcaagtgactcatccttccgatcctgtcagtgacccacctgcatggaacagtgtagggtggactcccaagaagaggcggttgtctgtcttgtcttgtcttgatgctggatcctgaactagcctagacctcctgcctctctcttaagacttggctttcctttcatttgaaaacttcagtcatagagcattaagcagatggtgcctctgcaggggcgagttttcccctgggcagggcggcaaggaccacgtaccggaacaaaaacctgtcctcagtatagtggccactgtaggtttcaacaacaacta

SEQ ID NO: 10982 - DNA, 430 bp, Bos taurus
  unsure (329),(351): unsure at all n locations; Clone ID: 47-LIB3058-049-Q1-K1-D4
ggtgcctaccacagggctgctggctaatacttatcccctcctgctgcctccaggctgtgagccggtggcttgagtaagtgtggcggccctcagcacagggtctctgccatgtctgagaagtgcttcttaggccaaacagcacatctcctgaacttttaatgtcctgccactctcttccctcctcattctctgggattctgagcacagagatcctggagcaacttctcaaaggagagccgtaaagttcaacaaatggctgggaagagtgatcaggtcagagactcgaggcccccagggcctaaagtgaagtgtccatgaggctgagcctnctgcgttctctcaggtgctcanggatctaagcgagtaaacagagagcctgcagctggggctggtgaagtacccactccgagtgctcccagctaggtgactc

SEQ ID NO: 10983 - DNA, 421 bp, Bos taurus
  Clone ID: 47-LIB3058-051-Q1-K1-D12
caaaaccgagaactcactccagtctccctagtaccactgaagagagaagaaaaaaaaaaagaatgccagcaaaacaataagagcatttgcccaaatctacctattgcagctgggagaagggggtcaaagcaaggatctttctcccatagaaagagagcactgaccccgatggcgatggactatttaagccctaactcagccaaccttacttatagcataagggagcatagtgtttgtgtagacaaagggggcgcttggccttatacctcgttagagaagagaaacagggtgtagtcagcatcttcttactcccttctccctgataacagctaccatgacaaccctgtggtttccaaggagctgaggatagagagaaactagttcatatgaaaaatagactggcctaaggagcaacagtcgc

SEQ ID NO: 10984 - DNA, 454 bp, Bos taurus
  Clone ID: 47-LIB3058-051-Q1-K1-D4
agccacttcagtgcagctctggggatccaccagtaatgatggggccttccccatcaccaacgtatctggtgcgagcataggtcgttacagctgctgctaccaccctgactggaccagccttatcaagatacagcctagcaacaccctggaactcatagtcacaggtttgctccccaaacccagcctattagcccaacctggtcccatggtggcccctggagaaaacatgactcttcaatgtcagggggaactggcagactcaacatttgtcctgttgaagaaaggtattcaagagcctttaaagcaacagatgccaaatgggtacagggctgacttctggatgccagcagtgagcagtgaagattctgggatgtacagctgtgtgcattattttgattctgctccccttgcagcttctaatcacagtgactccctggagatctgcgtgactgac

SEQ ID NO: 10985 - DNA, 434 bp, Bos taurus
  Clone ID: 47-LIB3058-052-Q1-K1-D4
gtggtgtgggggctgtgggctggagttctgcatggaccgctaggggctggtcagcgtggactggcggttctcgcattttgcgtgtatgctgcttttcttttctaaccaagatgctggttttggcatctgtttgtctcattccctgcgatctgctgtaagacatataattgtgactggatagggccatggaggtcaaattcctgcaagcctgcagtctaggacactgccggggagcccaatgtgccctgcacgcatgtggatagcggggaatcaaggttggaaatttggaaataaggacatgcattgggcccttcaggcttccttgtagcctgactggaaaggcgtgagaggctaggctagcccaacctggagaggcttgttccaattaggcctggtcttgggatgggcttcaatgattaaccctgggggattat

SEQ ID NO: 10986 - DNA, 386 bp, Bos taurus
  Clone ID: 47-LIB3058-053-Q1-K1-D12
tcgcggacgcgtgggttcccaccaggacgcccctcaatggctcgggacctccgcggcgcgtgggcggctatgccacgtctccatcctcccccaaaaaggaggcgacctctgggcgcagtgcccggcgctacttgtcaccagagcgcctcgcctcggtgcgccgcgaggatccccgcagccgcaccacatcctctagcagcaactgcagcgccaaaaaggaaggcaaaaccaaagaagttatcttcagcatggaggagggctcggtgaaaatgttcctgaggggccgtcctgtacccatgctgatcccggaggagctggtccccacctacagcctggacacacgctctgagctgccttcgcaccgattcaagttggactgggtctat

SEQ ID NO: 10987 - DNA, 419 bp, Bos taurus
  Clone ID: 47-LIB3058-053-Q1-K1-D4
ggaccgttaccctaaacctcagcttgctcattaggagctgggggaggaccccattcaatccaggagagcgaatgcgtatgacagggccgtcctgaccagcgcttgcgagcgaggctgccgccttttctccatctgccgattcgtggccaggagctccaagcccaatgccacccatgctgagtgtgaagcagcctgtgtggaggcctacgtgaaggagacagagcagcaagcttgcatcgagggctgctggagtcagaacccagagccggagcctgagcccgagctggagcagaagacccagcctgtggtagagagcctggggcatgagggagcccgtctgcagcgagtggaggtgacctggcggagatcccaccctgaggctttggaagtgcatgttgacccttgtagccctttggata

SEQ ID NO: 10988 - DNA, 390 bp, Bos taurus
  Clone ID: 47-LIB3058-054-Q1-K1-D4
cggacgcgtgggcgccatgttgggacttgtgggtcgtgtggttgctgcctcggcctgcggggccttgcggggactcagcccttcagcgccgctaccgcaagcccagcttttactgcgggccgctcctgcagcgctccagcctgccagagactatgccgctcaagcatctccatcgccaaaggccggcgccaccactgggcgcatcgtggcggtcattggtgcagtggtggacgtccagtttgatgagggactgcctcccatcctaaatgccctggaggtgcaaggcagggagaccaggctggttttggaggtggcccagcatttgggtgagagcacagtaaggaccattgctaaggatggtacaagaagcttgggtagaggtcagaaagt

SEQ ID NO: 10989 - DNA, 338 bp, Bos taurus
  Clone ID: 47-LIB3058-057-Q1-K1-D12
cagagcactgtatagctttcaggaaattgctctataagtgacattttccccaactagacttttggtgaattttggaatgtagtttattcagcatatgactctatcacaggtaccagtaatgcagctaattttcatgtttcctttaggtggcaaaccgcatgcgttaactactctctgaactgagtgattgggattactatcaaacagttgaagaacctaacagcatatttatgtacttaagccctgttaatttactccacagaatttaaaaatttggaagtttaataatcttcctcattcttcagatgaaggaaactggaagtgacctgacttgccaa

SEQ ID NO: 10990 - DNA, 446 bp, Bos taurus
  Clone ID: 47-LIB3058-057-Q1-K1-D4
cacaggtgtcgtgaaaaccaccgttaaacctaagccaaaatgggaaaggagaagacccacatcaacatcgttgtcattgggcacgtagattcagggaagtctaccacgactggccatctgatctataaatgtggcgggatcgacaagagaacaattgaaaagttcgagaaggaggctgccgagatgggaaagggctccttcaaatatgcctgggtcttggacaaacttaaagctgaacgtgagcgtggtatcaccattgatatctccctgtggaaatttgagaccagcaagtactatgttaccatcattgatgccccaggacacagagacttcatcaaaaacatgattacaggcacatcccaggctgactgtgctgtcctgatcgttgctgctggtgttggtgaatttgaaagccgtatctccaagaacgggcagacccgtgagca

SEQ ID NO: 10991 - DNA, 406 bp, Bos taurus
  Clone ID: 47-LIB34-001-Q1-E1-D12
agggacgggaaggcggattcagtgcttttaatcagctgaaaatggctcgtttcacgattgtggatggcaagatggggaaaggagtcagcttcaaagatgtggcaggaatgcatgaagccaaactggaggtcaaggagttcgtggattatctgaagagcccggagcgcttccttcagcttggcgccaaggtcccgaagggcgcactgctgctcggcccccccggctgcgggaagacgctgctggccaaggcagtggccacggaggcccaggtgcccttcctggcaatggctggcccagagttcgtggaggtcattggaggcctcggtgcggcccgtgtgcggagcctcttcaaggaagcccgggcccgggccccctgcatcgtgtatatcgacgagatcgacgccgt

SEQ ID NO: 10992 - DNA, 373 bp, Bos taurus
  unsure (312): unsure at all n locations; Clone ID: 47-LIB34-002-Q1-E1-D4
acaagcactctcctcagagttctctgtctgatgtttcagaagtatcctcgctagaacattcacaggagggccctgtgcagaatggctgcagaagcccagaaagcaagttccaggtcatcaagcaagagccaatggaactggagagctatgccagggaacccagagatgaccgaggtgcctaccgaggggccgtgtatcagaactacatggggaattcctttcccggatactcgcactctccccctctgctgcaggtcaaccgatcctccagtaactctccgaggacatcagaaactgatgaaggtgcagtangaaagtcatccgacggagaagatgagcagcaggtctccaagggcccgattcactctcccgt

SEQ ID NO: 10993 - DNA, 384 bp, Bos taurus
  unsure (191): unsure at all n locations; Clone ID: 47-LIB34-003-Q1-E1-D12
gccgaagaaatgttctggaaggattgtaggtgggtgtgtgtccaagccacactcttggccctggcaagtcagccttcgaagaagctcgaggcacttctgtggaggaactctgatatccccaaagtgggtgctgactgctgcccattgcctggacaacattttagcgctgtcattctacaaggtcatcctgngtgcacacaacgagaaagtccgggaacagagtgtccaggaaataccagtgtccaagctgttccgggagccctctcagggggacattgccttactcaagctgagcaaacctgccatcatcacgaaagaggtaatcccagcttgtctgccacccccgaactacatggttgcagcccggacagaatgttacatcac

SEQ ID NO: 10994 - DNA, 391 bp, Bos taurus
  Clone ID: 47-LIB34-004-Q1-E1-D4
agacaaggctggtgccagccttaggcttgacacggcagtgttcaccctctggccagacgactgtggttcaagacacatgtaaattgctttttaacagctgatactgtataagacaaagccaaaatgcaaaattaggctttgattggcacttttcgaaaaatatgcaacaattaagggatataatctggatggccgcttctgtacttaatgtgaaatatttagatacctttcaaacacttaacagtttctttgacaatgagttttgtaaggattggtagtaaatatcattccttatgacgtacattgtctgtcactaatccttggatcgtgctgtattgtcacctaaattggtacaggtactgatgaaaatctaatggataatcataacact

SEQ ID NO: 10995 - DNA, 283 bp, Bos taurus
  Clone ID: 47-LIB34-005-Q1-E1-D4
gaaaaagagtcaacaaatgcagcagcaagtcaattgtatcagcaaaatgttgtcctcattgcatgtgtagtttcagtacagttcccaaacttaaggcccagtttcttctagtgtgattgaaagtttcttttctttgctctgaataaaattgaactgtgggttccctatagaaagtggcattttgggctttccctttttgtaaagcaatttctgcctagtttattgtccagttaattttagttcagtgacttttaaagttggcgttgtaaataaagcaacttgc

SEQ ID NO: 10996 - DNA, 414 bp, Bos taurus
  Clone ID: 47-LIB34-006-Q1-E1-D12
ataattttaaccatatggctcctccctctaatactaatagctagccaacatcatctatcaaaagaaaacctaacccgaaaaaaactatttattactatgctgatctcactacaactattcctaattataacctttaccgccatggaactaatcttattttatattctatttgaagcaacactagtcccaacactcattattattacccgatgaggaaaccaaacagaacgcctaaacgccggactctatttcctattctatacactagctggctccctacccctattagtcgcactaatttatatccaaaacacagtaggatccctaaatttcctaatattacagtactgagtacaacctgttcataactcttgatctaatgtcttcatatgactagcatgtataatagctttc

SEQ ID NO: 10997 - DNA, 214 bp, Bos taurus
  Clone ID: 47-LIB34-006-Q1-E1-D4
cggacgcgtgggattccaggctcggagccccgggcccgccgacaccatgagttggtcctcgcaccctccgagtgtaatcttctacattctttcattgctttcttcagcatgcctggcatatgttgctacccgagacaactgctgcatcttagatgaaagatttggtagttattgcccaactacctgtggaattgcagatttcctgaataattac

SEQ ID NO: 10998 - DNA, 427 bp, Bos taurus
  Clone ID: 47-LIB34-007-Q1-E1-D4
cagaatttaatcaaacaaaactgtgaccaattcgaaaaacttggagagtatggattccaaaatgcgctcatagttcgttacaccaggaaagtaccccaagtgtcaactccaactctcgtggaggtttcaagaagcctaggaaaagtgggtactaggtgttgtacaaagccggaatcagaaagaatgccctgtactgaagactatctgagcttgatcctgaaccggttgtgcgtgctgcatgagaagacaccagtgagtgaaaaagtcaccaagtgctgcacagagtcattggtgaacagacggccatgtttctctgctctgacacctgatgaaacatatgttaccaaagcctttgatgagaaattgttcaacttccatgcagatatatgcacactttccgatactgggaaacaaatcaagaaacaaa

SEQ ID NO: 10999 - DNA, 394 bp, Bos taurus
  Clone ID: 47-LIB34-008-Q1-E1-D12
gttggagaagaagttgaaattttatgctttactggattcaaagctgttggataccagtacttcagatgcttaccagacagaagctggaggcaaggagacgtggaatgccaacggacagagtgcctcaagccaatagtgccagaaggactgacgctgtcaccatttcagacattatataaaattggtgactccatcgagctgacctgtcccagaggtttggttgtcaatgggccatcaaggtacacatgcagtggggattcctggacaccacccatttcggactcactcagctgtgaaaaagatgtcctgacaggcttaaggggtcactgtcaaccaggacaaaaacagttgggatctgaatgcgtttgcatgtctccagaagaagactgtgggc

SEQ ID NO: 11000 - DNA, 385 bp, Bos taurus
  Clone ID: 47-LIB34-008-Q1-E1-D4
ccccacagaactttggcacaatgaactgggtgacgtatagttcacttccccgtcacatcagcgctgcttattccacaggtgtgttgcgtcgagatacacacaacagtgagattgctcatcggtttaaagatttgggataagaacattacataggcctggtactgattgccttttcgcaatatctccagcagtgtccatctgacgatcatgtaaaattagtgaacgatttaactgactttgcagtaacatgtgttgctgatgagtctcatgcctgctgtgaaaagtcactctcatacgctctttggagactaactgtgttcagttgctcctcctcgtgagacctatggtgacatagctgactgcagtgagatccaagagcctgaca

SEQ ID NO: 11001 - DNA, 369 bp, Bos taurus
  Clone ID: 47-LIB34-009-Q1-E1-D12
gttctgaaaccctagaggacgcaactcccctgaagccagccttccgctaactgtgcgtctcacatgtcccttcctccataaggccgctggcccaactcctcttggaagtctggacagactctaggacatgcttcccctccctctctccatattgctcctgctcacacagtcccagagtttcctgggcgaagaaatggatgtctattctgagaaaaccctcaccgatccctgcaccctggttgtgtgtgctccaccagcagatagccttcgtggtcatgatggacgagatgggaaagaaggcccccaaggagagaagggggatccagggcctccaggtatgcctggaccagctggaagagagggcccctc

SEQ ID NO: 11002 - DNA, 406 bp, Bos taurus
  Clone ID: 47-LIB34-010-Q1-E2-D12
cggacgcgtgggggtgtatgtgcccacgggctttgctgccttcccctgtgagctgatgcacttgccagaaaagtgggtgaagaccaagtacccgaatctcatctcttattcctacatgccccgtgggggccactttgctgcctttgaggagccagagctgcttgcccaggacatccgcaagttcgtggggctgcaggagcggcagtgaccccggcagggcctgtcacctccccagcagcccctgccctagcacagcaggctccctcctgacacccgccctttcacagagaagtccctggtctcgcagcccagctcccagtagcagtggggctggcggggagcccactccccatctctggtcctctatggggagagatgcccctttccccaggaatgtgtttgctgc

SEQ ID NO: 11003 - DNA, 429 bp, Bos taurus
  unsure (283),(318): unsure at all n locations; Clone ID: 47-LIB34-010-Q1-E2-D4
tgaacgtcgatctacccccagagatcaagaatcaggtcctggccctgaagcagagaatcagccagatgtaatcaggtttgcctgactgtccacctccaatccatacaacgcaccaggagcaggagacacggcgcttcccgaattctcactgcctgcagcaccgcaatgagcgcacccaggggctgatcgaaacccttaatttttcagataagaccgtatagcagactgaagctagtcactaaagaggttggggagggaaatagcaggctccaggaaatagcanacattcatgatacaatgcacctttgttcaacttanggacactcaagcagtcttctttgtctttcccccttagctgtatcagttagccaggatgcacagaaaaaggacacttgagctgtatatatgtgtgtgtgcacatgcgtgtgt

SEQ ID NO: 11004 - DNA, 398 bp, Bos taurus
  Clone ID: 47-LIB34-011-Q1-E1-D12
agcctgcggccgaaccggtcccggagtctcctaaaggcgtccgggccgtgctcttagggccgcccggagccggcaagggtacccaggcacccaaattggctaaaaacttctgtgtctgccatttggctaccggagacatgctgagggccatggtggcttccggctcagagctgggaaagaagctgaaggcgactatggatgccgggaagctggtgagtgatgaaatggtcttggagctcattgaaaagaatttggagacccctccatgcaaaaatggttttcttctggatggcttccctcggaccgtgaggcaggcaaaaatgcttgatgacctcatggagaagaggaaagagaagcttgattctgtgattgaattcagcatcccagactctctgctc

SEQ ID NO: 11005 - DNA, 411 bp, Bos taurus
  unsure (333),(347),(373),(384): unsure at all n locations; Clone ID: 47-LIB34-011-Q1-E1-D4
agaaaacggaacggtacgctatacaacgtttgagtatcccaacaccatcagcttttcttgccacacggggttttatctgaaaggagctagttctgcaaaatgcactgaggaagggaagtggagcccagaccttcctgtctgtgcccctataacctgccctccaccacccatacccaagtttgcaagtctcagcgtttacaagccgttggctgggaacaactccttctatggcagcaaggcagtctttaagtgcttgccacaccacgcgatgtttggaaatgacaccgttacctgcacggaacatgggaactggacgcagttgccagaatgcangggaagtaagatgnccattcccatcaaagacagacaatgngttttgtgaancatcctgcaaatccagtgctctactat

SEQ ID NO: 11006 - DNA, 416 bp, Bos taurus
  Clone ID: 47-LIB34-012-Q1-E1-D4
cgggtccgccacgcgtccgagctatcgtccatttgagatggggctcgtcgtgccaagggctcatgggtcactagttctccaagtgccaggggtgggcaggcagtggcaccgagccccctccaacactgtgccctggtggagaaagcactgacctgtcctgccccccatgtctccctcttctgacgtgccttttgcacccctcccattaggacaatcagtcccctcccatttgggagctccctttcctttctctcccccagcccctcctggcacccagccacctgcccacacgtgccccctcctcttcccacacctacccccaccctcccgtggccagcccaactggttttgtaagatactgggttggtgcacagtgattttttttttcttgtaatttaaacaggcccagcattgtt

SEQ ID NO: 11007 - DNA, 455 bp, Bos taurus
  Clone ID: 47-LIB34-013-Q1-E1-D12
gggtccacggacgcgtccgatcttcacagaacccagagcgaaaacagagcctggtgggctgggactcccatctttctagaatcttcctattgctgctatttgtagtctcagcccaggggctcatcccaaatcatgaaccctgtctggtgttctcctcggtcaatggcagctccatctcctgctagccacctgcccaaatcccccacagcctcccagctgacaccatctttctggctgtggagttcttcaacctgactcaactgcctgctgacttcctccagggcgtccctaatctctatgaactctatctttccagcaaccgactgtatgacgtctcccccaagttcctgctgcccgtgccccagctaaacgtgctcgacctgacacgcaattcgctgaccgggctgttccctgacttcttccgggtctctgctgctctctgcatcctggtgctg

SEQ ID NO: 11008 - DNA, 400 bp, Bos taurus
  Clone ID: 47-LIB34-013-Q1-E1-D4
tgctagttcacttatgacattcctgggacagcctgtgtgcccaagctttttattattttttaaccttattgttcttactaagaggtgccttcctagaatgatagccgcttagtaggatactttataaccacgccatgccacacaccactctgccttgatcatgtgtgctaagagcttgggtacgcagagaatgatggcacgtttggtggaggaaacatttcggaatcgctctgaggagggactacgggatgaatgagtcattggaggtttttgggcttctttagccaatgcatatagccatttcgctcagttttctttgaactgcgtctgaacgttgcatcctgctcagctttgcaccctccacagtacacccaagatgaatgcctgaaatccagggctc

SEQ ID NO: 11009 - DNA, 409 bp, Bos taurus
  unsure (388): unsure at all n locations; Clone ID: 47-LIB34-014-Q1-E1-D4
gggtccagccacgcgtccgaggcaaaatgcaggacctggaagccaagctgaccccggagacgctgacgcggtggcgaaactccctgcagcccagacatatagatgaactcagcctgccaaggttttccatctccagtgactatcagctgagagacatcctttcccagctgggtatcaagaaaatcttcaccagcgatgcggacttctcaggaatcacaaatgaccacaagctggcagtttcccaggtgatccacaaggccgtgctcgacgtgggcgaggagggcacggaaggagctgctgtcacggctgtcataatgtttacttcattaccgttgcacgcgctaaatatcagtttcaacaggccctttctgctttccatattctgcanagagactcagagcatcatctt

SEQ ID NO: 11010 - DNA, 248 bp, Bos taurus
  Clone ID: 47-LIB34-015-Q1-E1-D4
actagttctagatcgcgagcggccgcccgtttttgttcttggggcgggtgcttgttgtggtcattgatatttaggtatcacgggtccctggaagagcacagaattgatatgcgtgacgtcatcttactaggaggagttgacggtgatagaagtgacggcaacagttaacatcgcaagcgggaggattcgcttatctggcgccaccacgggatcggttccagctccaagcctccctgggaggtcgacgg

SEQ ID NO: 11011 - DNA, 391 bp, Bos taurus
  Clone ID: 47-LIB34-017-Q1-E1-D4
gagactaaaactagcttgagcaacttgaataatagaggaactcagaaagactctgaagaccagtcctcttggcagagaagacctgtttgagttgaaaaaagttaagagtgaaccgcgtgtaatttgagtgagatgacatggttcttactctgcactttgtggggtcagctttgcagggacagcttgaggagctgctctgcaatcctcagacgtttccctctggttcctgagatgtaattagtgtgatcagtacttttttggggtagctggggcagggggctccttttcagcagtctctctcacaaggaatgctttatgctcgcctttcatggcccctgtattgccagggaggcatgatgcatctttcatatgtgggctgtcagtgagggac

SEQ ID NO: 11012 - DNA, 383 bp, Bos taurus
  Clone ID: 47-LIB34-018-Q1-E1-D12
ggtcaagagggtatgaacaggaagaattaaatgcagcaggctttcttttaaatgccgattcatattactctgttcaagctgcgttgagatgttaaactggcttactatagactttgtaaaaacggctccagaagagtaacaaactgaaatctttgagatcacacaggttggaaatatgtacataactgcacaaggtgtcaattctgctacacagtgcagttttagtcagttttagttgcataggtttccattgtatttatagtctgtttatgctaaatctggccaaagatgagcattgtccaccactaaaatgcctctgccacttttgaattctgtgctaattttgtggccagaatgcggtgatcaaaatgctcaatcttttt

SEQ ID NO: 11013 - DNA, 364 bp, Bos taurus
  Clone ID: 47-LIB34-018-Q1-E1-D4
cgcgtctaccttttaccactctacggccttggcgacctgccacagggatttgcactgctaagtgctatatatggaggtacctacatgctgaataaaccaattgaacagggcattatgcagaatggaaaggtgattgctgtggaatctgaaggagagattgctcgctgtaagcagctcatctgcgatcccagctatgtgaaagatcgagtagaaaaagtgggccaggtgatcagagtcatctgtattctcagccaccccatcaaaaagaccaatgacgccaactcctgccagatcattattccacagaaccaggtcaaccggaagtcagatatctacgtctgcatgatctcctctgcacataatg

SEQ ID NO: 11014 - DNA, 406 bp, Bos taurus
  Clone ID: 47-LIB34-020-Q1-E1-D12
agtgtgtctgctaacattggacagtcagctggggcgttaacttcctgttatttataacctctgaaggcaaaagaaaaaaatcagtctgattactcagtggagcaacaaacaatggatcccaaaggccagagagtgaagcttaatgatggccacttcattcctgtcctgggatttggaacctttgcacctcgagaggttcctaagagtgaagctctggaagtcaccaaatttgctatagaggctgggttccgccatattgacagtgctcatttgtaccaaaatgaagagcaagttggccaggccattcgaagcaagattgccgatggcactgtaaagagagaagacattttctacacttcaaagctttggtccacttcccttcgtccagaattggtcccgacagcct

SEQ ID NO: 11015 - DNA, 386 bp, Bos taurus
  Clone ID: 47-LIB34-020-Q1-E2-D12
agtgtgtctgctaacattggacagtcagctggggcgttaacttcctgttatttataacctctgaaggcaaaagaaaaaaatcagtctgattactcagtggagcaacaaacaatggatcccaaaggccagagagtgaagcttaatgatggccacttcattcctgtcctgggatttggaacctttgcacctcgagaggttcctaagagtgaagctctggaagtcaccaaatttgctatagaggctgggttccgccatattgacagtgctcatttgtaccaaaatgaagagcaggttggccaggccattcgaagcaagattgccgatggcactgtaaagagagaagacattttctacacttcaaagctttggtccacttcccttcgtcc

SEQ ID NO: 11016 - DNA, 321 bp, Bos taurus
  Clone ID: 47-LIB34-020-Q1-E2-D4
atcacatatgtaggagaaagtctcaaattgtgtgtgtgcgcgcgtgtgtatacatacacgcatatatcagaaatctaactgtgcttgtttctgtgtgctgtttttttttttgcttatatgtattttttaatgaacacatcacacacacaaagagaattaaagtttttttattaattaaagagtcaatcaaataatttgcaaccagcttataagggcaatgggggcacttaaaatcttgatgaaagaactattgaaaaaatgtaaacctcaaaatacctctggatctcttagccagaggaataaaactggcaattattacag

SEQ ID NO: 11017 - DNA, 418 bp, Bos taurus
  Clone ID: 47-LIB34-021-Q1-E1-D12
tggggaggttctgtgggcagctgggttctcccctgagcaatcccccaggaaggaaggaattcatgtcccaagggaacaagatgctgctgaccttccactcggacttctccaacgaggagaacggcaccatcatgttctacaagggcttcctggcatactaccaagccgtggacgtggacgaatgtgccttgcagctcaactcagtcgaggaggaccccccggccgggtgccagcacctgtgccacaactacgtcggcggctatttctgctcctgccgtccaggctatgagctccagccggatgggcgttcctgccaggccgaatgcagcagcgagctgttcacggagccctcaggctacatctccagcttggagtacccccggccctacccccctgacctgcgctgcaactacagtat

SEQ ID NO: 11018 - DNA, 416 bp, Bos taurus
  unsure (374): unsure at all n locations; Clone ID: 47-LIB34-021-Q1-E1-D4
gacagagcggaggacacggctctggagtgcggctccagggagaccatggagcgcccagtgagagtgaaggcgtgggtggaggagaaccggggctccttcctgcccccggtctgcaacaagctcctgcaccagaagcagctcaaaatcatgttcgtggggggtcccaacaccaggaaggactaccacatcgaggagggtgaggaggtattttaccagctggagggggacatgcttctccgagtcctggagcgagggaaacaccgggatgtggtcattcgtcagggagagatcttcctgctgcctgctggggtcccccactcgccgcagaggtttgccaacacagtggggctggtgattgagcggaggcggctganaacagaactagatgggctcaggtactacgtaggggaacacac

SEQ ID NO: 11019 - DNA, 402 bp, Bos taurus
  Clone ID: 47-LIB34-022-Q1-E1-D4
caaggttgtagtccaccacctgaagttaaacatggacactttgtgtatattcaaagagaaatatggggaactgatgtggttgagtatgaatgtcaggaaggatatactcttgttggagaggctagaatctcctgcagatttgtcgggtggtcaccaccggctcctcagtgtaaagctctatgccaaaaaccagaaatatcaaatggaaagctgtctgtggagaaggatcaatatgtcagccctgaaactgtcaccgtcaggtgtgaccctggctataggatggttggttcccaggacatcctttgctcagagaacaaattctggagtccagatgtgcccaagtgtgagaaagtatctgctgaagtttgtgaggcagtctttaaagggcaaaaactcctaaag

SEQ ID NO: 11020 - DNA, 298 bp, Bos taurus
  Clone ID: 47-LIB34-023-Q1-E1-D12
aagactctacagtgactcgatttacactaagagtgaaatattcacacaaagatttgcattaatgaagactacacagaaaaccttcctgaggatttgtgtggacctgatacttagcaaatttttgtgctttacattcttatggaaaagtcaatttaaaaatgatcatttgtaagaccaaaatataaataaaaagtttcaaaaatcaaaaaaaaaaaaaaaaaaaaaaaacaaaaaaaaaaaaaaaaaaacaaaaacaaatcaaaacaaaaagaataaccgaaaaaaaagggggaccccg

SEQ ID NO: 11021 - DNA, 386 bp, Bos taurus
  Clone ID: 47-LIB34-023-Q1-E1-D4
tcataaattgtaaacaatgcattcatcgaccttccagccccatcaaacatttcatcatgatgaaatttcggttccctcctgggaatctgcctaatcctacaaatcctcacaggcctattcctagcaatacactacacatccgacacaacaacagcattctcctctgttacccatatctgccgagacgtgaactacggctgaatcatccgatacatacacgcaaacggagcttcaatgttttttatctgcttatatatgcacgtaggacgaggcttatattacgggtcttacacttttctagaaacatgaaatattggagtaatccttctgctcacagtaatagccacagcatttatacgatacgtcctaccatgaggacaaatatc

SEQ ID NO: 11022 - DNA, 414 bp, Bos taurus
  Clone ID: 47-LIB34-024-Q1-E1-D4
taattactagatccactgtcagatgtgaacctttgcatctacgtgttaatggtgaacataaccctgcttcctgtatgtgttaactccagggtcctttctaaccactttaagagtgttactgaacacagcaagtgttcagtaaatgcttgttgaggaaatgaattgtctatacagtcatttctatttggcttaataaggactgttttcctttttgtgcctcagcatgatatacgcttgcctggaaaatcccatggacggacgaacctggtaagctgcactccatggggtcactaagagtccgacacaactgagcgacttcactttcacctttcacgttcatgcattggagaaggaaatggcaacccagtccagtgttcgtgtccggagaatcccaatgacgggggagcctggtgg

SEQ ID NO: 11023 - DNA, 402 bp, Bos taurus
  Clone ID: 47-LIB34-025-Q1-E1-D12
ccatggcgaagctgttggtgctcaccctcttgggactggggctggcattcttcagggattaccggtcttcttatctagcaagaatgaacgcttcccgagaagtaaaatcggtagaacttcctaactgtaaattaataaaaggaatagaaactggtgctgaagacctggagatacttcctaatggactcgctttcattagttccggattacgatatcctggagtaaaaagctttgaacctgataagcctggaaaaatactgctgatggacctgaacaaagaggatcctacagtgttggaattgaagatgactggaagtaactttgatgcgtcttcatttaaccctcacggcattagcacattcacagatgaagataatactgtgtacctgctggttgtgaagc

SEQ ID NO: 11024 - DNA, 417 bp, Bos taurus
  Clone ID: 47-LIB34-026-Q1-E1-D4
cggacgcgtgggtgatcacttaattctgacataataacaggtacataggatggtaaaaaatatgatatatgtactttattttgacttttggttccagacatttaatgagaagaaatggaatcaattttacagtgaagtactaggaagacagactacattatcagagacaatgggaaaagctgaaatgtggctcattcgaacctactgggattttcaatttcctcacccattactaccaaattttgaatttgttggaggccttcactgcaaacctgccaaacccctgcctaaggaaatagaagagtttgtccagagctctggagaaaatggtatcgtggtgtttactttggggtcaatgatcactaacatgacagaagaaagagccaatacaattgcatcagccctttgccagattcc

SEQ ID NO: 11025 - DNA, 374 bp, Bos taurus
  Clone ID: 47-LIB34-027-Q1-E1-D12
ggatgatttcttgcaacttcgaaaaatttgaaaccatgacacatctattactgctacttttctgtgcttttatagttcaggcccaatttcctactgactatgacgagggacaagatgacagacctaaggtaggtttgggtgcccgcggtcatcggccctatgacaagaagaaggaagaggcccccagcctgagacctgtgccccctcccatcagcggaggtggctatcgggctcgtcccgccacagcaactgtgggccagaagaaagtggagagaaagccccctgacgctgatggctgcctgcacgcggaccctgatctgggtgtgttgtgtcctacaggatgtaagttgcaagatactttggtaagacatgat

SEQ ID NO: 11026 - DNA, 276 bp, Bos taurus
  Clone ID: 47-LIB34-027-Q1-E1-D4
ccaagatggcggacacaatgaaccggcgtcgcgccgattggccctgatgcgaccgtgaggacgaacggtcggcaaggccccacagtccgggcagaagagtgttgcttaagcaggaggagaaagatgaggaggcgtcccgactgccggccgctctcccgcccgccgccggcgcggcgcccgccccgccccggtcggcccctcggcagcccgcccgttccccgggccccgccccggccctgcgccgctgccgccgccgccaccgccgccgccgcctca

SEQ ID NO: 11027 - DNA, 381 bp, Bos taurus
  Clone ID: 47-LIB34-028-Q1-E1-D4
tgtgtgagaaacgagatgctgaccaagcgaacttcatggctgagtttctttatgagtactcaaggagacatccagaactgtccacaccagaactgttaagaattgctaaagtgtatagggatctcctgaaagagtgttgtaacatggaaaaccctcctgagtgttaccgtcatacggaaaatagattcaatgagacaacagagaaaagcctcaagatagtacaacgagaatgtgaacattttcagaatttggggaacgatgacttgaaataccactacctcatcaatctcacgaagctagccccccagctctccactgaagaactgacctttcttggcaaggaaatggtgaatgctttgaccacctgctgtaccctgagcg

SEQ ID NO: 11028 - DNA, 422 bp, Bos taurus
  Clone ID: 47-LIB34-029-Q1-E1-D4
accgcgaggagttcccacggtcccgcagcagatttctgcagcggaactcccgggggcaggatgatttgggaagtcaccgtgttgctcagcttggtcctgggaactggtgctgtccccctggaggaccctgaggacggaggcaagcactgggtggtgatcgtcgcaggatcaaacggctggtataattacaggcaccaggcagatgcatgccatgcctaccagatcgttcaccgaaacgggatccctgatgagcagatcatcgtgatgatgtatgacgacatcgccaactccgaagacaatcccaccccgggaattgtgatcaacaggcccaacggctcagacgtgtaccaaggcgtgctgaaggactacacgggcgaagatgtcaccccgaagaatttccttgctgtgttgagaggtgatgc

SEQ ID NO: 11029 - DNA, 412 bp, Bos taurus
  Clone ID: 47-LIB34-031-Q1-E1-D12
gtaccactgggaaaatctaacatgttgatgttaatcaatgtccttctcaccttgtggttttacactgctcatggacaggggaaacattgtaattatccagtaataacacatggacggctatatcagtcatacagtggatactttccagcacgtgtaaatcaacagtttctctataactgtgatcagtaatttgtgcctccttcactaaattcctcggattacctgacttgcacatcagaacgattgtttccagaataaccatgccttagagaatgtattttcaataatttggaaaatggatataccccaagtactgaaagaaaagctgtacaaggtgaaacagtaagggttcgctgctattatggctacagtcttcacaataatcagaacacaatgacctgcacagagagtg

SEQ ID NO: 11030 - DNA, 410 bp, Bos taurus
  Clone ID: 47-LIB34-031-Q1-E1-D4
caacgatgagcgccctgcaagctgtcgtcactctcctgctctgcgggcagcttctcgcggtggaaaccggcagtgaggccacagccgacagctgcccaaaggcccccgagattgctaatagccatgtggagtactcggttcgctatcagtgtgacaaatattacaaactgcatgctggaaatggggtgtatacttttaacaataagcaatggataaacaaggacattggacagcaacttcctgaatgtgaagaagatgacagctgcccagagccccccaagattgaaaatggctacgtggagtacttggttcgctatcagtgcaaaccctattacacactgcgcacctgtggagatggagtgtacacctttaacagtaagaagcagtggatacataagaacattggacag

SEQ ID NO: 11031 - DNA, 368 bp, Bos taurus
  Clone ID: 47-LIB34-032-Q1-E1-D4
gcagaatataaagttcttacaacttttttcattaaaatttaccctgtaaaaagcattttgcaagttttgataaagtttaccaaaaaacagtttatttaccacaatcatggtatagaatatttccgtcacttttccccttcgcaaatttcgcacgtcgctgtatggtcaatcactccttctctacctcttattccttggaactactgacctatattctttccccgtttcgatttttaacagtgtcacatacctgaattgataccatatgtagcctttgaatctggtttctttacttaacatgatgcctttgagatgatctgttttgcatgtatcagtaatctgttcctttttaataactataagcttgt

SEQ ID NO: 11032 - DNA, 219 bp, Bos taurus
  Clone ID: 47-LIB34-033-Q1-E1-D4
aaatcacatacgacaggaacccaattcaccaacctcgaagctggcggcgccgccatgagatcgctaacgcgtcttctgatgctggcactgctcgcgtgggttgttgtggctgaccaacagtcctgcaaaggccgcagcaaccacggcatcaacgccactaccaaatgtcagtgtgaaaagctctgttcttagcatcaaagctacagtgccgacttcatc

SEQ ID NO: 11033 - DNA, 345 bp, Bos taurus
  Clone ID: 47-LIB34-034-Q1-E1-D4
agtggtatattataaaaaatcaaaagatttctatgtggtaaagcaattttatttacgaaacatggaggggtgtgcagacgagaactgcctcatgcaccacacggctaaggaggtcactctggaggaccggctggacaaggcttgcgaaccgggcgtggactatgtgtacacgaccagacttatccagaacacgctggaagatcactttgacgattacatcacggtgatcgagaacatcatcagttcaggctcggatgacgttcatgttgaataaggacccaatttcatcagccacatcaacgtgcagggaatcccctaaactcaacgaaggggcacaatatctcc

SEQ ID NO: 11034 - DNA, 383 bp, Bos taurus
  Clone ID: 47-LIB34-035-Q1-E1-D12
ctttgacgagtacatcatggtgatcgagaacatcatcaaatcgggctcggacgaggtgcaggttaaacaggatcgcaagttcatcagccacatcaagtgaaaggaagcccttaaactgaaggatggggcacactatctcgtgtggggcgtgtcctctgacctgtggggcgagaaacccaagatcagctacatcatcgggaaagacacctgtgtggagctgtggcccgaggctgaagaatgtcaagatgacgagaaccacaaacagtgcgaggacctggccaacttcacagagaacatggtcgtctttggctgccccaactgatcgcacacacatacaccctctcatacacactgtccacgcaataaaagcttcacttctgttc

SEQ ID NO: 11035 - DNA, 438 bp, Bos taurus
  unsure (24),(52): unsure at all n locations; Clone ID: 47-LIB34-036-Q1-E1-D4
ccgggtagaccacgcgtccgattntttttaaagtcctttcattttttattanttgttgcacaaacaaaagaagcaaaatatttaaagaaaattacgttctttagtgagagtgttggtttaacaccaacaggaaagggaaacaaatgaataagctccgagttttcaattctcttttttcctcttactctcaaggtaagctgagatgcctgtggttgtgtcgtgtttaggctaaggctgtttgagttgaaacaacaagttttggaccctccacagcaaagcaggcttctttgtcatcagctgcacagcacttgtctacaaaagccacaaaattctccatgacggttttcagttgttcctctgttgccttgggcttgtgtttcaacagctcaacaagtgcagtttgtttcctgatttgtttctcagtatcgggaagtgtgc

SEQ ID NO: 11036 - DNA, 434 bp, Bos taurus
  Clone ID: 47-LIB34-037-Q1-E1-D5
cagacgcgtgggcggcaacataatgctggcacaccactgcctgtttcatctgagaaagatatgatccgccaaatgatgattaaaatatttcgctgcattgagccagaactgaacaacttgattgcattaggagacaaaatcgatagttttaactccctttacatgctagtcaaaatgagtcatcatgtgtggactgcacaaaacgtggaccctgcttcttttctgagtactacattgggaaatgttttggtgactgtcaaaaggaactttgacaaatgtattagtaaccaaataaggcaaatggaagaagtaaagatctcaaagaagagtaaagtaggaattctcccatttgttgctgaatttgaagaatttgctggactcgcagaatcaatctttaaaaacgctgagcgtcgtggagatctagataaagcata

SEQ ID NO: 11037 - DNA, 407 bp, Bos taurus
  Clone ID: 47-LIB34-038-Q1-E1-D4
cgatattcttgacccttttttatcatctttcaactaaaagtttcaaaacacaacttttatcacaatccagaactgacaccaacacaaatattaaaacaaaacaccccttgagaaacagaatgaacgaacatttatttacctcttttattacccctgtaattttaggtctccctctcgtaacccttatcgtactaatcccaagcctactattcccaacatcaaaccgactagtaagcaatcgcgttgtaaccctccaacaatgaatacttcaacttgtaacataacaaataatgagtatccacaattctaaaggacaaacatgaacattaatattaatatctctgagtctatttattggataaacaaactactaggcctattaccccattcattcacaccaacaacac

SEQ ID NO: 11038 - DNA, 222 bp, Bos taurus
  Clone ID: 47-LIB34-039-Q1-E1-D12
ggtccacgcacgcgtccggaagaaatctgggtgaatgggaaaccccggatgaggaagagtctggagaaaggaaccattctggggaaaaaaggcaacaaccatcctggggcaggagcaggatcctttcgctgggggctttgatagaaaccagtgtttggtgggagacattggagatgtgaacatgtgggactttgtgctgtcgccggaagagattaatgctgt

SEQ ID NO: 11039 - DNA, 440 bp, Bos taurus
  Clone ID: 47-LIB34-039-Q1-E1-D4
ggaagggaaagcacaatccattagactataatgaaaatgtcttcgacgactactcctcacatctggaggcgcacaagttacatatagatgagaccgtgttcactacgctcacatgtcacgcttcgtgtgctccgttcatctctggagaattttagaagcaccctgacagatatcaatcggatgtctcaattcagatcgaatactgtcgcacaccgtgtattgttacttgcaataatcatgtcgtgtctggcctcaaatgtgaggaaatcatcatgaatcgaagtgtaagatctgacatgtatctcaatgaggctgaggattctatcgaaccatacatagtatactgtcatatgaagtccgcctccggaggattgacagtaattcataagcatcaagatggtactgttgatcttggcaagaaatgggattcatataaaccc

SEQ ID NO: 11040 - DNA, 337 bp, Bos taurus
  unsure (29): unsure at all n locations; Clone ID: 47-LIB34-040-Q1-E1-D12
acgcggccgggaaagaaccagacacaganggattgcctcagaccacactatctccactcgctcagacctgtggaagattagcgaccatgatttccaatgggataggaaccgtcaccgctggaaaaaggagtgagatgtcttcaccctttgctgcttattggcctctggggctgtgtgacctgtcatcggagccctgtggaagacgtctgcacagccaaacctcgggacattcctgtgaatcccatgtgtatttaccgttcctcagagaagaaggcaactgagggccaatgctccgagcaaaagatccctggggccagcaaccggcgggtctgggaac

SEQ ID NO: 11041 - DNA, 263 bp, Bos taurus
  Clone ID: 47-LIB34-041-Q1-E1-D12
aaaagcactctgggaatgacaactgctggcctaaactcagcaacaccagagctcctggggagacatctaggatactccctgcttgttttcagctacaatatcctcatctgatgttaggcgtgatgatttgttaccagaatatattgaaatataatgcaaaccataaaaaaaagtaaaaaaggatgtgaagctgagtaaagctacgaatagaaaatagtctatcgttcaatgaacacactactggtcaataaagatcatacaaa

SEQ ID NO: 11042 - DNA, 424 bp, Bos taurus
  Clone ID: 47-LIB34-042-Q1-E1-D4
aaaatatagaaaaatgtgcttgattcctctttttttccctagtccctccacatccattcacaaaatgtttcaaaactatatatatttaagaaaaaaaaagaaccaaatagaaataagtataatatctgaaatcaaaaacaatggaaaaattgggtggactctgaaaatacattgtgtgtgtgtgcatgtgtatacaaatacagccagttctcattattcatggtatagaggttgtatgaagtcaccccaaacacaaagtagcgaatagcaaaactttgcttccaaaagaaatagagggtttggttcttgtgagcctctggtcctatttttgtaaaccaataaacatagatctttgtttcatgaatgtttctgtttaaagacacctaatttattatacatgttgattcattaatgctgaactcac

SEQ ID NO: 11043 - DNA, 369 bp, Bos taurus
  Clone ID: 47-LIB34-043-Q1-E1-D12
aggcagatgaaaagaagttttggggaaaatacctatacgaaattgctagaagacatccctacttttatgcaccagaactcctttactatgctaataaatataatggagtttttcaagaatgctgccaagctgaagataaaggtgcctgcctgctaccaaagattgaaactatgagagaaaaagtactgacttcatctgccagacagagactcaggtgtgccagtattcaaaaatttggagaaagagctttaaaagcatggtcagtagctcgcctgagccagaaatttcccaaggctgagtttgtagaagttaccaagctagtgacagatctcacaaaagtccacaaggaatgctgccatggtgacccac

SEQ ID NO: 11044 - DNA, 430 bp, Bos taurus
  Clone ID: 47-LIB34-043-Q1-E1-D4
cacgcgtccatcaaactatatttcctctccttcttaatcacaatccttatcagcataatcttatttaatttccacgagtaatttctataataaccacaacaccaattaatatagaccacccagttacaataactaatcaggtaccataactgtataaagccgcaatccctatggcctcttcactaaagaacccagaatcccctgtatcataaatcacccaatcccctaaaccattaaactcaaacaacaagccagtaacaaatgcccctaaaacagtcttattagaaagccaaatttcaggatactgttctgtagccatagccgttgtataaccaaaaactaccatcatacctctcaaataaattaacaagaccatcaaccccaaaaaggattcaccaacattcaatacaattccacagccaaccccaac

SEQ ID NO: 11045 - DNA, 405 bp, Bos taurus
  Clone ID: 47-LIB34-044-Q1-E1-D4
gccaggggtatttctttaacatctcatcaacccctgtccccattgtccaaagatcctcatataatacagcaaacaccatgaacattcagaacagcctatagagaaatagatggtaagactccccatgggaacaccgtcaatctctatggatgacataagactgtgtgcagaattcgaactcctttctgaggtttcctcccaggttttcttaactagcacagaatatggacaaactaatatacttgtggcctacttcagttgcttttctgataatgaatgtgtaccctcaaatgtacaatgtcaattttcatacaaagattcctgacattttgaataaactgtaacatctggtccttatgtggcaataatggaagttaagagactgaatgtcgaacttcttaatgg

SEQ ID NO: 11046 - DNA, 360 bp, Bos taurus
  Clone ID: 47-LIB34-045-Q1-E1-D12
gcttcgcgtctggggaaaaactggtggcagctggtggcagcgagggtaccggtgaccatgagatctctgcgactgctcagaatccccttcctgtgtggcttgctctgggccttttgtgccccgggtgccagggccgaggagcccggggccagctcctcccatcacggcagcatgggcctggataagaacacagtgcatgaccaagagcatatcatggagcatctcgaaggtgtcatcaacaaaccagaggcggagatgtccccacaagagctgcagctccattatttcaaaatgcatgattatgatggcaataatctgcttgacggcctaaaactctccacgggcatcactcacgttcac

SEQ ID NO: 11047 - DNA, 420 bp, Bos taurus
  Clone ID: 47-LIB34-045-Q1-E1-D4
tggaaagactgttccaaaaacagtggataattttgtggccttggctacaggagagaaaggatttggctacaaagacagcaaattccatcgtgtgatcaaggacttcatgatccagggtggagatttcacccggggagacggcactggaggtaagagcatctacggtgaacgcttccccgatgagaacttcaagcttaaacactatgggcccggctgggtgagcatggccaacgcgggcaaagacaccaacggctcccagttcttcatcacgacagtcaagactgcctggctagatggcaagcacgtagtgttcggcaaagttctagagggcatggatgtagtacggaaggtagagagcaccaagactgacggtcgggacaagcctctgaaggacgtgacgatcgcagactgcggcaagat

SEQ ID NO: 11048 - DNA, 412 bp, Bos taurus
  unsure (373): unsure at all n locations; Clone ID: 47-LIB34-046-Q1-E1-D4
gactcccctgcacggtgggggccaacctggctctgcggaaactcccaggcagtacctgccgagatcatgagaaggagcttctgaaccaagtgagcattcccgctcattttgtggctttgaacggggataagctgaatattaatctcaagacagggtcagagtggacaaactgtgtcaaggtcgtcctcgaagacaaaaccacgttccccaacctgacagatgtcagagaggtggtgacagaccagttcctatgcagtgggacccagggggatgacagtccctgcaagggtgggcctggtgagctggggtctctacaacccctgtggcggctccagtaagaactcccgcaaacctgcgccccatggcaaggtcncgcgagatttccacatcaacctcttccgcctgcagccct

SEQ ID NO: 11049 - DNA, 416 bp, Bos taurus
  Clone ID: 47-LIB34-047-Q1-E1-D4
ctttgagaacatttactcagtgaatatatgtgataacatcttcatagtttgacaaccattccatttacccttttagatatttgataggaattaattcaactcataatacttccattttgtttaaataaaggttttattttgctggtaggagaagttagttattaaatgcaccaggtataaagtaaaagatggtttacccacgtggttttgatatcacgcacattccccagatgcagtgtttaaccttgactcatcaccagggtctagactcagattagtaaatattcctctctcacaattaaaatgatcaatttcccatcagtctgttgctttaaattttatttcttcaagagaaactttccacagaattaagaaaaataataatgcatccatattcagggtgtagggaaaattct

SEQ ID NO: 11050 - DNA, 369 bp, Bos taurus
  Clone ID: 47-LIB34-048-Q1-E1-D4
ctgagtcagcccacagatgactcctgcttcgacccctacacggtctcccattatgccattggagaggagtgggagcgattgtctgattctggctttaaactctcgtgccagtgcttaggctttggcagtggtcatttcagatgcgattcatctaaatggtgccatgacaatggagtgaactacaagattggagagaagtgggatcgtcagggagagaatggccagatgatgagctgcacgtgtcttggaaatggaaaaggagaattcaagtgtgatcctcatgatgccacgtgctatgacgatgggaagacttaccacgtgggagaacagtggcagaaggaatatcttggtgccatttgctcctgcaca

SEQ ID NO: 11051 - DNA, 389 bp, Bos taurus
  Clone ID: 47-LIB34-049-Q1-E1-D4
tgggcatgcccggcgcatttatgatgattccgatgccaacttgcacttgcagggcttctatgatgatgtggccaacccactgctgacaggcgtggaagtagagtaccctcagaatgccatcctggacctcacccagagcagttactaacacttctatgatggctctgatattgtggtagccgtgcacctgccggatgaggacatgaacagctttaatgcagctgtgaaatgacacggggccatcaacgacctgactcttcaccgatgaagtcgacatgaacgatatggagaaggccctgcatgatcgggactacaattttggggactacattgagcagctctgggcctacctcaccatcgatcatctgctggagaaacgcatcaatgcc

SEQ ID NO: 11052 - DNA, 400 bp, Bos taurus
  Clone ID: 47-LIB34-050-Q1-E1-D12
gacccacgcctccgcacctgtgctagattgtcacacagctcacattgcttgcaagtttgctgagctgaaggagaagattgatcgtcgttctgggaaaaagctggaagatggccctaaattcttgaaatctggtgacgctgccatcgttgatatggttcctggcaagcccatgtgtgtcgagagcttctctgattatcctcccctgggccgttttgctgtgcgtgacatgagacagacagtcgctgtgggtgtcatcaaagcagtggacaagaaggcagctggagctggcaaggtcaccaagtctgcccagaaagctcagaaggctaaatgaatattatccccaatacctgccaccccagtcttaatcagtggtggaagaacggtctcagaactgtttgtc

SEQ ID NO: 11053 - DNA, 275 bp, Bos taurus
  Clone ID: 47-LIB34-050-Q1-E1-D4
caaactcgagattgctagtcgaagccctgtaaaattcttcatctgcatggcaacacttcatgtatgtaatatcctgtagtacgctgcaaacaagtttgcccataggcatttaatttcctaattacagtaaggggattaaatgcaaatggctcacataactcctcattccaaacaggtcttcactacacacatgactttgacggatagttccaagaggttgcatcaataagttctgtagttgctcatagtcgcagatttgtcaaatcactcacata

SEQ ID NO: 11054 - DNA, 246 bp, Bos taurus
  Clone ID: 47-LIB34-051-Q1-E1-D12
acaggccctgttcccagagagttcaagagccagctccaagaggcccctctagaatggaaggcactgctggaaatgcagcagacgaaaatggtgttggaaactttcggtggcgatggacatgccagaggagactctgtatctcaaggaacaggattagcaccaggaagtcccagaaagcctggaaccagtagtattggaaatgtgaaccctgggagctatggacctggaagtagtggcacttggaac

SEQ ID NO: 11055 - DNA, 234 bp, Bos taurus
  Clone ID: 47-LIB34-051-Q1-E1-D4
gcggctggagcagaggcagcagccggacgagcagcggaggcggtccggagcgatggtgaagatggcggcggcgggcggcggaggcggcggtggccgttactacggcggcggcagtgagggcggtcgggcccccaaacggctcaagactgacaacgccggcgaccagcatggaggcggcggcggcggcggcggaggagccggggcggcgggcggtggcggcggggagaactacga

SEQ ID NO: 11056 - DNA, 241 bp, Bos taurus
  Clone ID: 47-LIB34-052-Q1-E1-D4
ctgggtcagggtttggaccatgtcccggctggtggaatgtgtccccaacttctcagaggggaacaatcaggaggtgattgatgccatcgctcgagcagtggcccagaccccgggctgcacgctgctggacgtggacgccggcccctccaccaaccgcactgtctacaccttcgtggggcgccctgaggacgtggtggagggggccctgaatgccgcccgcactgcccaccggctcatcgac

SEQ ID NO: 11057 - DNA, 240 bp, Bos taurus
  Clone ID: 47-LIB34-054-Q1-E1-D4
ggctgatgagctttatgaccaagattaccccatccattctgtagaagacagacacaaattggctgctcagggaaagtttgtgacaactgagtttgagccatgctttgatgctgctgatttcattcgagctggaagagatatcttcgtacaaagaagccaggttacaaactacatgggcattgaatggatgcgtaagcatctggctccagactacagagtgcacattgtttcctttaaaga

SEQ ID NO: 11058 - DNA, 160 bp, Bos taurus
  Clone ID: 47-LIB34-055-Q1-E1-D12
ctaagttctagatcgcgggccgcccttttttttttttttttttttttttttttttttttttttttttttttttttttttttttttttttttttttttttttttttttttttttttttttttttttttttttttttttttttttttttttttttggttttt

SEQ ID NO: 11059 - DNA, 362 bp, Bos taurus
  Clone ID: 47-LIB34-055-Q1-E1-D4
aacgtcagccggtattgtaagaacaagccgtacccaaagtctcgcttctgtcgaggtgtccctgatgctaagattcgcatctttgacttggggcgtaagaaggccaagtggatgagttcccactctgtggccacatggtgtcagatgagtatgagcagctctcctctgaagccctggaggctgcccgtatttgtgccaacaagtacatggtgaaaagctgtggcaaagatggttttcacatccgagtgcggctccaccccttccatgtcatccgcatcaacaagatgttgtcttgtgctggagctgatagactccagacaggtatgcgcggtgcctttggaaagccccagggcacagtggcc

SEQ ID NO: 11060 - DNA, 223 bp, Bos taurus
  Clone ID: 47-LIB34-057-Q1-E1-D12
ctgcattgctgaggtagaaaaagatgccatacctgaaaacctgcccccattaactgctgactttgctgaagataaggatgtttgcaaaaactatcaggaagcaaaagatgccttcctgagctcgtttttgtatgaatattcaagaaggcatcctgaatatgctgtctcagtgctattgagacttgccaaggaatatgaagccacactggaggaatgctgtgcc

SEQ ID NO: 11061 - DNA, 224 bp, Bos taurus
  Clone ID: 47-LIB34-057-Q1-E1-D4
gaataattctttgctcatatttataactaaataaacctcttccctggtggctctggtggtaaagaatctgcctgcagtgcaggaggtctgggttcgatccctgggttgggaagatcccctgaaggggggaatcgcaatccacttcagtattctttactggaaaattccgtgcacagaggagcctggtgagctatagtccgtggggttgcaaagagtcagacaca

SEQ ID NO: 11062 - DNA, 189 bp, Bos taurus
  unsure (166): unsure at all n locations; Clone ID: 47-LIB34-059-Q1-E1-D4
gtaacacaaaagtttattagaataaaaatacatgtacagtgtccaacattaaaattatttcacatgacatatatgttttacctccattagttttgttttttttaatgcttttatagtctgtgctttaaataatgtgcacatctgtaaacaaatcttagattaccanaagtatccattaggatactgaac

SEQ ID NO: 11063 - DNA, 332 bp, Bos taurus
  Clone ID: 47-LIB34-060-Q1-E1-D12
tcgacccacgcgtacgcacggggtagtcggagcgctcggagtttgccacctatcggtcatccttggtgtccgcagcactctctccctctctctaaggcggcgacctccggcggccggaaagtcaccatgtccatcctgaatgtccacgccacagagatctttgactctcgtgggaatcccaccgttgaggttgatctcttcaccgcgaaaggtctcttcagagctgctgtgcccaatggcgcttcaactggaatctatgaggccctggatctccgggacaatgataagacgcgctacatggggaaaggtgtctcaaaggctgttgagcacat

SEQ ID NO: 11064 - DNA, 406 bp, Bos taurus
  Clone ID: 47-LIB34-061-Q1-E1-D12
ccacgcctccgaaagggagtcagcgcaggagaaggttggtgggtaagcagcatgggattcgaggagctgctagacaaggtgggcggctttgggcccttccagctgcggaatgtggccctgctggccctgccccgggtgctgctgcccatgcacttcctcctgcccatcttcctggctgctatgccggcccaccgctgtgccctgcctggggtcccggacaacttcagcaacaaggatgcatggctggaggcccacctgccccgggagcctgatggcaggctcagcgcctgcctccgcttcacccatccgcaggccctccccaacagcacgttgtggggagaggggcagaactctggggagcaaccatagggcgagccctccacagtgccctgtcctcagggctggg

SEQ ID NO: 11065 - DNA, 374 bp, Bos taurus
  Clone ID: 47-LIB34-061-Q1-E1-D4
cttgggcatgggaatcccaagggtggggaattcccttggtttgctgattaaacctgattacaaccgcttcaaaataagggcaaagggaaccacctgtccattttggaccttggaaacaaatgtcaacaaagaaatttgccttaatgcaattgaaatgaagtcaattaataaacccttcactataaaaagaatgtgatgatggttatcagagcattcaacgtgattcagcctactgaagccccttgaaccgagcagtcttactggattgagtttgtcatgcgccacaaatgagctaagcaccttcggccagctgcccacgatctcacctggtaccagtaccactctctggatgtgattgggttcctgctaacatg

SEQ ID NO: 11066 - DNA, 211 bp, Bos taurus
  Clone ID: 47-LIB34-062-Q1-E1-D12
cagagcctgccgtgagccttcacttgtatagtccgccttttgacacatgccacgcctttgatcaaagaacaggacataaaaacaaagtcatcatgacattccatagcaaatttggaatcaagactccatttacaacttcaggatccctggagaacaactaaggggcaccaggccctctgaggttttactttaaggtccagcgaattccgca

SEQ ID NO: 11067 - DNA, 196 bp, Bos taurus
  Clone ID: 47-LIB34-062-Q1-E1-D4
cacctgccgtggattcttcttttcagacccagaaataacatgaatactttgctatgattacattttagatattcatttatacttttctatatctaagactcatatcttgatttttactatcatatatgaatgaagcctttatatcttgtttttttgccaatcttgaaagatagatgggaaaagataaaagaatgtt

SEQ ID NO: 11068 - DNA, 360 bp, Bos taurus
  Clone ID: 47-LIB34-063-Q1-E1-D4
ggggcgcggggcagggctcaggcatgggtccgaaggataaggcacggtcactgcttaccgccgcctcggttacgctctcagcttgaccgcgtttacagaacaggctatcgccttcgacatggatttgttgcacgggggcatcgcagatgctatatcgatcacagctgttgctccgatagagcgtgtcaaacgcctgctacaggtgcagcacgcacgcaagcagatcgctgcgaactgacagtacaagggcatcgtagactacatcgtacgtagctccaaagagcacggcgtgcagtcattcgggccgggcaaactggccaacgtcatgagctatttccacacgcaagcgctcagtttcgc

SEQ ID NO: 11069 - DNA, 297 bp, Bos taurus
  Clone ID: 47-LIB34-064-Q1-E1-D12
ggcggaatatggcggccggtcaaatcccgggtttggggcccttgcggctaattgccaagggtggcttcggggaaggaaccaggttctggacaaccataaacattaatggtccaaaacaacaatccaccgttcccttaaaccacattccaactaaaattttgggccacccctgggtgaaggggggcaaggtgctgaaggaagaccccctgcctgacctgaagacggagtatgaggtggactcagaagaccgctcaaggcagtactcctgcatcttccttccggagcacgcggggcgca

SEQ ID NO: 11070 - DNA, 296 bp, Bos taurus
  Clone ID: 47-LIB34-064-Q1-E1-D4
ttgaacggaggctacccctacatagcaggcaaatttggcctggtccctgtcctggcaaacaactacaaagttgagggtgaaatttccacaaggggggaggaaaaaggttatcttgctgtaactgtggttactacatcagattctaataccacctggaagaatctgaacgacaagatctcttgccacacagcactatacagaaccgctgggctagaacatccccatgggtgtgctcacctgcacgattaatctccgtcaatttcatcaatttttcacgcgcaggttgtgaccactgg

SEQ ID NO: 11071 - DNA, 216 bp, Bos taurus
  Clone ID: 47-LIB34-065-Q1-E1-D4
ctcctaatggttatgataatggcattatttgggccacatggaaatcccggtggtattccatgaagaaaaccaccatgaagataatcccacttaacagacttgccatcggagaaggacagcagcaccaactggggggagccaaacaggtcggagtagaacatcacgttgaaatagaatatgactaagtcattttgccctgagctgttcattctgtta

SEQ ID NO: 11072 - DNA, 266 bp, Bos taurus
  Clone ID: 47-LIB34-066-Q1-E1-D4
acgattttgttgaatggcagaatgttttgatagggcccacctgtgcctcactggaattatatgtatttttgaagttgtgaataaatatactctaaaatttttttaaagttcagttgattccccataaaatggtccatttaagtgcatccctaatatatgctatagctctcaactaataggtgcaattgagggaaatcagctttatttttttgaagttgaaactgtgtgcttatttataaaaggaatgtttctgagtgcaagtgctt

SEQ ID NO: 11073 - DNA, 238 bp, Bos taurus
  Clone ID: 47-LIB34-067-Q1-E1-D4
ccccacaaaactttggcacaatgaagtgggtgacttttatttctcttctccttctcttcagctctgcttattccaggggtgtgtttcgtcgagatacacacaagagtgagattgctcatcggtttaaagatttgggagaagaacattttaaaggcctggtactgattgccttttctcagtatctccagcagtgtccatttgatgagcatgtaaaattagtgaacgaactaactgagta

SEQ ID NO: 11074 - DNA, 218 bp, Bos taurus
  Clone ID: 47-LIB34-068-Q1-E1-D4
cgcctcgcttctcccggccgcatcccgcgggaccggagcgagcagcggggaccatgttccgacacaagttgacggcccttgactaccacaatcctgccggcttcaactgcaaagatgaaacagaatttatgaacttcattgtttggcttgaagaccagaaaatcagacactatcacattgaagacagaggtaatttaagaaacatccacagcagtgac

SEQ ID NO: 11075 - DNA, 218 bp, Bos taurus
  Clone ID: 47-LIB34-069-Q1-E1-D4
aactttgaagaggttgcttttgatgagaaaaagaacgtctttgtagagttctatgccccgtggtgcggtcactgcaagcagctggcccccatctgggataagctgggagagacgtacaaggaccacgagaacatagtcatcgccaagatggactccacggccaacgaggtggaggcggtgaaagtgcacagcttccccacgctcaagttcttccccgc

SEQ ID NO: 11076 - DNA, 406 bp, Bos taurus
  Clone ID: 47-LIB34-071-Q1-E1-D4
agaaattgttcaccttccatgcagatatatgcacacttcccgatactgagaaacaaatcaagaaacaaactgcacttgttgagctgttgaaacacaagcccaaggcaacagaggaacaactgaaaaccgtcatggagaattttgtggcttttgtagacaagtgctgtgcagctgatgacaaagaagcctgctttgctgtggagggtccaaaacttgttgtttcaactcaaacagccttagcctaaacacgacacaaccacaggcatctcagcctaccctgagagtaagaggaaaaaagagaaatgaaaactcagagcttattcatctgttttccttttctgttggtgttaaaccaacactctcactaaagaacgtaaatttcgttaaataatttgcctcctttggt

SEQ ID NO: 11077 - DNA, 397 bp, Bos taurus
  Clone ID: 47-LIB34-072-Q1-E1-D4
cgcgccaggcgtccgaagtgagcaaatagagtcgaacagctggcaatgccctcatagaaggggcttctcaactggtgggagaaaaccggaccatgaccatccacaacagcatgttcttcagcacatacgacagagacaacgacggctggaaaactacagatcccagaaagcagtgttctaaagaagatggtggtggatggtggtataaccgatgccatgcagccaatcccaatggcagatactactggggtggagcgtacacctgggacatggcaaagcacggcacagacgatggagtggtgtggatgaactggcaaggctcctggtactcaatgaagaagatgtccatgaagatcaggcccctacttccagagcaatagtaccccccacacagagt

SEQ ID NO: 11078 - DNA, 376 bp, Bos taurus
  Clone ID: 47-LIB34-073-Q1-E1-D4
acaatcccacagcactttggcacattgaagtgggtgacttttatttctcttctccttctcttcagctctgcttattccatgggtgtgtttcgtcgagatacacacacgattgagattgctcatcggtttaaagatttgggagaagaacattttaaaggcctggtactgattgccttttctcagtatctccagcagtgtccatttgatgagcatgtaaaattagcgaacgaactaactgagtttgcagaaacatgtgttgctgatgaatcccatgccggctgtgaaaagtcacttcacactctctttggagatgaattgtgtaaagctgcatcccttcgtgaaacctatggtgacatgggtgactgctgtgagaaac

SEQ ID NO: 11079 - DNA, 426 bp, Bos taurus
  Clone ID: 47-LIB34-074-Q1-E1-D4
acgcgtccactgcaggcgctcagggtctccaccccttctcccgtctgtgcgtctgtcaatcctgccgctgtctgtcccagaccatggcgaagctgttggtgctcaccctcttgggactggggctggcattcttcagggattaccggtcttcttatctagcaagaatgaacgcttcccgagaagtaaaatcggtagaacttcctaactgtaaattaataaaaggaatagaaactggtgctgaagacctggagatacttcctaatggactcgctttcattagttccggattacgatatcctggagtaaaaagctttgaacctgataagcctggaaaaatactgctgatggacctgaacaaagaggatcctacagtgttggaattgaagatgactggaagtaactttgatgcgtcttcatttaaccctc

SEQ ID NO: 11080 - DNA, 422 bp, Bos taurus
  Clone ID: 47-LIB34-075-Q1-E1-D12
cgacccacgcgtcagctcagttacacatgtgaaatcgaaaaaaacaagctttcacagaagaaaaatgagatttgtcgatgtcagcggtgggggactggtgggggtgggtttgagtaaaggtggtcagaaaatacaaaccttcagttatagggtgagaaagtactggggtataattacagcacagtggctaccatgagttactcatactgtatttatgttggcaagttgctaagagagtggatcttaaaaagttctaatcacatggaagaaaaaagctttttgtagtattgacattatcaaatcatgctgtacaccttaaacttaacgcaatgccctctctcaattttgtctcaatactgaatgaaaaaaagtataaagattatttgccactttcttacactgtcagaaataaaactgctaag

SEQ ID NO: 11081 - DNA, 354 bp, Bos taurus
  Clone ID: 47-LIB34-075-Q1-E1-D4
atttgcaccagcaagtacaaggttcccaccattgatgcccaaggacacagagacttcatcaaaaccatgattacaggcaaatcccaggctgactgtgcggtcctgatcgttgctgctggtgttggtgaatttgaagccggtatctccaagaacgggcaaacccgtgagcatgcccttttggcttaaaccctgggtgtgaaacaactaattgttggcgttaacaaaatggcttcaactgagccaccctatagccagacgagatacgaagaaattgttaaggaagtcaccacctatattaaaaaaattggctacaaccccgacacagtagcatttggtgcaatttctggctggaat

SEQ ID NO: 11082 - DNA, 349 bp, Bos taurus
  unsure (30): unsure at all n locations; Clone ID: 47-LIB34-076-Q1-E1-D4
ccacgcgtccgtcaaaaacgtgtatgtcanagatgtcggtcctggcattgtggctggtgacagcaaaaatgatcaacccatggaagctgctggcttcacagctcaggtgattattttgaaccatccaggccaaatcagtgctggatatgcacctgtgctggattgtcacacagctcacattgcttgcaagtttgctgacctgaaggagaagattgatcgtcgttctgggaaaaagctggaagatggccctaaattcttgaaatctggtgacgctgccatcgttgatatggttcctggcaagcccatgtgtgtcgagagcttccctgattaacctccccttgggcgtttt

SEQ ID NO: 11083 - DNA, 422 bp, Bos taurus
  Clone ID: 47-LIB34-080-Q1-E1-D12
aggacgcctccagctgcctgcctgctgacacaccggggcctctctgaagccaccatgaaatccttcgttctgctcttttgcctggctcagctctggggctgccactcgatcccgcttgacccggttgcaggttataaggaaccggcctgtgatgacccagacacagagcaagcagccttggctgccgtggactacatcaacaagcaccttcctcggggctacaagcacaccttgaaccagattgacagtgtgaaggtgtggccgaggcggcccacgggagaggtgtatgacattgaaatagataccctggaaaccacctgccacgtactggaccccacgcccctggcgaactgcagcgtgaggcagcagacgcagcacgcggtggaaggagactgcgatatccacgtgctgaaacaagatgg

SEQ ID NO: 11084 - DNA, 113 bp, Bos taurus
  Clone ID: 47-LIB34-080-Q1-E1-D4
gggccgacccacgcgtccacggacaactagcatctgtcctatactttctcctcatcctagtgctaataccaacggccggcacaatcgaaaacaaattactaaaatgaagacag

SEQ ID NO: 11085 - DNA, 432 bp, Bos taurus
  unsure (396): unsure at all n locations; Clone ID: 47-LIB34-081-Q1-E1-D12
aactggggatgtggcctttgtcaagcactcaacggtattcgacaacctgcctaacccagaagacaggaaaaactatgagctgctctgcggggacaacacccggaagtctgtagataattaccaagaatgctacttggcaatggttccttcccatgcggttgtggctcgaactgtgggcggcaaggaggatgtgatctgggaacttctcaatcacgcccaggaacattttggcaaagataaaccagacaatttccagcttttccaatcccctcatgggaaggacctgctgtttaaggactctgctgatgggtttttaaagattccttctaagatggattttgagctgtacttgggatatgaatatgtcactgctcttcagaatctaagagaaagtanacccccggactcctcaaaggatgagtgcatggtgaa

SEQ ID NO: 11086 - DNA, 430 bp, Bos taurus
  unsure (185),(187): unsure at all n locations; Clone ID: 47-LIB34-082-Q1-E1-D4
ggatggcttggcccggcttttgggcgccaattgcggctggcaacgttgcttcaaacggccccggcattgggaacaaaatttccctcagagtcttgcagagagttaggttcctccagcaacttgctctgcacctcctgtgatttgcttggacagttcaaccttctgcagctggatcctgactgtananggtgctgtcaagaagaagcacaatttgaaactaaaaagctgtatgcaggagctattcctgaagtctgtggatgaaaattggggaggttccctcaagtccaagctttcgtcaggagtgataaacccaagctattcaaaggactacaaatcaagtatgttcgcggttcagaccctgtgctaaagcttttggacgacagtgggaacattgctgaagaactaagcatcctcaaatggaacacagaca

SEQ ID NO: 11087 - DNA, 207 bp, Bos taurus
  Clone ID: 47-LIB34-083-Q1-E1-D4
acagaaatgactgcagtgcagcagtaattatggtgcactttttcgctatttaagttggatatttctctacattcctgaaacaatttttaggttttttttgtactagaaaatgcaggcagtgttttcacaaaagtaaatgtacagtgatttgaaatacaataaatgaaggcaatgcatggccttccaataaaaaatatttgaagactg

SEQ ID NO: 11088 - DNA, 394 bp, Bos taurus
  Clone ID: 47-LIB34-084-Q1-E1-D4
aaaggacatcctgggtgcacacaacgagaaagtccgggaacagagtgtccaggaaatacaagtgtccaggctgttccgggagccctctcaggcggacattgccttactcaagctgagcagacctgccatcatcacgaaagaggtaatcccagcttgtctgccacccccgaactacatggttgcagcccggacagaatgttacatcactggctggggagaaacccaaggcacttttggtgagggcctcctgaaggaagcgcacctgcctgtgatcgagaacaaggtgtgtaatcgcaacgagtatctcgacgggaaggtcaagccacggagctgtgtgcggccatctgattggagggactgacagctgccaaggtgacagcggcgggcctctggt

SEQ ID NO: 11089 - DNA, 356 bp, Bos taurus
  Clone ID: 47-LIB34-085-Q1-E1-D4
actcaaaatagttatctgctattattattattgaggagaaggggatgacagaggatgagatggctggatggcatcaccaactcaatggacatgagtttgagcaagctctgggagttggtgatggacagaaaagcctggcgtgctgagtccatggggcacaaagagtcggacacgactgagcggctgaattgaactttgtatgatgtccgcaaacaaaggttgattatataccgttgaaatacaatttggtggaattggtctgggttgaatgcagttgaaaagtctgaatcttaaccaaaaattaagctcggaataattaaacgataaatttatgagtgttgaattatgaatattga

SEQ ID NO: 11090 - DNA, 380 bp, Bos taurus
  Clone ID: 47-LIB34-086-Q1-E1-D12
aactcaaaggccggccatgtaagattgtggagatgtcaacttctaagaccggcaagcacggccatgccaaggtccatctggttggtattgacatcttcactgggaagaaatacgaggatatctgcccatcatctcataatatggatgtctccaacatcaacaggaacgattttcaactgattggcatccaggatggatacctatcactcctccaagacagcggggaggtgcgagaggacctccgtctgcctgagggagaccttggcaaggagattgagcagagatacgactgtggagaagagattctgatcacggtgctgtccgccatgacagaggaggcggctgttgcaatcaatgccatggcaacataactgggtccc

SEQ ID NO: 11091 - DNA, 477 bp, Bos taurus
  unsure (80): unsure at all n locations; Clone ID: 47-LIB34-086-Q1-E1-D4
ccgggtagaccacgcgtccgcggacgcgtgggcaaagatctacgaactttggaaggcatcttatatcaggttgagaacanaacatcagaagccagagagctggtcaaagcaatccaaatcagctataaccctgatcaaccatcaaagccaaataacatagagagtgctaccaagaattccaagagtatgatggaagaaattatgaaatatgaaacactgatatcaacacatgaatcaacaattcgatttttgcaagaaatatataactcaaatagtcaaaaaatcgttaacctaagagataaagtggtccagcttgaagcaaactgtcaagagccttgtcaagatacagtgaaaatacatgatgtaactgggagagattgccaagatgttgccaataagggggccaaagagagtggactttactttatcagacctctgaaagctaagcagcagttcttagtctactgtgaaattgat

SEQ ID NO: 11092 - DNA, 379 bp, Bos taurus
  Clone ID: 48-BOVMS1-002-Q1-E1-D12
atgcgacgtcatagctcttctatagtgtcacctaaattcaattcactggccgtcgttttacaacgtcgtgactgggaaaaccctggcgttacccaacttaatcgccttgcagcacatccccctttcgccagctggcgtaatagcgaagaggcccgcaccgatcgcccttcccaacagttgcgcagcctgaatggcgaatgggacgcgccctgtagcggcgcattaagcgcggcgggtgtggtggttacgcgcagcgtgaccgctatacttgccagcgccctatcgcccgctcctttcgctttcttcgcttcctttctcgccacgttcgccggctttccccgtcaagctctaaatcgggggctccctttaaggttccgat

SEQ ID NO: 11093 - DNA, 361 bp, Bos taurus
  Clone ID: 48-BOVMS1-002-Q1-E1-D8
acgatttaacaatggtctttgattaggacaaaggcagaaaattttataatcttcacacaatgctgtctgaaatgtaagcactgtcttgagtactgtgacgtaacacattgtgaatgttgggaaaagaactggaatcatcacaaaaacaagggcggacgaaccagatgatcaaagcttacatccacgagtatgagacttcagagatcgtctacactgtcacccagattcacttcactggcggtagttttaaagccacttcaatgagaaaaccctagcttaacccaaattactcgccatacagcatatccaccttttcccaacaggagtaatacacagaagatcctgacaaatcgcacatcac

SEQ ID NO: 11094 - DNA, 443 bp, Bos taurus
  Clone ID: 48-BOVMS1-004-Q1-E1-D12
actcatggcacgagctgtggctagccagctggattgcaatttcttaaaggttgtatctagttctatagtagacaagtacattggtgaaagtgctcgtttgatcagagaaatgtttaattatgccagggaccatcagccatgcatcatttttatggatgaaatagatgctattggtggtcgccggttttctgagggtacttcagctgatagagagattcagagaactttaatggagctactgaatcaaatggatggatttgatactctgcatagagttaaaatgatcatggctactaacagaccagatacactggatcctgctttgcttcgtccaggcagattagatagaaaaatacatattgatttaccaaacgaacaagcaaggttagatatattgaaaatccatgcaggtcccattacaaagcatggtgaaatagattatg

SEQ ID NO: 11095 - DNA, 429 bp, Bos taurus
  unsure (376): unsure at all n locations; Clone ID: 48-BOVMS1-005-Q1-E1-D8
ggcgactgccagcagggtcgttcaggtagtcaagccacatactccattaataaggttccctgatagaagagacaatcctaaaccaaatgtatcagaagttctacgatcagcaggactaccatctcatacttcttcaatttcacagcattctaagggaagtaaatcgccagactggctgatgcatcagggtccaccagacacggcagagatgataaaaactttacctcagaaatacagaaggaaacttgtgtctcaagaagaaattgaatttatccaacgtggaggtccagaataatcactgataatgtggctctaatatttgtcatcagataaagaagagtctttctaaaaaaggacttccagaatgacaaatganaaattgtatattaaacaactttaataaatattctgtaaaaaagaaaaaaaaga

SEQ ID NO: 11096 - DNA, 370 bp, Bos taurus
  Clone ID: 48-BOVMS1-006-Q1-E1-D12
aaaaaaatcaaaaaaataaaaaaattaaaaaaacaaaaaaaaaaaaaataaaaaaaaaaataaaaataaaaaaaaaatttaaagtatcagaataaagaagatttttgcataataaatgaataaaataatgaagttaaaaaggggtggtcgccttaaagtttaaaacttttttttcacttgaatgtaatttctaactttttcgaaatggtcactaattttaatttttgggcacttttttttaaaaatttgatatgggaaaaaccctgggtttaccaattttaatcgttttgaaaaaaatcccctttttccaaactggttttatagcaaaagggcccgccccttttgcctttctaaaattttttccccccaa

SEQ ID NO: 11097 - DNA, 429 bp, Bos taurus
  Clone ID: 48-BOVMS1-006-Q1-E1-D8
cgcgtccgcacgggactgtgggcagggggccagggtccccaggatgtgaacttgggtgtgtccttgatgaagggccctccatgactacctccctcagcactgttctaggaaatgccaataaaatcgtgctcctagaaaaaaaaaaaaaaaaaaaaaaaaaaaaaaaaaaaaaaaaaaaaaaaaaaaaaaaaaaaaaaaaaaaaaaaaaaaaaaaaaaaaaaaaaaaaaaaaaaaaaaaaaaaaaaaaaaaaaaaaaaaaaaaagggggggccccccaaaaggtttaaactttattttccctgtaatgaaatttcaaaccccttaaaaatggccccaaaatttaatttcaggggccgttttttaaaaattttgaaacgggaaaaacccggggttatccaaacataaaccctttgaaaaaaaacccctttt

SEQ ID NO: 11098 - DNA, 402 bp, Bos taurus
  unsure (363): unsure at all n locations; Clone ID: 48-BOVMS1-007-Q1-E1-D8
cacatacagtaaaaaccataggacatcagtgatactgaagctatgagtatacagattatgaggacttaagcttcgactcctacataattccaacatcagaattaaagccaggggagctacgactattagaagtcgataatcgagttgtactaccaatagaaataacaatccgaatgttagtctcctctgaagacgtattacactcatgagctgtgccctctctaggactaaaaacagacgcaatcccaggccgtctaaaccaaacaacccttatatcgtcccgtccaggcttatattacggtcaatgctcagaaatttgcgggtcaaaccacagtttcatacccattgtccttgagttagtcncactaaagtactttgaaaaatgatctgcgtcaatattat

SEQ ID NO: 11099 - DNA, 398 bp, Bos taurus
  Clone ID: 48-BOVMS1-008-Q1-E1-D8
atggagctggccgcgcttcacgctgtgagggccattctgtagcacatagatttgatcatgtggatcgcagagcaggagctcctgaatgccagtgagcgtgtccagctcctggacaccgatcacaccaatctgatcatcactaagcataaacgagagatagacatcactcaaatccatcgagagatggcagatattagccagtcagctcacaacgcagaagatagagccaagatggccatcactgatgcaaccatgatggctgacgagctaaatatcgaacacgacaccagtgcccacctggagcggatgaataacaatctggagcagacggtgaacgacctgcagcaccgcctggaccaatctgagcagctggtcctgaagggcggtatgaagcatat

SEQ ID NO: 11100 - DNA, 405 bp, Bos taurus; identical to SEQ ID NO: 244
  Clone ID: 48-BOVMS1-009-Q1-E1-D8

SEQ ID NO: 11101 - DNA, 448 bp, Bos taurus
  Clone ID: 48-BOVMS1-010-Q1-E1-D12
cttcacttactctctcaagtcctctgtccttctgattgtcctgtccctggccagggagagtactgtgtttggggctgaactttagcaatctcttgttgatgtatttgggtcaaatgagacctcaataaaggatctggggcaacattaaaaaaaaaaaaaaaaaaaaaaaaaaaacaaccatcagcgttgccgctgccgcaaactgacacactgtttataatgtgtacatacattgtttacctcattttgttatttttaaaacgaagccctgtggaaggaaatggaaaacttgaagcattaaactcagccgttctgttttgctgcgtaaaaaaaaaaaaaaaaaaccttcaagcactaaacatgcttttacattctttttatattgattgctttagtggaagagcatatgaaaagtcatttttaggatcaacttgtagggcactttaat

SEQ ID NO: 11102 - DNA, 448 bp, Bos taurus
  Clone ID: 48-BOVMS1-010-Q1-E1-D8
gtgactgtatggagtggagtgaatgttgctggtgtctccctgaagaatttacaccctgaattaggcactgatgcagataaggaacagtggaaagcggttcacaaacaagtggttgacagtgcttatgaggtgatcaaactgaaaggctacacatcctgggccattggactgtcagtggccgatttggcagaaagtataatgaagaatcttaggcgggtgcatccgatttccaccatgattaagggtctctatggaataaaagaggatgtcttccttagtgttccttgcatcttgggacagaatggaatctcagacgttgtgaaagtgactctgactcatgaagaagaggcctgtttgaagaagagtgcagatacactttgggggattcagaaagaactgcagttttaaagtcctctaatgttgtatcacttcactgtctaagctacac

SEQ ID NO: 11103 - DNA, 444 bp, Bos taurus
  Clone ID: 48-BOVMS1-012-Q1-E1-D12
ctgctatttatgatttgctgtataaagttggcactacttaatttgcaagctgatttctcagtgtaaatttgttcattcctggtaatctattttctataaaaacgtatttttgcacaacatttttaacaatcggtgtaccttcatctaggatgtgttccattttggcaaacagctttccggcataaatccagagaagtgctttatatgaagtttattattttgagcagagtttgtgatttagtattttatgttgttggatttgaattttagagttcttagataattatttcaaatggctattgatgctttcatgttaccagataattggcccattccgttttgatggcagattagttgtttggaaaatcattatttttctagaaatggtcaaccttttaaagagaaaatacttaaggggaagttgtgggaagatttttttttttt

SEQ ID NO: 11104 - DNA, 442 bp, Bos taurus
  Clone ID: 48-BOVMS1-013-Q1-E1-D8
ggaatatcggcaaatggttgagactgagctaaagttaatctgttgtgacattctggatgtactggacaaacacctcattccagcagctaacactggcgagtccaaggttttctattataaaatgaaaggggactaccacaggtatctggctgaatttgccacagggaatgacaggaaggaggctgcggagaacagcctagtggcttataaagctgctagtgatattgcaatgacagaacttccaacaacacatcccattcgcttaagtcttgctctcaacttttctgtattctactatgaaattcttaaatcccctgaccgtgcctgcaggttggcaaaagcagcttttgatgatgcaattgcagaactggacacgctgagtgaagaaagctataaggactctacacttatcatgcagttgttacgtgataatctgacacta

SEQ ID NO: 11105 - DNA, 346 bp, Bos taurus
  Clone ID: 48-BOVMS1-016-Q1-E1-D8
cagaagtttgccttcagttctcaccacgccactctgagaatggaacgatccacccgagagctgtgtctcaacttcagcgttgtcctgattacactcacccttatatggcaccatgtgaggtcctatcagtacggagatgccacagctcctggaattgcctgcagtgctccagtgctgtcttctgtatgccctgacatcccactgctgtcatgggatgccttttctggcatcccatggaacttctgaccacttcgcagaatatctggggtgcctccatatctgctcacaattggttcaaaatgtttgcgactacccagtagatgctttcaccatttcacatagccca

SEQ ID NO: 11106 - DNA, 386 bp, Bos taurus
  Clone ID: 48-BOVMS1-017-Q1-E1-D12
ccggtttagtgcggtactggcccagtcgtcactggcgcagaattgctgacggaacgggccgaggctggctggctgtgggaagagaggcgaggttcaggtcttctacggttgcagtgaaagtttcttgaaaatcttgttttaattgagtctttaataaatacaacgtaaaaatggcttcaaaaagagctctagtcatcctggctaaaggagcataggaaatggagacggttatcactgtcgatgtcatgagacgagctggaattaaggtcagcgttgcaggtctggctggaaaatacccggtacactgtagccgagatgttgtcatttgtcctgatgccagtctggaagatgcatgaaataagggacgttaagatgtggaggttcat

SEQ ID NO: 11107 - DNA, 441 bp, Bos taurus
  unsure (381),(398): unsure at all n locations; Clone ID: 48-BOVMS1-018-Q1-E1-D12
ggcacagtatggtggcgataactaccgtcctttctgcacagaagcacttccactgctggtaagagttattcagtctgctgatgctaagaccaaagaaaacatcaatgctactgagaactgcatctcagcggtggggaaaatgatgaagttcaagcctgactgtgtgaacgttgaagaagtcctcccacactggctttcttggcttccactgcatgaggataaagaagaagctgttcagactttcaattatctttgcgacctcattgagagtaatcacccaattgtccttggcccaaacaataccaatctgcccaaaatattcagtataatcgcagaaggagaaatgcatgaggcaattaaacatgatgattctttgtgcanacgttctggcaatgtanttcgccaagtacagacttctggaggactgtggactgaatgcat

SEQ ID NO: 11108 - DNA, 419 bp, Bos taurus
  Clone ID: 48-BOVMS1-019-Q1-E1-D8
agaaaattgagtttgaacaatttctgcccatgttgcaagctatttccaacaacaaggaccagggcacttatgaagactttgttgagggtctgcgtgtcttcgacaaggaaggcaatggcaccgtcatgggtgctgaacttcgtcatgttctagccatactacgtgaaaagatgaaagaagaagaagtggaagcgctgatggcaggtcaggaagactccaatggctgcatcaactatgaagcttttgtcaagcacatcatgtctaactaaatggagctctcaagatcaagcattgtttatgaagactggctgaaccttattttaagaacacccatgactaactgtccaaatctgtttaccatcaattagaataacaatacaatttgtacgaatccaaactgaaggactccctgaattttt

SEQ ID NO: 11109 - DNA, 427 bp, Bos taurus
  Clone ID: 48-BOVMS1-020-Q1-E1-D8
tcttaataaagactgggatgccaaggtaagtggaggtatacttcgaatttttccagaaggcaaagcccagtttgctgacattgaacccaaatttgatagactgctgtttttctggtctgaccgtcgcaaccctcatgaagtacaaccagcatatgctacaaggtacgcaataactgtttggtattttgatgcagatgagagagcgcgagctaaagtaaaatatctaacaggtgaaaaaggtgtgagggttgaactcaataaaccttctgattcgatcagtaaagacgtcttatagagcctttcatcagcaataccccacttcacctacaataattattgacgctctttgttaacttgtgaatacaaataaatgggataaagaacaatagacaaccagttggcagtttaaggaaacagaaacgacttt

SEQ ID NO: 11110 - DNA, 400 bp, Bos taurus
  Clone ID: 48-BOVMS1-021-Q1-E1-D8
gaacggtctcctcacctgtctcagctcatctaatattggagtttaatgtcccacagctttgaaagctcagttactactcagttaatggattgaggaggagatcgcacaattagattgaaacctattcactcatgcatgatacctcatatcgcgtctaatcgttcaataaacactgttcacaggtcgtggaatcaaatcatactacttgcaaataccctgtagtttaccatctaatgcgccaaggagtagaacaacctatcgcaaattgatcataaatgcaagatgccttcactaatgtcacttcccaagatttgcacagcctgaatggcaaatgttacgcaccatgtcttagaacattcagctcggctagtattgggattactctcaccataaacgcata

SEQ ID NO: 11111 - DNA, 440 bp, Bos taurus
  Clone ID: 48-BOVMS1-022-Q1-E1-D12
ggaatatcggcaaatggttgagactgagctaaagttaatctgttgtgacattctggatgtactggacaaacacctcattccagcagctaacactggcgagtccaaggttttctattataaaatgaaaggggactaccacaggtatctggctgaatttgccacagggaatgacaggaaggaggctgcggagaacagcctagtggcttataaagctgctagtgatattgcaatgacagaacttccaccaacacatcccattcgcttaggtcttgctctcaacttttctgtattctactatgaaattcttaattcccctgaccgtgcctgcaggttggcaaaagcagcttttgatgatgcaattgcagaactggacacgctgagtgaagaaagctataaggactctacacttatcatgcagttgttacgtgataatctgacac

SEQ ID NO: 11112 - DNA, 256 bp, Bos taurus
  Clone ID: 48-BOVMS1-022-Q1-E1-D8
ctctatcctaattcttgctctaatccccctactacacacctccaaacaacgaagcataatattccgaccactcagccaatgcctattctgagccctagtagcagacctactgacactcacatgaattggaggacaaccagtcgaacacccatatatcaccatcggacaactagcatctgtcctatactttctcctcatcctagtgctaataccaacggccggcacaatcgaaaacaaattactaaaatgaagacag

SEQ ID NO: 11113 - DNA, 387 bp, Bos taurus
  Clone ID: 48-BOVMS1-023-Q1-E1-D12
atgcgacgtcatagctcttctatagtgtcacctaaattcaattcactggccgtcgttttacaacgtcgtgactgggaaaaccctggcgttacccaacttaatcgccttgcagcacatccccctttcgccagctggcgtaatagcgaagaggcccgcaccgatcgcccttcccaacagttgcgcagcctgaatggcgaatgggacgcgccctgtagcggcgcattaagcgcggcgggtgtggtggttacgcgcagcgtgaccgctacacttgccagcgccctagcgcccgctcctttcgctttcttcccttcctttctcgccacgttcgccggctttccccgtcaagctctaaatcgggggctccctttagggttccgatttagtgct

SEQ ID NO: 11114 - DNA, 358 bp, Bos taurus
  Clone ID: 48-BOVMS1-023-Q1-E1-D8
cacgcgaccgatacaagcacgatagatgcacaagaagtagagacaatctgaaccattctgcccgccatcatcttaattctaattgctcttccttctttacgaattctatacataatagatgaaatcaataacccatctcttacagtaaaaaccataggacatcagtgatactgaagctatgagtatacagattatgaggacttaagcttcgactcctacataattccaacatcagaattaaagccaggggagctacgactattagaagtcgataatcgagttgtactaccaataaaaataacaatccgaatgttagtcccctctgaagacgtattacactcatgagctgtgccctctc

SEQ ID NO: 11115 - DNA, 330 bp, Bos taurus
  Clone ID: 48-LIB188-001-Q1-E1-D12
actcagtgtaaggctgacggtttacttgctgcaagccgtgtatcgtgcagttacattctcccagttgatcacattccaaatggccttcaggtaatcgggcctgacatttttatactgaaggtaataagcatgctcccacacgtcaatccccagcagggggataagacctgttgttccttgcaggggatcctggttagaacaagcagcaatctgtaagcgtccctgctccttattgaagccgagccaaccccaaccggagccttggacaccaacagatacagcagtcaacttttccttaaatttggcaaaggaaccaaagtcacgtttgat

SEQ ID NO: 11116 - DNA, 410 bp, Bos taurus
  Clone ID: 48-LIB188-001-Q1-E1-D8
acttgagctggacagagtcactcgagcccctccagggagctgtggctaaattcttctctgccagctgtgttccctgcattgatagacaagcataccccaacctgtgtcaactgtgcaagggggagggggagaaccagtgtgcctgctcctcccgggaaccatacttcggttattctggtgccttcaagtgtctgcaggacggggctggagacgtggcttttgttaaagagacgacagtgtttgagaacttgccagagaaggctgacagggaccagtatgagcttctctgcctgaacaacagtcgggcgccagtggatgcgttcaaggagtgccacctggcccaggtcccttctcatgctgtcgtggcccgaagtgtggatggcaatgaagacttgatctggaagcttctc

SEQ ID NO: 11117 - DNA, 432 bp, Bos taurus
  Clone ID: 48-LIB188-002-Q1-E1-D8
acattcaggtgaacgagccctggaagcggattaaaggtggcgaagctgacaggcagcggacagggacagtgacaggcttggccgtgaatatagctgccttgctgtccgtcatgctccagccttacatgcctacagttagtgccaccatccaagcccagctgcagctcccacctccagcctgcagtatcctgcccacaaacttcctatgcaccttaccagcaggacaccagattggcacggtcagtcccttgttccaaaaattggaaaatgaccagattgaaagtctgaagcagcgcttcagtgggggccaggcaaaagcatcccccaagacagcagctggactgacaacagctggaacgcagcagattcaagcactgacagaggaagttgacaagcagggcaatattgtccgagaattgaaggcacagaagg

SEQ ID NO: 11118 - DNA, 432 bp, Bos taurus
  Clone ID: 48-LIB188-003-Q1-E1-D8
catgctaacgagcgccatgcgccgcgggatacaatccaaatttgtctacagacttgtgcaatatttactgttctgggtctgaggaaaatggaaaatttcacagggaagaaattccattgcttcagtttctcagtgacattggtgaggggtctttaagaccttgagtttcccagacccaagtccccttgcgaaggccacagctgggcgtctggtgaacctggctgctatctggctgtggcccgtagtgagggactttgctctccactgccggtcccctttcctggattgcttaactactcaattctgactcagaggtgctatttaccaaacactctccctacccattcctgccggttctgcctcttgaactttccaaatcccaagctaccttcccaggccctgtttccagtccttattgctttaacgttgact

SEQ ID NO: 11119 - DNA, 406 bp, Bos taurus
  Clone ID: 48-LIB188-004-Q1-E1-D12
acttaagctatagataatttttgaataaaaagcctacggtagatataaatgcaatagttaactgatcctgtttgctgatgtccttttcatggtccacggaaggtggtggcttttagtctagcatcttctcctgtttcttgccttcctttttcttcttcttagattctgcttgaggtttggacttggtcagcttgccacagggcttggagatggtgactgtcttctggcagtcggcgttgtggagggctcgcttcaggctcccagttcgggtcttcagagccgtgttcagatcacattctccccaggcctggaactggtatttgcactccgctccaaattgctttttccagttgcaggggatcttacatctctgggtcttcatggtttgtttacactcagctccggt

SEQ ID NO: 11120 - DNA, 439 bp, Bos taurus
  Clone ID: 48-LIB188-004-Q1-E1-D8
acttatgataggccagcccaccgggcactttgacaagcttgttgttgttcaaatgaagttccctcaaatgaggagtgttggccaaagagccattgtcaaccgcagagatgctgttgaaactcagtcccaacttagccaaattattcagtcctttcaggctagctgcatcaactttggtgattttgttgccatcgagatgtaattcagtaagggaaggaggaagaccttgagggatggtagttatatttgtgtcagcaatgcggatgtaggagagcttcttcattccctgaaaggctccattttcaatgcctgagctcttcagcgggttggtgccaagttctacgacgatcatctggttcaatccattgaacacagactttcgcactttggtgatctcgttctcatggacacgcagctcctgaagagttttgggcatttt

SEQ ID NO: 11121 - DNA, 399 bp, Bos taurus
  Clone ID: 48-LIB188-005-Q1-E1-D8
acttgtccaccgactcaggctgcccgtttctctgccactccacggcgatgtagtctgggtagaagctggtgaccatgcaggtgaggctgaccgtgcttttgctgagctcttcctggggtggggccaggacatacacctgcggctcccgggccggccctttggtcctggagatggtcctcacgatgggggccgggaggccttcgttgtggaccttgcacttgaactcctttcctccagtccagtcctggtgctggatgcgcagggcgctgaccacgcggtaggtgctgttgaactgctcctctctcggcttcgtcgtggctgtgtttacctccacgtcgtccacgaaccaggagaacttcacctcggggtcatcgtggcccacgtccaccaccacacacg

SEQ ID NO: 11122 - DNA, 378 bp, Bos taurus
  Clone ID: 48-LIB188-006-Q1-E1-D8
gggatacttggccaagcgctcggatcggcaaggggcaccagtcttgatctgccccgtgcacagccccaccaccaggtcagcaatgaaggtgtcctcagtctccccggagcgatgagacaccatgacgccccacccgttggactgggccagcttgcacgcctgcagggactcggtcacagagccaatctggttcactttcagcaggaggcagttgcacgatttctcgctcacggccttggcgatccgcttggggttggtcaccgtgaggtcatcccccaccacctggatccctgcgctggcagtgaacttctgccaagcttcccagtcatcctggtcgaaggggtcctcgatagacaccactgggtagtccctgatgaa

SEQ ID NO: 11123 - DNA, 356 bp, Bos taurus
  Clone ID: 48-LIB188-007-Q1-E1-D8
gccatgggcccgggatacctcgaaacctggggccgaggactcctggtcaccgtctcctcggcctccaccacagccccgaaagtctaccctctggcatccagctgcggagacacatccagctccaccgtgaccctgggctgcctggtgtccagctacatgcccgagccggtgaccgtgacctggaactcgggtgccctgaagagcggcgtgcacaccttcccggctgtccttcagtcctccgggctctactctctcagcagcatggtgaccgtgcccgccagcagctcaggacagaccttcacctgcaacgtagcccacccggccagcagcaccaaggtggacaaggctgttggggt

SEQ ID NO: 11124 - DNA, 424 bp, Bos taurus
  unsure (393): unsure at all n locations; Clone ID: 48-LIB188-009-Q1-E1-D8
acagccggacagtgccatcctgtatgactactacaaccctgagcacaagtgttctgtgttttatggggcaccacgtaagagcaaactcttgtccacgttgtgctctgcggatgtctgccagtgtgctgaggggaagtgccctcgacagcgccgggccctggagcgtgggcagcaggacttggagggttaccggatgaaattcgcctgctactctccccgagtggactacggcttccaggttaaggttctccgagaagacagcagggctgctttccgcctctttgagacccgtatcacccaagtcctgcatttcaccaaggatgccagggccaccgctgatcagaccagaaacttcctggtccgagcctcttgccgccttcagttggaacctgngaaagaatatctgatcatgggtctggatggg

SEQ ID NO: 11125 - DNA, 353 bp, Bos taurus
  Clone ID: 48-LIB188-010-Q1-E1-D12
catgctcacgtacgccatggcgtcgggatacttcacagagacagtcatgtcttcagtgggcgtggagtactcatttcttcaacaggaggttacatcgggactctgtcccttcactccaagatggcgtgcacatcgatcatgggttcaacacgtatcattactgaattcccctcataaggagatgtcttctcctggtcttgcaacatggccatcctgacattgtgctcaccctccccatccatagtgatgttcagggaacttactatggactgcacggtcatttgtctgctcactttcatatctactagttaagcacactggacattggtgctgaggatcagtgtctcagaagt

SEQ ID NO: 11126 - DNA, 286 bp, Bos taurus; identical to SEQ ID NO: 9010
  Clone ID: 48-LIB188-010-Q1-E1-D8

SEQ ID NO: 11127 - DNA, 281 bp, Bos taurus
  Clone ID: 48-LIB188-012-Q1-E1-D12
accctgtgacccatcctcatccagcccgggtggcgtcacggtgcagaggcagaccttcggggaggccatcaagcagcccggtgtggtcttcatcgcggccaagttcgacgacattctgggcatggcctacccccgcatctccgtcaacaacgtgctgcctgtcttcgacaacctgatgcagcagaagttggtggacaagaacgtcttctccttcttcctgaacagggacccgaaagcccagcccgggggcgagctgatgctgggcgggaccgactccaagt

SEQ ID NO: 11128 - DNA, 426 bp, Bos taurus
  Clone ID: 48-LIB188-012-Q1-E1-D8
acagcgccaaatctaccttcgaggggatccgcaaaaacccaagagcagagtctttgaacagcaggtccctctggtcgggtggagagccaaagagctggaagctcagagacttgttttttccaaatttctcctgcgccttgctgagaagcttccagatcaagtcttccttgccatccacacttcgggccacgacagcatgagaagggacctgggccaggtggcactccttgaacgcatccactggcgcccgactgttgttcaggcagagaagctcatactggtccctgtcagccttctctggcaagttctcaacactgtcgtctctttaacaaaagccacgtctccagccccgtcctgcagacacttgaaggcaccagaataaccgaagtatggttcccgggatgagcagacacactggttctcccc

SEQ ID NO: 11129 - DNA, 389 bp, Bos taurus
  Clone ID: 48-LIB188-013-Q1-E1-D8
actatagccgagaagcccccaaccccattcacctcacggtggacaccagcctccagaacggccgcatgagcatcaaggcctacgtcagcactttaatgggtgttcctgggaggaccatgggggtgatgttcacccctctgacagtgaaatacacgtattacgacactgaacgcattggagttgacctgatcatgaagacctgttttagccccaaccgggtgatcggcctctccagtgacttgcagcaagtgggcggggcttccgcgcgcatccaggacgccctcagcacagtgctgcagtatgcggaggacgtgctgtcgggaaaggtgtcagccgacaataccgtgggccgcctcttgatgagtctgggttaccaagtatcactagtg

SEQ ID NO: 11130 - DNA, 434 bp, Bos taurus
  Clone ID: 48-LIB188-014-Q1-E1-D12
acatgaacacgcaccccggccgcctgctgctctgcctcacgcttggcctctggctcaccaccgcctgggtgctgtcggtagccgagaggcaggccgtgaatgccactgggcacctttcagacacactgtggctgatccccatcacattcctgaccattggctatggtgatgtggtgccaggcaccatgtggggcaagattgtctgcctctgcactggcgtcatgggggtctgctgcacagccctgctggtggccgtggtggcccggaagctggagtttaataaggcagagaagcatgtgcacaacttcatgatggatattcagtatgccaaagagatgagggagtcagctgcccgagtgctgcaggagtcctggatgttgtacatggatatagctatttatttctatctactagaaaataaagtcatatttttt

SEQ ID NO: 11131 - DNA, 395 bp, Bos taurus
  Clone ID: 48-LIB188-014-Q1-E1-D8
actcagaaatgtgatgctcgccaggccccagccctggtgctgggacgggcggagctgcctcgcaatccgcttctttgctttggcccccgtggcctgggtgaaccacctggctgacttcaggaccatccgcttgtgtccccctcgctggcctgcttttcctgtggggcctgggagatgctcacaatgggtcaacccttttaggctgaatgattccttgggtctcgaaaattcagtccaacagcccttggcttctttcgatcggctctgacactggtctacatgactggtctttctaaagtcagtgactttggttatgtaactctcaacttgaccagttttactaaagggctgacacatcaagaacacacttgacaattccgttaaaataatgttgg

SEQ ID NO: 11132 - DNA, 206 bp, Bos taurus
  unsure (160): unsure at all n locations; Clone ID: 48-LIB188-015-Q1-E1-D8
acacgcgcgagcaaccactgggctgtcggacacttaatgggaaaaaagagtgtggcagagtccccacaacttcatggggaggagagcctgaaggagcagctgagggagtatgcccagtgggaagaagcgacaaggaacttgctaagcctcctacaagcanagggggcccgaggccaccagatgcctccatgggagcccctgagcat

SEQ ID NO: 11133 - DNA, 406 bp, Bos taurus
  Clone ID: 48-LIB188-016-Q1-E1-D12
actggacacattcgctttgtttttagatgtggaatcttcacatccattgtgaaagacacttctgccactaggaatggtcgtcacaccgttcatgtcatcagtgatgtcaactcgaagaacgtcatctgactgtgcgcatctcacttctcagacatattgtccacagcttgcaatatatgctactattaggatcatgcctgctttgatctttgaacacattattgtccagatggcccaaagcatcatgattttcattatggttgacatcagtcatgacgtctataagtcatggtacagtggtatcttcgcatatcttctctcgtgtacgtctcggtctactgacctttctagcagtcatctgaagctttcaaagaaccagcttgcatacgctggatgaggacttcct

SEQ ID NO: 11134 - DNA, 403 bp, Bos taurus
  Clone ID: 48-LIB188-016-Q1-E1-D8
acagcccacactagtctcctctgtggccccgtcccagaccagagccccccacccctatggagtccctactccctcagctggggcttactccagggctggagtcatgaaaaccatgacaggaggcagagctcagagcattggccggaggggcaaggtagaacagttgtccccagaagaagaagagaaaaggcgaatccgaagggaaaggaataagatggctgcagccaaatgccggaaccggaggagggagctgactgacaccctccaagcggagacagaccaactagaagatgagaagtcggctttgcagacagagattgccaatctgctgaaggagaaggaaaaactcgagttcatcctagcggctcaccgacctgcctgcaagatccccgatgacctgggc

SEQ ID NO: 11135 - DNA, 271 bp, Bos taurus
  Clone ID: 48-LIB188-017-Q1-E1-D8
acaatcaagtcctcggccacactgtagaactttgggaatgctcgatccaaccgactgctgtcaccttcaccgttccagtttttaaatcctgagtcaagcgccaaaaaaaaaaaaaaaaatcaaaaaagacaaaaaaaaaaacaaataaagccatgccaatctcatctcgttttctgcgcaagttaggttttgtcaagaaaaagggtgtaacgcagctaacagtccgcctagaagcatttgcggtggacgatggaggggccggactcatcgt

SEQ ID NO: 11136 - DNA, 337 bp, Bos taurus
  Clone ID: 48-LIB188-018-Q1-E1-D8
accctcgcgaccctgtctttcccagccgtggcggctactcaaccacagggaacgactacagatggggaatgcctaacatatggaattacaaccagaacttcatatgacgaggaaacaatcgtggctacaataatcaatctcagggctacaacctctggcagcagggtcaattctggggtcagaagccgtggactcagcattatcactaacgatattattgaatacccaaatacatcgaactgatacatatttctccaaaaccttcacaagaattcgactgttttctttagtatgctaactttttaaacattctacaagaggaagtgcctgcgggctc

SEQ ID NO: 11137 - DNA, 256 bp, Bos taurus
  Clone ID: 48-LIB188-020-Q1-E1-D12
acagaaaagctcccctctttgtgtagctgacagggccttttggcggaggagaatgtcattgaatcttgacagtgacgtttgcctccagctgcctgacaggcagcaggtcagcagctcaaccccacagaagccagcaccaagtgaagctgaaaaaataaggccaaaatgtgaaaatgaccttcaaattaaatatatgaaattggatatattccccaagtcaatctacacaattgcatttccagcatttgtataaggt

SEQ ID NO: 11138 - DNA, 412 bp, Bos taurus
  Clone ID: 48-LIB188-020-Q1-E1-D8
acacgcgcagcaaccactgggctgtcggacacttaatgggaaaaaagagtgtggcagagtccccacaacttcatgaggaggagagcctgaaggagcagctgagggagtatgcccagtgggaagaagcgacaaggaacttgctaagcctcctacaagcaaagggggcccgaggccaccagatgcctccatgggagcccctgagcattcaccagcctgcctgggattccgaggacgtcagcaacttcaaagacacaggtcctcagcatgaaggaaggaacccccagctgaactgacaatgacgatggccgcctccctcaaagaagcaaaacaaaatccttaagaaactgcgttctatgggcatcagttctactggatcatcaacaaatttcctttgtgcaaaatacttaactat

SEQ ID NO: 11139 - DNA, 426 bp, Bos taurus
  Clone ID: 48-LIB188-021-Q1-E1-D8
actggtccagcaggaagctgcagcctttctcgagggcagccaggatctgctccttggtgctgttcttctccaggttccggtccaaatagcccaccagcttcttgcacacctcgcagaagccaccgtccttcctcggcatcacacggaccgtcgctgccggcagcccccggctggagcagaggtggagcatgctgcacaccagctcggggctcgcctcgtccagaaggatagacaggatggagctgccgtaggtgtccaccacctcctggcactgctcagctaaggatgtgggcagcttcgagcacactttgtccagcgcgtgaagtatttcttcctccgtcctgttgttgtcaatcagcttggccacctccttcaccacaaactcgcacacctcgcagtaaatgtcagcctttgcaggggctgggt

SEQ ID NO: 11140 - DNA, 378 bp, Bos taurus
  Clone ID: 48-LIB188-022-Q1-E1-D12
actcataaaaactctggttgccagtgtaaggagatgcttctgtagcactacacacacgcacaccgtccactctcacacccgcacagacaggaggcccgtggagacgggtgtcacacgctgacttcaggcaatggaaaagagacagagggcacgcgtgtcacacgtctttaatgtagtgcattcgtagaaaaaaggccagctttcgctcccaggcgtgcgctcgtccttagactttaatatcatgatttagaagatgcagacgttattgcctaaatattattctatacatttccatcagtgttcaggaaaacactttaaattgctacttaatttacaccataattactgggttacagctttagctcattggcaattttg

SEQ ID NO: 11141 - DNA, 288 bp, Bos taurus
  Clone ID: 48-LIB188-022-Q1-E1-D8
acatgtgtggtggggatgactgaagcctcgcgacagcccaagcatccaggacggctgctccgtgctccagctaacagttctccgcagtcagcccgaggctaacagccccctgtgcacgtccctgggaggatgacattatcgctgcacgcgccacccgctcttttgtgactttactttcctagtcagtatctgcctttcacggcgtaaccctctcttaggccaaagcattgaacattccaacgatttggaagtgggctctatgatgtgacacacgtttgcctctctagt

SEQ ID NO: 11142 - DNA, 397 bp, Bos taurus
  Clone ID: 48-LIB188-024-Q1-E1-D8
ccatggcggcgggataccagcaaagacttgcgcagagtgagcactcgcttcttggttcccaccacgcagcctttgagcatgacaaagtcattggtcacctcaccgtagtggacaaagccacccagagggttgatgctcttgtcagacagatcgtaatcagtagaggcattgttcttgatcagtttgccgtccttgatgaggtagccctgaccaatcttgtagatcttcttgttgatctcagtgcggtgatggtagcctttctgcccagccagagccacagagaaggccacccgggcaggatgccacgccccaatacaggcaaccttgcgcagtcctcggtgggtcttacggggcaacttcttggtgtgccaacggctggtgacacctttgtagcctt

SEQ ID NO: 11143 - DNA, 455 bp, Bos taurus
  Clone ID: 48-LIB188-025-Q1-E1-D8
cgcataactcctaccgccatgggcccgggatacgtggatatagctatttatttctatctactagaaaataaagtcatattttttcttaatttaatattggtcattgctaatcagaacacactattgccaggaacacagtagttattgttaaaatcagctgcactagatacaatttgaaaatatccagcaccaggttaattccaataacgaacccaatagattagttaatgctatgagaagactaaagagaaagagaaaagagacgcagacccaggcctggctccacatgctactaactaccagctctcagatgtgtcactgggaacaatacacactccatgcgttttgctacatctccagaagaggtaaggacttgagtccacacggggatgctcgcttgcaagtccttgaggcccacagcctggtgtgtttcacgcacagataaggtcctccct

SEQ ID NO: 11144 - DNA, 394 bp, Bos taurus
  Clone ID: 48-LIB188-027-Q1-E1-D12
acttatgatcggccagcccaccgggcactttgacaagcttgttgttgttcaaatgaagttccctcaaatgaggagtgttggccaaagagccattgtcaaccgcagagatgctgttgaaactcagtcccaacttagccaaattattcagtcctttcaggctagctgcatcaactttggtgattttgttgccatcgagatgtaattcagtaagggaaggaggaagaccttgagggatggtagttatatttgtgtcagcaatgcggatgtaggagagcttcttcattccctgaaaggctccattttcaatgcctgagctcttcagcgggttggtgccaagttctacgacgatcatccggttcaatccattgaacacagactttcgcactttggtgat

SEQ ID NO: 11145 - DNA, 350 bp, Bos taurus
  Clone ID: 48-LIB188-028-Q1-E1-D8
acttttaatgctgcttccgtctgaaagagcatccttctgtaagcctcgcttttcctcctgtaggctggcagaggacagtagagcagccaacacacaagactactgtttgtgcatggctaaagacggtggtgattttatagcatcctgggcattttacatccatgaaataggaattggggctctgcaccaggcgcttcttcttgtgtttcctcttctcctcttctggagagggatgaagaagatcctttgcgagaggcatgttctcgtgaggaggtcgtcaccaagatcatcagtttctatcctaatcagacccctcccaatctctcctcccttcccaggtccgacttccc

SEQ ID NO: 11146 - DNA, 405 bp, Bos taurus
  unsure (286): unsure at all n locations; Clone ID: 48-LIB2809-001-Q1-E1-D12
acaatgaggaaagctgtctgggaaagggagaaccatagccttggctcagagccttgaggcacagcctgaagacttcctacttaacatctaggaaggctgctttagtgtttttctaggccacgggtctgtctggaatggagagccaatggcctcctatagataccaatgtgtcatctagaaaggatatgctggattcagtttgccacatctcactaggccgactttgtaaccttgtttgtcacctgtctacactgcttaagcatttgatattgaatgaataatgtanagttgatgaaaaactttaaaattaaacatgttttcagtcacatgttatttctttgaaactgaagaaccctaaattttcaacttattgaatctctaataaacactgtaactccaatattt

SEQ ID NO: 11147 - DNA, 437 bp, Bos taurus
  Clone ID: 48-LIB2809-001-Q1-E1-D8
acctggtgagattgtggaaagcctttcaagcagtgaggaatctattacacgcatcaataagaaaattgagaagtttcagagtgaggaacagcagcaaacagaggatgaactccaggataaaatccacccctttgcccagacacagtctctagtctatcccttccctgggcccatccctaacagcctcccacaaaacatccctcctcttactcaaacccctgtggtggtgccgcctttccttcagcctgaagtaatgggagtctccaaagtgaaggaggctatggctcctaagcacaaagaaatgcccttccctaaatatccagttgaacccctttactgaaagccagagcctgactctcactgatgttgaaaatctgcaccttcctctgcctctgctccagtcttggatgcaccagcctcaacagcctcttcctcca

SEQ ID NO: 11148 - DNA, 413 bp, Bos taurus
  Clone ID: 48-LIB2809-002-Q1-E1-D8
acctggtgagattgtggaaagcctttcaagcagtgaggaatctattacacgcatcaataagaaaattgagaagtttcagagtgaggaacagcagcaaacagaggatgaactccaggataaaatccacccctttgcccagacacagtctctagtctatcccttccctgggcccatccataacagcctcccacaaaacatccctcctcttactcaaacccctgtggtggtgccgcctttccttcagcctgaagtaatgggagtctccaaagtgaaggaggctatggctcctaagcacaaagaaatgcccttccctaaatatccagttgagccctttactgaaagccagagcctgactctcactgatgttgaaaatctgcaccttcctctgcctctgctccagtcttggatgcact

SEQ ID NO: 11149 - DNA, 500 bp, Bos taurus
  Clone ID: 48-LIB2809-003-Q1-E1-D8
ggagccatggccgggcgatacaagctttttaattttttttttttttttttttttttttaaaagaaagaaacccagagtaagtttttaatagaaaaaattttgcacgtgcaggatcaatcagtgatatcagaacactgacaccaatccatttatttctgagcattgatgagtttgacagacactctggatccaggcatctctttgtaacaagaaacttttgaaaccttttctgctttttttacaaatacagtgataccagctcttcttttgaaatagtgggggctctgaaaagagcctttgggtttgaaagcacttccggaaactcaggtctcagtccaattacttgcccttggccttatggtgactctcggttttctttggcagcagcaccgcctggatgttaggcagcacaccaccctgagcgatggtcacacgacccagcagcttgttgagctcctcgtcgttgcggatggccagctgtaaatggcgcgggatgatat

SEQ ID NO: 11150 - DNA, 465 bp, Bos taurus
  Clone ID: 48-LIB2809-004-Q1-E1-D12
acaggctacagacccatcctccagggcttccggacctttgccaagaatggtggatgctgtggaggaaatgggaacaacccaaactgctgcatgaaccagaagaaagaccacaccgttactctctcaccatctttattcaacccagaggagttcatgcccctggatcctacccaggaacccatcttccctccagagttgctgaggctgaaagacgttccaccgaagcagctgcgttttgaaggggagcgtgtgacctggatccaagcctccaccttgaaggagttgctggacctcaaagctcagcatcccgaggccaagctggtggtggggaacacagagatcggcattgagatgaagtttaagaatcagctatttcctatgatcatctgcccagcctggatccctgagctgaatgcagtggagcacggacctgaggggatctcctttggagctgcttgtgccctg

SEQ ID NO: 11151 - DNA, 412 bp, Bos taurus
  Clone ID: 48-LIB2809-004-Q1-E1-D8
acagcagaaaggcctgaatgggcatatctctctggggatagggcactgctttctggggaacaggcaggactttggactgagaaagggacagcacggactgaggaggaaacatgacagttggaggaagaggctggtgaggctggtgcatccaagactggagcacaggcagaggaaggtgcagattttcaacatcagtgagagtcaggctctggctttcagtaaagggctcaactggatatttagggaagggcatttctttgtgcttaggagccatagcctccttcactttggagactcccattacttcaggctgaatgaaaggcggcaccaccacaggggtttgagtaagacgagggatgttttgtgggaggctgttagggatgggcccagggaagggatagactagagactg

SEQ ID NO: 11152 - DNA, 439 bp, Bos taurus
  Clone ID: 48-LIB2809-005-Q1-E1-D8
acagtattctataaaattttctttttaaattgaaagccaacaactctgcctttatgatgctaagctcatgttcttatttcttctcctatcttctttctcttctgttcccattatccttccctttgttttgtccctgtcaccttcctttctccttctcctcattgccccccaggcaagcaggtggtcagtcattggtgggtttccagcttccaaagcctagacaaccctgctgtagtctcaaactagtggtctttgccccggctgaccctttccttgagctgtctgagctttaaggtggatggctcaagctagagatatgacagaatcttctgggaagggccttgatgatcttcagcccagacttttgctaaatgaaatggaaaaataactttattttggcaccaaactgaaaaaacaggtcaattgtcaggggagagag

SEQ ID NO: 11153 - DNA, 386 bp, Bos taurus
  Clone ID: 48-LIB2809-006-Q1-E1-D8
acaatgaagaaagctgtctgggaaagggagaaccatagccttggctcagagccttgaggcacagcctgaagacttcctacttaacatctaggaaggctgctttagtgtttttctaggccacgggtctgtctggaatggagagccaatggcctcctatagataccaatgtgtcatctagaaaggatatgctggattcagtttgccacatctcactaggccgactttgtaaccttgtttgtcacctgtctacactgcttaagcatttgatattgaatgaataatgtagagttgatgaaaactttaaaattaaacatgttttcagtcacatgttatttctttgaaactgaggactctgaattttcaacttattgaatctccaataaaca

SEQ ID NO: 11154 - DNA, 339 bp, Bos taurus
  Clone ID: 48-LIB2809-010-Q1-E1-D12
actgaaaaaactgggcaaggactcgaaagataagtgtggtaaactggaccccacctacaccagcgccactttactctttcagaaagaccctccagccaacatccagctcttccaagaggtgcccaatggtcagtccaaggaggacacagtgggccggcccctgccccacctggccgcggccatgcaagcctctggggaggccgtatactgtgacgacatccctcgctacgagaatgagctgttcctccggctggtcaccagcacccgggcccacgccaagatcaagtccattgatgtttcagaagctcagaaagtgccaggatttgtttgccttccctc

SEQ ID NO: 11155 - DNA, 374 bp, Bos taurus
  Clone ID: 48-LIB2809-010-Q1-E1-D8
cgtatgtgtatgatacataaggttatgtattaattgtagccgcgttctaacgacaatatgtacaagcctaattgtgtagcatctggcttactgaagcagaccctatcatctctctcgtaaactgccgtcagagtcggtttggttggacgaaccttctgagtttctggtaacgccgtcccgcacccggaaatggtcagcgaaccaatcagcagggtcatcgctagccagatcctctacgccggacgcatcgtggccggcatcaccggcgccacaggtgcggttgctggcgcctatatcgccgacatcaccgatggggaagatcgggctcgccacttcgggctcatgagcgcttgtttcggcgtgggtatggtggc

SEQ ID NO: 11156 - DNA, 177 bp, Bos taurus
  Clone ID: 48-LIB2809-011-Q1-E1-D8
catgactccgaccgccatggcgcgcgggatactgttgcattaaaagcgccatcatggacatcgagcaagggtcaaaagtccatagcgccattcatgcacccctggagattagtccttacatgtccattgtcattacagggcccagggctcagacacgagttagcttcaagggggtac

SEQ ID NO: 11157 - DNA, 274 bp, Bos taurus
  Clone ID: 48-LIB2809-013-Q1-E1-D8
acaaagaaggggacctgacccacttcaaccagaagcttgaggggttcagcgtgcccaggtgctgggatgagtgcctgaagagctctgagtattacgctcggaagagtgaggtcgacaagttcaacaaggagaattgttggaaaaagagaggattgtgcataattcctaccaaatttggaataagcttcacagttccttttctaaatcaggcaggagccctgatccacgtatacacagatggctccgtgctggtgagccacgggggcacagagat

SEQ ID NO: 11158 - DNA, 416 bp, Bos taurus
  Clone ID: 48-LIB2809-014-Q1-E1-D12
ggatacaacgacaatgcatctcagcttctgtaccccccatcatgtggccccgctccctagaccacaggccagctacaatgtgtcggagtattttcaaccaacctcaactgtgataacgggtcgaagatcctcatatgcatgtttcagaacatgggcagctctcgctccaagtactggggtggcagcgaccacagaatcaatgtcatgcccaacacaagtctccatggccttctcaaatactgtcgcatcattaaagagtccggtttcattacccccgggacatatcatcatgacgaactaaccctagcaactcctggtacgttctgagcttccgcaccatcaatggacttgatcgtggcatgggcccaggtactgctgaccaacctggtcgaacagacattcccctccggaaggat

SEQ ID NO: 11159 - DNA, 440 bp, Bos taurus
  Clone ID: 48-LIB2809-014-Q1-E1-D8
acagcagaaaggcctgaatgggcatatctctctggggatagggcactgctttctggggaacaggcaggactttggactgagaaagggacagcacggactgaggaggaaacatgacagttggaggaagaggctggtgaggctggtgcatccaagactggagcagaggcagaggaaggtgcagattttcaacatcagtgagagtcaggctctggctttcagtaaagggctcaactggatatttagggaagggcatttctttgtgcttaggagccatagcctccttcactttggagactcccattacttcaggctgaaggaagggcggcaccaccacaggggtttgagtaagaggagggatgttttgtgggaggctgttagggatgggcccagggaagggatagactagagactgtgtctgggcaaaggggtggattttatcc

SEQ ID NO: 11160 - DNA, 397 bp, Bos taurus
  Clone ID: 48-LIB2809-015-Q1-E1-D12
aatacagcaaaaaggcctgaatgggcatatctctctggggatagggcactgctttctggggaacaggcatgactttggactgagaaagggacagcacggactgaggaggaaacatgacagttggaggaagaggctggtgaggctggtgcatccaacactggagcagaggcacaggaaggtgcagattttcaacatcagtgagagtcaggctctggctttcagtaaagggctcaactggatatttagggaagggcatttctttgtgcttaggagccatagcctccttcactttggagactcccattacttcatgctgaatgaaaagctgcaccaccacaggggtttgagtaacaggacggatgttttgtgggacgctgttagggatgggcccagggaa

SEQ ID NO: 11161 - DNA, 364 bp, Bos taurus
  Clone ID: 48-LIB2809-018-Q1-E1-D12
acagcaaaaaggcctgaatgggcatatctctctggggatagggcactgctttctggggaacaggcaggactttggactgagaaagggacagcacggactgaggaggaaacatgacagttggaggaagaggctggtgaggctggtgcatccaagactggagcagaggcagaggaaggtgcagattttcaacatcagtgagagtcaggctctggctttcagtaaagggctcaactggatatttagggaagggcatttctttgtgcttaggagccatagcctccttcactttggagactcccattacttcaggctgaaggaaatgcggcaccaccacaggggtttgagtaagaagagggatgttttg

SEQ ID NO: 11162 - DNA, 408 bp, Bos taurus
  unsure (340): unsure at all n locations; Clone ID: 48-LIB2809-023-Q1-E1-D12
gcgcgggatacaatgaggaaagctgtctgggaaagggagaaccatagccttggctcagagccttgaggcacagcctgaagacttcctacttaacatctaggaaggctgctttagtgtttttctaggccacgggtctgtctggaatggagagccaatggcctcctatagataccaatgtgtcatctagaaaggatatgctggattcagtttgccacatctcactaggccgactttgtaaccttgtttgtcacctgtctacactgcttaagcatttgatattgaatgaataatgtagagttgatgaaaactttaaaattaaacatgttttcagtcacatgtnatttctttgaaactgaggactctgaattttcaacttattgaatctctaataaacactgttactccaat

SEQ ID NO: 11163 - DNA, 398 bp, Bos taurus
  Clone ID: 48-LIB2809-024-Q1-E1-D8
acctggagagattgtggaaagcctttcaagcagtgaggaatctattacacgcatcaataagaaaattgagaagtttcagagtgaggaacagcagcaaacagaggatgaactccaggataaaatccacccctttgcccagacacagtctctagtctatcccttccctgggcccatccctaacagcctcccacaaaacatccctcctcttactcaaacccctgtggtggtgccgcctttccttcagcctgaagtaatgggagtctccaaagtgaaggaggctatggctcctaagcacaaagaaatgcccttccctaaatatccagttgagccctttactgaaagccagagcctgactctcactgatgttgaaaatctgcaccttcctctgcctctgctcc

SEQ ID NO: 11164 - DNA, 444 bp, Bos taurus
  unsure (331): unsure at all n locations; Clone ID: 48-LIB2809-025-Q1-E1-D8
gccatgggcgcgggatacattgaaagttcatcttatctaaattacccaggaatttgtggctaaaatcagtttaccacagataagctatgatgtgtctggttaattagcatttttatcttgaatgtaaattaatgtcataaaactaacaatacatgttttttattttttaaggaaattgttcccaatagtgttgaggtgagatatatctactaaatttaaaatatattaacatcatccaggatatcttaaaatttaattaaactttttattttttgaattttttagcagaagcacattcacaaggaagatgtgccctctgagcgttacctgngttatctggtaaaattttattaaaagttaatcaaagaccaatgtatcagggaatgagcaagaatgttgtattgataaattatctctccttttcaatatctgctaaacttaaag

SEQ ID NO: 11165 - DNA, 333 bp, Bos taurus
  Clone ID: 48-LIB2809-027-Q1-E1-D8
gggataacgccatcctggacctgttcatgcagtcactctttaaacccggggccaggatcaaccaggaccacaagcacaagtatatccacattttggcatatgcagcgagcgtggtggagacctggaagaagaacaagcgtgtcagcattaataaagacgagctgaagtccacgtcaaaagctgttgagactgttcacaacctgtgttgcaacgagaacaagggggcgtcggagctcgtggctgagctgagcaccctttatcagtgcatccggtttccagtggtggccatgggggtgctgaagtgggtggactggactgtgtccgagccgaggt

SEQ ID NO: 11166 - DNA, 205 bp, Bos taurus
  Clone ID: 48-LIB2809-028-Q1-E1-D8
gggataaaaagcagcaaaacgaggtagccacggggcagaggagttccaggaacagaaagaggacagaagcagcaaagacagcaggtgttcacaacttcccacagagccactgatccagcttctcagaacagagtgctttatgggccaaccagtagttaattcctactttatccagagacttcttgacacacataatgtcatcagt

SEQ ID NO: 11167 - DNA, 389 bp, Bos taurus
  Clone ID: 48-LIB2809-029-Q1-E1-D12
acagcaaaaaggcctgaatgggcatatctctctggggatagggcactgctttctggggaacaggcaggactttggactgagaaagggacagcacggactgaggaggaaacatgacagttggaggaagaggctggtgaggctggtgcatccaagactggagcagaggcagaggaaggtgcagattttcaacatcagtgagagtcaggctctggctttcagtaaagggctcaactggatatttagggaagggcatttctttgtgcttaggagccatagcctccttcactttggagactcccattacttcaggctgaaggaaaggcggcaccaccacaggggtttgagtaagaggagggatgttttgtgggaggctgttacggatgggccca

SEQ ID NO: 11168 - DNA, 448 bp, Bos taurus
  unsure (425): unsure at all n locations; Clone ID: 48-LIB2809-029-Q1-E1-D8
acagcagaaaggcctgaatgggcatatctctctggggatagggcactgctttctggggaacaggcaggactttggactgagaaagggacagcacggactgaggaggaaacatgacagttggaggaagaggctggtgaggctggtgcatccaagactggagcagaggcagaggaaggtgcagattttcaacatcagtgagagtcaggctctggctttcagtaaagggctcaactggatatttagggaggggcatttctttgtgcttaggagccatagcctccttcactttggagactcccattacttcaggctgaaggaaaggcggcaccaccacaggggtttgagtaagaggagggatgttttgtgggaagctgttagggatgggcccagggaacggatagactagagactgtgtctgggcaaangggtggattttatcctggagttc

SEQ ID NO: 11169 - DNA, 428 bp, Bos taurus
  Clone ID: 48-LIB2809-030-Q1-E1-D8
ctcccaggcgccatgggcccgggatacccaacactctgtgatcctatggatatagccctccaggctcctttgttcatggaattctcaaggtaagaatactagagtgggttgccatgccctcctccaggggactttcccaacccagtgatcaagcctgagtctcctgcattggtagaggggttccttaccactagcaccacctgggaagccccatttgttttctgatttttgcaaattaaatcagaatattggatgaagggaaaaatgatgtttctgatactagccacatttaccgagggcttacttcgcaattcaaaatggctcagacggtaaaccgtctgtctacagtgcgagagacctgggttcgatccctgggttgggaaaatcctctgcagaaggaaatgttgcctggaaaatcccatggacag

SEQ ID NO: 11170 - DNA, 404 bp, Bos taurus
  Clone ID: 48-LIB2809-031-Q1-E1-D12
acagcaaaaaggcctgaatgggcatatctctctggggatagggcactgctttctggggaacaggcaggactttggactgagaaagggacagcacggactgaggaggaaacatgacagttggaggaagaggctggtgaggctggtgcatccaagactggagcagaggcagaggaaggtgcagattttcaacatcagtgagagtcaggctctggctttcagtaaagggctcaactggatatttagggaagggcatttctttgtgcttaggagccatagcctccttcactttggagactcccattacttcaggctgaaggaaaggcggcaccaccacaggggtttgagtaagaggagggatgttttgtgggaggctgttacggatgggcccagggaagggatagact

SEQ ID NO: 11171 - DNA, 388 bp, Bos taurus
  Clone ID: 48-LIB2809-032-Q1-E1-D8
gccatgggcccgggatacatgatatttgtttcaaggtcaaaggttccgttacagttactatgatgaatcccagggggagatttatagatccattgaacatctatataacatgggtatgagtattagagaacaattatcatcccgtagctcttaacaattacttgtagaaatagcatacaactatatgtggtagacatcccactggggtgttaatacatgctatcactgaactgcacacaaatgggatgactatgaccttttcctttttgaattatgcccagtccagccagtgtagaaactggcaacacagttcagtgagttatgcatctggagcactcaaggttcactgaagctctgaatcctcaggaatgccatcagcacatactca

SEQ ID NO: 11172 - DNA, 402 bp, Bos taurus
  Clone ID: 48-LIB3057-001-Q1-K1-D12
aacagatattaaactttttgacatattttcacagcaggtggctacagtaatacagtctagacaagacatgccttcggaggatgttgtatctttacaagtctctctcattaatctcgctatgaagtgttatcctgatcgtgtggactatgttgataaagttctagaaacaacagtggagatatttaataagcttaaccttgaacatattgctaccagtagtgcagtttcaaaggagctcaccagacttttgaagattcctgttgacacttacaacaatattttaacagtcttgaaattaaaacatttccacccactctttgagtattttgactatgagtccagaaagagcatgagttgttacgtgcttagtaatgttctagattataatacagaaattgtctc

SEQ ID NO: 11173 - DNA, 390 bp, Bos taurus
  Clone ID: 48-LIB3057-001-Q1-K1-D8
tcgcgcagctagaaatgctcaagaaccttctggaccaggaagtggagttcttgtccacgtccattgcccagctcaaggtggttcagaccaagtatgtggaagccaaggactgtctgaacgtgctgaagaaaaacaacgaggggaaagaattacttgtcccactgacgagttctatgtatgtccccgggaagctacatgatgtggaacatgtgcttatcgatgtgggaactggctactacgtagagaagacagctgaggatgccaaggacttcttcaagaggaagatagacttccttaccaagcaaatggaaaaaatccagccagctctgcaagagaagcacgccatgaaacaggctgtcatggatatgatgagccagaagattcagcagc

SEQ ID NO: 11174 - DNA, 373 bp, Bos taurus
  Clone ID: 48-LIB3057-003-Q1-K1-D12
ggcaagtgtcgcggtcttcgtactgccaggaagctccgtagccaccgacgagaccggaagtggcatgataagcagtacaagaaagcccatctgggcacagccctgaaggccaacccttttggcggcgcttctcacgctaagggaattgtgctggaaaaagtaggagttgaagccaaacagccaaattctgccatcaggaagtgtgtcagggttcagctaatcaagaatggcaaaaagatcactgcttttgttcccaatgatggttgcttgaattttattgaggaaaatgatgaagttctggttgctggatttggtcgcaaaggtcatgctgttggtgacattcctggagtccgctttaaggttgtcaaagtag

SEQ ID NO: 11175 - DNA, 453 bp, Bos taurus
  Clone ID: 48-LIB3057-005-Q1-K1-D8
gtttcttgaaatcatcaccaccatagacagctgatgttcgtcacagaaagcttccctccgggtggtgctgctgctggtgtcaaatctactcttgtgccaaggtgtgccctacagatgactctgtcccaatggtcctggcaactgccatgcatgccttcaagacctgtatgaccgaccattcatggtatgccactacatccatgacctctgctaacaaaagtgaaacgaatgagattaacaccatgcccaagacttaggccatattgacatgggccataacagcttacatacctactcccttactactcctgacgataaagaccatgttcaacagacctaccatgaagtacttatgagcttgattctagagtaactgcgctcctgccatgaccatctctatcacctagtaaccgaggaacagggtataaacagacccccagatgcttttctata

SEQ ID NO: 11176 - DNA, 420 bp, Bos taurus
  Clone ID: 48-LIB3057-007-Q1-K1-D12
cttatgggagtcgaggaccaatgtggcaattacactgcttgaagctggtcttgcaaaacttcatacatcctttggcagtgatagaattcctgattttcatcttctggatcaggctgaacaatctgctaagaggcaaaagctgaaaatctgggagaattttgttgaaggagaggaagtatctaatggtgcagcagttgaaaacaaacagcaagaagtacttaaggtaattgttacagaagtcttgggtggtggtaaattctatgtccagacagttggagatcaaaagatcgcatccattcagcaacaacttgcttctttgaacctgaacgatgctcctgtgcttggtgctttcaatcctaagaagggtgacatagtcctttgttattttcatgctgacaagtcttggtaccgggcaatggt

SEQ ID NO: 11177 - DNA, 405 bp, Bos taurus
  Clone ID: 48-LIB3057-007-Q1-K1-D8
gtttgccgccgggacacaggtgtcgttaaaaccaccgttaaacctaagccgggatgtgaaagtagaagacccgacatcaacatcgttgtcattgggcacgtagattcagggaagtctaccacgactggccatctgatctataaatgtggcgggatcgacaagagaacaattgaaaagttcgagaaggaggctgccgagatgggaaagggctccttcaaatatgcctgggtcttggacaaacttaaagctgaacgtgagcgtggtatcaccattgatatctccctgtggaaatttgagaccagcaagtactatgttaccatcattgatgccccaggacacagagacttcatcaaaaacatgattacaggcacatcccaggctgactgtgctgtcctgatcgttgct

SEQ ID NO: 11178 - DNA, 396 bp, Bos taurus
  Clone ID: 48-LIB3057-008-Q1-K1-D12
cggggttctggactggggcggcggcgctggccaccgcgggacggcgcggacggcggtggccgaagcttttgatgcggagcgtggcgctgtggaccgtgaagcatgttccacattattcaagacggtacttagtggtgtctcgtactctctgttcagctggatatgattctaatgaaaaaacttttgataaaattcttattgctaatagaggagaaattgcgtgtcgggttattaaaacttgcaagaagatgggcattaagacggttgccatccacagtgatgtcgatgctagttctgttcacgtgaagatggcggacgaggctgtctgcgtcggcccagctcccaccagtaagagctacctcaacatgaatgccatcatggacgccgtcaggagca

SEQ ID NO: 11179 - DNA, 415 bp, Bos taurus
  Clone ID: 48-LIB3057-008-Q1-K1-D8
gtccttgccttggactaagctggtttgctgccagagtgttcggcatcttgatcggggggatgtgaaagaatcacagatgtagctctagagaagatttctagagctcttggaattttgacaactcatgagagtggccttttaaaaacttctacaagcaaagttacttcgactacgtggaaaaataaagacattaccatgcagtctttcaagcaatctgcttgtttgcatgatgtaactaacaaggatattggagaagaagtagataatgaacacccctggactaagcctatttcttctgacgatttcacttcaccttatgtgtggatgttagatgctgaagatttggctgatattgaagatgctgtagaatggagacatagaaatgttgaaagtctttgtgtaatggaaacagctt

SEQ ID NO: 11180 - DNA, 396 bp, Bos taurus
  Clone ID: 48-LIB3057-009-Q1-K1-D12
atcgcgagcggccgccctttttttttttttttaagagctcctgacgccattgcgtaggactggccctaaaaccgtgatctcggagcgcctctctcagagcttacttccgctctcttcaagttaggaatcgggctcagcctccactttcctcaggcggcagcggcagcggttcgcgatgttcggcctcaagagaaacgcagtaatcggactaaacctctattgtgggggagccggattaggacagggcagcggcgcctcctctccgggggggcggcttttggctgcggggaaggaggccacggcgcggcgagaggtaaggggaggggaagccggcacggtgattggcggaagcgccggcccgagccccccggccactcttgcgcccgacgcccggag

SEQ ID NO: 11181 - DNA, 433 bp, Bos taurus
  Clone ID: 48-LIB3057-009-Q1-K1-D8
aaacggtatgcccagggcaaagggttcattaccatggccctcaacagctgccatacctcctcccttcctacccctgaagataaagaacaagcccaacagacccaccatgaagtccttatgagcttgattcttgggttgctgcgctcctggaatgaccctctctatcacctagtcaccgaggtgcggggtatgaaaggagccccagatgctatcctatcgagggccatagagattgaggaagaaaacaaacgacttctggaaggcatggagatgatatttggccaggttattcctggagccaaagagactgagccctaccctgtgtggtcaggactcccgtccctgcaaactaaggatgaagatgcacgttattccgctttttataacctgctccactgcctgcgcagggattcaagcaagattgacacttacc

SEQ ID NO: 11182 - DNA, 431 bp, Bos taurus
  Clone ID: 48-LIB3057-010-Q1-K1-D8
caggacaagactcgactggggaaccagaacgcagctctggccgtgcaggccgtgcgcaccgtccggggcaacagcttctgtattgactgcgatgcccccaatccagactgggccagcctgaacctgggcgcactcatgtgcatcgagtgctccgggacgcaccggcatctgggagctcacctttcccgggtccgctccctcgacctagacgactggccacccgagctgctggccgtcatgacggccatgggcaacgccctggccaacagcgtctgggagggggccctggacggctatgctaaacccgggcccgaggcctgcagagaggagaaggagcgctggatccgggccaagtacgagcagaagctcttcctggccccgctgcccagcttggacgtgcctctgggccagcagctgctccgggcggtggt

SEQ ID NO: 11183 - DNA, 388 bp, Bos taurus
  unsure (280): unsure at all n locations; Clone ID: 48-LIB3057-011-Q1-K1-D8
gtcatgtaaatcccctggaggaggaaatagcaacccactccagtattcttgccaggagaatcccatgggcagaggagcctggcagggtgcagtccatgcatagggttgcaaagagtcagacaagacttgagctactaaacaataacaacaataaatgctgggttggctaaaaggttcattaagttttttttctgtaagatggctgtctttaacttcattcgaaacaattttgttagattgtatgtgacagctcttgtatcagcatgcatttgaaaaaganaacaacttaccaaaattggtgaatttttgtatagccattttactattgaagatggaagaaaagaagcaaaattttcagcatatcatgctgtattatttcaagaaagga

SEQ ID NO: 11184 - DNA, 328 bp, Bos taurus
  Clone ID: 48-LIB3057-012-Q1-K1-D12
taccacactcgttcgatggtttagcaccatgcgccacccataacctgcgaaacgtatacctgcaagcgagcgaggaggcttttcggtagcgatggcactcctgggacaaggctctcttggcatatgactgccatcgcaaagcaccgccagtatgcacaatgcctgtgcctctgctacaccagctaagtgacgccgacaccaactgactttaactagttatgctacgacactagatgcttgagatagcttcacaagtgctcacatctgtctgtgaccactacacttatgcatacaggatatagctatgtcatctaagctgtagcgcatg

SEQ ID NO: 11185 - DNA, 432 bp, Bos taurus
  Clone ID: 48-LIB3057-013-Q1-K1-D12
gaatcgatccttttccactacatggactggttagatgatcagagagctgaaaagtaccgtgaggccttggatgatgttgttggggattataatatcatatgtcctgctttggagttcaccaaaaagttctcagatatgggaaacaatgcctttttctactacttcgagcaccgatcctccaaactcccttggccagaatggatgggagtgatgcatggttatgagatcgaatttgtttttggtttgccactggaaagaagagttaattacacaaaagctgaggaaatttttagtagatccattatgaaacgttgggcaaattttgcaaaatatggaaatccgaatgggacccagaacaatagtacaagatggcctgtcttcaaaagcaatgaacaaaagtatttcaccttaaatacagagtcaccaaaagta

SEQ ID NO: 11186 - DNA, 442 bp, Bos taurus
  Clone ID: 48-LIB3057-013-Q1-K1-D8
gtgtcccgggacgaagggctctccgcactcggaccccggtcccgacgcgcggcgggggggcgccgcgccgcgccccgggggacgcgggcgacggcccgccggcggggacggcgggggaccggctatccgaggccaaccgaggctcccgcggcgctgccgtatcgttccgcctgggcgggattctgacttagaggcgttcagtcataatcccacagatggtagcttcgccccattggctcctcagccaagcacatacaccaaatgtctgaacctgcggttcctctcgtactgagcaggattaccatggcaacaacacatcatcagtagggtaaaactaacctgtctcacgacggtctaaacccagctcacgttccctattagtgggtgaacaatccaacgcttggtgaattctgcttcacaatgataggaagagccgacttcg

SEQ ID NO: 11187 - DNA, 400 bp, Bos taurus
  Clone ID: 48-LIB3057-016-Q1-K1-D12
cggacgcgtgggttttggtgtggtcaggcctctggttgctagatttctgcctgggtcgggcattatttcccgcctggggatggcgacctacacctgcaacacctgccgggcggtgttggaagatgcggaggcgcagcgggtccactacaagacggactggcaccgctacaacctgaggcgcaaagtggccggcatggcccccgtcagcctcgagggcttccaggagcgggtgcgggcacagcgggccctggcggagccagagagcaaaggcgcggccacctactgcaccgtctgcagtaagaaggttgcttccttcaaggcctaccaaaaccaccttaagtcccggcggcacgtggagctcgagaagcaggcggtgagtcggaaagtggcactcatgaac

SEQ ID NO: 11188 - DNA, 423 bp, Bos taurus
  Clone ID: 48-LIB3057-016-Q1-K1-D8
caacgctgtatctgagcgctcaaccagcggcggcgacgtgcccgagcgcgagctgtaggtgcgctggctggaagtggccgccttcatgccagctatgcagttctccgttccgccctggcggtacgacgctgaagtggtggccattgcgcacaagttcacggcgctgagggcctcgctcgtggcgccactgttgttggaactggcgggtgaggtcactgacacgggcgaccccatcgtgcgccccctctggtggatcgcgcccggcgatgagacggcgcaccgcatcgactcacagtttcttatcggagacacgctgctcgtggcacccgtactggagccgggcaagcaggagcgggacgtctacctgcctgcaggcaagtggcgcagctataaaggtgagctttttgacaagacaccagtgct

SEQ ID NO: 11189 - DNA, 366 bp, Bos taurus
  unsure (362): unsure at all n locations; Clone ID: 48-LIB3057-017-Q1-K1-D8
tttggctccaggaataacctggccaaatagactgagccctacgctgtgtggtcaggacggccgtccctgcaaactaaggatgaagatgcacgttattccgctttttataacctgctccactgcctgcgcagggattcaagcaagattgacacttaccttaagctcctgaattgcagaatcatctacaacaacaactgctaagcccacattcatcctatccatttctgagatggttcttaatgatccattccctggcaaacttctctgagctttatagctttgtaatgcatgcttggctctaatgggtttcatcttaaattaaaacagagtctgtagcgttgtctaaagaattgattttattntaaa

SEQ ID NO: 11190 - DNA, 362 bp, Bos taurus
  Clone ID: 48-LIB3057-018-Q1-K1-D8
tttttactttagaaaaataaatgcagtgcattttcagcaatatgatcgccacagagtctggttgctcagtccacacgtaagtagtagccgccttctatggtgatatggcttctctgcactaattcccatcaggccgaaaaacattagggcgggttaagtaaagaccgaattgttgcacaaaggaacatttactcatcagatcccactgatctcttctgtgcccgtttcctgggcaaccttcttggtgaagctttattgatctggttcagagtttcctgaggaatccagctcatgtcgacgtctgtttgactcgaggttcccatcttctaccttttgaatgtgctttttgctctttctagatt

SEQ ID NO: 11191 - DNA, 381 bp, Bos taurus
  Clone ID: 48-LIB3057-019-Q1-K1-D12
cgaacattctaaggtcatttggcacttgaagcaaatgggaaaagtgaaaaagctcaataagtgagtgcctcaatagctgaccacaaatcaaaagtatcttctttttgaagtgtcttctcttattctatgcaacagcaatgaaccatttgtcatttagattgtgatgtgcaatgaaaaggggtttttatatgacaaccagtgatgcctagctcagtggttggaccaagaagaagctccaaagtacttcccaaagcaaacatgtaccaaaaaaaggtcatggtttggtgacatgctgccagtctcatccactatagctttctgtgtgcacgctaaagtgcttcagtcatgtctgactctttgcaaccccgtggactgtagcac

SEQ ID NO: 11192 - DNA, 432 bp, Bos taurus
  unsure (299): unsure at all n locations; Clone ID: 48-LIB3057-020-Q1-K1-D8
taatgaagatgctctttgagtgttcagatgaacggattgacttggaactcatttctttgtgcattaatcttgctgctaacaaaaggaatgtacagcttatctgtgaaggaaacgggctgaagatgctcatgaagagggctctgaagttcaaggatccattgctgatgaaaatgattaggaacatttcccagcatgatggaccaactaaaaatttatttattgattatgttggggaccttgctgctcagatctctaatgatgaagaagaggagtttgtgattgagtgtttaagaactctngcaaatttgaccattccagacttagactgggaattggttcttaaggagtataagctcgttccatacctcaaggataaactaaaaccaggtgctgcagaagatgaccttgttttagaagtggttataatgattg

SEQ ID NO: 11193 - DNA, 425 bp, Bos taurus
  Clone ID: 48-LIB3057-022-Q1-K1-D8
gttctagatcgcgagcggccgctcgcggacgcgtgggcggacgcgtgggcggggcggcgggatggccgtgcaaatttccaaaaagaggaagtttgtcgctgatggcatcttcaaagctgaactgaacgagtttctcactcgggagctggctgaagatgggtactctggagttgaggtccgagttacaccaaccaggacagaaatcattatcttggccaccaggacacagaatgtacttggtgagaagggccggcggatccgggaattgactgctgtggttcagaagagatttggcttccctgaaggcagtgtagagctttatgctgaaaaggtagccacaagaggactgtgtgccattgcccaggcagagtctctgcgttacaaactcctaggaggccttgctgtgcggagggcctgctatggtg

SEQ ID NO: 11194 - DNA, 454 bp, Bos taurus
  Clone ID: 48-LIB3057-023-Q1-K1-D8
cattattctaattatttttatttttatttacttttatttaactttatatatggaagtagttttatattcaaaagggattgcgaaaatagtaaaaagaattcctgtgtgcccttcattcatgttccctttatggtaacatcctatataaccataatacatattatcaaaatttagaaattaacattaatagaatactattaattagactatagactgtattcagatgtcattagttactgcatgcactcatttctctctctctgtgcaagttctttgaaatgatgttacatatatggattgttataacaaccactgctataaatatactgtttcatcacctcaatagaactctatcacacacatcactttttaaccctaacccactaccatccctagactctggtaatctgtttttcatctctacattttgttcatgtatattatattatataaa

SEQ ID NO: 11195 - DNA, 428 bp, Bos taurus
  Clone ID: 48-LIB3057-024-Q1-K1-D8
tcccggtcgacctacgcgtccgctggtattataaaatttgtgaataaaaccagcgacacatttcaaaaccatttatgaaagtcagaccactcagttttacactagacagaaaccgcctctaaacaatatattggtggttgttgttaaagtggccttttaaaaggggttcactctgctaaaaggaggctgatcctgatcatttcaatcactaactagaaaaatatctaatccgtttgtacaagtcttttaatattacttatttcgtattactttttaagcttttaattcttttttctattttcttatttaataattttatatttttttggggggtgttttttttttatgtttttattttattaaatgtttttatttattttttttattttttttttttatttttacttttttttatatttttttttttt

SEQ ID NO: 11196 - DNA, 394 bp, Bos taurus
  Clone ID: 48-LIB3058-002-Q1-K1-D8
aacataacaaaaatcagaaacaaaaaaaaaagcaaaagcacaaaaaagataactagaattctgacttaaaagcaaaacaaacataaggcggcacactgtagctgctccccactggcttttcaacgcttgcgcgatgaccaattgtgtgtatcatcggctactctcatactacggggcattactatcgaagcgcggtcctgagaaaactatgacttacctgacttacgacggtttaatccaaactcacgtttcctatgctggggtgatcactacaacacttgctgcattctgctttacaatgattggaacagcctacatggaaagtggaacgcgccctgtagctgtgcattattggctgccgctagccaggtatccctcagggtacccgtatgac

SEQ ID NO: 11197 - DNA, 371 bp, Bos taurus
  unsure (333),(354): unsure at all n locations; Clone ID: 48-LIB3058-003-Q1-K1-D12
cttgtccgtaccagttctgagtcggttgttcgacgcccggggaaggcccccgagggggccgttcccggtccgtcccccggccggcacgcggcggcccgctctcgccgcgcgagcagctcgagcattccgccagcagccgacgggttcggggccgggacccccgagcccaaccctcagagccaatccttttcccgaagttacggatccgttttgccgacttcccttgcctacattgttccattggccagaggctgttcaccttggagacctgatgcggttatgagtacgaccgggcgtggacggtattcggtccttcggattttcaagggccgncgggggcgcaccggacaccgngcgatgtgcggtgctct

SEQ ID NO: 11198 - DNA, 447 bp, Bos taurus
  Clone ID: 48-LIB3058-004-Q1-K1-D8
gcggccgccctttttttttttttgtaaagtaggtattcaattctcttgtatgactataaccacagtttatttatccattcaccactgaaggatgtttgggttgtttcagtttttatgatgatgagtaaagttattgtaaatatttgcataaaggtttttgtgtgaacacaagtttttgtttctgtcaggtaaaaatctaggagtagaattgctagatcatatgctgagtatatattcaattttaccagaaactgccaaactggttcgcagaagggctgtatcatttttgcatgtctgccaagaggcggacacaactgagtgactgaacaacaacagctagcagtgtatgaagctccagatgcttatcatcctcactatgtatttggtattatcactgtttctaaattttagctattctgttaaatagatgttagtggtatccgttct

SEQ ID NO: 11199 - DNA, 406 bp, Bos taurus
  unsure (375): unsure at all n locations; Clone ID: 48-LIB3058-005-Q1-K1-D12
cggacgcgtgggtggataccgagccggagcccgagcgggagtcggggccggggccaggccggaacgggctccaacgaaatggggtcggccgactccaagctgaacttccgaaaggcggtgatccagctcaccaccaagacgcagcctgtggaagccaccgatgacgccttctgggaccagttctgggcagatactgccacctcggtgcaggatgtctttgcgctggtgccagcagcggagatccgggcggtgcgagaggagtcaccctccaacctagccactctgtgctacaaggcagtcgagaagctggtgcagggagccgagagcggctgccactcggagaaggagaggcagatcgtgctgaactgcagccgnctgctcacccgcgtgctgccctacatcttcg

SEQ ID NO: 11200 - DNA, 426 bp, Bos taurus
  Clone ID: 48-LIB3058-005-Q1-K1-D8
aaccttacatatcatagtgaatggtttccccagtgtatatgaatgttttaagtgtctccaatagcttacacagtttaggagctttccaatactcatttaataaggtttaatcatttgctaatggaaattttaccacttcccattttccttgttaccaaatttcagctctcaggagctgttctgcaattctgaaattgcttttcttgcctctttagtcacctgtcacaggaggttcttgctcagtaatgatatggtgagttagattaataacttttttttgcacttcagatttagaagaaacgatcctgtttccatttgaaaggaactgtaaagcttttttatcatttaaccaactgaacaacacaccaaaagcagcctagggatgagcacttctttgaaagccattaggttattcacctggtatta

SEQ ID NO: 11201 - DNA, 377 bp, Bos taurus
  Clone ID: 48-LIB3058-006-Q1-K1-D8
gccggagcaagatggtgcctatgtggaagtgatttgagggggcttagagggccctctcggagaaggcaacggcacccactccagtcctctcgcctggaaaatcccatggacagaggagcccgggtcaaagtcagagtggtggccacggtcctggaggcggcaagaaggacgataaggacaagaaaaagaaatatgaacctcctgtaccaactcgagttgggaaaaagaagaataagacaaagggaccagatgctgtcagcaaactgcccctggtgacgcctcacactcagtgccggttaaaactgctgaagctagagagaattaaagactatctcctcatggaggaggagttcattagaaaccaggagcagatgaag

SEQ ID NO: 11202 - DNA, 326 bp, Bos taurus
  Clone ID: 48-LIB3058-007-Q1-K1-D8
tcgataacaatttactgataaatcgataattaagtactaaaatgtaaaccgaatataataggcaatataagaaatacactataatctaaaaacatacttaacataaaaacaatataattatagatatttcaaaccaaaataaaagtaataaactagattgcaacattattatggacctattatcaaaaggtttgcttctataatgtgaacttttatattttattatcttatttacattaagtggactaactttaattgtgttatccttgtaaaaactttatattagcctacactacacatactacagtgatccacattttcactat

SEQ ID NO: 11203 - DNA, 314 bp, Bos taurus
  Clone ID: 48-LIB3058-008-Q1-K1-D8
cggccgccctttttttttttttaattttttttttatttatttttttttttttttttattttattttttttttatatttttattattattattaaaaaaaaaataaaaaagttattataaaaaaataaaaaaaaaaagtaaagaatataggataaaactaaactttagacaaaaaaactaatgtgaccaaaaaggatggcttattaaaataaatactttcagtaaatgaacaatagctaatatttataggattgaaatgataaacacacagatccaggagagatataacatgagagtataatagggaattaaaat

SEQ ID NO: 11204 - DNA, 433 bp, Bos taurus
  Clone ID: 48-LIB3058-010-Q1-K1-D8
ggaactttctcagcaacagcctcacgctggccattgccgcattgaggtttccagagaagagatttttgaggaatcatatcgacaagtcatgacaatgagaccaaaagatctctggaagctgattaatgataaaatttcgtgacgaagaaggccttgactatggaggggttgccagggagtggttatatctcttgtcacatgaaatgctgaatccttattatgggctcttccagtattcaagaaatgatactctatacattgcagatcactcctgattctgcagttaatccggaacatttatcatacttacactatgttggacgaataatgtgaatggctgtgtttcatggacattatatagatggtggttccacgttgccgagctataagcagttgcttgggaagtacattactacggatgacatggaattag

SEQ ID NO: 11205 - DNA, 424 bp, Bos taurus
  Clone ID: 48-LIB3058-011-Q1-K1-D8
gcttgtcccacttcctggaatggggacctccagtgacccacccttcaagactccctccttttcccttggtagacaggccaatgtcctaccttctctctacagcagacatgaagatgacccaaaaaagtttcaattttgccaggaagttctccttgcccctgtactttgtctcagctgctgatggtaccaacgttgtgaagctcttcagtgatgcgatccgactagctgtgtcttacaaacagaactcccgggacttcatggatgaggtgttgcaggagctcgagaacatcgacttgaagcgggaggaggaggaagaggaggagatgctggacaaggagcagccgggccgacagcagagcccgtctccctagtgagcacaggaggactcttcacggcccacctacctcggcagtgcttcagctct

SEQ ID NO: 11206 - DNA, 383 bp, Bos taurus
  Clone ID: 48-LIB3058-012-Q1-K1-D12
gccagagccccgagtccctgggccctcttcaaaggaaaaagaggctcaggtcatgacttcatgaacagcgagtgaccaggctggtgtggcggggtggagccccccacccacccactgcctgcccgtgtcctctcccccacgtctggggctgggaacctaagctcccttccccatcatagtcccctcccctgaaaaccccctttggagagttaattgtctgtgtgaggtgcttaacctattagccctgagaacacaaagcaataatctttgttactgagatgcgcggctgttcgtggttttttttttttaatgtttcctaataaaagagaagctgcattttattggtttttatttttaattttctacacacttgagctgagtct

SEQ ID NO: 11207 - DNA, 410 bp, Bos taurus
  Clone ID: 48-LIB3058-012-Q1-K1-D8
cgcgagcggccgccctttttttttgtttttttttttttttttaggagcctcatcaatggatagaaacatagaggaaaagtcagactacgtctacgaaatgtcagtatcaggcagcggcttcaaagccgaagtggtggttagaagtaaaatgaaattttaattggcggaagaagcagacaataagggtcccctgtctgcttgggtgacagaatttctggaggctgtttgttgtctcattatggttttaggattgaaagtgagaagatacttagaataataaagctagaccctctggacgcaggttttcctgggaaatacttcatcccaggtggcagtaagtaactagatgcacaggtatgatacgcagccttaggaggaatatgtctcacataaaatgactggaaagaaga

SEQ ID NO: 11208 - DNA, 323 bp, Bos taurus
  Clone ID: 48-LIB3058-015-Q1-K1-D8
gcgcctgaggagaagtgccacgttaggaattggaggtcgaaagggcacttggcacccttgatgcgacccacaaagttctccgaaatcccggtctccctcgagaggaacaccgaggttttccggcacccacacctctgagccctttatccccttctgatctggacaagaaggtagactcccctgctttgtctggaaggggttcccgaccttccggtcgcacctcaggatgaggccggtctcacgaagacatttcagacgtggccccgtgggtggttccacatttcgtgggaacccgatttcccggatcccttttgataagaacc

SEQ ID NO: 11209 - DNA, 181 bp, Bos taurus
  Clone ID: 48-LIB3058-016-Q1-K1-D8
caatcgcaagccagaagatgaaggttcctggggttggcgtggtggtcgcgcttctggcaggatgccaggcggatatggggggagagctggggcccgaagagcccctgactacgcagcagccccgggggaaggacaggcagccttgggaacaagcgcttgggcggttctgggattacctggg

SEQ ID NO: 11210 - DNA, 359 bp, Bos taurus
  Clone ID: 48-LIB3058-017-Q1-K1-D12
gtgcaggctcgcggacctttgtgcaggaggacatttacgccgagtttgtggaacggagtgttgcccgggccaagtctagtgtggttgggaacccctttgacagccggactgagcaggggccgcatgtggatgaaacgcagtttaagaaggtccttggctatatcaaatctgggaaggacgagggggcgaagctgctgtgtggtggaggggcggctgctgaccgtggctacttcatccagcccactgtgtttggagacgtgcaagatggcatgaccatcgcagaggatgagatctttgggccagtgatgcatattctgaagttcaagagcatggaggaagtctgtgggagagccaacaat

SEQ ID NO: 11211 - DNA, 433 bp, Bos taurus
  Clone ID: 48-LIB3058-018-Q1-K1-D8
ggtgtatctggtgattgtaaaaatattagacagatataaaagcatatatattaactggtaatgctgaggtatatagtctgtgaattatgtgttttgtacttctattcattgtgtaatttagtgatggtggagaagatctacacccaatccttaagagtggcagtatcccttttacgatttaacatgatctgcatcaatttgtttgcttgctgaagttttgttagaataggaaatagtaaaacaaatattaaaaagagagtgtagtgctggttagggaaacagacttcaagtcactgactgaagtcacgcgaactccttgtacattcactgtgagtttcaaagggaatcggtccctaatttcctttgttcactttccggatatggacttttaagagagatctaaggttaagtgacattacagcacccaacactg

SEQ ID NO: 11212 - DNA, 266 bp, Bos taurus
  Clone ID: 48-LIB3058-019-Q1-K1-D8
cgcgtcacgcgtccgatcgctagcggcctcacacctcatgttggcttttagaaccatctatacctaatcagaggcgggggtgccatctgtgctgtagattcacacagctcacatcgcttgcaagttgaatgagcatcaggacatgcagtgatcgacgttactagacaaaatcttaaaaattttcctaaattgttgaaatctggtgacgatgccatcgtcgatatggcttctggcttgcccatgtgtatcgagagcttctctgatta

SEQ ID NO: 11213 - DNA, 421 bp, Bos taurus
  Clone ID: 48-LIB3058-020-Q1-K1-D12
gcgaacataacttatgtagaattagtatcaagaatgcataacctgaatctaatcataagcaaatatcagaaaaactcaaggaacactctaactttaaaaaaaaaaaaaaaaaaaggttattctatttaccaacatcataaaagacaaaggaagaaggtagaaatattctagacctaaaaaaactaaagagggcttccctggtggctcagaagtaaagaatccgcctgccaaagctggagacacgggttcaaggcctggctgggaagattccacatgccacacggcaactaagccctggtgccgcagctaccaagcctgtgctccagaacccgggagccgcgaacactgaagcctgcgtgcccagcgcccgtgctccacaacagaagccagcgcaactggaagcccgagcaccgtaactaga

SEQ ID NO: 11214 - DNA, 336 bp, Bos taurus
  unsure (269): unsure at all n locations; Clone ID: 48-LIB3058-021-Q1-K1-D8
ggtttttcctgtggtcatgtatggatgtgagagttggactgtgaagaaggctgagtgccgaagaattgatgcttttgaactgtggtgttggagaagactcttgagagtacctaggactgcaaggagatccaaccagtccattctgaaggagatcagccctgggatttctttggaaggaatgatgctgaagctgaaattccagtactttggccacctcatgcgaagagttgacttattggaaaagactctgatgctgggagggatccggngcaggaggagaaggggacgacagaggatgagatggctggatggcatcaccgacctgatagacgtgag

SEQ ID NO: 11215 - DNA, 327 bp, Bos taurus
  Clone ID: 48-LIB3058-022-Q1-K1-D8
cggactcgtgggcgcgagcggtcgtcctttttttttttgaatcatcaatgagccaactgctgctggtattgcctatggcttagacaaaaaggttgtagcaaaaagaaacgtgctgatctttgaattaaggggtggcactgtcgatgtgtcaatcctcactattgacgatggaatctttgaggtcaaatctacagctggagatactcacttgggtggagaagactttgactaccgcatggttaacaattttattgcggagttcaagcgttaacacaagaaggatatcagtgaaaacgtgatggctgtacgtcgtcttcaaactgtttg

SEQ ID NO: 11216 - DNA, 418 bp, Bos taurus
  Clone ID: 48-LIB3058-023-Q1-K1-D8
aaatggcaacccactccagtgttcttgcctggagaatcccagggacgggggagcctggtgggctgccgtctatggagtcgcacagagtcggacacgactgaagcgacttagcagcagcagcagcagtgccccaaccagggaggggtggaactcaggcccctgaagtggaagttcagaatcctaaccactggactaccagggaattccctcatttgtttaacattttacacttgagaagcagcaatggtgagatgtatactgcacagctgtgtgggccctgacataggctgacaggataaggaggagggacctgtggaagctccccagctatccctcccaacccaacctaaggagataatcttgccattggcagaagggccccccctttccctccaccctagtgagagccattctgttg

SEQ ID NO: 11217 - DNA, 366 bp, Bos taurus
  Clone ID: 48-LIB3058-024-Q1-K1-D8
gtgactagcggcctcgctttgactacgtgaccgaggctcgcagcctgtagctctatggacctgtacctactacagctcgaccttcgagccgtctactcgattctaatctacgaggccggcttatacatcatactcgtctggacggcggtctacatacagtactgctccagagtcatggtggtgctcgcaggtgtgctgccgctgtgagtgcttgtgacgcacctgatgtacatccatgattactggaagacgtagctcatggagctgctcggcttattcttccagggcgttctctactcgtacgtctctgtcgacacgttatgcaccttattgctgctgaccatcactgtacaccagatcctcaca

SEQ ID NO: 11218 - DNA, 424 bp, Bos taurus
  Clone ID: 48-LIB3058-026-Q1-K1-D12
tcggcgagcggtcgccctttttttttttttttttttttttttttttttttttttttttttggttttttttttttttttttttttttttttttttttttttaaattaaaaataaaaaaataaaaaaaaaaaaataaaaaaaaaaaaaaaataaaaaaaataaaaaaaatttaaaaataaaataaattaaaattttaaatatttgtttaaaaatataaaaaaaaatattataaggaaatttaaaaaaaataaaaaagagatattttaagaaaaaaaaaaaatgaaaatttaaaaaagaattaagttatattaaaaaaaaaaagatataaaaatttaaaaaataaaagaaataaaaaaaggaaaaaatagagggaattatatattagggaaaaaaatattatataaaagtaaaaatttaaaggaaaa

SEQ ID NO: 11219 - DNA, 396 bp, Bos taurus
  Clone ID: 48-LIB3058-027-Q1-K1-D8
ggatgccactccttttgaatcccaagttgctcagtctggagtatcccaggaataacagggaatatgtgagagatattggagagggagcatttggaagggtctttcaagcaagggctccaggcttacttccctatgaacctttcacaatggtggccgtgaagatgctcaaagaagaagcctcagcagatatgcaagcagactttcagagggaggcagccctcatggcagaatttgataatcctaatattgtgaaactcttaggagtgtgtgcggtggggaagcccatgtgcttgctctttgaatacatggcctacggggacctcaatgagttcctccgcagcatggccccgcaccccggacgcggcctcagtcccagcgacctgccccccggctcac

SEQ ID NO: 11220 - DNA, 276 bp, Bos taurus
  Clone ID: 48-LIB3058-028-Q1-K1-D8
ctcaaaacgtgcatttatgatgcgaaaacagatcccttctgccccatattccgactgggaaaaattgtggaaagcgcagggcacagcttccaggacatagccattgagggaggcatcatgggcatccagatcaagtggaactgcaacctggacagggccgcctccttctgcctgcccaggtattccttccgccgcctagacacccgtgacttggcccacaacgtatccccaggctacaatttcaggtttgccaagtactacagcgacctgaagggt

SEQ ID NO: 11221 - DNA, 395 bp, Bos taurus
  Clone ID: 48-LIB3058-030-Q1-K1-D8
atctattaatttggagtgaaaacacctgagacaaagtgcatatattaaatggaatgatttaggtaagagaccacgcattttttagatgcctgcaatgctggaggcattaaagagatattggtcctcttcttccatctacttttatataccaccaggaatttaatttatgctaaagtgctaaacattgacatcacattccagataggtagatgtcattgtatctttgttctcattattaaagtaaaatatgaaaggtgctttatcttttcagtgttgggctgcttttctatgctatgctatgttaagtcactttagtcgtgtccgactctgtgtgaccccatagatggcagcccaccaggctcccctgtccctgggattctccaggcaagaacact

SEQ ID NO: 11222 - DNA, 364 bp, Bos taurus
  Clone ID: 48-LIB3058-034-Q1-K1-D8
gggaaacttcaactccttccatcttttgacggtcccgcaggaagtctccagtcctaacttcatggagaatgtggcagagaaagcactgcagcaataccgccggaagagccaggaggagtgaggcgtgaaagttgcttttgcaagtatcgggcgtctgcacccacttgcccctgagatgagcttcaggcccctttagagagctctgcacgtcgccagatgaccaggccctgacctcgaggtcctcctgacccctccagcctctccttcctctgaactcctctgaaacgcactaatgcctgcgtttgctgatcacgggaagaacttgcttgcatgccactaactcaataaaccaccttgtaatctg

SEQ ID NO: 11223 - DNA, 442 bp, Bos taurus
  Clone ID: 48-LIB3058-035-Q1-K1-D8
ctgcgctgaagcttctgcactctgagcttcataacctgcaccatgcccatgatcctggggtactgggacatccgcgggctggcccatgccatccgccttctcctggagtacacagacacaaactatgaggagaggcagtactcggtaggagatgctcccgactatgacagaagccagtggctgaatgaaaaattcaagctgggcctggacttccccaatctgccctacttaatcgatgggactcacaagctcacccagagcaacgccatccttcggtacatcgctcgcaagcacaacctgtgtggggagacagaagaagagatgattcgtgtggacattatggagaaccaagttatggatgtccgcttggccatggctaggatctgctacagccctgactttgagaaactgaagcctggtttcttgaaagagatccctgaaa

SEQ ID NO: 11224 - DNA, 416 bp, Bos taurus
  Clone ID: 48-LIB3058-037-Q1-K1-D8
ctggattgtagaacttgttgttgattttgaccttgtattcaagttaactcttaccttggtatatgtttaataccctgtgcatatctttgatttaaacccctagttatatgcggctctctcacctcgagctgaggtgagaatgtttatggaagagaaatccaatggcttgataagaatctgggagactgagtctctcagtctgtgcagggtattaatgtgtcagagctgcctattccaggatttctctagaggctggcaagagtccttgaaacagttgtcatttctgtcttggccggtcttacacggggttgggaaggtccaagccgtaggacctgctttcctttcttactgaagatttcccaccagagcactgttctggttacttgccttgagttggaaacagtttgcattcacac

SEQ ID NO: 11225 - DNA, 396 bp, Bos taurus
  Clone ID: 48-LIB3058-038-Q1-K1-D8
atcgcgagtcggccgccctttattttttctctttttttagctacatttactgtaggtggcgcaagaacttttactcttttgtaattgtgcctcacacttcttgaaagtccaccttctaaattgcccagatgatcttctagattctacatgctattgctggtttattcttgtgctttctgtatttaaaactttgactgtactaataagcaaatgcatggttataaatttagctaatattagtttacagactattcgaatgattatgattttattcggtttaagctgctctagtatatttcgtaaggaaatgatgctgtacacaaatgtatataaagcttgtgagtcaagcatcaagtgatgtttgttagaaataaattagaatttttaagctctgaa

SEQ ID NO: 11226 - DNA, 429 bp, Bos taurus
  Clone ID: 48-LIB3058-042-Q1-K1-D8
ggaaaagtgcatcagagcaattgtctgtgcattgaaaaacacacccggtattttgaaaatgtttttggatgtgtcagcagtattttgtaagaagcaaaaatacaacagatagtacaacagatagcacataaaaagatgttcaatgccattaatcagtcatctgggaaatgcaaatcaaaaccaccaagagatgctattcacatctactaggatggctgtaattaaaaagggaggtaactgcaaatgtttgtgaggacggagaaattggaaccttatacatggctggtgggactataaaattgtgcagccactttggaaacagactgtccagttgcccaaagggtaaaacagcattattcataagagccacaaagtagacaatccaaatgcctatcaactgattatggactaagtaaaatgtggtatacc

SEQ ID NO: 11227 - DNA, 442 bp, Bos taurus
  Clone ID: 48-LIB3058-045-Q1-K1-D8
ttgaaaagcaacaagctattgagctgctcaggaagaaccatacagtgatatcattggaacaccgggaccaaggttccacattatttgagcagctagaagcgttagagctagtgttcatttcactagtgtgtacaaattgcccccgtgtgtagggcacacaaaacccttccagaaaatttagatttttgtctgtacaaagtctctgccttttttcattttttccagtattttaaatttacccatttcctctttaagcagaactgcttgtatggtgtttgtgttctggtggagaaagcaagcaccccaagatcagtccagaacagatgtgtgcaatattggcgcatataattgagtagcaacggaaggttggagtttttctcttagttctccattactgcattctaaaggagaacgtttcagggaaaaacacctgacagttaag

SEQ ID NO: 11228 - DNA, 437 bp, Bos taurus
  Clone ID: 48-LIB3058-046-Q1-K1-D12
ttttctttgaaataaatgagaagcaggtaagtgaaactaaaacactggtataaatatggagcttttctagaagtgcaaaaaaaaatcagcatgcatacaatttcttagtagtacaaatatttcaatagatctttttgaaaagttcaacacaaagaaaatccacttaacccttaataaaaatgctctccgtatttgcttttctcttcttggctctctacagttagaatgcagcaagcataagctttttcaagtgaacttctgccttgtaaatcaatgatatcggtgatgtttcttactttttgtgtcaagttgcttagtgatggtaccataacttttaagggtttgtagtgtgttaagaaaacaatgaatatttagatgctagttaataatgtctgaccaatttagagatttctttttttttttttttttttgccaaa

SEQ ID NO: 11229 - DNA, 285 bp, Bos taurus
  Clone ID: 48-LIB3058-046-Q1-K1-D8
ggctgttcatagctatgtgccgggtgttgcagcctgcggtgccagagtctctggccggctacatcacagcagcctacgtggagatgaggcgcgaggcttgggccagtaaggacgccacctatacttcggcccggactctgctggctatcctgcgactgtccactgctctggcacgtttacgaaaggtggacaccgtagatgaggaagatggggatgaagccatacggctgaaggagaagtccaaggactcactgatgggtgacaagaggcagacagctaggaccc

SEQ ID NO: 11230 - DNA, 341 bp, Bos taurus
  Clone ID: 48-LIB3058-047-Q1-K1-D8
ttcatttcattttttatgactgttttttattattactttctttatatatcataattcaactactgtacaattcttttttttaaccatctttagttaaatggagttttaatttaaattgaatctttgctaattttaagtgttaagcattttgcattaaagtattcatataatgttttgactcagtttattggcattattctctggttgcagagtcaacacacatttcatcagtattaatgggtgtaagagtttacaccatgaagtcatcctaaaagcacataaattcgatgttatagtgatttctgaatgggtattacagtgctcacatggaaacaagttcc

SEQ ID NO: 11231 - DNA, 377 bp, Bos taurus
  Clone ID: 48-LIB3058-048-Q1-K1-D12
atcgcgagcggccgtcctttttttttttttttttttttttttttttttttaagcaatgattttcagtttactagatgaaacagacttgcaacatagtctgcatgaatgcaaaataagccatctacagcaagtgataaggaaactgggcaaaaaggaaaaaagcatacattggaaaagaagattctctcgagataaaaaaatcaaaccattattataaaggagtttaccaagaactgctatatttcccccatcccatttgctggaagtcaacaagagcatctagcactttgtgttcatgtcaaaaagtcagatcagagcatcctaacgcaaagcaaaaaaggaaaagaaggaaaatccctaaccccctcccccaaacc

SEQ ID NO: 11232 - DNA, 436 bp, Bos taurus
  Clone ID: 48-LIB3058-050-Q1-K1-D12
gtctggtacaggcaaaacagccaccttcagtatttctgtcctccagtgtctggatattcaggttcgtgaaacccaagctttgatcttggctccaacaagagagttagctgtacagatccagaagggcctgcttgctttgggtgactacatgaacgtccagtgccatgcctgcatcgggggcaccaatgtgggggaggacatcaggaaattggactacggacagcacgttgtcgccggcacacctgggcgtgtctttgatatgattcgtcgcaggagtttgaggacacgtgctatcaagatgttggttttggatgaggctgatgaaatgttgaataaaggtttcaaagaacagatctacgatgtgtacaggtacttgcccccagccacacaggtggtgctcatcagtgccacactgccccacgagatcctcgagatg

SEQ ID NO: 11233 - DNA, 408 bp, Bos taurus
  Clone ID: 48-LIB3058-051-Q1-K1-D8
atcgcgagcggccgcccttttttttttttttttttttttttttttttttttttttttttttttgcacaagaagattttattgatttttttttttattgattgggggcagcataaccaaggggatgtaacttcataccctgagaagttcacacataaataattcttcatcaaactgctgtactaatttttacaaaggacctgtgtgtaaccatacaaaatgtaggcaattccttctctgacttgctatcaaaagtcattcatatcaaaaggggtaggctggcccttaccatgagcccatagaataacctggccacgcccatcattctggggcaaaaaaagcagtgcatttttggttaacggtgaagttgtcagccacgtccacgaggcatcggggtcacggtcaacctg

SEQ ID NO: 11234 - DNA, 419 bp, Bos taurus
  Clone ID: 48-LIB3058-052-Q1-K1-D8
cggacgcgtgggcgcgagcgttcgcttttttttttttttttttttttttttttttttttttttttttttttttttttttttttttttttttttttttttttttttttttttttttttttttttttttttttttttttttattttttttttttttttttttttttttttttttttttaaaaataataataaaaaaattttaaaaagttaaaatttataattttattaaatataaaaaaaaatttttttatattatatttttttaaatttaaattaaatttttaaaattttttaaaaaattataatttaaataaaataataaataaaaaattttaaaaaaaattttttaaaaaatatttttataaaaataatttttatataaataattttattttttttaaatatatatttataaaattat

SEQ ID NO: 11235 - DNA, 412 bp, Bos taurus
  Clone ID: 48-LIB3058-053-Q1-K1-D8
gtacccacaccaaggaagaagaaggaatgggaaagatggggaggggatcttggactgggatgctaaaaatttttttttatcgctcaaacccgcttcagagttgcccttcaaaaatgttctcagtttctgaaaagtaaagctttagaagtcacctaagacacgttcatggcaaccacagttatcagaaaataatggacttttaagtctatgggcttccctggtgactcagacagtaaagatctccctgcagcacaggagacccaggttgatccctgggttgggacaatcccctggagaagggaatggcttctccagtatccctgcctggagaattccatggacagaggagcctggtaggctatagtccatggggtaacaaatagttggacatgactgaacaaccaacatagtt

SEQ ID NO: 11236 - DNA, 396 bp, Bos taurus
  Clone ID: 48-LIB3058-056-Q1-K1-D12
atccatagttcttcagcactctgttgatcagatctaatcccttgaatctgtttggcactttcactgtataattgtaagggatttgatttaagtcacacttgaatgacttcgtggttttctctactttcttcagttaagtctgcattttgcaataaggagttcatgatctgagccacagtaaactcccagtcttgtttttgctaacttatagagcttcttcatcttcaactgtaaagaatataatcagtctgatatcggtattgaacatctgatgatgttcatgtgtaaagttgtctattgtgttgttgcaagaggatgtttgctatgaccaatgtgttcttttggcaaaactctgttagcctttgccctgcttcattttgtactccaaggccaaac

SEQ ID NO: 11237 - DNA, 306 bp, Bos taurus
  Clone ID: 48-LIB3058-056-Q1-K1-D8
gatatgaccatcattatgtggaagctgaccagagatgagaccaactatggtatcccacagcgtgctcttcggggtcactcccactttgttagtgatgtggtcatttcctcagatggccaatttgccctctcaggctcctgggatggaacccttcgcctttgggatctcacaacgggcaccaccactcgccgatttgtaggccataccaaagatgtgctgagtgtggccttctcttctgacaaccggcaaattgtctctggctcgcgagacaaaaccatcaaactatggaatactctgggtgtatgc

SEQ ID NO: 11238 - DNA, 354 bp, Bos taurus
  Clone ID: 48-LIB3058-057-Q1-K1-D8
caaagagtaatcttatggtgcacgttggtttatacctagttagagaggagaaacagggagtagtcagactcttattgactcccttctccctgataacagctaccatgacaaccctgtggtttccaaggagctgaggatagagagatactagttcatatgaaaaatagactggcctaaggagcagcagtcgcttgtggctaacagtgtaaactgggccagccctctggtagtacacaggatagataacttttttgatagcatgtttttttctggtaatttgttgtgtacttaggctctttgtatatttttactatggttgcttttttacatgttgtattagccattcagtcatat

SEQ ID NO: 11239 - DNA, 293 bp, Bos taurus
  Clone ID: 48-LIB3058-058-Q1-K1-D12
gacccacgcgtacgcagagcactgtatagctcccacgatacagctctctcagcgacattctccccaactagacttttggtgaattttggaatgcagtttattcagcatatgactctataacgacgtccaccaacgccactaattctcatgtttcctttaggtggcaaaccgcatgcgttaactactctctgaactgagtgattgggattactatcaaacaattgaagaacctaacagcatatttatgtactttagccctgttaatttactccacagaatttaaattttgtaag

SEQ ID NO: 11240 - DNA, 433 bp, Bos taurus
  Clone ID: 48-LIB34-001-Q1-E1-D8
caccgtgccatgcccaggtgcaggatcaaggactgcgggcagccccgaagcctgctcaacggggccttcaattacaccaccagagagggggtgaacacctacgaggcgcgtatccagtactactgccatgagcccttctacaagatgcacaccaaaggtggcacaagcgagtctgagcgagggctgtacacctgcacggctcagggcatttggaagaacgagctggtaggagagaagatgcctcggtgtttgccagtgtgcgggaagccactccaccctgtcgagcagaggcagcgcatcattggaggcctgaaggccaagctgggcaacttcccctggcaggcctacaccaacatccacgggcccgggggtggcgcgctgctgggggaacgctggatcctcacggccgcgcacaacatcgaacccaaggacc

SEQ ID NO: 11241 - DNA, 403 bp, Bos taurus
  Clone ID: 48-LIB34-003-Q1-E1-D8
ctttagggacggcgtaattctgtcttttcagacccagaaatacacatgaatactttgctatgattacattttagatattcatttatacttttctatatctaagactcatatcttgatttttactatcatatatgaatgaagcctttatatcttgtttttttgccaatcttgaaagatagatgggaaaagataaaagaatgttgtctaactcttgattgcttagaaagtatttccatagtcaatgatggttcaataggcaaaccaggtcctataaacctgaattttttttatggtcaatactgttaagcagaaatgtagaacaggactggcaaaaatgtggatgtttaaattcaataaaaaagtttaaagcttaaaaagaaaaaataaaaagggcggccgctct

SEQ ID NO: 11242 - DNA, 397 bp, Bos taurus
  Clone ID: 48-LIB34-004-Q1-E1-D12
ggcccagccagcgcccgcgatgactgccactctccgcccctacctgagtgccgtgcgggccacactgcaggctgccctctgcctggagaatttctcctcccaagtcgtggaacgacacaacaagccggaagtagaagtcaggagtagcaaagagctcctgctacaacccgtgaccatcagcaggaatgaaaaggaaaaggttctgattgaaggctccatcaactctgtcagggtcagcattgctgtgaaacaggctgatgaaatcgagaagattctatgtcacaagttcatgcgcttcatgatgatgcgagcagagaacttctttatcctccgaaggaaaccagtggaggggtatgacatcagctttctgatcaccaacttccacacagaacagatg

SEQ ID NO: 11243 - DNA, 355 bp, Bos taurus
  Clone ID: 48-LIB34-004-Q1-E1-D8
ggcgagatgcccaagtccaagcgcgacaagaaagtctccctaaccaaaactgccaagaaaggcttggaactgaaacagaacttgatagaagagcttcggaaatgtgtggacacgtacaagtacctcttcatcttctccgtggccaacatgaggaacagcaagctgaaggacatccgcaacgcctggaagcacagtcggatgttctttggcaaaaacaaagtgatgatggtggcgctgggtcgaagcccgtctgacgagtacaaagacaacctgcatcaggtcagcaagaagttgaagggcgaagttggtctcctcttcaacaatcgcactaaaggacgaagtggacgagtgggtc

SEQ ID NO: 11244 - DNA, 417 bp, Bos taurus
  Clone ID: 48-LIB34-005-Q1-E1-D12
ggaccatgtctgcttgggcagccctcctgctgctctggggtctgtccctgagcccagtgactgagcaggcgacgttctttgaccccaggccatccctgtgggccgaggccggctcaccgctggcaccctgggccgatgtgacgctgacctgccagagcccgctgccgacccaggagtttcagctcctcaaggatggcgtgggccaggaaccggtgcacctggagtcccctgcccatgagcacaggttcccgctgggaccagtgaccagcaccacccggggcctctaccgctgcagctacaagggcaacaacgattggatcagcccgagcaacctggtggaagtgaccggagcagagcccctgcccgcaccctcgatctcaaccagtcccgtgtcctggatcacacccggcctgaaca

SEQ ID NO: 11245 - DNA, 404 bp, Bos taurus
  Clone ID: 48-LIB34-005-Q1-E1-D8
ccacggcagagatgttttccgtgagggacctctgcctggtcctgagtttggtgggtgcaattaagacagaagatggtagtgatcctcccagtggtgactttttaactgaaggaggaggggtgcgtggcccaagacttgtggaaagacagcaatctgcctgcaaagagacaggctggcccttctgctctgatgaagactggaatacaaaatgcccttctggctgcaggatgaaagggttgattgatgaagtcgatcaagattttacaagcagaataaataaactaagagattcactatttaattatcagaagaacagtaaggactctaatacattgaccaagaacatagtggaactaatgagaggggattttgccaaagctaacaacaatgataatacatttaaa

SEQ ID NO: 11246 - DNA, 390 bp, Bos taurus
  Clone ID: 48-LIB34-007-Q1-E1-D12
aagaaaaacatcagtctgcttactccaaggagaaataggcaatggatcccaaacgccagagagtgaaacttaatgacggccacttcattcctgtcctgggatttggaacctatgcacctccagaggttgctaagaaggaagctctggaattcaccccattcgctatagaggttgggttccgccatattgactgtgctcatgcctaccaaaatgaacaggagattggccaggtcattcgaagcaagattgcagatggcactgtgaagagagaagacatattctgcacttcaaagctttggttgacttcccttcgaccagagttggtccgaccagccttggaaaagtcactgaaaaatcttcaactggactatgtcgatctctatattatgc

SEQ ID NO: 11247 - DNA, 408 bp, Bos taurus
  Clone ID: 48-LIB34-008-Q1-E1-D8
ctttcagcttcttcgtgttcttctttgtatttttctgtcaaatagggatctacatcatccagttgatcggcatccctagccttggggacagtggttggattgcagccctgtctacgatgaagcacaacttggctgtgtcggttatcatgatggtggtggctggcttcttcaccctctgtgccgtgctctcactcttcctcctgaagcgggtgcactccctgtaccgcaggagatgggccagcttccatcaggcccatgaggagttttcccagggcatcttcagtagcaggaccttccgcagtgccgcctcatctgctggccaaggagcgttccaggggaattagtcttcctgacacctccctctgcccctggccttctctctctcagcttgccttccgagctgcactt

SEQ ID NO: 11248 - DNA, 410 bp, Bos taurus
  Clone ID: 48-LIB34-010-Q1-E1-D12
agcggacgcgtgggggtgtatgtgcccacgggctttgctgccttcccctgtgagctgatgcacttgccagaaaagtgggtgaagaccaagtacccgaatctcatctcgtattcctacatgccccgtgggggccactttgctgcctttgaggagccagagctgcttgcccaggacatccgcaagttcgtggggctgcaggagcggcagtgaccccggcagggcctgtcacctccccagcagcccctgccctagcacagcaggctccctcctgacagccgccctttcacagagaagtccctggtctcgcagtccagctcccagtagcagtggggctggcggggagcccactctccatctctggtcctctatggggagagatgcccctttccccaggaatgtgtttgctgccg

SEQ ID NO: 11249 - DNA, 421 bp, Bos taurus
  Clone ID: 48-LIB34-010-Q1-E2-D8
atgagagaaaaagtactgacttcatctgccagacagagactcaggtgtgccagtattcaaaaatttggagaaagagctttaaaagcatggtcagtagctcgcctgagccagaaatttcccaaggctgagtttgtagaagttaccaagctagtgacagatctcacaaaagtccacaaggaatgctgccatggtgacctacttgaatgcgcagatgacagggcagatcttgccaagtacatatgtgataatcaagatacaatctccagtaaactgaaggaatgctgtgataagcctttgttggaaaaatcccactgcattgctgaggtagaaaaagatgccatacctgaaaacctgcccccattaactgctgactttgctgaagataaggatgtttgcaaaaactatcaggaaagcaaagatg

SEQ ID NO: 11250 - DNA, 405 bp, Bos taurus
  Clone ID: 48-LIB34-011-Q1-E1-D8
acgaatcaaggagccaaaagatatgaaatttatttatgaagggagttctgatttctcctgtttgccaacctttggagttattcttgctcagaaatctataatgaatggaggattagcagagattcctgggctttcaatcaatttagcaaagattcttcatggggagcagtacttggagttacataaaccaattcccagagcaggaaaattaagatgtgaagcaattgttgctgatatcctggataaaggatccggtttagtaattcttgtggatgtctacacttactctggggaggaacttatatgttataatcagttctccatctttgttgttggttctggaggctctggtggaaaacggacatcagacattgcaaggcagctgtagccataaccaatagacct

SEQ ID NO: 11251 - DNA, 355 bp, Bos taurus
  Clone ID: 48-LIB34-012-Q1-E1-D12
caatcataaggatattggtaccctttatctactagttggtgcttgggccggtatagtacgaacagctctaagccttctaattcgcgctgaattaggccaacccggaactctgctcggagacgaccaaatctacaaggtagttgtaaccgcacacgcatttgtaataatcttcttcatagtaataccaatcataattggacgattcggtaactgacttgttcccctaataattggtgctcccgagatagcatttccccgaataaataatataagcttctgactcctccctccctcattcctactactcctcgcatcctctaaagttgaacctcggggatgaacaggctgaaccctg

SEQ ID NO: 11252 - DNA, 423 bp, Bos taurus
  Clone ID: 48-LIB34-012-Q1-E1-D8
accacgcgtccgaatggatcccaaaggccagagagtgaagcttaatgatggccacttcattcctgtcctgggatttggcactgctgaagctaaagaggttcctaagagtgaagctctggaagtcaccaaatttgctatagaggttgggttccgccatattgactgtgctcatgtgtaccaaaatgaagagcacgttggccaggccattcgaagcaagattgcagatggcactgtgaagagagaagacatattctacacttcaaagctttggtgcactttccttcgaccagagttggtcagaccagccttggaaaagtcactgaaaaatcttcacctggactatgttgatctctatattattcattttccactggctatgaagccaggggaggaattattgccaaaagatgaaaatggaaaact

SEQ ID NO: 11253 - DNA, 375 bp, Bos taurus
  Clone ID: 48-LIB34-013-Q1-E1-D8
ggtccacgcatgcgtccggctctctctcctgcaatcctgggtttccctcctgtgaactctcccagcagtcctgccctggcatgaatgcttcaccctctgttgagactagccctaaattcctgctcctgcaactgtgctccacaatcacaacctccggcttcgggaactggattgtgtatactcgagcttcacgatggttcacgctaatagcaggacccggatgatacatgatgcaggtcagcctatcaccaatgacgtagaactgaatacagttgaacttcgacgcttttgagattcagaggtcctgctggatgctttgtacttgcatgtggctccttacatgataattatgtcacaacgcttgcaggatggtga

SEQ ID NO: 11254 - DNA, 437 bp, Bos taurus
  Clone ID: 48-LIB34-014-Q1-E1-D12
aagcagtgtccatttgatgagcatgtaaaattagtgaacgaactaactgagtttgcaaaaacatgtgttgctgatgagtcccatgccggctgtgaaaagtcacttcacactctctttggagatgaattgtgtaaagttgcatcccttcgtgaaacctatggtgacatggctgactgctgtgagaaacaagagcctgaaagaaatgaatgcttcctgagccacaagatgatagcccagacctccctaaattgaaaccagaccccaatactttgtgtgatgagtttaaggcagatgaaaagaagttttggggaaaatacctatacgaaattgctagaagacatccctacttttatgcaccagaactcctttactatgctaataaatataatggagtttttcaagaatgctgccaagctgaagataaaggtgcctgcctg

SEQ ID NO: 11255 - DNA, 385 bp, Bos taurus
  Clone ID: 48-LIB34-014-Q1-E1-D8
tgcaggagctgtagtcgaagctgaagccggaacaggctgcagcggtggggaaggtctctgcagaacaggaatatgtatagtctcagcgtgcgaacgatttcgaactccagtgactttcagtggaaagacatctggtcctagctaggtgagatgaaggtgttcaagagagattccggattcacaggacatcaatatgtccaaatgctgtcattttgctaagtggtcgacaatgtcgtactgtagatatgtgaagatggaacagctggaggtgctgtcatggcagtgacgatcttgaagtgattaacgtcgccagcgggaagtatcacgatcagcaaggcctttcaactttcaatattcaggtctccaacatccagcgggaacattt

SEQ ID NO: 11256 - DNA, 418 bp, Bos taurus
  Clone ID: 48-LIB34-016-Q1-E1-D8
gcaatatcatcatccatggcgaactggttgcgctcgtggtcgacaacggctccggcatgtgcaaggccggcttcgcgggcgacgatgctccccgggccgtcttcccgtccatcgtggggcgcccccggcaccagggcgtaatggtgggcatgggccacaaggactcgtacgtgggggatgaggctcagagcaagagaggcatcctgaccctcaagtaccccattgagcacggcatcgtcaccaactgggacgacatggagaagatctggcaccataccttctacaacgagctccgtgtggcccctgaggagcaccccgtgctgctgaccgaggcccccctgaaccccaaggccaaccgtgagaagatgacccagatcatgttcgagaccttcaacacccctgccatgttcgtggccat

SEQ ID NO: 11257 - DNA, 383 bp, Bos taurus
  Clone ID: 48-LIB34-017-Q1-E1-D12
gctggccctgctggcgtgggttgttgtggctggccaagaatcctgcaagggccgctgcaccgagggcttcaacgccaccaggaagtgtcagtgtgacgagctctgtgcttactaccagagctgctgtgccgacttcatggctgagtgcaagccccagatgactcgtggggatgtgttccagctgccagaagatgagtacgggttccatgactacagcgatcgcgcagaccgtcaacagcaacgtggaagcacagcccgagagcaccaccctggcccctgttctgcaagctcagaccctagagactcctgtccaggcaccagttctcaaccctgagaaagaggtcccaccatctgggcggggagactcagatcctgggatgggg

SEQ ID NO: 11258 - DNA, 412 bp, Bos taurus
  Clone ID: 48-LIB34-017-Q1-E1-D8
atccctacttttatgcaccagaactcctttactatgctaataaatataatggagtttttcaagaatgctgccaagctgaagataaaggtgcctgcctgctaccaaagattgaaactatgagagaaaaagtactgacttcatctgccagacagagactcaggtgtgccagtattcaaaaatttggagaaagagctttaaaagcatggtcagtagctcgcctgagccagaaatttcccaaggctgagtttgtagaagttaccaagctagtgacagatctcacaaaagtccacaaggaatgctgccatggtgacctacttgaatgcgcagatgacagggcagatcttgccaagtacatatgtgataatcaagatacaatctccagtaaactgaaggaatgctgtgataagccttt

SEQ ID NO: 11259 - DNA, 376 bp, Bos taurus
  Clone ID: 48-LIB34-018-Q1-E1-D8
agctttatccactctacggccttggagaactgccacagggatttgcacggctaagtgctatatatggaggtacctacatgctgaataaaccaattgaagaagtcattatgcaaaatggaaaggtgattggtgtaaaatctgaaggagagattgctcgctgtaagcagctcatctgcgatcccagctatgtgaaagatcgagtagaaaaagtgggccaggtgatcagagtcatctgtattctcagccaccccatcaaaaacaccaatgacgccaactcctgccagatcattattccacagaaccaagtcaaccggaagtcagatatctacgtctgcatgatctcctctgcacacaatgtggccgcacaaggcaagta

SEQ ID NO: 11260 - DNA, 376 bp, Bos taurus
  Clone ID: 48-LIB34-020-Q1-E2-D8
gtgcgagataacgtactgacgtcatcagacatacagagagacacgtgtgccaatggtcagaagattggcaagtgaactctataagcatgggcagtaactcgcctgagccagctgattcccatagctgagtttgtcaaagtgaccaagctagtgacagatctcagaaaagtcgacaaggaatgctgccatggtgacctacttgaatgcgcagatgacagggcagatcttgccaagtacatatgtgataatcaagatacaatctccagtatactgaaggaatgctgtaataagcctttgttggcaaaatcccactgcattgctgaggtagaaaatgatgccatacctgacaacctgcccccaataactgctgactttg

SEQ ID NO: 11261 - DNA, 416 bp, Bos taurus
  Clone ID: 48-LIB34-021-Q1-E1-D8
agcgcagcgatcggaacttaggagcaggtccgggctgaagtcgcctcccagatggcctccaggctgaccccgctgaccctcctgctgctgctgctgctggctggggacagagtcacctcagatatgatcgtcggcccagggaacttacaagaaggggaaagtgaaggagacagccagaaaggaggtattctcgatggtgagtccattcaaggctacgaggactctcccatcttgctgataactaacctgaccgtcgtgccagccactgtcatcaagcccttcagccagcctgccactgaaccggtcgaatcaactatccagcccactgctgagcccttctgcctggcgcctgtcaactcctgctctgactcggagatccgctcagcacaggctgtgctgggggaggctttgacaga

SEQ ID NO: 11262 - DNA, 442 bp, Bos taurus
  Clone ID: 48-LIB34-022-Q1-E1-D12
cagccacgtcctccctggacccggtggagcagacgtgctcgcgccagagccagagcagccgcgagtcgcaccagcagcagccgccgccgccccctcggccaccgcccgcggaggtagcgacggagccgcggctgcgggcggacctgctgccctcgcacctgcccgaggtggtggccggcctcagctgcgccttcatcgtgctggtcttcgttaccgtcttcctggtcctgcagctgcgctcgggcttcagcttccgaggggtgaaagtgtacaccatggaccgcggcctcatctcctacaagggactaccccctgaagcctggcaggaggagtgcccgtccgactcagaggaagacgagggccggggcgagaggaccgcctttatcagagaccagagcgccctttgacgagcgcctactgcccgccccttcgagcccatccc

SEQ ID NO: 11263 - DNA, 431 bp, Bos taurus
  Clone ID: 48-LIB34-023-Q1-E1-D8
gctggactgcgggatatggcggccggtcagatcgcggtgttggggctcgtgctgctgagtgcccagggtggcttcggggcagggagcaggatctggacgaacatagacaatgatggctccaaaacacgactcacctgtgccttgaatcacagtgccactgacattgtgggccaccgctgggtgaaggggggcaaggtgctgaaggaggacgccctgcctgacctgaagacggagtatgaggtggactcagaagaccgctcaggccagtactcctgcatcttccttccggagcacgcgggccgcaccgatctggaactgaagggaccccccagcatcaatgcccgtgaagaagtcggagcacgccaccgagggggagactgtgattctggttgccaatccgaaccccttccgccagtcaggagggggggggg

SEQ ID NO: 11264 - DNA, 414 bp, Bos taurus
  Clone ID: 48-LIB34-026-Q1-E1-D8
aaagtcccacccactaataaaaattgtaaacaatgcattcatcgaccttccagccccatcaaacatttcatcatgatgaaatttcggttccctcctgggaatctgcctaatcctacaaatcctcacaggcctattcctagcaatacactacacatccgacacaacaacagcattctcctctgttacccatatctgccgagacgtgaactacggctgaatcatccgatacatacacgcaaacggagcttcaatgttttttatctgcttatatatgcacgtaggacgaggcttatattacgggtcttacacttttctagaaacatgaaatattggagtaatccttctgctcacagtaataaccacagcatttataggatacgtcctaccatgaggacaaatatcattctgatgagc

SEQ ID NO: 11265 - DNA, 295 bp, Bos taurus
  Clone ID: 48-LIB34-027-Q1-E1-D8
cactgctgactttgtcttcgtgcagcccttatcactctctggagaactttctctcccctgggcacaatggcaactcttaaggaaaaattgattgcaccaattgcagaagaagagacaaggatcccaaacaattaagatcacggtattgggtgttggacaagttggtatggcatgtgccatcagcattctgggaaagtccctgactgacaagcttgcccttgtggatgttttggaaaataaacccaagggagaaatgatggacctgcaacacggggaccttattccttcagacacc

SEQ ID NO: 11266 - DNA, 341 bp, Bos taurus
  Clone ID: 48-LIB34-028-Q1-E1-D12
actatgagcaagatgtctatgaaaaggctctcgcttctgctgctgctacagctgacttgctactttagcggtgggagttgtggcaacgtgctggtatggccagtggaatttaatccctggctgaatataaagacaattctggaggaactcgtcacgaggggtcatgaggtgactgttctgatatcttcagcttccactattcctaattccagcaaaccatctactatgaaatttgagacttttcctgtatctttaacaaaaagtgattatgagaattttatggaacgtactcttgaggaactgacatatgtggcacaagattccttttggtcctatctttc

SEQ ID NO: 11267 - DNA, 403 bp, Bos taurus
  Clone ID: 48-LIB34-028-Q1-E1-D8
acagattatgcttcattcaaggtgacaggtgaaaatgacaaataccgcctgacatatgcttacttcattggtggagatgctggagatgcatttgatggctacgattttggcgatgattctagtgacaagtttttcacatcccataatggcatgcagttcagtacttgggacagtgacaatgataagtatgatggcaactgtgctgaacaggatggatctggttggtggatgaacaaatgtcacgctggccacctcaatggagtttattatcaaggtggcacttactcaaaaacatctactcctaatggttatgataatggcattatttgggccacatggaaatcccggtggtattccatgaagaaaaccaccatgaagataatcccacttaacagacttgcca

SEQ ID NO: 11268 - DNA, 421 bp, Bos taurus
  Clone ID: 48-LIB34-029-Q1-E1-D8
atgaaaagaagttttggggaaaatacctatacgaaattgctagaagacatccctacttttatgcaccagaactcctttactatgctaataaatataatggagtttttcaagaatgctgccaagctgaagataaaggtgcctgcctgctaccaaagattgaaactatgagagaaaaagtactgacttcatctgccagacagagactcaggtgtgccagtattcaaaaatttggagaaagagctttaaaagcatggtcagtagctcgcctgagccagaaatttcccaaggctgagtttgtagaagttaccaagctagtgacagatctcacaagagtccacaaggaatgctgccatggtgacctacttgaatgcgcagatgacagggcagatcttgccaagtacatatgtgataatcaagatac

SEQ ID NO: 11269 - DNA, 380 bp, Bos taurus
  Clone ID: 48-LIB34-030-Q1-E1-D8
aggagaaggaggtgatacaggacgtggtggcagaaaaatgaagaggatcctggttttcctccttgctgtagcctttgtgcatgctctagagagaggccgagattatgagaaagataaagtctgcaaggaccttgccagcctgggaagagatgacttcacatctttgtcaatggtcctatacagcagaaaatttcccagtggcacctttgaacagatcagccatcttgtgaatgaagttgtttccttaacagtaacctgctgtgcggaaggggccgatcctgactgctatgacaacaggacttcagcattgtctgacaagtcctgtgaaagcaactctccattcccagtgcaccctggaactcctgagtgctgcacccatg

SEQ ID NO: 11270 - DNA, 404 bp, Bos taurus
  Clone ID: 48-LIB34-031-Q1-E1-D8
gaaaatcatgccaagtggaattgtgataatcaagatacaatctccagtaaacagaacgaatgctgtgataagcctttgttggaaaaatcccactgcattgctgaggtagaaaaagatgccatacctgaaaacctgcccccattaactgctgactttgctgaagataaggatgtttgcaaaaactatcaggaagcaaaagatgccttcctgggctcgtttttgtatgaatattcaagaaggcatcctgaatatgctgtcacagtgctattgagacttgccaaggaatatgaagccacactggaggaatgctgtgccaaatatgatccacatgcatgctattccacagtgtttgacaaacttaagcatcttgtggatgagcctcagaatttaatcaaacaaaactg

SEQ ID NO: 11271 - DNA, 395 bp, Bos taurus
  Clone ID: 48-LIB34-032-Q1-E1-D12
cgcttcaccgcgcgctcgcctccctgctcccgccgcagccccagggcccctcgccgccgccaccatggacgccatcaagaagaagatgcagatgctcaagctcgacaaggagaacgccttggatcgagcggagcaggcggaggccgataagaaggcagcggaggacaggagcaagcagctcgaggaggacatagcggccaaggagaagctgctgcgggtgtcggaggacgagcgggaccgggtgctggaggagttgcacaaggcagaggacagcctcctggccgccgacgaggccgccgccaaggctgaagccgacgtagcttctctgaacagacgcatccagctggttgaggaagagttggatcgtgcccaggagcgtctggcaacagctctgc

SEQ ID NO: 11272 - DNA, 388 bp, Bos taurus
  Clone ID: 48-LIB34-032-Q1-E1-D8
ctcccgactcgacgtcgtcgttacagggaataagaagcgggtgagaaaaacttctgtttccaccgttttgcccatttctgcagatttgttccgaagccgaagcatctccaaggcagtgatggctctccagatgacccaggcctttcttctgctcttgctgctgaccctgctggggctatggctggtacagccctcatatggccaggatcgcatgtaacaacgattcctgaggcaacatgtggacccctgatgagaacggaaggaatgacaactaccgcaatttgatgatgcaaagaccgaagatgactttcaatcagtgcaagcgcatcaacactttcattcatgaagatcgttgggacatccgtagtatctgcagcaacaacaacat

SEQ ID NO: 11273 - DNA, 419 bp, Bos taurus
  Clone ID: 48-LIB34-034-Q1-E1-D12
gaggacgagagcagaaggatagcagaagcaagtgcctggtcagagatggctcctgctggcctgagcctaggggctgccatcctttgcctcttggcctgggctggcctggctgctggcgaccgggtgtatgtacaccccttccacctcctcgtctacagcaagagcaactgtgaccagctggagaaacccagtgtggagacacctccagacccaactttcacacctgtacccattcagaccaagtcatccgcagtggatgaggaggccctgtgggaacagctggttcgagccaccgagaagctagaggctgaagatcggctgcgggcctcagaggtggggctgctgctcaacttcatgggcttccacatgtacaagacactgagcgagacatggagtgtggccagtggggctgtgttctc

SEQ ID NO: 11274 - DNA, 186 bp, Bos taurus
  Clone ID: 48-LIB34-034-Q1-E1-D8
aatctggattatcattttacagatttctatagcaaatgatgtaataatggcttttaatcctactttcctgtgggtgaatgaaggttaacgcttaacaatcatttaagagaaacatgtatttgcttttgacagctgattattcacttaaaatgactagaatgaaagtttctagcagaaatatgattt

SEQ ID NO: 11275 - DNA, 404 bp, Bos taurus
  Clone ID: 48-LIB34-036-Q1-E1-D8
agcagtcgtggagccctgtacacgggcttttccgtcttggtggctctgctcctggctggccaggccaccactgcctacttcctgtaccagcagcagggccggctggacaagctgacggtcacctcccagaacctgcagctggagaacctgcgcatgaagcttcccaagcctgccaagcctatgagccagatgcggatggccactcccatgctgatgcgggcgctgcccatggcaggcccagagcccatgaagaacgccaccaagtacggcaacatgacacaggaccacgtgatgcacctgctcctgaaggcagaccccctgaaggtgtacccgcagctgaaggggagcctgccagaaaacctgaaacaccttaaggactccatggatggcttggactggaagct

SEQ ID NO: 11276 - DNA, 413 bp, Bos taurus
  Clone ID: 48-LIB34-037-Q1-E1-D12
gccgcggcagctgcagcccgacgccgagcgaactgaacggcctcagctgctagcggagcggcagcggcgccttcccttcccccccggagaccaccagatcacctctccccacggcctcgccatggcgacctacggacagaactgcgcgcggccaatgtgtattcctccatcatatgctgaccttggcaaagctgccagagatatattcaacaaaggatttggttttgggttggtgaaactggatgtgaaaacaaagtcgtgcagcggcgtggaattctcaacatctggttcatctaatacagacactggtaaagttactgggaccttggagaccaaatataaatggtgtgagtatggtctgactttcacagaaaagtggaacactgataacactctgggaacagaaatcgcta

SEQ ID NO: 11277 - DNA, 356 bp, Bos taurus
  Clone ID: 48-LIB34-037-Q1-E1-D8
catttatgcaccagaactcctttactatgctaataaatataatggagtttttcaagaatgctgccaagctgaagataaaggtgcctgcctgctaccaaagattgaaactatgagagaaaaagtactgacttcatctgccagacagagactcaggtgtgccagtattcaaaaatttggagaaagagctttaaaagcatggtcagtagctcgcctgagccagaaatttcccaaggctgagtttgtacaagttaccaagctagtgacagatctcacaggagtccacacggaatgctgccatggtgacctacttgaatgcgcagatgacagggcagatcttgccaagtacatatgtgata

SEQ ID NO: 11278 - DNA, 306 bp, Bos taurus
  Clone ID: 48-LIB34-038-Q1-E1-D12
ggatgctactctcaacctcaatgctatcaacctttgcccgctaccaaagccctggaaactaagtttctcttatggacgggccctgcatgccagtgcactggctgcgtggggtggcatggctgaaaacaagatgacaatccaggaagcctttatgaagcgggccctggctaacagccaggcagccacatgacagtatgttcacatgggctcttctggctctgcttccacccagtcgctcttcactgccagctatacctactataacccgacgctgaccagcttggctctggcgctcgatgtgtcctg

SEQ ID NO: 11279 - DNA, 422 bp, Bos taurus
  unsure (388): unsure at all n locations; Clone ID: 48-LIB34-038-Q1-E1-D8
agtacatgctgctgtaagaaaattgcctttaatcatttaacaagcctaaccttgactcaagcagtgaatgcctataaacataataaatgaaaaaagctagtatttttataacataaaacagtatcatttatagcttgtcaattgcatactgtcatccagcaaaaataaaaagcccagtagagaattaagttatcttcatacctgcaaatgatggaggctatttttgttaaggctgtcgaatttactaaccacaattatgatatatagtccaaagaatgtagtaacctccttatcatgttaattaattgttctcttttgaagatctgttgcattgactaattgaacgataattcaagtagagtgtcccagaaaaaactgcttgggctcnctcttcggagtctggctggcagccctgagcattg

SEQ ID NO: 11280 - DNA, 435 bp, Bos taurus
  Clone ID: 48-LIB34-039-Q1-E1-D8
ggcacatcccaggctgactgtgctgtcctgatcgttgctgctggtgttggtgaatttgaagccggtatctccaagaacgggcagacccgtgagcatgcccttttggcttacaccctgggtgtgaaacaactaattgttggcgttaacaaaatggattccactgagccaccctatagccagaagagatacgaagaaattgttaaggaagtcagcacctatattaagaaaattggctacaaccccgacacagtagcatttgtgccaatttctggctggaatggtgacaacatgctagaaccaagtgctaatatgccatggttcaagggatggaaagtcacccgtaaggacggcaatgccagtggaaccaccctgcttgaagctctggattgcattctgccaccaactcgcccaactgacaaacccttgcgtttgcct

SEQ ID NO: 11281 - DNA, 389 bp, Bos taurus
  Clone ID: 48-LIB34-041-Q1-E1-D8
aggcgcgccgccgggggagcctgacgggtgccgggaagaggccggggccgcaggggagaccccgaggcgcagcagaggagggtccaggagacggaggtgaagccatgtggcagctgctgctccccctggccctggggctgggcaccatgggcttgggcagggcggagctcacgacggcccagcaccggggcctgcaggtggccctggaggagttccacaagcatccacccgtgctgtgggccttccaggtgaccagcgtggacaatgcagcagacacgctcttcccggctgggcagtttgtgaggctggagttcaagctccagcagacgagctgtcggaagaaagactggaggaaagaagactgcaaagtcaagcccaacgggagaaag

SEQ ID NO: 11282 - DNA, 226 bp, Bos taurus
  Clone ID: 48-LIB34-042-Q1-E1-D12
aatccgatgacatggctgacagctctgacacccaggaacctgactgacatgaatgcttcctgagccacacgcatgatagcccaaaccgctctctattgaacccagaacccaccacagggtgtgatgaatttacggcagaccaaatcacgtttcgtggacaatgtctatcactaacttgctacaagacatccctagcttgccgcagcggaagtccttcactctcccc

SEQ ID NO: 11283 - DNA, 426 bp, Bos taurus
  Clone ID: 48-LIB34-044-Q1-E1-D12
gactcgccggccgacgcacgcatctacactgacttctcactacagcctctacaagcagttggctttgaagaaccccaataagaatgtcatcttatccccgctgagtgtctccatagccttggccttcctgtctctgggggcccgtggctccaccctgacagagatcctggaaggtctcaagttcaacctcacagagatccaggagaaagaaatacaccatagctttcagcacctcctgcaggcgctcaatcaacccagcaaccagctgcagctgagcgtgggcaacgccatgttcgtgcaggaagagctgaaactgctggacaagttcatagaagatgcccaggtgctgtactcctctgaggccttcccgaccaacttcacggattctgaagcctgcaggagtcgaataaatgactatgtgaagaa

SEQ ID NO: 11284 - DNA, 288 bp, Bos taurus
  Clone ID: 48-LIB34-046-Q1-E1-D12
aaacaatttatagtatagctaggaaagagaatatcccaaagagatgaagaaaatttgcttcaagtcacactacagtctaccaagtacatattttgcatttgatgcatattggagaaggcaatggcaccccactccagtactcttgcctgcaaaaccccatggatggaggagcctgatatgctgcagtccatgggatcgtgaagagtcagacatgatggagtgacttcactttcacttttcactttcaagcattggagaaaggaatggcaacccaatccaatgttcctg

SEQ ID NO: 11285 - DNA, 346 bp, Bos taurus
  Clone ID: 48-LIB34-046-Q1-E1-D8
cacagtcacacacacccgtgcagtgtcacagcctcacacatgtgcagtgtcacacagtcacaaacacacgtgcagtgtcacacacagcctcacacacacacgtgcagtgtcacagcctcacacacacacgtgcagtgtcacacacacgtgaagtgtcccacagtcacacacgtgcagtgtcacacaggatgacagtgtcacagtttcatagtgtaacagtcacacaaccacttacatagtatctcactttcacagtcaaagtctcacacactcacacacctctcctcctcccctctctcgctcgtcggcgcgcgccgtccaatcagcaggtcgggcaggccgcacc

SEQ ID NO: 11286 - DNA, 402 bp, Bos taurus
  Clone ID: 48-LIB34-047-Q1-E1-D8
agagaacaaagagtgtgaagaagggaaataaagcatttcctgcccgttgtaaatccaagttcttggacctagtctttaggaccagattcctacaactgccaaccacgtggcattagtatatgttggcttgtctgtttctttctcaatattctttgtcaaataagtgctatttactcatttaattgcttatcagttacttattcttggtttaaaaagtttaatgacaattgcgtatttttctcatttttagtagtattcgaatgtttatattttaataactttaaaccacttaaaaattttcatgtataattgtttaagaaaagctattttgaacaaccacagatgcatctagcatctaatgtatatgtgagtagatataatttatagtggaagacggtagtg

SEQ ID NO: 11287 - DNA, 378 bp, Bos taurus
  Clone ID: 48-LIB34-048-Q1-E1-D12
atctgttggttggggttgtgatggaggtggagtgggatgcactgagagtgctgggagcggttacagccctgttcctgctgctgtgggcgacctgggctgtgggatccacagtctatatttacctgctgcctcaggcacgccggagcaaccactggctccgggcacacggggcctgggcagtggtgacaggagccaccagcggcattggcaaggcttacgcacatgagctcgcccggagaggtctgaacgtcgtcctcatcagtcgagacctgagcaagttgaagcacgaggcaaaggagatagaggggctttacggcaaaagaacacgagtgattcaggtggatttcaccgggggcttgggaatctacgagaccattg

SEQ ID NO: 11288 - DNA, 421 bp, Bos taurus
  Clone ID: 48-LIB34-048-Q1-E1-D8
ctagaagacatccctacttttatgcaccagaactcctttactatgctaataaatataatggagtttttcaagaatgctgccaagctgaagataaaggtgcctgcctgctaccaaagattgaaactatgagagaaaaagtactgacttcatctgccagacagagactcaggtgtgccagtattcaaaaatttggagaaagagctttaaaagcatggtcagtagctcgcctgagccagaaatttcccaaggctgagtttgtagaagttaccaagctagtgacagatctcacaaaagtccacaaggaatgctgccatggtgacctacttgaatgcgcagatgacagggcagatcttgccaagtacatatgtgataatcaagatacaatctccagtagactgaaggaatgctgtgataagccttt

SEQ ID NO: 11289 - DNA, 425 bp, Bos taurus
  Clone ID: 48-LIB34-049-Q1-E1-D8
atttattactatgctgatctcactacaactattcctaattataacctttaccgccatggaactaatcttagtttatattccatttgaagcaatactagtcccaagactcattattattacccgatgaggaaaccattcagaacgcctaaacgccggactctatttcctattctatacactagctggctccctacccctattagtcgcactaatttatatccattgcacagtaggatacctaaatttcctaatattacagtactgagtacaacctgttcataactcttgatctaatgtcttcatatgactatcatgtataataaccttcatagtaaaaataccactatatggcctccacctttgactacctatagctcacgtagaatccaccatcgcatgctccatagtccttgcatcagttctac

SEQ ID NO: 11290 - DNA, 373 bp, Bos taurus
  Clone ID: 48-LIB34-050-Q1-E1-D8
cactttccgctgctatgatggctacactcttcggggctctgccaatcgcacctgccaagggaatggtcggtgggatggggaaacggccatctgtgatgatggagcgacgtactgccccaacccgggcatcccccttggcacgaggaaggtgggcagccagtaccgccttgaagaccgtgtcacctactactgcaaccgggggctcactctacgtggttctgaccaccgaacatgcctgaaaggtggcccttgaattgaaacggacccttcctgccaaaaccccttaattgtaaacactcctgcaaaggtggccaaacctttcctgtcttccctgacagacaccatagagggatttaatcccaaggatggacat

SEQ ID NO: 11291 - DNA, 239 bp, Bos taurus
  Clone ID: 48-LIB34-052-Q1-E1-D12
atttgaatgacctaaattcaaagggtttaatatgtgcttttcagaaactaagagaggaaagaagtttatagatgagttttcttctagattttctttatttctatttcagagtataaccccacaactcaaattaattaggcttgtttatggccatcatttcaaaaggaaaaatcctcccctactaaattctttacccagcattctgcagtaattgcctggacttgattgcaagacagtag

SEQ ID NO: 11292 - DNA, 236 bp, Bos taurus
  Clone ID: 48-LIB34-054-Q1-E1-D8
cggacgcgtgggaaaacccaggacgctatggaggccgcccttctcgtagagaagaacctgaatcaagccctgttggatctgcatggcctggcttctgcccgcggagacccccacatctgtgacttcctggagaaccacttcctagatgaggaagtgaaactcatcaagaagatgggtgaccatctgaccaacctccgcaggctggctggtccccaggctgggttgggcgagtatcc

SEQ ID NO: 11293 - DNA, 351 bp, Bos taurus
  Clone ID: 48-LIB34-055-Q1-E1-D8
tcgagttctacgcgccctggtgcgggcactgcaagcagctggagccggtgtacacctccctgggcaagaagtacaagggccacaagaacctggtcatcgccaagatggacgccacggccaacgacgtcaccagcgaccgctacaaagtcgagggcttccccaccatctacttcgcccccagtggggacaaaaagaacccaattaaatttgaggacggaaacagagacctgaagcatttgagcaagtttatagaagaacatgccacataactgagcagaaccaaggaagaactttgaaggccgtgggggtctgcagagggcgagtgcgggagggaccggacccagcgaagct

SEQ ID NO: 11294 - DNA, 337 bp, Bos taurus
  Clone ID: 48-LIB34-056-Q1-E1-D12
cgtccggcaagttcataaatgcgcagatcttggtggtactagttgctatggttgaaatggtgcctttaggtcactattccatatttacaccctcagttctcatctcctgagcgtgggcaccgagttcacagtgggaatgtgctcagacgttatgcagatctgacggagaactgctcggatgcctggggctttgatgactccaccctgtagtcacatgggaacatgctgtttttacaaggggagtttgtgtacaagggtcatgcctgggcccggcagttaatctcagagagggttaagggatcgcccagtcccgtggatgctgcattcggctatgatc

SEQ ID NO: 11295 - DNA, 370 bp, Bos taurus
  Clone ID: 48-LIB34-056-Q1-E1-D8
cctgatcttcatggagcaatagtaccccccacacagagtattattcttccacatgtaataacatttttatatatcatgttatcagaaattttttttcataccttatatctctctaaagctatcaaaatgtagttggtgtgagttttcagaaaaagtttttaggacaaatgacattaaaaacagcacatggttttctttcatatttgtcatttccattgtgtaccaagaagtaactaaaaggatgattgtggacagtcagtgttcataatttccattccagtggattgtgagaagtttcaaattaggaagagaaattgaggtgaagtaaaatcatgtgtttaaaatccactttgaacctctctttatttat

SEQ ID NO: 11296 - DNA, 221 bp, Bos taurus
  Clone ID: 48-LIB34-057-Q1-E1-D8
ctccagtattcttgcctggagaatcccagggacggcggagcctggtgggctgccgtctatggggtcacacagagtcagacacgactgaagcaacttagcagcagcagcagcagcagcagcaggcttcaacagtatgtcaaccaagaacttccagatgtacaagctgtattgagaaaaggcagaggaaccagagatcgaattgccaacatccattggatcat

SEQ ID NO: 11297 - DNA, 251 bp, Bos taurus
  Clone ID: 48-LIB34-058-Q1-E1-D8
tgggacgcgcggttcgatacaatactctagattgagtcgtatgaatcagggaaatttaggcagacataaattgtaagctacaaaattactggtgtgcagcattaatatgaagcactataatgtttatcaccagcgaagagtcgaaagtttcgaatataggttaagatctttcttcagatattaaacacgcatcgttctgatgagcccctaagcgtaagcttgtcgcaaataccagctctcgctctcctctg

SEQ ID NO: 11298 - DNA, 203 bp, Bos taurus
  Clone ID: 48-LIB34-059-Q1-E1-D8
gtccaagccacactcttggccctggcaagtcagccttcgaagaagctcgaggcacttctgtggaggaactctgatatccccaaagtgggtgctgactgctgcccattgcctggacaacattttagcgctgtcattctacaaggtcatcctgggtgcacacaacgagaaagtccgggaacagagtgtccaggaaataccagtgt

SEQ ID NO: 11299 - DNA, 350 bp, Bos taurus
  Clone ID: 48-LIB34-061-Q1-E1-D8
acaaagatgatagcccagacctccctaaattgaaaccagaccccaatactttgtgtgatgagtttaaggcagatgaaaagaagttttggggaaaatacctatacgaaattgctagaagacatccctacttttatgcaccagaactcctttactatgctaataaatataatggagtttttcaagaatgctgccaagctgaagataaaggtgcctgcctgctaccaaagattgaaactatgagagaaaaagtactgacttcatctgccagacagagactcaggtgtgccagtattcaaaaatttggagaaagagctttaaaagcatggtcagtagctcgcctgagccagaaa

SEQ ID NO: 11300 - DNA, 190 bp, Bos taurus
  Clone ID: 48-LIB34-062-Q1-E1-D8
caccaccaccacaggcacaagggtccccaaagacagggtcactcagataactgtgatacaccagtaggaagtgaaagtttacaaccttctcttccacaaaagaagctctgacgaaagagatgcataaatcagttactctgacagtttcccaaagattcagaatctgctttgagtagctgctgttgccaca

SEQ ID NO: 11301 - DNA, 376 bp, Bos taurus
  unsure (50): unsure at all n locations; Clone ID: 48-LIB34-063-Q1-E1-D8
ctcctgctctgcgggcagcttctcgcggtgaaaaccggcagtgaaggccnaagccgaaacctccccaaaggcccccgaaattcctaaaacccatttgaagtacccggttcgctatcagtgtgacaaatattacaaactgcatgctgaaaatggggtgtatacttttaacaataaccaatggataaacaaggacattggacagcaacttcctaaatgtgaaaaagataacagctgccaagagccccccaaaattaaaaatggctacttggagtacttggtcccctatcagtgcaaacctaatacacactgcccacctgtggagatggagtgtacacctttaacagtaagaaacagtggataaataagaacattggac

SEQ ID NO: 11302 - DNA, 173 bp, Bos taurus
  Clone ID: 48-LIB34-065-Q1-E1-D12
cctcctggctctgactactattaaagtcaatacactattgtcaaaaaaaaaaaaaaaaaaaaaaaaaaaaaaaaaaaaaaaaaaaaaaaaaaaaaaaaaaaaaaaaaaaaaaaaaaaaaaaaaaaaaaaaaaaaaaaaaaaaaaaggggggcccccccaaaagtttcaaactt

SEQ ID NO: 11303 - DNA, 214 bp, Bos taurus
  Clone ID: 48-LIB34-065-Q1-E1-D8
cggagccccgggcccgccgacaccatgagttggtcctcgcaccctccgagtgtaatcctccacattccttcaatggcttccttaacaatgccgggaaaaggtggcaacccaaaaaaatggtggaacctaagataaagaattgggaagtaattgcccaactacctgtggaattgcagatttcctgaataattaccaaaccagtgtagacaaagat

SEQ ID NO: 11304 - DNA, 260 bp, Bos taurus
  Clone ID: 48-LIB34-066-Q1-E1-D8
gctagaaccaagtgctaatatgccatggttcaagggatggaaagtcacccgtaaggacggcaatgccagtggaaccaccctgcttgaagctctggattgcattctgccaccaactcgcccaactgacaaacccttgcgtttgcctctccaggatgtctataaaattggtggtattggtactgtccctgtgggtcgtgtggagactggtgttctcaaacctggcatggtggtcacctttgctccagtcaatgtaacaactg

SEQ ID NO: 11305 - DNA, 233 bp, Bos taurus
  Clone ID: 48-LIB34-067-Q1-E1-D8
caggctgaaccgtgtaccctcccttagcaggcaacctagcccatgcaggagcttcagtagatctaaccattttctctttacacttagcaggagtttcctcaattttaggagccatcaacttcattacaacaattatcaacataaagccccccgcaatgtcacaataccaaacccctctgttcgtatgatccgtaataattaccgccgtactactactactctcgctccctgta

SEQ ID NO: 11306 - DNA, 214 bp, Bos taurus
  Clone ID: 48-LIB34-068-Q1-E1-D8
gaaatgaatgcttcctgagccacaaagatgatagcccagacctccctaaattgaaaccagaccccaatactttgtgtgatgagtttaaggcagatgaaaagaagttttggggaaaatacctatacgaaattgctagaagacatccctacttttatgcaccagaactcctttactatgctaataaatataatggagtttttcaagaatgctgcca

SEQ ID NO: 11307 - DNA, 319 bp, Bos taurus
  Clone ID: 48-LIB34-071-Q1-E1-D12
ccgggccgacccacgacgtccgcaggaggttcatgacattcggagctatctgacagaacaggtcaaccaggatctgcccaaggaagtgctggctgaactggaggccttggagggacgtgtgcgcagaatgtgacctgagccttcagctagcgagggggcacagcaccccccacccctactccaactcccctggaataagtaagccactaggcttgcagaaactatgagcaacttaacaacactctcatcctctgggtgctatgggatcaggccccagagctttccccacatgctgcctaataatgaaatgctcatttat

SEQ ID NO: 11308 - DNA, 405 bp, Bos taurus
  Clone ID: 48-LIB34-071-Q1-E1-D8
acggagccccgggcccgccgacaccatgagttggtcctcgcaccctccgagtgtaatcttctacattctttcattgctttcttcagcatgcctggcatatgttgctacccgagacaactgctgcatcttagatgaaagatttggtagttattgcccaactacctgtggaattgcagatttcctgaataattaccaaaccagtgtagacaaagatctacgaactttggaaggcatcttatatcaggttgagaacaaaacatcagaagccagagagctggtcaaagcaatccaaatcagctataaccctgatcaaccatcaaagccaaataacatagagagtgctaccaagaattccaagagtatgatggaagaaattatgaaatatgaaacactgatatcaacaca

SEQ ID NO: 11309 - DNA, 387 bp, Bos taurus
  Clone ID: 48-LIB34-072-Q1-E1-D8
acaagtctctatagtgagtcgtattaatggttggcaactaagaatggaggaagactaacatggacatgttctccactttcttatttctcaaaacaatgttatcttcgtcgttttaatcttaggtttttaacagattaaacctttaaagcaagaagtgaattctgtcttttcagacccagaaatacacatgaatactttgctatgattacattttagatattcatttatacttttctatatctaagactcatatcttgatttttactatcatatatgaatgaagcctttatatcgatgtttttttgcaaatcttgaaagatagatgggaaaagataaaagaatgttgtcgaagtcttgattgcttagaaagtatttccatagtcaatg

SEQ ID NO: 11310 - DNA, 423 bp, Bos taurus
  unsure (310): unsure at all n locations; Clone ID: 48-LIB34-074-Q1-E1-D8
aattaccaaaccagtgtagacaaagatctacgaactttggaaggcatcttatatcaggttgagaacaaaacatcagaagccagagagctggtcaaagcaatccaaatcagctataaccctgatcaaccatcaaagccaaataacatagagagtgctaccaagaattccaagagtatgatggaagaaattatgaaatatgaaacactgatatcaacacatgaatcaacaattcgatttttgcaagaaatatataactcaaatagtcaaaaaatcgttaacctaagagataaagtggtccagcttgaagcanactgtcaagagccttgtcaagatacagtgaaaatacatgatgtaactgggagagattgccaagatgttgccaataagggggccaaagagagtggactttactttatcagacct

SEQ ID NO: 11311 - DNA, 450 bp, Bos taurus
  Clone ID: 48-LIB34-075-Q1-E1-D8
ccgggtcgacacaaaagtctaaaaccagtcgactttggcacaatgaagtgggtgacttttatttctcttctccttctcttcagctctgcttattccaggggtgtgtttcgtcgagatacacacaagagtgagattgctcatcggtttaaagatttgggagaagaacattttaaaggcctggtactgattgccttttctcagtatctccagcagtgtccatttgatgagcatgtaaaattagtgaacgaactaactgagtttgcaaaaacatgtgttgctgatgagtcccatgccggctgtgaaaagtcacttcacactctctttggagatgaattgtgtaaagttgcatcccttcgtgaaacctatggtgacatggctgactgctgtgagaaacaagagcctgaaagaaatgaatgcttcctgagccacaaagatgatagcccagacctc

SEQ ID NO: 11312 - DNA, 410 bp, Bos taurus
  Clone ID: 48-LIB34-076-Q1-E1-D12
gacccaaacgtcagggactggcatctcgtttcatacatgatattttacatgtttcaatgccattctcccaaatcgtcccaccctctccctctcccatagagtccataagactgttctatacatgagtgtctcttttgctgtctcgtacacagggttattgttacaacctttctaaattccatatatatgcgttattatactgtattggtgtttttccttctggcttacttcactctgtataataggctccagtttcatccacctcattagaactgattcgaatgttttctttttaatggctgagtaatactccattgtgtatatgtaccatagctttcttatccattcatctgctgatgggcatctaggttgcttccatgtcctggctattataaacagtgctgcgatga

SEQ ID NO: 11313 - DNA, 372 bp, Bos taurus
  Clone ID: 48-LIB34-076-Q1-E1-D8
ccgggtggacgcacgaatccgcggacacgtgggcaagttggtagctcctggatgagatgtttgctgctgcttttttcctcttatttttgatgacttatcagcctggggtaaccatacaggagaaggtgaactggagagtcagtcgagctgttcagagtttcacccccacagcggtctcctgccagctggacaactgggcagagtggacagactgctttccatgccaggacaaaaagtacagataccggagcctcttgcagccaaacaagtttgggggaaccatctgcagtgggaatgtctgggaacaagccagctgtcacaatcccaaaacttgtccgagtcaagcacagtgttgacaggaattccaatttt

SEQ ID NO: 11314 - DNA, 480 bp, Bos taurus
  Clone ID: 48-LIB34-077-Q1-E1-D8
cggtccggacctccgggtggcccaaacgtccgacaagagacaacccacaaactcactattatgctgtggcggtggtgaagaaggacactgacttcaagctgaatgagctcagaggcaagaagtcctgccacacaggcctcggcaggtccgctgggtggaacatccccatgggcaaactttataaggaattgcctgatccacaggaatcaattcagagagctgcggccaacttcttctctgccagctgtgtcccctgtgcggatcaatcatcatttcccaaactctgtcaactgtgtgcggggaaagggacagacaagtgtgcctgctccaaccacgaaccatacttcggctactcaggggcctttaaatgtctgatggaaggcgctggggatgtggccttgtcaagcactcaacggtattcgacaaactgcctaaccaagaagacaggaaaaactatgagctgctctgcggggacaacac

SEQ ID NO: 11315 - DNA, 423 bp, Bos taurus
  Clone ID: 48-LIB34-078-Q1-E1-D8
atcattaaatatgctgtctcagtgctattgagacttgccaaggaatatgaagccacactggaggaatgctgtgccaaagatgatccacatgcatgctattccacagtgtttgacaaacttaagcatcatgtggatgagcctcagaatttaatcaaacacaactgtgaccaattcgaaaaacttggagagtatggattccaaaatgcgctcatagttcgttacaccaggaaagtaccccaagtgtcaactccaactctcgtggacgtttcaagacacctaggacaagtgggtacgaagtgttgtacacagccggaatcagaaagaatgccctgtactgaagactatctgagcttgatcctgaaccggttgtgcgtgctgcatgatagtacaccagtgagtgaaaaaatccacaaagtgctgcac

SEQ ID NO: 11316 - DNA, 387 bp, Bos taurus
  Clone ID: 48-LIB34-079-Q1-E1-D8
agattatccaaagcagctggagaaggaatttgggagccctgatggggtctgccttcattctgtggatgcagcctttacctgtcctggatcttctcagctctacatcatggcaggccagaagctgtggaggctggacctgaacttaggagctcaagccacgtggacagagcttccttggctccatacgaaagtcgatggggccctgtgtacagagaagtctctgggcccccactcgtgttctgccaatggtctgggcttgtacctcgtccaaggccccaatctgtactgctacaaagatgtggaggaattgagcaagaccaaggaccttccccaggcccagaggatgaacagcctcctgggctgcgctccccaacagcactcctgatg

SEQ ID NO: 11317 - DNA, 417 bp, Bos taurus
  Clone ID: 48-LIB34-080-Q1-E1-D8
aggatcaccgggcggtcagtcaggtccaccggatcaacgagaccaagcacagcgtcctgcagtacgttgggggtgtaatgtctgtggagatgcaggccccgaagcttctgtggctaaaagagaacttgagagagacttgctgggataaggcgggacatttctttgatctcccagacttcttatcgtggaaggcaacaggtgtcacagcacggtctctttgttccctggtgtgcaaatggacatactctgcagagaaaggctgggacgacagtttctggaagatggttggtttggaagacttggttacagataattacagcaaaatatgaaaccaagtgctgcctcctgtagcttctcttggaagtgggctcacaccatatgcagcaaatgaccttggccttcctcccggaattgcag

SEQ ID NO: 11318 - DNA, 411 bp, Bos taurus
  Clone ID: 48-LIB34-082-Q1-E1-D12
aaaaacaaccaagatagaataaaacaaaacatttaatcccaatttaaagtataggagatagaaatctaagtacggcgctatagagaaagtaccgcaagggaacgatgaaagaaaaaactaaaagtataaaaaagcaaagattaccccttgtaccttttgcataatgaattaactagtataagacttaacaaaatgaattttagctaagcagcccgaaaccagacgagctactcacaaacagtttaccaagaactaactcatctatgtggcaaaatagtgagaagatttgtaagtagaggtgacatgcctaacgagcctggtgatagctggttgtccagaaaatgaatctaagttcagctttaaagataccaaaaattcaaataaaccccactgtagctttaaaagttagtc

SEQ ID NO: 11319 - DNA, 441 bp, Bos taurus
  Clone ID: 48-LIB34-082-Q1-E1-D8
accaacccagggcagtttgatcctggtcacttcctggatgaaagtggcaactttaagaagactgaccacttcatggctttttcagcaggaaaaagagtttgtgttggagaaggcctggcccgcatggagctgtttttactcctggtcagcattttacagcattttaccttgaaatctgtggttgatccaaagcacattgatactgcaccaagtttcaaagggttaatctctattccacccttctgtgagatgtgtttcattccagtctgaagaaagggctgactgccaggttgcagagtgagcctctccagctccatctacacaagctgatgctctctgtcctggctgttacccattgtccaactctcccttacctttaagagtgacattcttgagccctgcctgttctaattttcccttaagatcagttcaagttttttt

SEQ ID NO: 11320 - DNA, 400 bp, Bos taurus
  Clone ID: 48-LIB34-083-Q1-E1-D12
agccaatggggagcagccgccactgcaggcagggctggaccggagcgggtgctcagaccagttacctcaggccgacctgtcccagagccgcagccggcgcccactgcccagcgcccctggcccactcgctccctgccctcacgaggccgctgcttgctcagattgtctatttgctatgctgaatgcagccccagttactttttacgatctgtgatgccttaccgattggatcttgatcctgtatttaaagttttctaacattgccttatactgtgtttctcttcttgggggtggggccgtgagctcttctcgctgttcttcactcgtccacctggtagcagaggccatgaggtgacggcaacccctatgccgccccgggtcctcctggggccaggccctc

SEQ ID NO: 11321 - DNA, 407 bp, Bos taurus
  Clone ID: 48-LIB34-083-Q1-E1-D8
aggacgcgtgggcttcgttgcgagaggatggccctggagacggtgccgaaggatctgcggcatctgcgggcgtgtctgctgtgttcgctggtcaagactatagaccagtttgaatatgatggctgtgacaattgtgatgcataccttcagatgaagggtaaccgagagatggtttatgactgcaccagctcttcttttgatggaatcatcgcgatgatgagtccagaggacagctgggtctccaagtggcagcgagtcagtaactttaagccaggcgtgtatgcagtgtccgtcactggtcgcctgccccaaggaatcgtacgggagctgaagagtcgaggcgtggcctacaagtccagagacacggccataaagacctaagaaggcgcatggctgccagcatcttg

SEQ ID NO: 11322 - DNA, 405 bp, Bos taurus
  Clone ID: 48-LIB34-084-Q1-E1-D8
ccctgattctttgtttttttcttctttatataacccattctgttaaacacattgcatgacagagaaagatgagacacaaacttataatgaatctgggctcttctgtaatatgctttcttttataatattggtcagctttgctatctttgatcttatcatctggaatttagtcattacatagaatttcaagaatttcaaggtcctttcatctaagctatctcattctaataccatggcacccttgggatgctggtcctagtgttacagtatacaaaagctcaaagtgaagggatttactaagactgaaaagttagtagaaaagctaagacaaaagtctagtttaacaggctactcattcagtgctttccccacttcagcacaaggagttttgaaagttttaataca

SEQ ID NO: 11323 - DNA, 401 bp, Bos taurus
  Clone ID: 48-LIB34-085-Q1-E1-D12
aggccagctggaaagaagggggtgcatgaaagcagaatgactgctgcgtcccgacccggagagcctgctgtttgggggcaccaagcccatgctcacccctccttagtttgcacaattctgtcttccgagattccagcagccttcagggaggggtaggtacccaacctttccctcatctcgtgctcattttaccatgggtgtattctactcttgtgtaagaacatgcatgaatgagtcatgcacatgtatacattatgcatttgacaagtggtggtaaaaacaaacaaaaaaaaaccaaaacaagtttggttcgtgtttctgaaatgtcagtacatttcgtgccactcacactgtgatgtataaaagagctgttcgaacgccttttaatgtcctgttttgga

SEQ ID NO: 11324 - DNA, 410 bp, Bos taurus
  Clone ID: 48-LIB34-085-Q1-E1-D8
aggcctgggatctgcgcaggattgagggacccacaagtcaaccttgagacctttggcccagccggccctaccatgacaaaggagtatcaagatcttcagcatctggacaacgaggagaatgaccatcagcacagaaaaaggccactgcctcctcattcattcagtcggcgtctctgcaccggacccagcctcctcctggtctccatgggccttagcctcctgctgctagtcgttctatgtgtgatcggatcccagaactccaagctgcaggaggagctcagcgccctgagagagaccttcagcaacctcacagtgagcacagaggccaaggtcaaggccctgagcgttcaaggaggaaatgtgggcagaaaggtgaagtccctggagtcccaactggagaaacagcagca

SEQ ID NO: 11325 - DNA, 492 bp, Bos taurus
  unsure (21): unsure at all n locations; Clone ID: 48-LIB34-086-Q1-E1-D8
ggtccggacttccgggtggancacgagtccgattagaaaagactctgatgctgggagggattgggggcaggaggagaaggggacaacagaggatgagatggctggatggcatcactgactcgatggatgtgagtctgagtaaactccgggagttggtgatggacagggaggcctggcgtgctgcagttcatggggtccgaaagagtcagatacgactgagtgactgaactgaactgacaactaagctgaacttgatttcttaagcaatgtttttgagggccaaataatttaaagtattgctacaagtattttattgtttaatagacctacattcctccttattttatgtttggatgttaagggaaataaagaaagatggcccaatctaacaaaccaacattccttttaaaaggctgagcctggacatcatctgaatttaaaaaatgaaggttttaaaaataattaaccttcaaaaaacatgttgtgattaat

SEQ ID NO: 11326 - DNA, 408 bp, Bos taurus
  Clone ID: 49-BOVMS1-001-Q1-E1-E10
aacccactaataaaaattgtaaacaatgcattcatcgaccttccagccccatcaaacatttcatcatgatgaaatttcggttccctcctgggaatctgcctaatcctacaaatcctcacaggcctattcctagcaatacactacacatccgacacaacaacagcattctcctctgttacccatatctgccgagacgtgaactacggctgaatcatccgatacatacacgcaaacggagcttcaatgttttttatctgcttatatatgcacgtacgacgaggcttatattacgggtcttacacttttctagtaacatgaaatattggagtaatccttctgctcacagtaatatccacagcatttataggatacgtcctaccatgaagacaaatatcattctgaggagca

SEQ ID NO: 11327 - DNA, 408 bp, Bos taurus
  unsure (370),(387): unsure at all n locations; Clone ID: 49-BOVMS1-003-Q1-E1-E2
atgcgacgtcatagctcttctatagtgtcacctaaattcaattcactggccgtcgttttacaacgtcgtgactgggaaaaccctggcgttacccaacttaatcgccttgcagcacatccccctttcgccagctggcgtaatagcgaagaggcccgcaccgatcgcccttcccaacagttgcgcagcctgaatggcgaatgggacgcgccctgtagcggcgcattaagcgcggcgggtgtggtggttacgcgcagcgtgaccgctacacttgccagcgccctagcgcccgctcctttcgctttcttcccttcctttctcgccacgttcgccggctttccccgtcaagctctaaatcgggggctccctttanggttccgatttagtgcnttacgggaactcgaccccaaa

SEQ ID NO: 11328 - DNA, 429 bp, Bos taurus
  unsure (422): unsure at all n locations; Clone ID: 49-BOVMS1-004-Q1-E1-E2
gtccgcgagatcataggcaagcgtggcatcattggctatgatgtttgaagaccaatttttaacatgtgattatatttgctttattattcaagtgttcttggaccacgtgtgagcagactgctatttgaataaaataagacaatgtgtcagaatcagtgtttctctatcacacactacatggaaggtcacagtttctcttgacattaagttggtttgtctttcgctttaatatattaatacggttctaaatgcatgcctttgcttagcctgcaattggaaaagatatatatgagtacaccaacctggtacctgtataaatgaggttaactttattctgaaagcttgaaataaatgatatttaagctttatttctagaaaagctggggggaaggctttgagaaaatgagaacttgctccagtangcgaaat

SEQ ID NO: 11329 - DNA, 374 bp, Bos taurus
  Clone ID: 49-BOVMS1-005-Q1-E1-E10
atgcgacgtcatagctcttctatagtgtcacctaaattcaattcactggccgtcgttttacaacgtcgtgactgggaaaaccctggcgttacccaacttaatcgccttgcagcacatccccctttcgccagctggcgtaatagcgaagaggcccgcaccgatcgcccttcccaacagttgcgcagcctgaatggcgaatgggacgccccctgtagcggcgcattaagcgcggcgggtgtggtggttacacgcagcgttaccgctacacttggcaacgccctagcgcccgctcctttcgcattcctcccattcgttttcgccaaattctcccggtttcccggtcagctccaaatcgggggctcccttaagggtcc

SEQ ID NO: 11330 - DNA, 451 bp, Bos taurus
  unsure (238): unsure at all n locations; Clone ID: 49-BOVMS1-006-Q1-E1-E2
caacgacatcaggttcatctgtttaccgagctagaaacatagtatgtagattcacttttttaaatgcaacagctgtgctgaaatttttttatcattaacacttgaagtaataaaataggcttcatttattaataaatgtttcatttgatttatttttctattatagttccatttgtgaggattgtgactttgtttatgagctataatttctatacttgtgacgcttaaaaggaagcanacaagttaaaaaaagaaaattgcagataacacttgtcccttccgtcttcacttagttgtgttactgttttaattcactttgcctttgcaaaagtttgggtatcttctttgtaatgctattgagtcccaaccaagaagattatgttcattgcattccccttgcttaatacatgggtaaaatggggaaaaaaggcaagacaaattctcattaaat

SEQ ID NO: 11331 - DNA, 355 bp, Bos taurus
  Clone ID: 49-BOVMS1-008-Q1-E1-E2
taaagggactgggcactgcctctctgcacgccactgctttgaaatcgggttgcaatgagaaagcatttgtttttcaacaggctcccaagtgtggtcgttttttttcctcctgatgctgaagaaaaaaaaaaaatgtttgcacggattgcttaattaaaaattgcaaacaaaatctcatttgaagttagcattttggtcattgttgtctttgcttggtcactgtactttccaaaaaaatgcaagctatagaataatcagaaacagttattttagcttaacataatagactctgaaatcttttttttcccttagagtaaatatatatatatatatatacacacacacacacacacaa

SEQ ID NO: 11332 - DNA, 362 bp, Bos taurus; identical to SEQ ID NO: 4025
  Clone ID: 49-BOVMS1-009-Q1-E1-E10

SEQ ID NO: 11333 - DNA, 477 bp, Bos taurus
  unsure (444): unsure at all n locations; Clone ID: 49-BOVMS1-009-Q1-E1-E2
tcgcagtaattaaaataaggatttaccaaaaaccaggcttgcacaaaagtttattctccatagctgcaattaagaaacaaatacttaagtagattgattcctccgcatgtttatcatagagcagaaaagcgctgaccacgtagctgcttagtgatgcaagcaaaaagcctaagcgataaagccccactgatacacctcttgtggctcagctgggacccacattgtcatcacacgacacaagagttggagcggctgctccaactcagctgctcaccctgttctgtgagcagaaagaacttactgaaatgcatggtttaaataacttcctcatcaaaaccttccttctgttttttgtgctttcaaataactaatccgaatttccaaaaaattaacatttgaatttagctgtaattctcaactgacctttttccctgtactaacgtntggtttccctgtgtggcgtgttttctgaacgtt

SEQ ID NO: 11334 - DNA, 481 bp, Bos taurus
  unsure (458): unsure at all n locations; Clone ID: 49-BOVMS1-010-Q1-E1-E2
cgggtcgagcccgcgttcgaattacatgggcctttccaattttttcattaccttaatggtttggagctatactggtcaagtattttatagaatattcctcaagtgtggcttatcttatatagtctcataattagaatgtggttatgagttttgggaagaaacaccacagaggtaatgcctttcttatatcacatcagagagtatatgacattcgcatgatgtcattgataatataaatcaatatatctacaggattctgcactacaaaattactatttttttttcctttttataccctattctttggaagtgagtcaataagtccaatccaccctcaatagtacatcaacattctgtaaggaaaatttgtctattcacctccattaatttattttgtcatttatttatatcattatggacagagttgtatttattttatactttggattataattcanaattatattattgttcaaattgt

SEQ ID NO: 11335 - DNA, 454 bp, Bos taurus
  unsure (400): unsure at all n locations; Clone ID: 49-BOVMS1-012-Q1-E1-E2
ctggtggggaccggccccaggaggatcctcatcgacactggagaaccatcaatcccagaatatatcagctgtttaaagcaggctctgacggaatttaacacagccatccaggaaatcatagtgacgcattggcaccgtgatcatactggaggcataggagatatttgtaaaagcatcaataatgacactacttattgcgttaaaaaactcccacggaatcctgagagaaaagaaattataggcaacggagagcaacagtatgtttatgtgaaagatggagatataattaagactgaaggtgccacactaagagttgtatacacacctggccacactgatgatcatatggctctagtcttagaagaagaaaatgctctgttttctggagattgcatcctangggaaggaacaactgtaattgaagacctctatgattatatgaactccctgaaag

SEQ ID NO: 11336 - DNA, 432 bp, Bos taurus
  Clone ID: 49-BOVMS1-013-Q1-E1-E2
attttaaccatatggctcctccctctaatactaatagctagccaacatcatctatcataagaaaacctaacccgaataaaactatttattactatgctgatctcactacaactattcctaattataacctttaccgccatggaactaatcttattttatattctatttgaagcaacactagtcccaacactcattattattacccgatgaggaaaccaaacagaacgcctaaacgccggactctatttcctattctatacactagctggctccctacccctatgagtcgcactaatttatatccaaaacacagtaggatccctaaatttcctaatattacagtactgagtacaacctgttcataactcttgatctaatgtcatcatatgactagcatgtataatatctttcatagtagatataccactatat

SEQ ID NO: 11337 - DNA, 191 bp, Bos taurus
  Clone ID: 49-BOVMS1-014-Q1-E1-E2
gcttcatccgccaattaaaatttcattttacttctaaccaccacttcagctttgaagccgctgcctgatactgacatttcgtagacgtagtctgacttttcctctatgtttctatctattgatgaggctcctaaaaaaaaaacataaagacaagaatcaatttcgtaatcaaaaaaaataactaggtcaat

SEQ ID NO: 11338 - DNA, 218 bp, Bos taurus
  Clone ID: 49-BOVMS1-015-Q1-E1-E10
ccaaccacgcgtaagcatgactcgctcagtagtggaaatgcctccgctgcaagacccgtcaggcaaaggtacctcaatcacagtactcactggagtctctattctcataaaacatcacctgcaggggagcaacgtcacattacgacacctacaacattcgcaacccgatgacatacagtcaatcaacgggaatattgacctacatagaacatgcccag

SEQ ID NO: 11339 - DNA, 342 bp, Bos taurus
  Clone ID: 49-BOVMS1-016-Q1-E1-E10
aaaacaactgtcactgggcgataactaacgtcctttctgcacagaagcacttcgactgcatggtaaaagttattcagtctgctgaatgctaaaaccaaagaaaacatcaatagctactgagagctgcatctcagcggatggggaaaatgataaagggggggccccgactgtgtttacgttgaagaattcctcccacactggctttcatggcttccaatggtttgacgataattcaataagctgtgcagactttaaaatatctttgcgagggcaatgacagtagtacccaattgtccttggctcaaacaataccactctgtccaaaatagtcattataatcgc

SEQ ID NO: 11340 - DNA, 436 bp, Bos taurus
  unsure (339),(388),(427): unsure at all n locations; Clone ID: 49-BOVMS1-016-Q1-E1-E2
aacatgactgacaatgatcttatcaatattcttgaccctttttatcatctttcaactaaaagtttcaaaacacaacttttatcacaatccagaactgacaccaacaaaaatattaagacaaaacaccccttgagaaacaaaatgaacgaaaatttatttacctcttttattacccctgtaattttaggtctccctctcgtaacccttatcgtactattcccaagcctactattcccaacatcaaaccgactagtaagcaatcgctttgtaaccctccaacaatgaatacttcaacttgtatcaaaacaaataatgagtatccacaattctaaaggacanacatgaacattaatattaatatctctgatcctatttattggatcaacanacctactaggcctaattacccattcattcacaccaacancacaactat

SEQ ID NO: 11341 - DNA, 341 bp, Bos taurus
  Clone ID: 49-BOVMS1-019-Q1-E1-E10
ggagactgaggatggcattattgcttatgatgattgtggggtgaaattgactactgcttttcaagccaacgatctggaatgatctacttcacctcaaatatgagacaaggttgaattctaatatcactgacaaacatacgcctggacagcagattgcaacttgtgtgcgactcttacgtcgtaattcgcactccaagatgctcttgggttatgtggcaactttgactgatcactctggatttatttcaagacccaatcatgataaggatatctttttccattatagtgagttcactggtgatgttgatagcctggatctgcgggatatggtacactacacc

SEQ ID NO: 11342 - DNA, 355 bp, Bos taurus
  Clone ID: 49-BOVMS1-019-Q1-E1-E2
gccaggggagctacgactattagaagtcgataatcgagttgtactaccaatagaaataacaatccgaatgttagtctcctctgaagacgtattacactcatgagctgtgccctctctaggactaaaaacagacgcaatcccaggccgtctaaaccaaacaacccttatatcgtcccgtccaggcttatattacggtcaatgctcagaaatttgcgggtcaaaccacagtttcatacccattgtccttgagttagtcccactaaagtactttgaaaaatgatctgcgtcaatattataaaataaaaaaaaaaaaaacaaaaaaaaaaaaaaaaaaaaaaaaaagggcggccgctct

SEQ ID NO: 11343 - DNA, 431 bp, Bos taurus
  Clone ID: 49-BOVMS1-021-Q1-E1-E10
tgttgttcagtcatcctagttttaatgtagtgccttgtcttatgtccttgaatctagttgtataactttacttttttaggcaataattagaacagttcccttcagaggctgcatttgccttccatctcctgaagagatacaagtctacaagtctgcctttgaaccatcatttaaaatataaaaaaacactgaacatgtttttgttatggttaccttctggggtttcagttcctccgaagtaacttttcacaatgagaagttaaaaaccctgaacaaaaatgaagcttcacgtatatttcaaatagtataaagtttattttacaaaagagaagtgactctcgggagaaatttagaatcatgctgacacagatgcagatagaaatactaatttcttctttacagagtactctgaaagttcaaggactagcctc

SEQ ID NO: 11344 - DNA, 429 bp, Bos taurus
  Clone ID: 49-BOVMS1-022-Q1-E1-E2
gccaaccaagacgtctgaagggtctgcgcaaacacgagaggagagtgaaggaactcacttaccagacggaagaagatcggaaaaatattctcagacttcaggacttggtagataaacttcaagcgaaagtgaaatcttacaagagacaagctgaggaggctgaggaacaatccaatacaaatctatctaaattccgcaagctccagcatgagctggaggaagccgatgaaagggctgacattgctgaatcccaggtcaacaagctgcgggtgaagagccgggaggttcacacaaaaatcatcagtgaagagtgatcgtgtcctgatgctatgggatgactgaagagaggcacaaaatgtgaagtctttggtcatttctctctgtaattatcatctatcctactctactgcaaaggaaataaagagcata

SEQ ID NO: 11345 - DNA, 442 bp, Bos taurus
  Clone ID: 49-BOVMS1-023-Q1-E1-E2
acgcgtccgcattcttaacctttcccaaatgattcacatggactaatctttctatctttctgatctgtaaatacttaaaaaaaagagtagttttgtatcaacctaaatgagtcgaagttcaaaaataatacatttcagtcttttcataattgttgacctaagaagattacacattttctagtgacatgtacatactgtatatagccggattaacggttataaagttttgtaccatttattttatgacattttacactgtaactattgaaactaatggttggtaggagaaagtttcttatggaacgaataccctgctcaacacttaatcaatctttgtgcctcaacatactgttgatgtctaagtatgcctcagtgggtcgaggaattccccattgaagatgtcctatccaccgaaaaatgctgtgcacatcaactgatatgc

SEQ ID NO: 11346 - DNA, 342 bp, Bos taurus
  Clone ID: 49-LIB188-003-Q1-E1-E10
gacagaagctatgacatcgcccaaatatcccgacacctggacttcatcagccttttgacctatgactttcacggagcctggcgccagacagtcggacaacacaacccccatctcaagggcaagaattccaggccagttcaccaaggagaaagggattcttgcctaataagaaattcgtgacttcctccaaggggccaacaaccacaaattccgtgaccaacaaggcccccaagccaacaaggggaaacaattggttgggtaagaccaacaagaaaatggtcaaaaccaaggaacggccaaccggccgcccggcaaggtttttttttttttttcctttttttt

SEQ ID NO: 11347 - DNA, 293 bp, Bos taurus
  Clone ID: 49-LIB188-003-Q1-E1-E2
tggcggccggatacttggagtaggtcacgcccagcatcagctcgcccccgggctgggctttcgggtccctgttcaagaagaaggagaagacgttcttgtccaccaacttctgctgcatcaggttgtcgaagacaggcagcacgttgttgacggagatgcgggggtaggccatgcccagaatgccgtcgaacttggccgcgatgaagaccacaccgggctgcttgatggcctccccgaaggtctgcctctgcaccgtgacgccacccgggctggatgaggatgggttacagggt

SEQ ID NO: 11348 - DNA, 408 bp, Bos taurus
  unsure (401): unsure at all n locations; Clone ID: 49-LIB188-005-Q1-E1-E10
gcgggacactgagtgacctgaggcctccggaggaagaaccggtcctggaagagctcgtccatgatgctggacgcccgggtgaagctgtcctccatgacgtccatcacgtggctctgctcccggtcattctccatcagggaatcgatgcggtcaccgttgatccagaagtagaagggggagctctggtttaggaactcctcaagctggtggccaaccagtcccgatccgcttctgcacacccgcgcgtagaacttcatgcaggtctgcttgaggcagggcttacattcctcccaaagggctgtcatggtctcattgcacaccccctgggacgccttcagcttgttttcagaatccctggtgtcattcagggcgtcctctttcttcttcttggcttcctctanggagctg

SEQ ID NO: 11349 - DNA, 355 bp, Bos taurus
  Clone ID: 49-LIB188-005-Q1-E1-E2
ctccggacgtaatggcggcgggctactccttttacgaagactgttgacgtgaacaggtccctatgactacctcacgcttgaagaatacccactgatgatttttttcatggtgatgtgtactgtgtatgtcctgtttggtgttctgtggctggcatggtctgcatgctattggcgacatctccggaaaatccagttttggatcggtgctgtcatctttctgggaatgcttgcgaaagccgtcttcaatgcagaatttctaaacatccgctctactcgagaatctgtccaaggtgccctaatccttgcaaaactgctttctgcagttaaacgctcattggctcaaaccctggtcatc

SEQ ID NO: 11350 - DNA, 369 bp, Bos taurus
  Clone ID: 49-LIB188-006-Q1-E1-E2
gggcgcggcatacacggacagcggtttcatggcgacatctttgggcttggagacggtgttcttttctgggaagggcaggtccgagtgggccactgtgcacgtgaactcctctccggactcccagtcctccgagcagaccgaggcctcaccccgggcgctgaaggtgtcgttgaggtgtcgctcaaaatacgtgtgggtctccagggccttgccgttctgacgggaccagctgatgttcaggccatcataggaggccaggtttgtgaccagacaggacagcttggctgacttcgtgaggaagatgtccgcgaaagatggggggatggttaagaccccgatgggagatggtggtgcaacatcacatgaaga

SEQ ID NO: 11351 - DNA, 457 bp, Bos taurus
  Clone ID: 49-LIB188-008-Q1-E1-E2
gccatggcggcgggatactccctacactcaccttcctttgctaacaccctttcagcgagtgttttcttcctctgcaaaggaaaaacaaattggatttgaaaaatattctcaagtttcatagctgaaatttggggcaaatgtgtccagaccagctagcattctctataaatatcaacaaaagcaggcttggggattctgtgctttgggtccaaggatcctggcaagaaacacatgttgagattcctctagttcagaatttccagggggtggaggtagagccacctcaactgtcttcagcctcagctggctcaattgccaggcttagtggcaactgcccctgccatctcgaagcccatttttcacatttgccctctgctgtgccctcttgccagcttctgtctttggctacagcactttaggcactattctaagtcctggaatatatcactcttttgtt

SEQ ID NO: 11352 - DNA, 416 bp, Bos taurus
  Clone ID: 49-LIB188-009-Q1-E1-E10
ctccgtacgaatggccgcgggatacttggcttccaaatgtgttagtctctctttattcttttgtaaactcttctagataaccacttccatttgtaggtgatgaaacgtgtgagcaatccacttcaaatgctggctggcactgtcatgagcatggtctttccctttactccaaactcagttacttctgactcttgtatattccaagtcccggaaatggtttcactgtagaccttatctgaaggcgctttctagtggtacgctacaaccagactctagctgctccaagaaggctacaaggatggatttagatatgacatattaaactaagaggcattcattccaatgagtttacatgcgttttatttttacacaacctacatgacaacgttttctcaaaaacaatgcctccgctccaa

SEQ ID NO: 11353 - DNA, 409 bp, Bos taurus
  Clone ID: 49-LIB188-009-Q1-E1-E2
accatctcacaacctgagtggttcaaatgccgccgatggcagtggaggatgaagaagctgggtgctccctctatcacctgtgtgaggagggcctttgccttggaatgtatccgggccatcgcggagaaaaaggcggatgctgtgaccctggatggtggcatggtgtttgaggcgggccgggacccctacaaactgcggccagtagcatcagagatctatgggacgaaagagtctccccaaacccactattatgctgtggccgtcgtgaagaagggcatcaactttcagctggaccatctgcaaagccggaagtcctgccatacgggccttggcaggtccgctgggtggatcatccctatgggaatccttcgcccgtacgagagctggagctgctctatgcccgggccca

SEQ ID NO: 11354 - DNA, 372 bp, Bos taurus
  Clone ID: 49-LIB188-010-Q1-E1-E2
accagactcggcagccagtagctgtccttcccaggccacatagtgatggctgtaaggctccggcccagccagtcaaagacattgagagtcaagaaacaggacacgggaatgaagtaggccttccaggcgctggtgcccgcgatggtggactcgacctcatctgtcacagcaggaaatatcccaatggtgatggtgaagacgatgcatacggcgaaagccgggactaagatacttttgaggatatcgcggagagaatggctttccttggcgggctgagagctgggggctgagaatccggtctcctcttggcctgcttttgattcctctcctttactaatgaggtccaacttggtctcctgctccccggggcct

SEQ ID NO: 11355 - DNA, 398 bp, Bos taurus
  Clone ID: 49-LIB188-011-Q1-E1-E10
atgctgccgtacgccatggaggccggatacaagctttattttttttttttttttttttttttcaaaatcaacagcatttctaattttatttcttgctaaaatgacagcagggaattgtaaatactgatgagcttggcaaaaatccgacttcaggaagggagaggaaggtccctcgcgcctggagattggggctgagagcagggaggagctgaggcccatggaggcaggctagcttctttgcaggctttacctcgtcaggaaggcgcaggcttccagaagcggggaggttgagcattttttcaggttggcaatggccgtgacatactctgtccccaaatattcttcatacgttggtctgcctccaagtttggccagacactcagtgttgtcattgaaca

SEQ ID NO: 11356 - DNA, 280 bp, Bos taurus
  Clone ID: 49-LIB188-011-Q1-E1-E2
ggccgcgggacacatgtgtagtgcgaatgactgaggcatcgccacagcccaagcatcaaagacggttgctccgtggtccatctaacagttctccgcactcaacacgcggctaatagcccatgtgcccgtccccgggatgaccagattatcgctgcccgccctacacgttcattcgtcagtttaatttccaactcattacatgacattctcggatagtccctctttaaagccaaacaccttaacattccacagatttggccagtcggatctacaagctgaa

SEQ ID NO: 11357 - DNA, 302 bp, Bos taurus
  Clone ID: 49-LIB188-012-Q1-E1-E2
gccataggcgcgggatactcgagaggcaaagtgtttcacatcatagattccacttccaaatccttggaatgttcatttctttggctataaagagggactagccgggaaagccaggtaatgcgtaggaaactaaactaacaaaagagcgggtggggcgggcagcgctaatgtcatcctcccggggacgggcacaggggctgttagccgcgggctgactgcggagaactgttagctggagcacggagcagccgtcctcgatgcttgggctgtcgcggggcttcagtcatccccaccacacaggt

SEQ ID NO: 11358 - DNA, 392 bp, Bos taurus
  Clone ID: 49-LIB188-014-Q1-E1-E2
gatactctgagatgggcagtgtcaggatgctgctgaggctgtaggtgcttttcttgctgtcctggtctgtgaaactgttttggaagttgctgctgctctgagtaaccccatccactttccacttgacattgatatctttggggtagaaatcattcaccaagcacacgacagagacagttccggtcttcagctgctcatcagatggtttgaagaggaagacggatggctcagcatcagaccttttgatctctaccttggttccttggcgaaagtattgggggcatatgaaccttgagaacagtaatagactccagcatcctcagcctgcacactactgattgtaagtgtgaaatctgtgtctgacccactgccagtgaacctgtctgggaacc

SEQ ID NO: 11359 - DNA, 418 bp, Bos taurus
  Clone ID: 49-LIB188-017-Q1-E1-E10
atgcgccggacgccatggacgccggatacacgctttattttcttctgatgcttatttttccttgggaaacagctttatttacacatcatgtctactttaatgaacctgaaaacgacaacgctttgggaatatcacgagacctggttcttcgggcccaagtgtgaagcagcccagatgtccagtcaaaaggctttaaagaagaccatctgtaatacaggggcctaaaatttgaactctttatatttcttgctgccactacggctgtcctgtggctgagctttccgtttcatttgcttctgcttggcagcatgctcatccaccatgtcactaaagtcttctttctccacttgtgcctgctgctcccgcacgtgctcctcatacttctgggtcatggccatgggatctagctccaactctt

SEQ ID NO: 11360 - DNA, 258 bp, Bos taurus
  Clone ID: 49-LIB188-017-Q1-E1-E2
aggtccctcaggccgggaggaaaacaactgatctggaaactccaagacatgttttttccaaatttcacctgcgccttgcagagaaacttccaaatcaagtcatccttgcgatccacacttcgggctacgacaccatgaaaagggacctgtgccaggtggcacaccttgaacacatccacaggcgcccgactgttgttcaagcagagaaactcatactggtccctgtcagacttctctggacagttctcaaatactgtc

SEQ ID NO: 11361 - DNA, 417 bp, Bos taurus
  Clone ID: 49-LIB188-018-Q1-E1-E2
gataccaaaagaccttcctcctgatactgcgctgctggacctgcaaaacaacaaaataactgagatcaaagatggagactttaagaacctgaagaaccttcatacactgattctcatcaacaacaaaattagcaaaatcagccctggggcatttgctcctttggtgaaattggaacgactttatctttccaagaatcaactgaaggaattgccagagaaaatgcccaaaactcttcaggagctgcgtgtccatgagaacgagatcaccaaagtgcgaaagtctgtgttcaatggattgaaccagatgatcgtcgtagaacttggcaccaacccgctgaagagctcaggcattgaaaatggagcctttcaaggaatgaagaagctctcctacatccgcattgctgacacaaatataac

SEQ ID NO: 11362 - DNA, 429 bp, Bos taurus
  Clone ID: 49-LIB188-019-Q1-E1-E10
acagctcgaccacttcctcatctgtaaaccggtctcccattgtggtcagcagttctctcaggtaatcctcctgaatggtgccagttgcttcttcatcaaagcaagcaaaagcatttctgatgacatcttctggatctgtgccatttaacttttcaccaaacattgtgagaaacatggtaaaatttatgggacctggagcctcgttcatcatggcatccagatactcatcagttggattttttcccagggaagcaagcatgtcatgcaagtcttccttgtcaatgaacccatccctgttctggtcgatcatgttgaaggcctccttgaactcctgaatctgggactggtcaaacatggcgaacacgttggaggtcgcgcgctgggggcgcttcttggtggtcttggtctttgctcttttgctcgacatgg

SEQ ID NO: 11363 - DNA, 403 bp, Bos taurus
  Clone ID: 49-LIB188-019-Q1-E1-E2
accggtcttctaccagcatccagattaggtagcctgtttatcttgagctgacttcctgctccagggctggcttcctaatccagtcatattgctgaagtgtggctgaggtgagcccaggcctctctctgcgggtgagggttgctcctcacttaggttgtggggagaactccccccatagtaaatggaagcagttgcctgcctgcctctggagtcccttttgcaacactcctttctttccctgggctgaagccaggacctggtggtgttccttacaggatactcagtgacaatgctgggcacagctttccatagtgaaggccatatgagcccgagcaccctttcacttggctccccccaccctctctatgaatcacattatgactgaatgctaagggtgagggct

SEQ ID NO: 11364 - DNA, 414 bp, Bos taurus
  Clone ID: 49-LIB188-020-Q1-E1-E2
actgcatcacggaagctcttataatgtgaaaatggcaaactgccaccaaagggaaggacaatgtcacaacttgacccgtgacctctcatcttccttccagatgaacacctgtgtgcaggccctattcccaggaaggaaagccatctgctggcactgctctgcctggctggggccaggctgactcacctgtttgtgtacgagatggagcaaagcaccccaggcatccgcctcatgctgctgctggggtgggagatcgccacagcggcgcatcaaacaccagctccacgcccacccgcctcccatggcacccggccctgaagatccccatgggctaaattcttctgtggatgggttattgccattggaaaacgattattctctagtagtgtaaacagtgccctttggtctctctga

SEQ ID NO: 11365 - DNA, 394 bp, Bos taurus
  Clone ID: 49-LIB188-021-Q1-E1-E10
tggccgcgggatactctgactctggtagacacaggcattggcatgaccaaagctgatcttgtaaataatttgggaaccattgccaagtctggcactaaagcgtttatggaggctcttcaggctggtgcagacatctccatgattgggcaatttggtgtgggcttctactctgcctacctagtggcagagaaagtggttgtgatcacaaagcataacgatgatgaacagtatgcttgggagtcttctgctggaggttccttcactgtccgtgctgaccatggtgagcctattggccgcggtacacacacacatatggggaaggcagatggagagattgacttcaggattgggttcaagtgattgtggaggctgacaagtctgaagtctgcagggc

SEQ ID NO: 11366 - DNA, 337 bp, Bos taurus
  Clone ID: 49-LIB188-021-Q1-E1-E2
acagagctaaggcacaacctggttgtttccaagagttaggggggcagcagtggagatgggaagcaagccctcttggacgctgggtctcccggtgggcttcttggctgggggctgggcctcagccccgagccccagcaaacccaaggctgtgttgaagaggttgatgggcgtggaaccatcggtgatgagggtggattttaggcccaggctctgcagcaattttacctgcatctccggccctgccacagccatgtctctgatggtgctgggccccagggcctctgtcatctgcttgaacttcttcacctccacctcagccagctgctgggccttgctc

SEQ ID NO: 11367 - DNA, 463 bp, Bos taurus
  unsure (267),(295): unsure at all n locations; Clone ID: 49-LIB188-022-Q1-E1-E2
ccgaggcgcatgggccggaggccatgaacgccggatactggtccgacaggaagctgcagccttccccaagggaaccaagatttggcccctgggggcggtcctccccaagttccgggccaaataacccaacaacctcctggaaaactcccaaaaaccaacgttcttcctccggaatcaaacggaccttccctgcgggcaccccccggttggagcagacgtggagcatgctgcacaacagctcggggctcgcctcgtccagaaggatanacaggatggagctgccgtaggtgtccancacctcctggcactgctcagctaaggatgtgggcagcttcgagcacactttgtccagcgcgtgaagtatttcttcctccgtcctgttgttgtcaatcagcttggccaactccttcaccacaaactcgcacacctcgcagtaaatgtcagcctttgcaagggctgggtc

SEQ ID NO: 11368 - DNA, 428 bp, Bos taurus
  Clone ID: 49-LIB188-024-Q1-E1-E2
ccatgaccgccggatacgaagaaaagtgcgggttttttttttttttttttttaatttgttttttgtttttctttttttttagaaaagattccgaaaaatgagggaaacaggaagcccagaggtgcccctgtagtttggcgaaggccttaagaggtcacttggaaatgctgctggctgtgagggggggagggggcagatgtgcacagagctgtgcaggcttgtcctttgcatggatgttctttgtagaaatccacctcggagccatctcctgatgtgtaggaatttcccagacaaaccttgagctaagcaatgcgttttttccttaggaaatgttggtcttcagcgatgttcaaagcctgtgtatttcggctagactctggcttcaggtcggttcccccaaaaggctcaaaagcgacctgaaccaaaca

SEQ ID NO: 11369 - DNA, 417 bp, Bos taurus
  Clone ID: 49-LIB188-025-Q1-E1-E10
cagcgcagaatcaaccttcgaggggatcctcaaaaacccaagagcagagtctttgaacagcaggtccctctggccgggtggagagccaaaagggctggaagctccgagacttgttttttccaaatttctcctgcgccttgctgagaagcttccagatcaagtcttccttgcgatccacacttcgggccacgacagcatgagaagggacctgggccatgtggcactccttgaacgcatccactggcgcccgactgttgttcaggcagagaagctcatactggaccctgtcagccttctctggcaagttctcaaacactgtcgtctctttaacaaaagccacgtctccagccccgtcctgcagacacttgagggcaccagaataaccgacatatggttcccgggaggagcaggcacact

SEQ ID NO: 11370 - DNA, 297 bp, Bos taurus
  Clone ID: 49-LIB188-026-Q1-E1-E2
ccgacatggccgcggcatacataaaggacatcaacatcctcgccgctctcatcgttacagcacagctcaagcaccagtgctcgcacatggcggccaagctttcgtttcgacacacggcttacaatctcggtcatcggctgatccaatcgttccttgagcttggcggctggcatgaagaaagagtagagcatagacacgccctgggacagcatagtgatctccaacttatgttctgtcttgaagtagtcgaggaactgtttgagggtcatctcctcaccgttaggctgcataccctgt

SEQ ID NO: 11371 - DNA, 385 bp, Bos taurus
  unsure (94): unsure at all n locations; Clone ID: 49-LIB188-027-Q1-E1-E2
cgccatggcggcgggatactcgacgaggcccatgaccgtcacttcaatctgaagatcctggcaggtcgtgttcgtcatgtccatgacgttgtanctgcgaaggaccttcaaggttcctttgctgtttcctctcacctccacgttaatcttgcttcccagggaaaactgcagctcctcctccagcctgtggacttggtggttggtcagctgcaacacgtgggacttgagcccactgcggcccaaggagctcagggtcacgttgagccccttctcctcggcggtgtaggacgcaatccagtacaagttcccctcggcccgtctgcccagcaaggccccaggttcaaagtgctgggaagtgggcccttcgttccgaacccaacgcaaa

SEQ ID NO: 11372 - DNA, 397 bp, Bos taurus
  Clone ID: 49-LIB188-028-Q1-E1-E2
cgccatgagcgcgggatacccggaggcgctggaaaagggtgatgttacagctcagatagctctgcatcctgcgttgacattcaacggtgggggccatatcaatcagaggatcttctggacaaatctgagccctaacggtggtggagaatcccaaggggaattgctggaagccatcaaacgtgacattggttcctttgccaaatttaaggaaaagttgactgctgtatgctgttggtgtccaaagctccggttggggttggctcggcttcaataaagagcatggacgcttacagattgctgcttgttctaaccaggatcccctgcaatgaataacaggtcttatccccctgctggggattgacgtgtgggaccattcgtaataccttcagtttgaaaa

SEQ ID NO: 11373 - DNA, 447 bp, Bos taurus
  Clone ID: 49-LIB2809-001-Q1-E1-E2
gcggacgctatggccgcgggacacctggtgagattgatggaaagcctttcaagcagtgaggaatctattacacgcatcaataagaaaattgagaagtttcagagtgaggaacagcagcaaacagaggatgaactccaggataaaatccacccctttgcccagacacagtctctagtctatcccttccctgggcccatccataacagcctcccacaaaacatccctcctcttactcaaacccctgtggtggtgccgcctttccttcagcctgaagtaatgggagtctccaaagtgaaggaggctatggctcctaagcacaaagaaatgcccttccctaaatatccagttgagccctttactgaaagccagaacctgactctcactgatgttgaaaatctgcaccttcctctgcctctgctccagtcttggatgcaccagcctcaacag

SEQ ID NO: 11374 - DNA, 421 bp, Bos taurus
  Clone ID: 49-LIB2809-002-Q1-E1-E10
tggccgcgggataccccagctggaaattgttcccaatagtgctgaggaacgacttcacagtatgaaagagggaatccatgcccaacagaaagaacctatgataggagtgaatcaggaactggcctacttctaccctgagcttttcagacaattctaccagctggatgcctatccatctggtgcctggtattacgttccactaggcacacaatacactgatgccccatcattctctgacatccctaatcccattggctctgagaacagtgaaaagactactatgccactgtggtgaagagtcaagtgaattctgagggactccacagttatggtctttgatggttctgaaaattccatgctctacatgtcttttcatctatcatgtcaaaccattctatccaaaggcttcaactgctgtttt

SEQ ID NO: 11375 - DNA, 139 bp, Bos taurus
  Clone ID: 49-LIB2809-003-Q1-E1-E2
gcattaaaagcgtcatcagggacatcgagcaagggtcaaaagtccagagcgccattcatgcacccctggagattagtccttacatgtccattgtcactacagggcccagggctcagagatgagttagcttcaagggggt

SEQ ID NO: 11376 - DNA, 418 bp, Bos taurus
  Clone ID: 49-LIB2809-004-Q1-E1-E2
catgaccgccggataccccagctggaaattgatcccaatagtgctgaggaacgacttcacagtatgaaagagggaatccatgcccaacagaaagaacctatgataggactgaatcaggaagtgcgctacttctaccctgagcttttcagacaattctaccagctggatgcctatccatctggtgcctggtattacgttccactaggcacacaatacactgatgccccatcattctctgacatccctaatcccattggctctgagaacagtgaaaagactactatgccactgtggtgaacagtcaagtgaattctgagggactccacagttatggtctttgatgggtctgaaaattccatgctctacatgtcttttcatctatcatgtcaaaccattctatccaaaggcttcaactgct

SEQ ID NO: 11377 - DNA, 497 bp, Bos taurus
  Clone ID: 49-LIB2809-005-Q1-E1-E10
ccgacgtcttatgctcgccgtagccatggctaccggatacctggctgagatatgtggaaaacctttcaagcagtgaggaatctattacacgcatcaataagaaaattgagaagtttcagagtgaggaacagcagcaaacagaggatgaactccaggataaaatccacccctttgcccagacacagtctctagtctatcccttccctgggcccatccataacagcctcccacaaaacatccctcctcttactcaaacccctgtggtggtgccgcctttccttcagcctgaagtaatgggagtctccaaagtgaaggaggctatggctcctaagcacaaagaaatgcccttccctaaatatccagttgagccctttactgaaagccagagcctgactctcactgatgttgaaaatctgcaccttcctctgcctctgctccagtcttggatgcaccagcctcaccagcctcttcctccaactgtcatgtctcctcctcag

SEQ ID NO: 11378 - DNA, 160 bp, Bos taurus
  Clone ID: 49-LIB2809-005-Q1-E1-E2
ccatggcagccggatactgtcgcattaaaagcgccatcagggacatcgagcaagggtcaaaagtccagagcgccattcatgcacccctggagattagtccttacatgtccattgtcactacagggcccagggctcagagacgagttagcttcaagggggt

SEQ ID NO: 11379 - DNA, 413 bp, Bos taurus
  Clone ID: 49-LIB2809-006-Q1-E1-E2
gccatgggtacgggatactgccgaaaacccagatagtccatccccttacaaatctgaacggcgtattttaattgctgtttgaggttaattttgttcttattctttggaagatattccttaaggctccctgaaggcagaaactccatgatgagcttaataccatttccaccatcttctgtgcagatgcctttatacttcacaatgttctcatgataaagatttcttaagatttcaatctccttcttcagatcagcgatgtggttccctccactctcgggcttcagggatttgacagccacttgctcccctgtattgtccccctcagggtcatacctgcagagctcgaccttcccaaagtggccctctcccaagtcacggatcctctttaagaaccgcttttcaaaatgtgtggg

SEQ ID NO: 11380 - DNA, 211 bp, Bos taurus
  Clone ID: 49-LIB2809-007-Q1-E1-E10
ataacttgtgtaaaaattccacatccccatattggcgacctcaagattacaacagataattcccgaaatgttaagtggctctactcccctaagattaagcccaggatcgacatgggaaatatagaaattcaaatacaagtatccatacacctgtcataaatcgtacatatagcatgacttgtgggatagcacggattacacatggtctact

SEQ ID NO: 11381 - DNA, 351 bp, Bos taurus
  unsure (328): unsure at all n locations; Clone ID: 49-LIB2809-007-Q1-E1-E2
tggccgcgggatacagcagaaaggactgaatgggcatatctctctggggatagggcactgctttctggggaacaggcaggactttggactgagaaagggacagcacggactgaggaggaaacatgacagttggaggaagaggctggtgaggctggtgcatccaagactggagcagaggcagaggaaggtgcagattttcaacatcagtgagagtcaggctctggctttcagtaaagggctcaactggatatttagggaaaggcatttctttgtgcttaggagccatagcctccttcactttggagactcccattacttcaggctgaangaaaggcggcaccaccacaaggg

SEQ ID NO: 11382 - DNA, 386 bp, Bos taurus
  Clone ID: 49-LIB2809-008-Q1-E1-E2
tatggctgaggaacgacttcacagtatgaaggagggaatccatgcccatcagacagaacctatgataggagtgaatcacgaactggcctacttctaggctgagcttttcagacaattctaccaactggatgcccatccatctggtgcctggtattacgttccactaggcacacagtacactgatgccccatcattctctgacatccctaatcccattgggtctgagaacagtgaaaagactactatgccactgtggtgagtagtcaagtgaattctgagggactcgacagttatggtctttgatggttctgaaaattccaggctctacatgtcttttcatctatcatgtcaaaccattctatccaaaggcttcatccgctcgtttt

SEQ ID NO: 11383 - DNA, 218 bp, Bos taurus
  Clone ID: 49-LIB2809-009-Q1-E1-E2
ctcccgaccgacatggggccgggctacaactagatttagagttgatattagatacatattattccaaaattattcttatgtcagagataattactatcctacatatcctccggagaaatcgcaatcatttagcgaatttcgtaccctgctgtatgtgtccaaggcatttagtttatacagtctcaaatttagtcctgtgactaatacacactttatcg

SEQ ID NO: 11384 - DNA, 342 bp, Bos taurus
  Clone ID: 49-LIB2809-012-Q1-E1-E2
gatacttgtaggctcaccactagcaatggtattgatggtacggatttctgttttatcctgagttttctttggtggaatggccataaatgataaatgtgggtgtgggtgacgtgccatggtagttggctgggcttggcaggacttgccaggcacagtatgtgacaaaacgttccagtgaagaatttgggcaggtgacgtagctgcagctggcgttgcataacatgggtatggcagacagtgatgattaattagtgcaactggtttctgtcggtagtaattgagtccataactacgatacccacgcagcacagactgaattgggatagatctggctattttgtc

SEQ ID NO: 11385 - DNA, 229 bp, Bos taurus
  Clone ID: 49-LIB2809-013-Q1-E1-E10
ccctggactcctaagtggagatacaggccacagataatgcctatgatctggaatccaacctggctgtcctgaaactgtaccagttcaacccggccttcttccagaccacggtcatcgcccagatcctgctgaaagccctcaccaacctgccccacaccgacttcacgctgtgcaagtgcatgatcgaccaggcccaccaagaacaacggcccatcccgcagattttgtc

SEQ ID NO: 11386 - DNA, 457 bp, Bos taurus
  unsure (397),(405): unsure at all n locations; Clone ID: 49-LIB2809-013-Q1-E1-E2
tcccgaccgccaaggcggccggatacaactagcattggagttgatattaatagaaattattccaaaattattcttaggtcacaaataactactatcccacataaaaagggaaaaatcccacccaattaaggaaaaggtatcctgtgtatgtttccatggcaatgagtttatgcattctcagattttgtccggctagttatccaccctttatctgatgcatttattccatctctcagagagaaccatatagattcctgacggcatccaggacacgtggctcgtggtggacacacttcatggtggatactgctactataaaaatactcagaacttaagagaattccaagatgcttttataaaagcattagtcatgcctcaaaactgccctttgaggtangtcagtantattatcccattttaacagaaggaaaactgaggcacattatagttaaatgac

SEQ ID NO: 11387 - DNA, 420 bp, Bos taurus
  Clone ID: 49-LIB2809-016-Q1-E1-E2
tgggcccgggataccacatagtatatcgttgttctgtctccttattctcctctggtctgtaatgttttctcagaatttccttattgctcatgattttgacagctttgaggagtcctgatcaaggtattttctatttagatttgcttgatgttttattgcataataagactggggttgcaaagagcaccacagaagtgatatctcttctaattatatcatatacggtgatatgtgaatccatatggctcattgctgagtcagtaatgatgtggaattttgatcacttagttaagatgttatttgccagatttctccactgttcataccttccgctttggaagcgagtcccaaagttcagcacagactcaatagcgggtggacaaagttctacctcctgaaggaagaggtatattcaaaata

SEQ ID NO: 11388 - DNA, 434 bp, Bos taurus
  Clone ID: 49-LIB2809-018-Q1-E1-E2
agctcggtgagattgtggaaagcctttcaagcagtgaggaatctattacacgcatcaataagaaaattgagaagtttcagagtgaggaacagcagcaaacagaggatgaactccaggataaaatccacccctttgcccagacacagtctctagtctatcccttccctgggcccatccctaacagcctcccacaaaacatccctcctcttactcaaacccctgtggtggtgccgcctttccttcagcctgaagtaatgggagtctccaaagtgaaggaggctatggctcctaagcacaaagaaatgcccttccctaaatatccagttgagccctttactgaaagccagagcctgactctcactgatgttgaaaatctgcaccttcctctgcctctgctccagtcttggatgcaccagcctcaccagcctcttcct

SEQ ID NO: 11389 - DNA, 366 bp, Bos taurus
  Clone ID: 49-LIB2809-019-Q1-E1-E2
ctccagccgcaatggccccgggatacagcaaaaaggcctgaatgggcatatctctctggggatagggcactgctttctggggaacaggcaggactttggactgagaaagggacagcacggactgaggaggaaacatgacagttggaggaagaggctggtgaggctggtgcatccaagactggagcagaggcagaggaaggtgcagattttcaacatcagtgagagtcaggctctggctttcagtaaagggctcaactggatatttacgggagggcatttctttgtgcttaggagccataccctccttcactttggagactcccattacttcacgctgaaggaaacgccgcaccaccacacgggttt

SEQ ID NO: 11390 - DNA, 366 bp, Bos taurus
  Clone ID: 49-LIB2809-020-Q1-E1-E10
ctgcccctgctccttcccctcactgacatagcccctcttccctgaagctatgaacatgtgagatacttgtagacacgcaagcacctggcaagtttgcgttcaagagcctgctaatgaatgaggaaagtcagtccaggccaggtgtcagagcccccaccatgagaaaaagaggaatacaaaggactgagagtattaaacaaggcaaagctcttctttttctccaaaactagtcaggcctggagactacgtgatttgtttgaagacagaaccagcagagctgcacggtgactggaagccatcgccagagggaagaacacaagcttcaaggccacatgcccagctgagctctcagaacagcccaaccag

SEQ ID NO: 11391 - DNA, 418 bp, Bos taurus
  Clone ID: 49-LIB2809-025-Q1-E1-E10
gcctagggcccgggatacttcagagaagcatccagtgaaataccaaacagcttgtgatgaacttccactggaggtcagcatctgggaaaaaaaagtcaatcctttgcccagttgttttatatcatctctgttgttgggctttgacagatgtcctgcccaccccttttatctcctgtgggtcagcctccccaggtagcgggatggaagagcaagaaagtctgcccttcgccacacgaacagccattgacccagagtggagggtgtgtgggcagtgactggcacacgtgtgtggtttccagctcagctgacagtgggggctcagaagggcacggagtggggagggtccacaactcttagccacctgccagactgaaggccagaggcaacttgtaaaattaggcgtgatcttcactcctca

SEQ ID NO: 11392 - DNA, 321 bp, Bos taurus
  Clone ID: 49-LIB2809-027-Q1-E1-E2
acatctcatcccaatgggtcaacaatggattgtgtgactgctttaacgggaccgacgaatacaacagcgggatcttttgtgagaacacctgcaaagaaaagggccgcaaggagagagagacactgcaccagatggcacacgtgacccgcgagggcttccgcctgaataagatcctgattgaggactggaacaacgcccgggaggagaagcagaaaaagctcattgagctgcacgctggaaagaagtcactggaggaccacgtggaggtgctgctgaccctgaatgaggaagccgataagccacacgaggcggccaaagacc

SEQ ID NO: 11393 - DNA, 251 bp, Bos taurus
  unsure (227): unsure at all n locations; Clone ID: 49-LIB2809-029-Q1-E1-E2
ggactgaggaggaaacatgacagttggaggaaaaggctggtaaagctggttcatccaagactggagcagaagcagaagaaggttcagattttcaacatcacttagaatcaagctctggctttcaataaagggctcaactggatatttaaggaagggcatttctttgtgcttaagagccatacgctccttcactttggagactcccattacttcaggctgaaggaaangcggcaccaccacaggggtttgag

SEQ ID NO: 11394 - DNA, 445 bp, Bos taurus
  Clone ID: 49-LIB2809-030-Q1-E1-E2
gcatgcctccagccgccaagggcccgggatactttgtattttttcagtctgagaagctgttccagataacccaggtaacgctcagagggcacatcttccttttgaatgtgcttctgctcaacactattgggaacaatttcctcacttgacgaaatgctttcagcttccatttgcttaatatcttccatggcttgatcctcagttgattcactcccaatatccttgctcagttcattgaccttctcctttccaaacacttctggaaaaggtgccacaaaaaacctgagtaaattttcattgaggacttcttgagggagtccttggtgcttgataggatgtttaggcctggcaagagcaacagccacaagacaggtaaggatgagaagtttcatggttgtcaagatcttgaacccaagactgggaagaagcagcaagcctgggtata

SEQ ID NO: 11395 - DNA, 392 bp, Bos taurus
  Clone ID: 49-LIB2809-031-Q1-E1-E2
acaagctattttttattttttttttttttttttttaccttaaaatgtaatttattgaaaagaagaaagacaaaatctcagttaatgcacacaattatttgatatgatggcacttacaggagaagtgattcaaaggcttttaaaacattttccatacagaaatttaatgaagactttaattccctttgactcagtggcctttataccagcatgatactactggaatttaggtaacaagctgttaggacaatttcacttaaggatgttacactatctaaaatacagtagagaactcaagaagaaagagtgccttcaatttgagattgccctattctaaaacagcagttgaagcctttggatagaatggtttgacatgatacgtgaaaagacatg

SEQ ID NO: 11396 - DNA, 306 bp, Bos taurus
  Clone ID: 49-LIB2809-032-Q1-E1-E2
gccaagggcgcgggatacggtggggaaggcttgataggtctggacagaaactcagggtgatactgcactccgacgaaaaagggatgatcttccaactccacaatttccattctctctccttcaacatcttggccaacgaacttcaagccttgctcctccaaacactttttcaagactggattcacctcaaacctgtggcggtgcctctcttccaggtaatctggatctccgtagagtttcctcatgacggagttcttggtctggaacagaattctcctcttgcccagccgcattggttcaaccaat

SEQ ID NO: 11397 - DNA, 413 bp, Bos taurus
  unsure (302),(347): unsure at all n locations; Clone ID: 49-LIB3057-001-Q1-K1-E2
gggtcgaccgacgcgttcgttggacgccaatgacaagatccacctcctttgagctgatgccctttctacagccaggagccaatggctagggacaaagccaaaccctgtgagctggaccaggagaaatacgatgctgatgacaatgtgaaaatcatctgcctgggagacagcgctgtgggcaagtccaaactcatggagaggttcctcatggatggatttcagccccagcagctgtccacatacgccttgaccctgtacaagcacacggtcacggtagacggcaagaccgtccttgtggactnttgggacacagcatgccaagagcggttccagagcatgcacgcctnctactaccacaaggcccacgcctgcatcatggtgttcgatgtgcataggataatcacgtacaggaa

SEQ ID NO: 11398 - DNA, 344 bp, Bos taurus
  Clone ID: 49-LIB3057-002-Q1-K1-E10
attcggaataccagcggcgacccactcgtacgggcaagcgtcgcggtctacttactgtcaggaagctccgtaaccacctacgagaccgtaactttcatgataagcaggacaagaaagcccatctgggcacagccctgaaggccaacccttttggcggcgcttctcacgctaagggaatagagctggaaaaagtaggagttgaagccaaacaaccaaattctgccatcaagaagtgtgtcagggttcaactaatcaagaatggcacaaagatcactgcttatgttcccaatgatggttgcttgaattttattgaggaaaatgatgaactactggttgcatggatt

SEQ ID NO: 11399 - DNA, 330 bp, Bos taurus
  Clone ID: 49-LIB3057-003-Q1-K1-E2
gaatggaggagatatgggtttgatccctgggccacgcatattccttggagaggcaggtggcggttcgttccagtgtacttgcctgggaaattccatggacggagagtcctggtggtctacaggccatgagtcacaaacactggacacaacatagcgactaaacagcaactctttcaggttggccaacctattgatggcctaaaaattaattctacagttaaagtattacatgtaatagtccttttgttattagaatattctttttaatagagcatacattttatatcataatttgattgctttaaatatcatacactattttaattttac

SEQ ID NO: 11400 - DNA, 393 bp, Bos taurus
  Clone ID: 49-LIB3057-004-Q1-K1-E2
cgtgaccgataatccctcatggcgacggttgctaccacggccgctgaacagcttccatagctgcaccgattgaaccgctgaaaatctagaacatgcccaacaaacccaacatgaagtccttatgagcttgattcttgggttgctgcgctcctggaatgaccctctctatcacctagtcaccgaggtgcggggtatgaaaggagccccagatgctatcctatcgagggccatagagattgaggaagaaaacaaacgacttctggaaggcatggagatgatatttggccaggttattcctggagccaaagagactgagccctaccctgtgtggtcaggactcccgtccctgcaaactaaggatgaagatgcacgttattccgctttttataacct

SEQ ID NO: 11401 - DNA, 298 bp, Bos taurus
  Clone ID: 49-LIB3057-005-Q1-K1-E2
agacccacattaacatcgatgtcattgggcacctagattcagggaagtctaccacgactggccatctgatctataaatgtggcgtgcatcgacgagagaacaattgaaaagttctagaaggatgctgacgagatgggaaagggctccttcaaatatgcctgggtcttggacaaacttatagctgaacgtgagcgtggtatcaccattgatatctccctgtggaaatttgagaccaagcagtactatggtaccatcattgatgccccaagacacatagacttcatcaaaaacatgatta

SEQ ID NO: 11402 - DNA, 423 bp, Bos taurus
  unsure (213),(291),(397): unsure at all n locations; Clone ID: 49-LIB3057-006-Q1-K1-E10
taattagtgacgcgcatgaatggatgaacgagattcccactgtccctacctactatccagcgaagccacagccaagggaacgggcttggcggaatcagcggggaaagaagaccctgttgagcttgactctagtctggcacggtgaagagacatgagaggtgtagaataagtgggaggcccccggcgcccccccgtttcccgcgagggggcggngcggggtccgccggccttgcgggccgccggtgaaataccactactctgatcgttttttcactgacccggtgaggcggnggggcgagccccgaggggctctcgcttctggcgccaagcgcccggccgcgcgccggccgggcgcgacccgctccggggacagtgccaggtggggagtttgactggngcggtacacctgtcaaacggtaacgc

SEQ ID NO: 11403 - DNA, 295 bp, Bos taurus
  Clone ID: 49-LIB3057-006-Q1-K1-E2
tagcaccaggcgccccacgaacgtgcggcgcgtgacgggcgagggggcggccgagtttggggccgcgccccgtgtcccgggacgaagggctactacgtaccggaccccggtcccgacgcgcggaggaggcgcgccgtgccgagccgcgggggacgcgggcgatagaccgtcggcggggacggtggaggaccgggtattcgaggccaaccgacgctaccgcggcgctgacgtatcattgcagctgggcaggattctgacttagaggcggtcagtcgtaatgccacctatggcaact

SEQ ID NO: 11404 - DNA, 401 bp, Bos taurus
  unsure (8): unsure at all n locations; Clone ID: 49-LIB3057-007-Q1-K1-E2
tgcacctncgagcaaaaaaaaaaaaaaaaaaaaagagcagaggcagcagggagctccaggaccgacaggatggggtcagcctgcatcaaagtcaccaagtacttcctcttcctcttcaacttgctcttctttgtcctgggcgcggtgatcctgggcttcgggatgtggatcctggtcgacaagaacagtttcatctccatcttacagacctcctccacctcgttcaaggtggcggcctacgtcttcatcagcgtgggggccctcaccatgctcatgggcttcctgggctgcctgggtgccgtcaaagaggtccgctgcctgctggggatgtactttgccttcctcctgctgatcctcatcgcccaggtgactgccggggtcttcttctacttcaacatggg

SEQ ID NO: 11405 - DNA, 422 bp, Bos taurus
  Clone ID: 49-LIB3057-008-Q1-K1-E2
cggacgcgtgggcggacgcgtgggcctggtgaagtgtgtttcttgaaatcatcaccacggtggacagcaaaggttcgtcgcagaaagggtcccgcctgctcctgctgctggtggtgtcaaatctactcttgtgccagggtgtggtctccacccccgtctgtcccaatgggcctggcaactgccaggtatcccttcgagacctgtttgaccgggcagtcatggtgtcccactacatccatgacctctcctcggaaatgttcaacgaatttgataaacggtatgcccagggcaaagggttcattaccatggccctcaacagctgccatacctcctcccttcctacccctgaagataaagaacaagcccaacagacccaccatgaagtccttatgagcttgattcttgggttgctgcgctcctgg

SEQ ID NO: 11406 - DNA, 444 bp, Bos taurus
  Clone ID: 49-LIB3057-009-Q1-K1-E2
gtggttgccggcccggtctccgcagtttccaccgagccccgaccctgctggccgcccgctcgccttacctcgtcgccatgcgcctccgccgcctagcgctgttcccaggcctggcgctgctcctcgccgcggcccgcctcgctgctgcctccgatgtgctggaactcacggacgacaacttcgagagtcgcatcaccgacacgggctcttctggcctcatgctcgtcgagttcttcgccccctggtgtggacactgcaaaaagcttgccccagagtatgaagctgcagctaccagattaaaaggaatagtcccgttagcaaaggtggattgtactgccaacacgaacacctgtaataagtatggagtgagtggatatccaaccctgaagatatttagagatggtgaagaatcaggtgcctatgatgggcctaggactgccgatg

SEQ ID NO: 11407 - DNA, 368 bp, Bos taurus
  Clone ID: 49-LIB3057-010-Q1-K1-E10
cgacccacgcgtccggccatgtgaaagccataaaaaacatatttttgagattaccaccacacagagggagacaggtggaggaggtctatttcagatgtgcctcaaaagatgggcaggatttgggtgagcactattacagacgatatattgaagttcatgagcatgtttctaaactctgtcgtattcttgctattgtagcgtgttttttacttatatgcttttatttataatcctatatattgtatctttgttttattgtctatttattctattattatacttcttatgttttattttgctgtttctattttatttatttttttttcttttgtattatcttatttttattttgttatatctaacttttt

SEQ ID NO: 11408 - DNA, 335 bp, Bos taurus
  Clone ID: 49-LIB3057-010-Q1-K1-E2
ggccgtgcactccgaacggaggctgggtgacaacagcatatttattgactatgatgccgccaatgcagactgttccaaacttaacctgggcgcactcatgtgcaacgagtgctcccatacacaccagcatgttggagatcacctttgccgggagcgctcgctctacctagacaactggccaccctagctgctggccgccatgacagtcatgggcaacgccctgttcaacaaggtctgtaaaggggcccttgacggatatgcttaacccgggccccaaggctgcaaagaggagaaagagcactggatacgggccaagttctagcagaaaatctttc

SEQ ID NO: 11409 - DNA, 187 bp, Bos taurus
  Clone ID: 49-LIB3057-011-Q1-K1-E2
agagcttcctggtgaaaagtgattaccgtaagaaacagcaacagagaccggcatagttggggccaggagcacatgctcataggagcctgaaatggaagagtgcatccgtacggtggcaaagagccagacaagactagagcgactaaccaataacaacaatgaatactgggcctgctaaaccggtcat

SEQ ID NO: 11410 - DNA, 314 bp, Bos taurus
  Clone ID: 49-LIB3057-014-Q1-K1-E2
cggacgcgtgggaaagcagtggacaagaaggcagctggagctggcaaggtcaccaagtgtgcccagaaagctcagaaggctaaatgaatattatccccaatacctgccaccccagtcttaatcagtggtggaagaacggtctcagaactgtttgtctcaattggccatttaagtttaatagtaaaagactggttaatgataacaatgcatcgtaaaaccttcagaaggaaaggagaatgtttttgtggaccatatgttttgtgtgtggcagtttaagttattagtttttaaaatcagtactttttaatgaaaac

SEQ ID NO: 11411 - DNA, 428 bp, Bos taurus
  Clone ID: 49-LIB3057-015-Q1-K1-E10
cctcacccgctttgtcaaatggccccgctacatccggctgcagcggcaaagggctattgtctataagcggctgaaagtgcctcctgcaattaaccagttcacgcaggccttggaccgacaaacagctactcaactgcttaagctggcccacaagtacagaccagagacaaagcaagagaagaagcagaggctgctggcccgagctgagaagaaagccgcgggcaaaggcgatgtccccaccaagaggccacctgtccttcgagcaggggtcaacacggtcaccaccctggtggagaacaagaaggctcagctggtggtgatcgctcacgacgtggatcccattgagctcgtggtcttcctgcctgccctgtgccgcaagatgggggttccctactgcatcatcaagggcaaggcccggctggggcgcc

SEQ ID NO: 11412 - DNA, 365 bp, Bos taurus
  Clone ID: 49-LIB3057-015-Q1-K1-E2
ccgcttgccatgcatcactggtgggtctcaggctccagggggacttgagcacgtttttgccacgttgacagtattgaagcagcattgcgctgccacagtcaggactgtccaggcactcggaacgtgcatcttgcttggccagcacagtgtttaacaaaattgagccactttttaaatatctggagattttgcaaacaaattttggatccccgagtgagactagatagctgatggcttacagttctcgctgtgccacgtcattcacagatgatggtgtagacacacttagaaagctgttctcttgggcggtgaacattcgtgtttcccccttgttcttactctaatttgtgatttaaaccttcttt

SEQ ID NO: 11413 - DNA, 424 bp, Bos taurus
  Clone ID: 49-LIB3057-016-Q1-K1-E2
gccaaggtcagtgaggggctggtaggcccctggagaagcagcaccgacaatgacgacggcaaggagatcccttccgcacccctttgcacccctcccactgcgggtgtcctagagggaggaacggtgcttagggggagcagactcctgagatctgggcacaggcaacgcattcagatctggaccaagtcgggacagcaccatcccagccccgcagccatggccatgccagcaggccgcaccacagagatccagacaactacaccagccagcataatggacattccaacatcaccagccgaagccctgaatctcggtgcagcagacgagcgacaactctgtgcctgtgtggcaggactggagggcagaaggtgaggtgagagggttaagaagcatagcagggcccttactgtcctttgcctacagc

SEQ ID NO: 11414 - DNA, 279 bp, Bos taurus
  Clone ID: 49-LIB3057-017-Q1-K1-E10
aagactcgtgcctagcttcctcggtgaatcccttacttgaaatcataaccaccattgacagcatgcgtacatcccagagtgcgcaccacctgctcctgatacttgtgatcccaaacctactcatatgccacaacatcttcttgacacgcatattgcccaataggcacttcaacttccatgcatccctctgagacactgataaccattcagtcaagctgactcactactgcatgacctctcctagattcaagtgaactgatttaaccaaacaccttaccc

SEQ ID NO: 11415 - DNA, 427 bp, Bos taurus
  Clone ID: 49-LIB3057-018-Q1-K1-E10
cacctaaccaccatggatatcgccatccaccatccctggatccgccgccccttcttccctgtccactctcccagcctcctctttgaccagttttttggcgagcacctgttgtagtctgatctctctcaagctattacttccctgagcccattctaccttcggacggccttattcctgcaggcacccagcttgattgacactgacctatgcatgattcatctggagaacgacagattctctgtcaactccttatgcgagcacacatgtcccagaggaacgtaagtgcttggtgccatgctatcagactgatgcgctatacctatctgtatacgcgctgaattgctttagtcatatctgactctttgcaaccccgtggactgttgcacaccatactgcttttgccattggatttttcatgcaagaattc

SEQ ID NO: 11416 - DNA, 296 bp, Bos taurus
  Clone ID: 49-LIB3057-018-Q1-K1-E2
aagcgaggaagagaggggtccggccccggttacccagctacagagcccggggaggggaggcggcggcctactccacactaggccaaacagatgagaaacggttcttgggtgaaacgcaccaccgtgttcaggaaagccagagggacaaggcgaggcgccgcctaccaggcgagctgagaaattacctcgactatggtgaggaaaagggtgaggaagcagccagagggaagtggcagccgcagggagacccgcgagacgctgactagaacaggtaagaggctaggctttgaggctaa

SEQ ID NO: 11417 - DNA, 340 bp, Bos taurus
  Clone ID: 49-LIB3057-019-Q1-K1-E2
tggtgaagtgtgtttcttgaaatcatcaccaccatggacagcaaaggttcgtcgcagaaagggtcccgcctgctcctgctgctggtggtgtcaaatctactcttgtgccagggtgtggtctccacccccgtctgtcccaatgggcctggcaactgccaggtatcccttcgagacctgtttgaccgggcagtcatggtgtcccactacatccatgacctctcctcggaaatgttcaacgaatttgataaacggtatgcccagggcaaagggttcattaccatggccctcaacagctgccatacctgctcccttcctacccctgaagataaagaacatgccc

SEQ ID NO: 11418 - DNA, 387 bp, Bos taurus
  Clone ID: 49-LIB3057-021-Q1-K1-E10
attgttgggttcctgtgtcgtcttggaggtgactcggcgtgattgaatttgcggcatcttcgcattcactcacaggtcaaaatgcagatcttcgtgaaaaccctgaccggcaagaccatcaccctggaggtggagcccagtgacaccatcgagaacgtgaaggccaagatccaggataaggaaggcattccccctgaccagcagaggctcatctttgccggcaagcagctggaagatggccgcactctttctgattacaacatccagaaagagtcgaccctgcacctggtcctacgtctgaggggtggtatgcagattttcgtgaagaccctgaccggcaagaccatcaccctggaagtggagcccagtgacaccatcgagaacgtg

SEQ ID NO: 11419 - DNA, 364 bp, Bos taurus
  unsure (288): unsure at all n locations; Clone ID: 49-LIB3057-021-Q1-K1-E2
agatcgcgagcggccgccctttttttttttttttggaatctcagtctttattggctgcaaggccacacaggctcaggccagggctcagatcttgttgaaagcagcaatgtcgacgctctgcacgtgctcctcgaacttggtgatctcctcttccagctggtctgtccccaccttgtcatcctccaccacacactggatctgcagtttgcggatgccgtagcccacaggcaccagcttggagctcccccagaccaacccgtccagctggacggagcgcacacaggcctncagttgggccatgtccgtctcgtcatcccaaggcttcacatccaggaggatggaggacttggccaccagggcaggc

SEQ ID NO: 11420 - DNA, 165 bp, Bos taurus
  Clone ID: 49-LIB3057-022-Q1-K1-E2
cggacgcgtgggctgacttaccataagatgcactgttgatatgctttttgatgtgtgggtgtttgataagggtgataaaataaagcttaaaaacaaaaaaaaaaaaaaaaaaaaaaaaaaaaaaaaaaaaaaaaaaaaaaaaaaaaaaaaaaaaagggcaaacat

SEQ ID NO: 11421 - DNA, 196 bp, Bos taurus
  Clone ID: 49-LIB3057-024-Q1-K1-E2
tttatttattattattattatttttttttttttagtggggggtgtaattttttatttttttattttttttattttttatatttatttttttttattttttttttttttttaattatttattaattttttaattttatattatttttattttcttattattattttattattttttttcttttatttatttttattt

SEQ ID NO: 11422 - DNA, 436 bp, Bos taurus
  Clone ID: 49-LIB3057-025-Q1-K1-E2
gccagatatgcctcagatatttaaccagtaagccttagttgtacataaatacttttgtgtcagcaaaaactcagctctcacagaagacagttattcagcattttttgatgtgccatgccacagtttgcagtttttcaatatttaattttattttattttgttttgttattgctttacatctaagtttgggtttgtatcttttccttctaactcttcatgtggcagactttctgtcgtctcacagctttctcatttacagaaaagaacacttgctcctctgaaatcattgtcatatattaggctaatgttgttgtccccacctggaactgaattgcttggtggaacatttgctttcacttgttgtgcaatatgcatttattccttttatgaatgctttaaagtcatttgagattagattcttttaagtcctattttc

SEQ ID NO: 11423 - DNA, 289 bp, Bos taurus
  Clone ID: 49-LIB3058-001-Q1-K1-E2
tcggcggtttctggaggcgaataacgcggttggccaatcgcaagccagaagatgaaggttctgtgggttgccgtggtggtcgcgcttctggcaggatgccaggcggatatggagggagagctggggcccgaggagcccctgactacgcagcagccccgggggaaggacagccagccttgggagcatgcgctgggccgcttctgggattacctgcgctgggtgcagaccctgtctgaccaggtgcaggaggagctgctcaacacccaggtcattcaggaactgacggcgc

SEQ ID NO: 11424 - DNA, 448 bp, Bos taurus
  unsure (342),(385): unsure at all n locations; Clone ID: 49-LIB3058-002-Q1-K1-E2
cttttgttccacacgagatttctgttctcgttgagctcatcttaggacacctgcgttatcttttaacagatgtgccgccccagccaaactccccacctgacaatgtcttccgcccggatcggcccggcgaggccgggccttggagccaaaaggaggggcggtgccccgcttccgacccacggaataagtaaaataacgttaaaagtagtggtatttcacttgcgcccggaggctcccacttatcctacacctctcaagtcatttcacaaagtcggactagagtcaagctcaacagggtcttctttccccgctgattccgccaagcccggtccccttggctgngggttcccttggatagtagaccggggaccagtgggaatctcgntaatccattcatgcgcgtcactaattagatgacgaggcatttggctaccttaagagagtcata

SEQ ID NO: 11425 - DNA, 386 bp, Bos taurus
  Clone ID: 49-LIB3058-003-Q1-K1-E2
agaggctagtggaggctgcagcccggtggtacgtgctgcgcgccccgaaccccgacagccatgcagatgtcctacgccatccgatgtgccttataccagctgctgctggccgagctcatgctggtggctatgctgcagctgctctacctgttgctgctgtccgggctgcatggacaagaagagcaagaccaatatttcgagttctttcccacatccacgcggtcggtggaccaagtcaaggcgcagctccacaccgcgctggccttcggaggcgtcctggacgccagcggcgactaccgcgtctacaggggcctactgaagaccaccatggaccccaacgatgtgatcctggccactcacgccagtgtggacaacatgctgcacct

SEQ ID NO: 11426 - DNA, 203 bp, Bos taurus
  Clone ID: 49-LIB3058-004-Q1-K1-E10
gagaaactacgagctgtgaaaaatagattggcctaaggagcattagtcgatagaggctaacagtgtaaattggaccagccatctggtatacacaggatagatgacttagtggatagcatgtgactttctggtaattagcagagtgctatgagctctgacatatgttcacgatggtgctgttttcatggggtattagccattca

SEQ ID NO: 11427 - DNA, 441 bp, Bos taurus
  Clone ID: 49-LIB3058-005-Q1-K1-E2
gcatcatagacacaatgttcaggattctgaggcatcgaaagagtttccttggctgtcattttttccacagtgcttttcatctgaggagctcaaagtgctgtgtgattaaataatctatgtagaagttccttgaggtaagtgaatgagtgttattctcatgttacatgttaacacactaaggcaccaaaatatataaagtgccttgaattagatgacatagcaaaccaggagagctcagattgaagacaggccatattcttttatgtgctgttcattgacttataattcacacgtgaccttttattttgcaaataataacaagttgccattcataattgggagaaatgactgaaactagtccttcaccctactggtcatatacattcttgggttctcacgcacaaaggaggagttacttataaggaattagtagccatttct

SEQ ID NO: 11428 - DNA, 412 bp, Bos taurus
  unsure (393): unsure at all n locations; Clone ID: 49-LIB3058-006-Q1-K1-E2
ggccgggccatctacaacaacatgaagcagtttatccgctacctcatctcctccaacgtgggcgaggtggtctgcatcttcctgacagctgccctggggctgcccgaggccctgatccctgtgcagctgctgtgggtgaacctggtgaccgatgggctcccagccacagccctgggcttcaaccccccagacctggacatcatggaccggcccccccggacccccaaggagcccctcatcagtggctggctcttcttccgctacatggcaattgggggctatgtgggtgcagccaccgtgggagcagcggcctggtggttcctgtatgctgaggacgggcctcacgtcacctacagccagctgactcacttcatgaagtgctcggagcacagnccagacttcgagggtgtgg

SEQ ID NO: 11429 - DNA, 441 bp, Bos taurus
  Clone ID: 49-LIB3058-007-Q1-K1-E2
ggaatagtttgggctataatgtcaatcggatttctaggtttcatcgtatgagcccaccatatattcactgtcggaatagacgtcgacacacgagcctacttcacatcagccactataattattgctattccaaccggggtaaaagtcttcagctgattggcaacacttcatggaggtaatatcaaatggtctcctgctataatgtgagccctaggctttattttcttatttacagtagggggtttaactggaattgtcttagccaactcttccctcgatattgttcttcacgacacatactacgttgtcgcacatttccactatgttttatcaataggagctgtatttgctattatagggggatttgttcattgattcccactattctcaggttatactctcaacgatacatgagccaaaatccacttcgcaattatattt

SEQ ID NO: 11430 - DNA, 218 bp, Bos taurus
  Clone ID: 49-LIB3058-008-Q1-K1-E2
caaaagtactgcatgtttgttttgtgagactgatgggctgatttacatgtatggtaactaaaaagtaccagcatgttaactttattacagtttgtattactttctctgtagttcctaatggacttaattatggattctggatatttgcacttatgtacttgatactgaatgcataaataaatgttactaagtgtagaaaaaaaagagtttaagtgaag

SEQ ID NO: 11431 - DNA, 428 bp, Bos taurus
  Clone ID: 49-LIB3058-009-Q1-K1-E10
cagctactcaactgcttaagctggcccacaagtacagaccagagacaaagcaagagaagaagcagaggctgctggcccgagctgagaagaaagccgcgggcaaaggcgatgtccccaccaagaggccacctgtccttcgagcaggggtcaacacggtcaccaccctggtggagaacaagaaggctcagctggtggtgatcgctcacgacgtggatcccattgagctcgtggtcttcctgcctgccctgtgccgcaagatgggggttccctactgcatcatcaagggcaaggcccggctggggcgcctggtgcacaggaagacgtgcaccaccgtagccttcacacaagtcaactcggaggacaagagtgccctggctaagctggtggaagccatcaggaccaattacaacgaccgatacgatgagatc

SEQ ID NO: 11432 - DNA, 353 bp, Bos taurus
  Clone ID: 49-LIB3058-009-Q1-K1-E2
gttctagatcgcgagcggccgcccttttttttttttttttttttttttttttttttttatgattcaagggtttattaagtcatacatgcaaaacatactgctaatcgcgttagcaaaagatcaatgtaaaaacactccacaattctgcaactgtcaatttaaaaaattttgttctagtggttgaaaggtccaagctcgtattcttgccagtgggtaagttgtacagaacttcgttagcacgagcacagggttggcggaacctcagaccccaaggaacattgttagggcaaggacaggaagcgtgtgcacgcggtgaggcagaggggtcagtgtcgctactcacggggcagtgt

SEQ ID NO: 11433 - DNA, 348 bp, Bos taurus
  Clone ID: 49-LIB3058-011-Q1-K1-E2
tcggcgggcgctgcagcagtacactctggagccgtcggagaagcccttcgacctcaagtccgtgcccctggccaccgcgcccctggcggagcagaggacagaaagcaccccggtcaccgccgccaagcagcccgagaaggtggccgccacccggcaggagatcttccaggagcagctggcggctgtgcccgagttccaggggctggggcccctcttcaagtcctcgcctgagcccgtggccctcactgagtcggagacggagtacgtgatccggtgcacaaagcacaccttcactgaccacatggtcttccaagttgactgcacgaacacgctcaacgaccagaccct

SEQ ID NO: 11434 - DNA, 442 bp, Bos taurus
  unsure (357): unsure at all n locations; Clone ID: 49-LIB3058-012-Q1-K1-E2
agaaaaacaaacaagacgctttgatgaaggaaaattaaaagctggccagagtgtaattggtttgcagatgggaaccaacaaatgcgccagccaagcaggtatgacagcctatgggacgaggaggcacctttatgatcccaaaatgcaaactgacaaaccttttgatcagaccacaattagcctgcaaatgggcaccaacaaaggagccagccaggcgggaatgttagcaccgggtacccgaagagacatctacgatcagaagctaacattacaacccgtggacaactcgacgatttccctacagatgggtaccaacaaagtcgcttcccagaaaggaatgagtgtgtatgggcttgngcggcaagtgtatgatcccaaatactgtgctgctcccacagaacctgtcattcacaacggaagccaaggaacaggaaccaatggg

SEQ ID NO: 11435 - DNA, 435 bp, Bos taurus
  Clone ID: 49-LIB3058-013-Q1-K1-E2
tattttaggagtatctttaatgtttagatagtatattagcagcatgcaataattacatcataagttctcaagcagaggcagtctattgcaaggaccttctttgctgccagttatcataggctgttttaagttagaaaactgaatagcaacactgaatactgtagaaatgcactttgctcagtaatacttgagttgttgcaatatttgattatccatttggttgttacagaaaaattcttaactgtaattgatggttgttgccgtaatagtatattgcctgtatttctacctctagtaatgggctttatgtgctagattttaatatccttgagcctgggcaagtgcacaagtctttttaaaagaaacatggtttacttgcacaaaactgatcagttttgagagatcgtaaatgcccttgaagtggtctttgtgggt

SEQ ID NO: 11436 - DNA, 427 bp, Bos taurus
  Clone ID: 49-LIB3058-016-Q1-K1-E2
tggaactgatgaaaagaagaagctgtactgtatctatgttgctattggtcaaaagagatccactgttgcccagttggtgaagagacttacagatgcagatgccatgaagtataccattgtggtttcagctactgcttcagatgctgccccacttcagtacttggctccttattctggatgttcaatgggagaatattttagggataatggcaaacacgctttgatcatttatgatgacttatccaaacaggcggttgcttatcgtcagatgtctctgctgctccgccgaccccctggtcgtgaggcctatcctggtgatgtattctacctgcactcccgactcctggagagagcagctaaaatgaacgatgcttttggtggtggctccttgactgctctaccagtcatcgaaacacaagctggtgat

SEQ ID NO: 11437 - DNA, 263 bp, Bos taurus
  Clone ID: 49-LIB3058-017-Q1-K1-E2
acgctcggttccctactggggatctgactaatcctacaaattctcacaggcctattcctagcaatacactacacatacgacacaacaacagcattctaactatgctacccatatctgacgagactggaactactgctgaatgatccgatacatacacgcaaacggagcatcaatgtgttttatctgcgaatatatgcacgtaggacgaggctgatattacgggacttacacttttctgtgaacgtgaaatattggagtaatcc

SEQ ID NO: 11438 - DNA, 239 bp, Bos taurus
  Clone ID: 49-LIB3058-019-Q1-K1-E10
atcgcgagcggccgcccttttttttttttttttttttttttttttttttttttttttgttttttttttttttttttttttttttttttttttttttttttttttttttttttttttttttttttttttttttttttttttaaaagaaaattaaaaatgtagaaatattctatataaaaaaaactaaatagggcttcacttttggcttaaaagtaaataaatattctatttaaattttat

SEQ ID NO: 11439 - DNA, 353 bp, Bos taurus
  Clone ID: 49-LIB3058-019-Q1-K1-E2
acgacccatggaagctgctggcttcacagctcaggtgattattttgaaccatccaggccaaatcagtgctggatatgcacctgtgctggattgtcacacagctcacattgcttgcaagtttgctgagctgaaggagaagattgatcgtcgttctgggaaaaagctggaagatggccctaaattcttgaaatctggtgacgctgccatcgttgatatggttcctggcaagcccatgtgtgtcgagagcttctctgattatcctcccctgggccgttttgctgtgcgtgacatgagacagacagtcgctgtgggtgtcatcaaagcagtggacaagaaagcagctggagctggca

SEQ ID NO: 11440 - DNA, 320 bp, Bos taurus
  Clone ID: 49-LIB3058-020-Q1-K1-E2
cggcccgcgtgaggccgaccgctcccggtcgcttcgtcgccgtcaccttcatgggctgtctcggaaacagcatgactgaggaccagctcatcgaggagaatgcgcattgcgaggcctacaagaagatcgagaagcaactgcagaatgacatgcaggtctacctgaccatgcaccgattgctgctgctgggtgctggagaatctgttaaaagcaccattgtgaagcatatgatgatcctgcatgttaatgggtttaatggagagggcggtgtataggaccctcaggctgcaaggagcaacatcgatggtgtgaaggccacc

SEQ ID NO: 11441 - DNA, 391 bp, Bos taurus
  Clone ID: 49-LIB3058-021-Q1-K1-E10
gtctggggcctccagaatggggccttcgagtttccttgagctgctagaggaaaactgagagtctgagacaagcagaggaagtccccaaggcaaggtggccttggccagaggcttattcttctagactgactctgaccagtctgagggtaggtggggctatcctgccaactgggagagtcagcagacagaattcctggcctgctcagatcgcagaggggcctcctgagcgatgcgtcgagtgtctcaggcccactgagctgccacatgggcatgccgtgggcccgtgtgagcttgattctctgtgcttgggggaagtatagtgtaagtgcagaggaaaggggtgctgtgagggagtagaatgagtccttgcccatagctgttggtacagaga

SEQ ID NO: 11442 - DNA, 365 bp, Bos taurus
  unsure (6),(281): unsure at all n locations; Clone ID: 49-LIB3058-022-Q1-K1-E2
cgcgtncgcgccggacacaggtgtcgtgaaaaccaccgttaaacctaagccaaaatgggaaaggagaagacccacatcaacatcgttgtcattgggcacgtagattcagggaagtctaccacgactggccatctgatctataaatgtggcgggatcgacaagagaacaattgaaaagttcgagaaggaggctgccgagatgggaaagggctccttcaaatatgcctgggtcttggacaaacttaaagctgaacgtgagcgtggtatcaccattgatatctncctgtggaaaattgagaccagcaagtactatgttaccatcattgatgccccaagacacaaagacttcatcaaaaacatgattac

SEQ ID NO: 11443 - DNA, 167 bp, Bos taurus
  Clone ID: 49-LIB3058-023-Q1-K1-E10
tgtatagtccatggaattctccaggccagaatactggagtaggtcgcctattgcttcttcaggggattttcctgacccaggaatcaaaccagggtctcctgtactgcaggcagattctttatgagcagagctaccagggaagacccccacaactttagaataacagc

SEQ ID NO: 11444 - DNA, 385 bp, Bos taurus
  Clone ID: 49-LIB3058-024-Q1-K1-E2
gtttcccttacacctttggtcctaagtgcctgtcccctcctcacactataactaggggcagtttgacaactaggggacaaaacagaataggcagcagccacaccctaggctggctgcaggtctcaccccgggaaagggatgggctgccgtccttccagctgtgtggccctgctgtgtcggtggggagatcgaggccagagacagagcctcggtgagaaagtaccagtctttccacctgcccagcccatcctgcctccttggtgcctgtggaggcctttgtgtctctgctgaaaggggtcagtgggcaccaaaagccagtggagtggcccctggctgtcacgggccacgccctatccagtgcctttgaaggaagggttttaacact

SEQ ID NO: 11445 - DNA, 439 bp, Bos taurus
  unsure (431): unsure at all n locations; Clone ID: 49-LIB3058-025-Q1-K1-E2
gcaagaagtagcacatcagaacacctaacgagcacgtgtgtcctgacagtccctcccagcagaagtggtcataccggacattgcattggaaacgcaccgtggttccagttggcgtactttatgtatctgcacaaagcacttcatgtgtaccgtgtggcctttcttgatgtagctgtcacagcagtgttgttgatgggcggttaatctgcaggtgaaaaataatagctgtttgttttgtccttgccatggcattataagaaagtgccctgtcttctttcagtcttaattctttcaacatgaaaatattctacttaaaatcttgttttgtttctttgtatatgatttgccttgaaattactgtggacagtttatttagttctgttttcatgtattatcaggagcagatttgataagtacatgtgaataacctnctgtaaat

SEQ ID NO: 11446 - DNA, 420 bp, Bos taurus
  unsure (404): unsure at all n locations; Clone ID: 49-LIB3058-027-Q1-K1-E10
atttataattgctatatcttcttcttcgattgatcctttgatcattatgtagtgtccgtctgtgtctcttttcatggcttttatttcaaagtctattttatctgatatgagtattgctattcctgctttcttttggtctcagaattttgatgcaaccattctctccctcacttttttctttttgcatatatgaacatctgtcttctcagtaagattatcaattttagaaaacagaatctcagttttacatgttttgacagttaggatttggttttactttataaaacaataaagccaaatactttggttgaataagatagagatttattatttgctaatgtaaaaggaatctggagctgttgtttcagaatggcatggagattacaccgacattagagactcangctccttgctttcttt

SEQ ID NO: 11447 - DNA, 270 bp, Bos taurus
  Clone ID: 49-LIB3058-027-Q1-K1-E2
cggacgcgtgggccaccccccacggggctgggggcacacaaggtgggacagagcagagaccgtgtgaggaaggggccagtcccgccctctgggggagagacgcgagcatcccaggtcgccggctcctgctgctgtatggggacccctcccccatctcctccacctacctcccttcctcttggtggtttttttgtgtcaattgtgccgtttttattttattgcctttccccccttttcacagagaaataaaggcctagaaataaaaaataa

SEQ ID NO: 11448 - DNA, 282 bp, Bos taurus
  Clone ID: 49-LIB3058-028-Q1-K1-E2
cggacgcgtgggctgggttgtgttcgtttcgacgtccgcgaagatgcagctcaaacggatggggattaaccccgggatgctgaacaaagtgctgacccggctgggggtcgccggccagtggcgcttcgaggatgttctgggactggaggaggagtctctgggctcggtgccagcgccggcctgcgcgctgctgctgctctttccgctcacggcgcagcatgagaacttcaggaaaaaacaaattgaagagctgaagggacaagaagtcagttccaaggtgta

SEQ ID NO: 11449 - DNA, 406 bp, Bos taurus
  Clone ID: 49-LIB3058-029-Q1-K1-E10
gttcagaataagtgctgaagggtcttttgcaaatgaaggagtagtaagaatctatacgaaagggaaagcccaacaggaaaggcaaatatactaagggtttaaggtcacttaaaccagtatgtatatcagcgaaagtggagtaactccgtcctgtccgactctgtgcgaccccgtggattgtagcctaccaggctcttccctccattggattctccaggcaagaatactggagtgggttgccatttgcttcttcaggcaatcttcccagctcatggattgagcccgcgtatcctgcactgcacgcagacgctgtaacctctgagccaccaatgattccctatgtatatcaattgactgattcaaaattaaggctgcatattgtcaccctgcttatgtaacctatatg

SEQ ID NO: 11450 - DNA, 303 bp, Bos taurus
  Clone ID: 49-LIB3058-029-Q1-K1-E2
gtgagtccatctttttttttaaaacatggttagctttgtaccgttaagcaccgtttggtctcagaagcagtggcctggttgtccttgacccgtctgtgcctaggaatgtcttatagtttttgccaggactaacaaaactcagtccttggcttcctctctcaggattaaccatttctctgaacgccaggaagaaagaatgacctatgagggaaaaaatgtttaaagagggccaatgactatgatatctagcatgggtacctacttgatggagaatcattatattttctatagtatattaaatta

SEQ ID NO: 11451 - DNA, 278 bp, Bos taurus
  Clone ID: 49-LIB3058-031-Q1-K1-E2
ttctagatcgcgagcgtcattactatttagtttccaaaccaatcacccaaccaaattggttggactcagtgattgtatttttgtattttatatttaaattaatctctattggagtacagatgctttataactgtttgtcattttctttcttttattctatattacttttttttaattttccatattattttattattatttgtactttttatatttattatttcttattttttagaatttttttttattttatttttttttctatttttttttttttt

SEQ ID NO: 11452 - DNA, 361 bp, Bos taurus
  Clone ID: 49-LIB3058-032-Q1-K1-E2
gtactcctaataagtgggtcctttaccctcttcacattaattactacacaagaacaaatatggttaatcctcccagcatggcctctagcaataatatgatttatctcaacactagcagaaacaaaccgagctccatttgatttaactgaaggagaatcagagctagtctcgggcttcaacgtataatatgcagcaggaccatttgccctcttcttcatagcagagtacgcacatattatcataataaatatctttacagcaattttatacctaggaacataccacaatccacacataccagaactctacacaatcaattttaccattaaatccctactgctcacaatatcctttctatgaa

SEQ ID NO: 11453 - DNA, 428 bp, Bos taurus
  Clone ID: 49-LIB3058-033-Q1-K1-E10
tcggtctggtacaggcaaaacagccttcttttttatttctgtcctccagtgtctggagattcgggttcgtgaaacccaagctttgatcttggctccaacaagagagttagctgtacagatccagaagggcctgcttgctttgggtgactacatgaacgtccagtgccatgcctgcatcgggggcaccaatgtgggggaggacatcaggaaattggactacggacagcacgttgtcgccggcacacctgggcgtgtctttgatatgattcgtcgcaagagtttgaggacacgtgctatcaagatgttggttttggatgaggctgatgaaatgttgaataaaggtttcaaagaacagatctacgatgtgtacaggtacttgcccccagccacacaagtggtgctcatcagtgccacactgacccactaga

SEQ ID NO: 11454 - DNA, 260 bp, Bos taurus
  Clone ID: 49-LIB3058-034-Q1-K1-E10
gaacattatctcagtgtgacttctgtccatgaagccctgctgtggcgcccttggagcgtggatcgaatgcatcgtcagcgcctggctggagcgctgctacaccacgccacctggctttcaaggagtcactaaacctttccgtgcctagacctccccatctgtagaacgggtccataccacctacctcacaggggtgttgtgaagacttggaagaaccatgtcaaatgtttttaacactttgttaatagatagtaccaaac

SEQ ID NO: 11455 - DNA, 428 bp, Bos taurus
  Clone ID: 49-LIB3058-034-Q1-K1-E2
cggacgcgtggggtccccacccaagggttcattcgactgctgagctagataagaaggcggacctcctcaagtgcgagtactgtgggaagtacgcccccgccgagcaattccgcggctccaagagattctgctccatgacttgcgctaagaggtataatgtgagctgtagccaccaattccggctgaagaggaaaaaaatgaaagaatttcaggaagccaactatgcccgtgttcgcaggcgcggaccccgccgcagctcctcggacatcgcccgtgccaagatccagggcaagcgccaccgaggtcaagaggattctagccggggttcagataattccagttacgatgaagcactctctccaacatctcctgggcctttatccgtgagagcagggcatggagaacgtgatctggggaattccaacaca

SEQ ID NO: 11456 - DNA, 208 bp, Bos taurus
  Clone ID: 49-LIB3058-037-Q1-K1-E2
atgacgagcggccgtccttcagcaggttcggattcccccggcaccaccctccccaaggccccgggtaaaaaacagaaaggcccaccaaaccctacgcctcccaaacacaccccgcccaaggaggacaagcaagagcagacccccagcaagcaagacgacacagaagaacctaagaacaacgcgaccacccctaaccacacagaggccc

SEQ ID NO: 11457 - DNA, 378 bp, Bos taurus
  Clone ID: 49-LIB3058-038-Q1-K1-E2
tagatcgcgagcggccgccctttttttatcattttttatttttttttttttttttttgggtgggtttaaaatttgggttgttttttaattttattttttttttttttatttttttttttttttttttttttgaaccggcctaaaaaaaaaaattaaaagcgggaaaaaaaacacaagggggaaaggaggagaaggggccggaacagggggatcaagcgggaggacagggggtagaaaaaaacgggtgaacaaggaaaaagggcaaaaacctgaaaaggaaaaccaccaaagggagccacaaaaagccacaggcaatcatgagggaaaacacaaagcctacctataggaaacccaaaccccaaggaaaaagggaagaaa

SEQ ID NO: 11458 - DNA, 316 bp, Bos taurus
  Clone ID: 49-LIB3058-039-Q1-K1-E2
gccaagccttctgtgaaataaatgctcatttcttaaatccaacccctgatgctcttcgttgccgtctcctcccatttcctggtctagtgctctcaagactgatccttgaaaaccatgtgtccagcattgaagagaactacaattaactaattggatgatggccattttaaaataaggaatttgctcccaacctgtggatgtgagggtgaattatgaccaaagacttacatgaataaatccttggaatcctaattctgcccaccctcccaaccaatcagttcttgactatataaattgttgactttataacattatc

SEQ ID NO: 11459 - DNA, 334 bp, Bos taurus
  Clone ID: 49-LIB3058-040-Q1-K1-E2
catttcttaccacaaggaacacccactccactaatcccaatactagtaattattgaaactatcagcctttttattcaacctatagccctcgccgtgcggttaacagctaacatcactgcaggacacctattaattcacctaatcggaggagctacacttgcactaataagcattagcactacaacagctctaattacattcaccattctaatcctactaacaattctagagtttgcagtagctataatccaagcctatgtattcactctcctagtcagcctatatctgcatgacaacacataatgacacaccaaactcatgcttatcatatagt

SEQ ID NO: 11460 - DNA, 275 bp, Bos taurus
  Clone ID: 49-LIB3058-043-Q1-K1-E10
gcgccatgtgctgctcagacagggtgttttgttcatcaaggtaaagatcatgctgccttgggacccgactggtaagattggccctaagaagcctctgcctgatcacgtgagcattgtggaacccaaagatgaaatactgcccaccacccccatctctgaacagaagggtgggaagccagagccgcctgccatgccccagccggtacccacagcataataggtctccttggccgctggatctggaatctgaatgttgctctgcaaagacctttaat

SEQ ID NO: 11461 - DNA, 389 bp, Bos taurus
  Clone ID: 49-LIB3058-045-Q1-K1-E10
gcagtggctccgtgtcctctgccaccttcttggagagctgttgtgttgctgacctcatgactacctgctacggagggcggaaccggaaggtggccgaggccttcgcccgcacaggaaagtccattgagcagctggagaaagagatgctgaatggacagaagctgcaggggccccagacagcccgggaactgcacagtatcctccagcacagaggcatggtggacaagttccctctgttcacagctgtgtacaaggtatgctacgagaaccagccagtgggggaattcatccactgcctgcagaatcatccagaacatgtgtgagcaggcctgaggcccaggccaggcagcctctttatcaatggagacaggcagaagcttggggtgcct

SEQ ID NO: 11462 - DNA, 438 bp, Bos taurus
  Clone ID: 49-LIB3058-045-Q1-K1-E2
ttgaaaatcaacaagctattgagctgatacaggaagaaccatacagtgatatcattggggcaccgggaccaaggttccacattatttgagcagctagaagcgttagagctagtgttcatttcactagtgtgtacaaattgcccccgtgtgtagggcacacaaaacccttccagaaaatttagatttttgtctgtacaaagtctctgccttttttcattttttccagtattttaaatttacccatttcctctttaagcagaactgcttgtatggtgtttgtgttctggtggagaaagcaagcaccccaagatcagttcagaacagatgtgtgcaatattggcgcatataattgagtaacaacggaaggttccagtcctgatcgtacttctccattactgcattctaaaggagaacgtttcatggaaaaacacctgacag

SEQ ID NO: 11463 - DNA, 301 bp, Bos taurus
  Clone ID: 49-LIB3058-046-Q1-K1-E2
gtgctagtttttgagcggccgcccttttttttttttttttttttttttgggttgtaaaaggttggtttaatgtcccagcacttggagaaaaaaaaactccagccagatggaacaagaaccacgatggccctgccccaaccccaagttccagtctacatgcctgccagaccaagcccgcggtagtcacgaccagggaccagatgacagcaggggagggagacaccaatggtgcccttatgacttcaggccaggcgggaaggggatttagataagaagatagcaaaagcccaacctgcaacag

SEQ ID NO: 11464 - DNA, 433 bp, Bos taurus
  unsure (38): unsure at all n locations; Clone ID: 49-LIB3058-049-Q1-K1-E2
gccccagaaggcgcagcacggccggccttcatacgaanaccccgtagggcacttcttcgagaacatcgtgacaccccgcacacctcctccatcgcaaggaaaggggcgaggactgtccctcagcagatttagctggggggctgagggccagaagccaggattcggctatggaggcagagcgtctgactacaaatcggctcacaagggactcaaggggcacgacgcccagggcacgctttccaaaatcttcaagctgggaggacgagacagccgttccgggtccccgatggcaagacgctgaagcccagctcccctcccagaaccccgtccccagcttcttaatacaactgcctcgacgctaaccattgtctaaattcccaagtgcagcaggcatccccccaccctgcccacatgcgcgtcctgcaggctcctg

SEQ ID NO: 11465 - DNA, 402 bp, Bos taurus
  Clone ID: 49-LIB3058-051-Q1-K1-E10
aacatagtaaaatcttaacagatgaagagtgatcattgaaagattttgcttctaaaacacactgtgtatattaggatatgccgaggcttttattgtgtgtctggctatgatctcctttttacaccttcccactgacctgcatggcaacctttgggaatcccaggctgggaacctgttccgtatctgttggcatggttgagggagttgatttctgtcctcaagatccatcttctgggacttccctggtcgtccagtggctaagactctgagctcccaatgcaaggggcccaggttcgatccctggtcagggaactagatcccacatgccacaatgaaggttgaggatcctgcatgctgcaactaagatttgtcgcagccaaataaaaatttattaatgttaaa

SEQ ID NO: 11466 - DNA, 348 bp, Bos taurus
  Clone ID: 49-LIB3058-052-Q1-K1-E10
aattaacaaagatcaaacacaaagaacaaatattaaaagcagcaagagaaaaacaacaaatatcacacaagggaattcccacaaggataacagctgatctttcaatagaaactcttcaagccaggagggaatggcaagacatacttaaagtgatgaaagaaaataacctacagcccagattattggcccagcaaggatatcattcaaatatgaaggagaaatcaaaagcttgacagaccactgaaaaaaaaaaaaaatataacaaaaaaaaaatataaaaggcaataaataaattataaaaaaaaaggacccaagcatttacaaaaaaaaaaaaggggcggccgcttt

SEQ ID NO: 11467 - DNA, 268 bp, Bos taurus
  Clone ID: 49-LIB3058-054-Q1-K1-E2
aaaaaaaaaaaaaataaaaaaaaaaaataaaataaaaaaaaaaaaaaaaaaaaaaaagggaaaaaaaaaaaaaaaaaaaaaaaaaaaaaaaaaaaaaaaaaaaaaaaaaaaaaaaaaaaaaaaaaaaaaaaaaaaaaaaaaaaaaaaaaaggggaaaaaaaaaaaaaaaaacacaaaaaaaaaaaaaagggaaaaaaaaaaaaaaaagaaaaaaaggggaacaaaaaagggaaagaaggggaaaaaaagaaaacagaaaagagaagag

SEQ ID NO: 11468 - DNA, 313 bp, Bos taurus
  Clone ID: 49-LIB3058-057-Q1-K1-E10
ccactttctgccggctccacatccttcggccatctgcgccgccatggatctcgccgccatctacaagagcctcctgtcgctgagccctgaactgccatccgacctcggagagactgaatccagcaccagctgggctttctcgggaccctggagcctcagctcatccgactccagcctgtctgaggtcgctgcctgactgcttggccgctccaccagcctgtttgtagtatttttatagtcttttattctttggttaatttattactcatgttttatttttttttgtttctttaataatttttttttttttttt

SEQ ID NO: 11469 - DNA, 438 bp, Bos taurus
  Clone ID: 49-LIB3058-058-Q1-K1-E2
cccgtttggattaattagaggtctatctgaaggctttgaagctcttttctatgaacccttccagggtgctgttcaaggccctgaagaatttgctgaggggttagtaattggagtaaaaagtctctttggacacacagtaggtggtgcagcaggagttgtatctcgaatcaccggctctgttggaaaaggtttggcagcaattacaatggacaaagaatatcagcaaaaaagaagagaagagatgggtcggcagcctaaagattttggtgacagcctggccagagggggaaagggcttgctgcttggagttgttggtggagtgactggaataataacaaagccggtggaaggtgccaaaaaggaaagagctgctggattctttaaagggattggaaaagggcttgtgggtgctgtggctcgttcaactggtggaattat

SEQ ID NO: 11470 - DNA, 366 bp, Bos taurus
  unsure (241),(299): unsure at all n locations; Clone ID: 49-LIB34-001-Q1-E1-E10
agcaatcaccagccctgacctaagacagtgaatcgataatggcactctccatcacgcggggccttctgctgctggcagccctgtgctgcctggcccccatctccctggctggagttctccaaggacacgctgtccaagagacagatgatacatcccaccaggaagcagcatgccacaagattgcccccaacctggccaactttgccttcagcatataccaccatttggctcatcagtccancaccagcaacatcttcttctcccccgtgagcatcgcttcagcctttgcgatgctctcnctgggagcaaagggcaacactcacactgagattcttgaaggctgggtttcaacctcactgagctcgc

SEQ ID NO: 11471 - DNA, 417 bp, Bos taurus
  Clone ID: 49-LIB34-001-Q1-E1-E2
ggcacagcacctggcaggtgtcctgggacttgatggcgaacttcaagggccacgcgctccccgggagcttcttcttgatagttggactgtggtggtcgctgaaatacccactgaagtacttttatcaaaaggagaagagcaaccaactgacccatcattaccagcgtctcgagatcatcgaagccgcaatcagaactttatttgcagtcatcgggatcctggtagagcagtttgttcctgatgggccccacctccacctgtaccacgaggaccactgggtaaaactcatgaactggcagcacagcaccatgtacctgttcttcgcagtctcaggcatcatggacatgctgacctatctcatcacgcatgttcccctggggctggacagactggttatggctctggctgccttcaatg

SEQ ID NO: 11472 - DNA, 409 bp, Bos taurus
  Clone ID: 49-LIB34-002-Q1-E1-E10
ggtctagctatccgggtcggaccacgcgtccagccacagccggcagttaaccaccgtactctgaactcgggtgtcggccgcttccatcacccgagtcaccatgggggccgtgctgggcgtcttcgccctcgccagctgggtcccgtgcctttgcggcggtgcgtcctgtttgctgtgcagctgctgtcccaacagtaagaattccaccttgactcgcctcatctacgcattcatcctcttcctgggcacgattgtctgttgtagcaggtttcatgatgggatggagactcagctgaagaagatacctggcttctgtgatgaaggacttagtaccatgcattactgatattatcgataaagagtgtgatgtgctggttcgttataaatctgtgtgtcgactcagctttgc

SEQ ID NO: 11473 - DNA, 398 bp, Bos taurus
  unsure (363): unsure at all n locations; Clone ID: 49-LIB34-002-Q1-E1-E2
aaattggttcaagaaaacaaggtctgagaattccttggcaatccataggactcagcacttccactgcagggggcacgggtttgatccctggtcagaaactaagatcccatatgctatgcagcacagccaaaaaataaataagtaagtaaataaggtctcccaaaagccatagcaactgagacttaattattcctgaaccttagatatgcttgctgctgctgctgctgagtcatttcagtcatgtccgactctgtgtgaccccatagacagcagcccaccaggctcccccgtccctgggactctccaggcaagaacacaggagtgggttgccatttccttctccaaagcgtgaaggtgaattcnctcagtcgtgtccgactcttagcgaccccatggac

SEQ ID NO: 11474 - DNA, 404 bp, Bos taurus
  Clone ID: 49-LIB34-003-Q1-E1-E10
cttcataaaagaccaaatattgcctccttgccatggacacccacagtcaatatatgctgtaatttgacattctgaatcacagacttggtggagtaaaaatgtattgatacttatagaaagaaacctgacatcccttcagagtttgtacactacttcctaaactggagtttagtccacattttggacctgcagagttatagaatcttcagtgcaggtaatgaaaataattctgtggttgtattttcctggaattaactgaaaagaataattcataatccaataagttccgggataattaaaacagattttaaaaactgtaatctcaaagatgatttgctctgaagtgattctcctcatagcatagaatttacttattccgcacatatgtttgaaaccgactgctg

SEQ ID NO: 11475 - DNA, 397 bp, Bos taurus
  Clone ID: 49-LIB34-003-Q1-E1-E2
caggaagatctgtgtgaattgttctacaaaggtatccgccctgccattaatgttggtttgtctgtgtcccgtgtcggatctgctgcccaaaccagggccatgaaacatgtggcaggtactatgaaactggagttggctcagtatcgtgaggttgctgcttttgcccagttcggttctgaccttgatgctgccactcaacaactcttgagtcgtggtgtgcgtttgactgagctgctcaagcagggacagtattctctcatggctattgaagagcaagtggctgttatctaagcgggtgtcagggggtatcttgacaagctggagcccagcaagatcacaaaatttgagaatgctttcttgtctcacgttatcagccaacatcaggccctgttgagca

SEQ ID NO: 11476 - DNA, 385 bp, Bos taurus
  Clone ID: 49-LIB34-004-Q1-E1-E2
ttacgttgttcgcagaggttcgccgggtcatggtgccatcctgactgggaagaggacgctccggggagacgaatgaggaaccacctcctcctactgttcaagtacaggggcctggtccgcaaagggaagaacagcaaaagacgaaaatggctaaattcgtgatccgcccggccaccgctgccgactgcagtgacatcctgcggctgatcaatgaattggctaaatacgaatacatggaagagcaagtaatgttaactgagtaacatctgctggaacacggtttcggagagcatcccttctagcactgcttagttgcaaaagtgcccaatgagcacctgactccgggaagacacaccattgttggttttgccaagtactaatttac

SEQ ID NO: 11477 - DNA, 406 bp, Bos taurus
  Clone ID: 49-LIB34-005-Q1-E1-E2
cggacgcgtgggcagaggctgaagctagttaacatcagtgtcttggctcccaactggctcccaattcctggtgaaactcctaaagggagactgttaaatcatgaaattaatcaccatccttttcctttgttccaggctgctaccaagtttaacccaagagtcttctcaagaaatcgactgcaacaaccaggatgtatttaaagctgtggacgctgctctgacaaaatacaacagtgaaaacaagagtggcaaccagtttgtattgtaccgcataaccgaggttgccagaatggataatcctgacacattttattccttgaagtaccaaatcaaggagggcgactgtccttttcaaagtaacaaaacttggcaagactgtgactacaaggactctgcacaagctgcc

SEQ ID NO: 11478 - DNA, 375 bp, Bos taurus
  Clone ID: 49-LIB34-006-Q1-E1-E10
cggagagccggagccagagggacggccaagcccaggagccagggaaccgacgaccgagtcatgtggctggaaatactccttgcctcagtgctgggctttgtcatctactggttcgtctccaaggacaaggaggagactttgccccttgaagatggatggtgggggcctggggtgaggcccacagctggggaggataagagcatccgcccattcaaggtggaaacatcagatgaggagatcaatgacttacatcagaggattgacagggtccgtttaactccacctttggaggacagtcgtttccactatggtttcaactccaactatttgaagaaaatcatctcctactggaagaatgaatttgactggaggaag

SEQ ID NO: 11479 - DNA, 373 bp, Bos taurus
  Clone ID: 49-LIB34-008-Q1-E1-E10
caagatacaatctccagtaaactgaaggaatgctgtgataagcctttgttggaaaaatcccactgcattgctgaggtagaaaaagatgccatacctgaaaacctgcccccattaactgctgactttgctgaagataaggatgtttgcaaaaactatcaggaagcaaaagatgccttcctgggctcgtttttgtatgaatattcaagaaggcatcctgaatatgctgtctcagtgctattgagacttgccaaggaatatgaagccacactggaggaatgctgtgccaaagatgatccacatgcatgctattccacagtgtttgacaaacttaagcatcttgtggatgagcctcagaatttaatcaaacaaaact

SEQ ID NO: 11480 - DNA, 382 bp, Bos taurus
  Clone ID: 49-LIB34-009-Q1-E1-E10
gtcccagaaagcctggaaccagtagtattggaaatgtgaaccctgggagctatggacctggaagtagtggcacttggaaccccggccgccctgagcccggaagtgctggcacctggaaccccggccgccccgagcccggaagtgctggcacctggaaccccggccgccccgagcccggaagtgctggcacctggaaccccggccgccccgagcccggaagtgctggcacctggaaccccggccgccccgagcccggaagtgctggcacttggaatactggaagctctggatcttcaagttttaggccagatagctcaggtcatgggaacattaggccttccagtccagactggggcacctttagagaggaaggaagtgtaag

SEQ ID NO: 11481 - DNA, 286 bp, Bos taurus
  Clone ID: 49-LIB34-009-Q1-E1-E2
gaggaaaatgctattatacacaatcagaagtctagatatcagagtggtgagagagcacgttacgaatgcattgggaattatgacctttttggagagacagaagtcatatgtttgaatggaatttggacagaaccacctcagtgtaaagactctcaagggaaatgtgggcctcctccaacaatagacaatggggacattacctcactcctggaatcagtatatcctccaggatctattgttgagtacccgtgtcaaggctactatgaacttcgggggaacagaaatg

SEQ ID NO: 11482 - DNA, 342 bp, Bos taurus
  Clone ID: 49-LIB34-011-Q1-E1-E10
actcaaccaaccataaagatattggtaccctttatctactatttggtgcttgggccggtatagtaggaacagctctaagccttctaattcgcgctgaattaggccaacccggaactctgctcggagacgaccaaatctacaacgtagttgtaaccgcacacgcatttgtaataatcttcttcatagtaataccaatcataattggaggattcggtaactgacttgttcgcctaataattggtgctcccgatatagcatttccccgaataaataatataagcttctgactcctctctccctcattcctactactcctcgcatcctctatagttgaagctgggg

SEQ ID NO: 11483 - DNA, 395 bp, Bos taurus
  Clone ID: 49-LIB34-013-Q1-E1-E2
acccgcggtcatcggccctatgacaagaagaaggaagaggcccccagcctgagacctgtgccccctcccatcagcggaggtggctatcgggctcgtcccgccacagcaactgtgggccagaagaaagtggagagaaagccccctgacgctgatggctgcctgcacgcggacccggatctgggtgtgttgtgtcctacaggatgtaagttgcaagatactttggtaagacaggagagaccaatccgaaagagtatagaagatttacgtaatactgtggactctgtttcccggacctcttcttccacctttcaatatataactctgctaaaaaacatgtggaaaggaatgcagaatcaagtacaagataatgaaaatgtagtacacgagtactcctc

SEQ ID NO: 11484 - DNA, 391 bp, Bos taurus
  Clone ID: 49-LIB34-014-Q1-E1-E2
agaccctgaagaaacattttgtaggttaccctactaacagtgactttgaactgaagacagttgaacttccacccttaaaagatggagaggtcctgctggaagctttgtacttgactgtggatccttacatgagaattatggcaaaaagcttgaaggaaggtgacatgatgatgggagagcaagtggccagagttgtggaaagtaaaaattcagccttcccaacaggaactattgtgctggctccttctggctggacaacgcattccatttctaatggggaaaaactggaaaaggtgcttgcagagtggccagacacgttaccactgtctctggctctgggaacggttggcatgcccggcctaacagcctactttggcctgttggacatctg

SEQ ID NO: 11485 - DNA, 397 bp, Bos taurus
  Clone ID: 49-LIB34-015-Q1-E1-E10
aagataaaggtgcctgcctgctaccaaagattgaaactatgagagaaaaagtactgacttcatctgccagacagagactcaggtgtgccagtattcaaaaatttggagaaagagctttaaaagcatggtcagtagctcgcctgagccagaaatttcccaaggctgagtttgtagaagttaccaagctagtgacagatctcacaaaagtccacaaggaatgctgccatggtgacctacttgaatgcgcagatgacagggcagatcttgccaagtacatatgtgataatcaagatacaatctccagtaaactgaaggaatgctgtgataagcctttgttggaaaaatcccactgcattgctgaggtagaaaaagatgccatacctgaaaacctgccccc

SEQ ID NO: 11486 - DNA, 369 bp, Bos taurus
  Clone ID: 49-LIB34-018-Q1-E1-E10
caatgggtttgataaccatcctgcaaatccagtgctctactataaggacaccgccacctttggctgccatgaaacgtattccttggatggaccggaagaagtagaatgcagcaaattcggaaactggtctgcacagacaagctgtgaagcatccatgtagttatctattaaaagagccactgtgatatatgaacgagagagagtaactatccagaacacatttaacaatggaatgctgcatggccaaaaagtttcattcttctgcaagaataaagtaacaaagtgcaactacacagaggatgctcagtgcaaagacagcagcatcaagattcccaaatgcctcaatgagcacagttcgttagctttctg

SEQ ID NO: 11487 - DNA, 433 bp, Bos taurus
  Clone ID: 49-LIB34-019-Q1-E1-E2
cttgaagctacataggagcaaccgcccttatgattgcccacggcctcacatcctccatacttttctgtctagcaaactcaaactacgaacgaatccacagccgaaccataattctagctcgaggcctacaaacgctccttccactaatagccacctgatgactactagcaagtctaaccaacttagctctacccccaacaatcaacttaattggagaactatttgtagtaatgtcaaccttttcatgatctaacattacaattattctaataggagtaaatatagtaatcaccgccctatattctctatacatgctaattataacccaacgaggaaaatatacctaccacattaataatatctcgccttcctttacacgggaaaatgcactcatatcattacacatcctaaccctactactcctaaacctaaa

SEQ ID NO: 11488 - DNA, 409 bp, Bos taurus
  Clone ID: 49-LIB34-020-Q1-E1-E10
agggactcgaaggctgcagctgagcaaattgctgtcattgctggctgtaaaaccaccacctcagctgtccttgttcactgcctgcgccagaagacagaggacgagctcctggagataacactgaaaatgaaatttttcgctcttgatttacacaaagactccacagagagccatcctttcctgcccaccgtggttgacggaatgctgctgccaaagatgcccgaagagatgctggctgaaaagaatttcaacaatgttccctacatggtgggaatcaacaagcaagagtttggctggattattccactgttcatgagcttacctctgcctgaagacaagctggaccagaagacggccacatcactcctgtggcagtcctactctctccttagcattcctgaggaactga

SEQ ID NO: 11489 - DNA, 406 bp, Bos taurus
  Clone ID: 49-LIB34-020-Q1-E2-E10
agggactcgaaggctgcagctgagcaaattgctgtcattgctggctgtaaaaccaccacctcagctgtccttgttcactgcctgcgccagaagacagaggacgagctcctggagataacactgaaaatgaaatttttcgctcttgatttacacaaagactccacagagagccatcctttcctgcccaccgtggttgacggaatgctgctgccaaagatgcccgaagagatgctggctgaaaagaatttcaacaatgttccctacatggtgggaatcaacaagcaagagtttggctggattattccactgttcatgagctaccctctgcctgaagacaagctggaccagaagacggccacatcactcctgtggcagtcctactctctccttaacattcctgaggaac

SEQ ID NO: 11490 - DNA, 431 bp, Bos taurus
  unsure (411): unsure at all n locations; Clone ID: 49-LIB34-020-Q1-E2-E2
ctttcagctgggtgctcctcttgagtcagccctatccacggcagagatgttttccgtgagggacctctgcctggtcctgagtttggtgggtgcaattaagacagaagatggtagtgatcctcccagtggtgactttttaactgaaggaggaggggtgcgtggcccaagacttgtggaaagacagcaatctgcctgcaaagagacaggctggcccttctgctctgatgaagactggaatacaaaatgcccttctggctgcaggatgaaagggttgattgatgaagtcgatcaagattttacaagcagaataaataaactaagagattcactatttaattatcagaagaacagtaaggactctaatacattgaccaagaacatagtggaactaatgagaggggattttgccanagctaacaacaatgataata

SEQ ID NO: 11491 - DNA, 366 bp, Bos taurus
  Clone ID: 49-LIB34-021-Q1-E1-E10
cacagtttcccggaactcttcttccacctttcaatatataactctgctaaaaaacatgtgcaaaggaaggcagaatcacatacatgataatgatgatgtagtaaacgagtactcctcacatctggaatagcaccacttacagatagatgagactgtgaagaatagtatcccaactaagcttcgtgtgctccgttcagttctggagaatttgagaagcagattacaagaattagaatcggatgtctcaactcacatggaatactgccgcaccccgtgtactgttacttgcaatattcctgtggtgtctggcaaagaatgtgaggaaatcatcatgaatggaggtgaaacatctgaattggtcctcat

SEQ ID NO: 11492 - DNA, 438 bp, Bos taurus
  unsure (280),(373): unsure at all n locations; Clone ID: 49-LIB34-021-Q1-E1-E2
cattggtaagacatgagagaccaatccgaaagagtatagaagatttacgtaatactgtggactctgtttcccggacctcttcttccacctttcaatatataactctgctaaaaaacatgtggaaaggaaggcagaatcaagtacaagataatgaaaatgtagtaaacgagtactcctcacatctggaaaagcaccagttatatatagatgagactgtgaagaataatatcccaactaagcttcgtgtgctccgttcaattctggagaatttgagaagcanaatacaaaaattagaatcggatgtctcaactcagatggaatactgccgcaccccgtgtactgttacttgcaatattcctgtggtgtctggcanagaatgtgaggaaatcatcaggaatggaagttaaacatctgaaatgtacctcattcaccctgagg

SEQ ID NO: 11493 - DNA, 400 bp, Bos taurus
  Clone ID: 49-LIB34-023-Q1-E1-E10
gtcgacgcacgcgtccgggaaaatacgacattcttggaaaaactcaagtttggcataggcgatggcaatttacagtattacttgtacaactggaggtgtccagggacagagtctgaaaaggttggactcgtagtacagtagatggatatttctattgatatttctagaactctgacatcatcattcgttaatactctaaagattcctggaactgccattccaaagaagagtaaaagcacaacttaagtgacatcgaagtgtcagtaacagaagagatggaaaagcatccatttgtgaccacacctgtagaacacatttctagctgacattaacatccatcctttttttccactgttggaccgtttataggacggatgcagagggtatagagcatattcct

SEQ ID NO: 11494 - DNA, 380 bp, Bos taurus
  Clone ID: 49-LIB34-025-Q1-E1-E2
aaagaattccataatacaagaatccctttaaagaaaaaggcagctgcattatttcatgaataactggggagacacttcctcctcagtggaagacgtcgtttgttgtcgtttgccaaaataaaaccaacccccttttaaaggagtaacaatgaaatttaaatgagactttcttaagcgctcacctagatgtggacttgtctgaaagctgtatgcctctcatccctgtgcaccacacaccccttttaagaagacagagagcatctgatgtgcgattatgggaataaggacaacacttgtgcatgacacacctctttcagtatattgcttgacgcctcaaataaagttttatctctgcaaaaaaaaaatggaaaagccgaggg

SEQ ID NO: 11495 - DNA, 390 bp, Bos taurus
  Clone ID: 49-LIB34-026-Q1-E1-E10
agcggatacaccatggcgcgcgtccgaggcccgcggctgcctggctgcctggccctggctgccctgttcagcctcgtgcacagccagcatgtgttcctggcccatcagcaagcatcgtcgctgctccagagggcccgccgtgccaacaagggcttcctgtaggaggtgcggaaggggaacctggagcgagagtgcctggaggagccatgcagccgcgaggaggccttcgaggccctggagtctctcagtgccacggatgcgttctgggccaagtacacagcttgtgagtcagcgagaaatcctcgagaaaagctcaatgaatgtctggaaggaaactgcgctgaaggtgtggggatgaactaccgagggaacgtgagcgtcacccggtca

SEQ ID NO: 11496 - DNA, 410 bp, Bos taurus
  unsure (372): unsure at all n locations; Clone ID: 49-LIB34-026-Q1-E1-E2
tggacgttggctctggtggtgatggacaggccgaaccccctgccgaggacccgctcaacttctacggagcttctcttctctccaaaggatcctcctctaaggcccgcctcctcgtagacccgaactgtagtggccacagcccgcgcacagcgcggcatgcacctgcggtccggaagttctcccctgaccttaagttgcttaaggatgtaaagattagcgtgagctttacggagagctgcaggagtgaggacaggaaggtgctgtacacgggagcggagcgcgacgtgcgggcagagtgtggcctggccctcagccctgtcattggggacgtgcatgctggtccctttggcgggagcgtggggaaccgggtangcccagggggtgagagtgcgggtaagagggatgaggaa

SEQ ID NO: 11497 - DNA, 411 bp, Bos taurus
  Clone ID: 49-LIB34-027-Q1-E1-E10
aaccaccacaggcacaagggtccccaaagacagggtcactcagataactgtgatacaccagtaggaagtgaaagtttacaaccttctcttccacaaaagaagctctgacgagagagatgcataaatcagttactctgacagtttcccaaagattcagaatctgctttgagtagctgctgttgccactgtcgacatctggtatttgaaaaaacagggtctgcaatcacctgacagtgtacagaaaagctcccctctttgtgtagctgacagggccttttggcggaggagaatgtcattgaatcttgacagtgacgtttgcctccagctgcctgacaggcagcaggtcagcagctcaaccccacagaagccagcaccaagtgaagctgaaaaaataagggcaaaatgtgaaaa

SEQ ID NO: 11498 - DNA, 345 bp, Bos taurus
  Clone ID: 49-LIB34-027-Q1-E1-E2
gccgtactactactactctcgctccctgtattagcagccggcatcacaatgctattaacagaccggaacctaaatacaaccttcttcgacccggcaggaggaggagaccctattctatatcaacacttattctgattctttggacaccccgaagtctatattttaatcttacctgggtttggaataatctctcatatcgtgacctactactcaggaaaaaaagaaccattcggatatatgggaatagtttgggctataatgtcaatcggatttctaggtttcatcgtatgagcccaccatatattcactgtcggaatagacgtcgacacacgaacctaattcaca

SEQ ID NO: 11499 - DNA, 382 bp, Bos taurus
  Clone ID: 49-LIB34-028-Q1-E1-E2
tagccaaggaaggcattccagtgtacgcctggaagggtgaaacggatgaggagtacctgtggtgcattgaacagacgctgtacttcaaggacgggcccctcaacatgattctggacgacggtggtgacctcaccaacctcatccacaccaagtacccgcagctcctgtcaggcatccgacgcatctctgaagagaccacaacgggggtccacaacctgtacaagatgatggccaaagggatcctgaaggtgccggccatcaatgtcaatgactctgtcaccaagagcaagtgtgacaagctccatggctgccgggagtccctcataaatggcatcaagcgggccacagatgtcatgattgcgggcaacgtggcggtgggtgc

SEQ ID NO: 11500 - DNA, 419 bp, Bos taurus
  Clone ID: 49-LIB34-029-Q1-E1-E2
gtgagagtgccctgctggcctggtcctgggtgccggcgtggtgaggaacccagcgctcgaagaggcagccatggggctgctgtctggggacacgctggggcccctggccgtggccctgctcatcttcttgctcttgctggacctgatgcaccggcgctcacgttgggccccacgatacccaccaggccccatgccgctgccggtgctgggcaatctgctgcaggtggacttctaggacccacgtctcagctttaaccaggcactctacaagcacttgggtttcgggccgcgcgccgaaggagtgatcctggcgcgttatggcaacgcctggcgtgagcagcggcgtttctccctatccaccctgcgcaacttcggcctgtggaagaagtcactggaacagtgggtgaccgaagaggcct

SEQ ID NO: 11501 - DNA, 425 bp, Bos taurus
  Clone ID: 49-LIB34-031-Q1-E1-E2
atttattcatatattttgtgatatgtgaatcaaattttagaatttgattctaaagtttaaccactggatgaaatttcaaaacaccgccctaaataaaataaaaaaaatttttatgtttaaagtcatcttgttagctaactgcacaacttcttcagttaaaaaaatacttttcttgctaaaattctacacttgaataaatataaacaattaataattgtacaattcttaaatgatgtaatattaatttcaaaactaaaattaaataagttgattttacatgtgaaaatcagtaacatggattttaaaattgatactaattttgcaacaaaataatttggagtaaatgtttggtatgctttatttatgaggccaaatgaagcaggatgaaatactgtattgaaataggctcacactgttaaatatag

SEQ ID NO: 11502 - DNA, 381 bp, Bos taurus
  Clone ID: 49-LIB34-033-Q1-E1-E10
aatttttcaagaatgctgccaagctgaagatagaggcacctgcctgctaccatagattgaaactatgagataaaaagtactgacttcatctgccatacagagactcaggtgtgccagtaatcattcaattggagaatgagctttaagagcatggacagtagctcgccagagccacaaatttcccaaggctgagtttgtcgaagttaccatgctagtgacagatctcacagaaagtccacagagaatgctgccatagtgacctacttgaatgcgcagatgacagggcagatcctgccaactacatatgtgagaatcaagatataatctccagtaaactgaatgaatgctgtcataagcctttattggcaaaatcccactgca

SEQ ID NO: 11503 - DNA, 422 bp, Bos taurus
  Clone ID: 49-LIB34-035-Q1-E1-E10
gtctgacattcacgggtctacacacgcggcccaatatttcccaggaagtcataatacaatatttagaaacatgactgagcaaagaaagtttattttggaggaaataaagaaacaccaagaatccctggacctcaataaccctcaagattttattgattactttctgattaaaatggaaaaggagaaaacacaataaacattctgaatttaccatggacaacttgatcaccaccgtatgggacgtgtttagtgctggaacagagacaacaagcctcactctgagatatggactcctgctcctgctgaagcacccagaggtcacagctaaagttcaggaagaaattgatcgtgtggttggcagaaaccgaagcccctgcatgcaggacaagagctgcatgccctacacagatgctgtgctgcat

SEQ ID NO: 11504 - DNA, 352 bp, Bos taurus
  Clone ID: 49-LIB34-035-Q1-E1-E2
agaaatgaatgcttcctgagccacaaagatgatagcccagacctcgctaaattgaaaccagaccccaatactttgtgtgatgagtttaaggcagatgaaaagaagttttggggaaaatacctatacgaaattgctagaagacatccctacttttatgcaccagaactcctttactatgctaataaatataatggagtttttcaagaatgctgccaagctgaagataaaggtgcctgcctgctaccaaagattgaaactatgagagaaaaagtactgacttcatctgccagacagagactcaggtgtgccagtattcaaaaatttggagaaagagctttaaaagcatggtcag

SEQ ID NO: 11505 - DNA, 413 bp, Bos taurus
  Clone ID: 49-LIB34-036-Q1-E1-E2
tatcctcccttctatgcttagaaggaataatgctatccctattcgttatagcagccctaacaatcctcaactcacattttacattagctagcataatacctattatcctactagtcttcgcagcctgtgaagcagccctaggtctatctctactagtaatagtatcaaatacatatggtactgattatgtacaaaacctcaacttactccaatgctaaaatacattattccaacaattatacttatacccctaacctggttatcaaaaaataatataatttgggttaactccacagcacacagccttctaattagctttacaagcctcctcctcataaaccagtttggcgacaacagccttaatttttcactactatttttctccgactccctatccactccactactaattt

SEQ ID NO: 11506 - DNA, 427 bp, Bos taurus
  Clone ID: 49-LIB34-038-Q1-E1-E2
catgagtcagccctatccacggcagagatgttttccgtgagggacctctgcctggtcctgagtttggtgggtgcaattaagacagaagatggtagtgatcctcccagtggtgactttttaactgaaggaggaggggtgcgtggcccaagacttgtggaaagacagcaatctgcctgcaaagagacaggctggcccttctgctctgatgaagactggaatacaaaatgcccttctggctgcaggatgaaagggttgattgatgaagtcgatcaagattttacaagcagaataaataaactaagagattcactatttaattatcagaagaacagtaaggactctaatacattgaccaagaacatagtggaactaatgagaggggattttgccaaagctaacaacaatgataatacatttaaacaaatat

SEQ ID NO: 11507 - DNA, 388 bp, Bos taurus
  unsure (342): unsure at all n locations; Clone ID: 49-LIB34-039-Q1-E1-E10
caatttcctactgactatgacgagggacaagatgacagacctaaggtaggtttgggtgcccgcggtcatcggccctatgacaagaagaaggaagaggcccccagcctgagacctgtgccccctcccatcagcggaggtggctatcgggctcgtcccgccacagcaactgtgggccagaagaaagtggagagaaagccccctgacgctgatggctgcctgcacgcggacccggatctgggtgtgttgtgtcctacaggatgtaagttgcaagatactttggtaagacaggagagaccaatccgaaagagtatagaagatttacgtaatactgtggactctgtntcccggacctcttcttccaaccttcaatatataactctgctaaaaa

SEQ ID NO: 11508 - DNA, 324 bp, Bos taurus
  Clone ID: 49-LIB34-040-Q1-E1-E10
acgcggccggcagtggacacaacagtcggccagctccaagctctcatggaccctgaaggcctggcgcatctgctgcctcctgccactctggccgccctggcagacagctggctccgagaggactgcccagggctcaactacgtggccttggtctcggggacagccccctcgcaggcggtgctgtgggccaagtccccaggggtgctggcagggaggcccttctttgagtcgatctttgccgaagtcaactgccaggtctcctggtttctcccctgaggggtcaaagctggtgcctgtggccaacgtggccgaggtccggggccc

SEQ ID NO: 11509 - DNA, 417 bp, Bos taurus
  Clone ID: 49-LIB34-041-Q1-E1-E10
gggtcgacgcacgcgtctaaagtgattcttcatgagggagcagtacttggagttacataaaccaattcccagagcaggaaaattaagatgtgaagcaattgttgctgatatcctggataaaggatccggtttagtaattcttgtggatgtctacacttactctggggaggaacttatatgttataatcagttctccatctttgttgttggttctggaggctctggtggaaaacggacatcagacaaggccaaggcagctgtagccatacccaatagacctcctgatgctgtacttacagataccacctcacttaatcaggctgctttgtaccgcctcagtggagattggaatcccttacacattgatcctaactttgctagcttagcaagtttcgataaacctatattacatggatt

SEQ ID NO: 11510 - DNA, 252 bp, Bos taurus
  Clone ID: 49-LIB34-042-Q1-E1-E2
aggaaactttggcacactgcagtgggtgacttttatttctcttcgccttctcgtcagctctgcatgagccacgggtgtgtttcgtccagattacctgatgagtgagattgcgtatcggtttaaagatttgggagaagaacattctaaaggcctggtactgagtgccttttctcagtatctccagcagtgtccatgtaatgagcatgtggaagtagtgaatgagataagtgagtttgcacaagtgtgtgttgc

SEQ ID NO: 11511 - DNA, 407 bp, Bos taurus
  Clone ID: 49-LIB34-043-Q1-E1-E10
acattcatgcatcaaacaacctgaagtttactcaggtgacaccaaccagcctgactgcccagtggacggcacccaatgttcagctcactgggtatcgagtgcgggtgaccccgaaggagaagaccggaccgatgaaagaaatcaaccttgctcctgatagctcatccgtggttgtatcaggactcatggttgccaccaaatatgaagtgagtgtctatgctcttaaggacactttgacaagcagaccggctcagggagtcgttacaactctggagaatgtcagccctccaagaagggcccgtgtgacagatgctactgagaccaccatcaccattagctggagaactaagactgagacgatcaccggcttccaagttgatgctatcccaacaaatggccagacccca

SEQ ID NO: 11512 - DNA, 376 bp, Bos taurus
  Clone ID: 49-LIB34-043-Q1-E1-E2
gaaaatgtgacttatggggccgcgaacccgcctcctgctgctctctggggtcctggtcgtgaccgagacccgggctgctacgcccggcatccgaagatggagcctcagacgcggtgggtgaagcaggaagggccggagtattgggatcagaacacgcaaaacgccaatggcaacgcaaagagtttccgattgggcctgaacaccctgcgcggctacgatcaccatggtgacgccgggtctcacaccctccagtggatgtctggctgctacatggggcctgaccggcgtctcctcgtcgggttcatgcagtacggctacgacggcagagattacctcgccctgaacgaggatctgcacgcctggaacgcagtggaca

SEQ ID NO: 11513 - DNA, 305 bp, Bos taurus
  Clone ID: 49-LIB34-044-Q1-E1-E2
aggccagcatgcccagcaatggcgttggctcagtggccctacctcatcttggccctgctctccggcttggcagtctctggcttccctagaaacccatccctgctgcttggggcagtcgatggcatcgaagtctacagcaccaaggtcaactgcaaggtgacctcccgcttcgctcacaatgtcgtcaccaccagggccgtcaaccacgcagacacagccaaggaggtgtccttcgatgtggagctgcccaagacagccttcatcaccaacttcacctttaccatcgatggtgttacctacccggg

SEQ ID NO: 11514 - DNA, 360 bp, Bos taurus
  Clone ID: 49-LIB34-045-Q1-E1-E10
gaaaggcactgctggaaatgcagcagacgaaaatggtgttggaaactttcggtggcgatggacatgccagaggagactctgtatctcaaggaacaggattagcaccaggaagtcccagaaagcctggaaccagtagtattggaaatgtgaaccctgggagctatggacctggaagtagtggcacttggaaccccggccgccctgagcccggaagtgctggcacctggaaccccggccgccccgagcccggaagtgctggcacctggaaccccggccgccccgagcccggaagtgctggcacctggaatcccggccgccccgaacccggaagtgctgggacctggaacccccgccggcccg

SEQ ID NO: 11515 - DNA, 340 bp, Bos taurus
  unsure (327): unsure at all n locations; Clone ID: 49-LIB34-045-Q1-E1-E2
ccccactgtccctctacaatgaggagctcgtgagcatgaacgtgcagggagactacgagccggttgatgccactggtttcatcaacatcaattccctcaggctgaaggaatatcatcgcctccagaacaaggtcaccgccaaatagaccagctgacaatgcagactggggcccctcaatttaaccaacccccaagtgttaccgccaattggtgtgaaaaattgtgaatgtgacttgttctctgggtctggcagcgtagtgggggtgccaagcctcagctttgttccaatagtcccctgtagcccacagaagtggtccaaacacgganggatggggccggg

SEQ ID NO: 11516 - DNA, 374 bp, Bos taurus
  Clone ID: 49-LIB34-046-Q1-E1-E2
gacaagtcttcagcagactctgagctgtgtggacctcgtggagcccgaggacctccgggactcagtggtcttccagggccacctggttatacaggacccataggtatgccaggactaacagggagacctgggcttcctggactggttgagaagtgcccacccctgcctcagtctgccttttccgtcaagctgagtgggcctttcccaggaccctcccagcccattgtcttccaggaagctctgtacaaccatcagggccacttcgaccccgccactggtgtgttcaactgcagcgtccctggtgtgtaccactttggctttgacattgagttgtttcagagtgctgtcaaaggtggtctaatgcggaatggaat

SEQ ID NO: 11517 - DNA, 416 bp, Bos taurus
  Clone ID: 49-LIB34-047-Q1-E1-E10
agctgactattctcaaccaaccataaagatattggtaccctttatctactatttggtgcttgggccggtatagtaggaacagctctaagccttctaattcgcgctgaattaggccaacccggaactctgctcggagacgaccaaatctacaacgtagttgtaaccgcacacgcatttgtaataatcttcttcatagtaataccaatcataattggaggattcggtaactgacttgttcccctaataattggtgctcccgatatagcatttccccgaataaataatataagcttctgactcctccctccctcattcctactactcctcgcatcctctatagttgaagctggggcaagaacaggctgaaccgtgtaccctcccttagcaggcaacctagcccatgcaggagcttcagt

SEQ ID NO: 11518 - DNA, 359 bp, Bos taurus
  Clone ID: 49-LIB34-047-Q1-E1-E2
atcagcgtcacgactcctgtggagggcaccacctggttagagttgctgatcctacacgaagtgcatgagcctgcgcaggatgcgcaggacgttacacactgccgtgcagatgtcgacgaattgcgcactgtgccaaaaaccttccacgttaaattccggcacatcagcaataaataggatggacgtgatccagatgcattgtaaaacctggtcgagatatatccggattcgctgagcaggaacgaccgcacatacgagcaaatgcatcatatcctagtggtcaagaagatgggcaacatcatgcgcaatgccacgcttccctcgcagtatctcggctccaggcatctgaacgtcacagg

SEQ ID NO: 11519 - DNA, 422 bp, Bos taurus
  Clone ID: 49-LIB34-048-Q1-E1-E2
gttctagatcgcgagcggccgcccttttttttttttttttttttttttggaacagaagtgaagctttattgcgtggacagtgtgtatgagagggtgtatgtgtgtgggatcagttggggcagccaaagacgaccatgttctctgtgaagttggccaggtcctcgcactgtttctggttctcctcatcttgacattcttcagcctcgggccacagctccacccaggtgtccttcccgatgatgtagctgatcttgggtttctcgccccacaggtcagaggacacgccccacacgagatagtgtgccccctccttcagtttaagggcttccctgcacttgatgtggctgatgaacttgcgctcctgtttaacctgcacctcgtccgagcccgatttgatgatgttctcgatcaccatgatgtac

SEQ ID NO: 11520 - DNA, 418 bp, Bos taurus
  Clone ID: 49-LIB34-049-Q1-E1-E2
aatcaagatacaatctccagtaaactgaaggaatgctgtgataagcctttgttggaaaaatcccactgcattgctgaggtagaaaaagatgccatacctgaaaacctgcccccattaactgctgactttgctgaagataaggatgtttgcaaaaactatcaggaagcaaaagatgccttcctgggctcgtttttgtatgaatattcaagaaggcatcctgaatatgctgtctcagtgctattgagacttgccaaggaatatgaagccacactggaggaatgctgtgccaaagatgatccacatgcatgctattccacagtgtttgacaaacttaagcatcttgtggatgagcctcagaatttaatcaaacaaaactgtgaccaattcgaaaaacttggagagtatggattccaaaatg

SEQ ID NO: 11521 - DNA, 328 bp, Bos taurus
  Clone ID: 49-LIB34-050-Q1-E1-E10
ggatccacccacggctccgcagccccagtatgtagctgcctcgagcagggagctggtggctcttccatccccagaccagccaagcctgtgagtgacaccccagacagaggaaccagagccatgcggagtctcatcggactgctgttgttactgactgcctgcctggcagtaaacgccagctccgtgcccacattgcccgatgacattcaagtgcaggagaacttcgacctgtctacgatctatgggaagtggttcaatgtggccgtgggctccacctgcccatggctgaagaggttcaaggagaagatgaccatgagcacagtggtgt

SEQ ID NO: 11522 - DNA, 199 bp, Bos taurus
  Clone ID: 49-LIB34-050-Q1-E1-E2
gttctgaaacactagaggacgcaactgtgagtgtctctgtcctagcctctcaacttgctttcctggtttctgacatgcttcccctccctctctccatattgctcctgctcaaacagtcccagagtttcctgggcgaagaaatggatgtctaatctgagaaaaccctcaacgattcctgcaacctggttgtgtgtgctcc

SEQ ID NO: 11523 - DNA, 245 bp, Bos taurus
  Clone ID: 49-LIB34-051-Q1-E1-E10
accccacaaaactttggcacaatgaagtgggtgacttttatttctcttctccttctcttcagctctgcttattccaggggtgtgtttcgtcgagatacacacaagagtgagattgctcatcggtttaaagatttgggagaagaacattttaaaggcctggtactgattgccttttctcagtatctccagcagtgtccatttgatgagcatgtaaaattagtgaacgaactaactgagtttgcaaa

SEQ ID NO: 11524 - DNA, 234 bp, Bos taurus
  Clone ID: 49-LIB34-051-Q1-E1-E2
ttaaagcccaactgtactgctctgctgtgcctctctgatcgtggttcaggggacactgggctcccccccagaccccccgcctgagagctgggcagagacacccagcgcgatgaaggggctcacgtgctttttcctctgcttcttcctttctgaatcgagaggctttgaaatccccaccaatggactttcagaatttgcagactatggagaccatgtggagttggctccaggcat

SEQ ID NO: 11525 - DNA, 242 bp, Bos taurus
  Clone ID: 49-LIB34-052-Q1-E1-E2
gaggatctggtgtaccaggcgaagctggccgagcaggctgagcgatacgacgaaatggtggagtcaatgaagaaagtagcagggatggatgtggagttgacagttgaagaaagaaacctcctatctgttgcatataaaaatgtgattggagctagaagagcttcctggagaataatcagcagcattgaacagaaagaagaaaacaagggaggagaagacaaactaaaaatgattcgggaata

SEQ ID NO: 11526 - DNA, 241 bp, Bos taurus
  Clone ID: 49-LIB34-054-Q1-E1-E2
atttaacggaacggtctcccagaagcaatttagaatgactggtaaaacgaaatatacccaaagctcgcagcaacaaaaaaggatacagttctttctggccagcttcctgcttctgccctttctgctcgtctgcatcgtacagtctctcctgaagctttttattcctaagaagagaaaatcagtcaccggagagattgtccttattaccggagctggacacggtattggcaggcagactgcc

SEQ ID NO: 11527 - DNA, 350 bp, Bos taurus
  Clone ID: 49-LIB34-055-Q1-E1-E10
gggcctctccagctcaccatggctcgggcattgagagtgccagttgcactgtggctgttgggcttgtgctggtctttggctaaagcccaccctctggctagagctcctgagcttgggcacggagttgaaggtgggaatgtggccaagccggatccagaagtgacggaacgctgctcggatggctggggctttgatgctaccaccctggatgagcatgggaacatgctgtttttaaaaggggagtttgtgtggaagggtcatgcctgggcccggcagttgatctcagagaggtggaaggatgcccccagtcgcgtggatgctgcattccgctatgatcgtaacagtgtcct

SEQ ID NO: 11528 - DNA, 356 bp, Bos taurus
  Clone ID: 49-LIB34-055-Q1-E1-E2
aggggagctggtggctcttccatccccagaccagccaagcctgtgagtgacaccccagacagaggaaccagagccatgcggagtctcagcggactgctgttgttactgactgcctgcctggcggtaaacgccagctccgtgcccacattgcccgatgacattcaagtgcaggagaacttcgacctgtctaggatctatgggaagtggttcaatgtggccgtgggctccacctgcccatggctgaagaggttcaaggagaagatgaccatgagcacagtggtgttgaaagcggggccgacgagcaaggagatcagcgtcaccaacactcacaggcggaaaggtgtctgtgaatcgat

SEQ ID NO: 11529 - DNA, 378 bp, Bos taurus
  Clone ID: 49-LIB34-056-Q1-E1-E2
agcaaagaatgtgaggaaatcatcaggaatggaggtgaaacatctgaaatgtacctcattcagcctgaggattctagcaaaccatatagagtatactgtgatatgaaaacggaaaaaggaggatggacagtaattcagaaccgtcaagatggtagtgttgactttggcaggaaatgggatccatataaacaaggatttggaaatattgcaaccaatgcagaagggaagaaatactgtggtgtaccaggtgagtattggctcggaaatgacagaattagccagcttaccaatatgggacccacaaagcttttgattgaaatggaggactggaaaggcgataaggtgacggcactctatgaaggatttactgtacagaat

SEQ ID NO: 11530 - DNA, 224 bp, Bos taurus
  Clone ID: 49-LIB34-057-Q1-E1-E10
cagagactccaacaagaacacactcatcatctacctggacaaggtctcacacacagtggaggactgtctgtccttcaaagttcaccagtactttaatgtcggacttatacagcctggggcagtcaaggtgtactcctattacaacctggatgaaacttgtatccgcttctatcacccggataaagaggacggaatgctgagcaaactctgccacaaagatacct

SEQ ID NO: 11531 - DNA, 224 bp, Bos taurus
  Clone ID: 49-LIB34-057-Q1-E1-E2
cgcaaagcacaccaatggatctctttgtagttctagtgatctgtctttctattttgattttcctttttctatggaatcagaggcatgccaaagggaagctgccacctgggcccactcctctcccaattgttggaaatattctgcagataaatattaagaatatcagcaaatccataagcaagctagcagaagattatggtcctgtgttcactctgtattttgga

SEQ ID NO: 11532 - DNA, 227 bp, Bos taurus
  Clone ID: 49-LIB34-058-Q1-E1-E2
tgtggattctggcaaatggtccttgtgcccttccccaattcttacctaatctgaccccttatttcctccatagccctctatcccaagcaccacccccacagactggggaccagccccctcccctgcctatgtctctccccatctaaagatggggagggaagaggaggagaggggaggggacatgccccctcctcaggcatctgggagggccctgctcccatgggctt

SEQ ID NO: 11533 - DNA, 207 bp, Bos taurus
  unsure (200): unsure at all n locations; Clone ID: 49-LIB34-059-Q1-E1-E2
ctggtgtctgaccacagccgtgaagggtggctggacttccgatcactggttaaatcagcctccccagatcacatctgtattaagtcaaagaccctggacccaatggccatcttcttcaccagtgggaccacgggcttccccaagatggcaaagcacagccacggattcgctttacgatcctatttcccagcatgcagganaattgta

SEQ ID NO: 11534 - DNA, 327 bp, Bos taurus
  Clone ID: 49-LIB34-060-Q1-E1-E10
cgacccacgcgacggcttgggggagagagagaagtgggagacccgcgagaggctgccgtgtagggactagggaccgtagagtaagcgacagcgaaggagggagagggggatggccgggatcgggccgatcaggcaggactgggagccggtggttgtgcggaagaaggcacccaccgccgctgccaagaaggatgagaaggccgtcaacgccgcgcgccgctccggcgcggagatcgagaccatgaagaagttcaacgctggtatgaacaaggcggcgtccaacggcacatccctcaacaccaagcgcctcgacgacgacacagagaa

SEQ ID NO: 11535 - DNA, 274 bp, Bos taurus
  Clone ID: 49-LIB34-061-Q1-E1-E10
ttcccggatgcccccacgggcccggcactgtgagaagctgcaggatgcctcactggctgtgcgggagttgcccctgggacatgatgctaactacacctgccagttcgctaccttccctacaggggacaccagcgctcgaagccagctccgtgtgcgcgccgagccccagaacaatgttgagaccctggagaactcgctcagcccgagccctgtgccggtggcacgaggtgtcgccaatggaggtcactcacctgcccgcatcacgtgggcctca

SEQ ID NO: 11536 - DNA, 417 bp, Bos taurus
  Clone ID: 49-LIB34-061-Q1-E1-E2
atcacagagggctgtcgtggagaggggggcatcctcatcaacagccagggtgagaggttcatggagcgctacgcccccgtcgctaaggacctggcgtccagggatgtcgtgtcccggtccatgaccctggaaatccgcgagggaagaggctgtgggcccgagaaggaccatgtgtacctgcagctgcaccacctgcccccagcacagctggctatgcgcctgcctggcatctcagagacggccatgatcttcgcgggcgtggacgtcaccaaggagcccatccccgtgcttcccaccgtgcactacaacatgggtggcatccccaccaactacaaggggcaggttctgaagcacgttaattgccaagaacaaggttgtgcctgcccggtcgcatgcggggaggctgcctgcgcctcg

SEQ ID NO: 11537 - DNA, 195 bp, Bos taurus
  unsure (15): unsure at all n locations; Clone ID: 49-LIB34-062-Q1-E1-E2
ccgcttgcacactanatatgtgataatcacaatataattctccagtaaactgaaggaatgctgtgataagcctttgttggaaaaatcccactgcattgctgaggtagaaaaagatgccatacctgaaaacctgcccccattaactgctgactttgctgaagataaggatgtttgcaaaaactatcaggaagcaaa

SEQ ID NO: 11538 - DNA, 184 bp, Bos taurus
  unsure (30): unsure at all n locations; Clone ID: 49-LIB34-063-Q1-E1-E2
actgggtggtgatcgtcgcaggatcaaacngctggtataattacaggcaccaggcagatgcatgccacgcctacaaatcttcacgaaacggatcctgatgagcagatcatcgtgatgatgtatgacgacatcgccaactccgaagacaatcccaccccgggaattgtgatcaacaggcccaacg

SEQ ID NO: 11539 - DNA, 281 bp, Bos taurus
  Clone ID: 49-LIB34-064-Q1-E1-E10
aggggttccggtggaagggtggcaactaagaatggaaggagaaccaccaagacatgttctccactttcctaattcccaaaacaatgttatcggcggcgttttaatcctaggtttttaacagattaaacctttaaagcaagaagtgaattctgtcttttcagacccagaaatacacatgaatactttgctatgattacattttagatattcatttatacttttctatatctaagactcatatcttgatttttactatcagatatgaatgaaacctttatatc

SEQ ID NO: 11540 - DNA, 370 bp, Bos taurus
  Clone ID: 49-LIB34-064-Q1-E1-E2
ttggggaaccccatgtaaccgaattggaaggtaccagttccttaactggaattattagctggggtgaagagtgtgcaatgaaaggaaaatatggcatatataccaaggtgtcccggtatgtcaactggattaaggaaaaaacaaagctcacataaagaaaaatgtatttccaaggctgacatatttggaattgaacatggacaaggtcctttactaactaatcactttcccatctctttagatttgagtgtataccttctatgaatattcctttttctctttatggggagaagtctagctagacttcatattttactagaataagtagataagaaaatgtaatcactagagaaacatactgtggtgggaa

SEQ ID NO: 11541 - DNA, 201 bp, Bos taurus
  Clone ID: 49-LIB34-066-Q1-E1-E10
cttacagcctttgttctcatcgcgctgcacgaggctaaagacatttgcgaggcacaggtcaacagcctgggccgcagcatcgctaaggcaggagacttcctcgaaaaccactacagagagttgcgaagaccatatactgtggccattgctgcctatgccctggctttgttgggcaagctggagggtgaccgcctcaccaaa

SEQ ID NO: 11542 - DNA, 213 bp, Bos taurus
  Clone ID: 49-LIB34-067-Q1-E1-E2
aaatcagatttgtattaaatattatggggacaatgtaattgagagatgggtccaatgaatcccttcttaaaagtacctcattaaacttggcaaatcaaaaaaaacacaaaaaaaaacaaaaaaaaaaaaaaaaaaaaaaaaaaaaggaggccgaaccaaaaagataaaagcatacaataaaaaagcatgcaaggaaacaaagacacacaaaag

SEQ ID NO: 11543 - DNA, 199 bp, Bos taurus
  Clone ID: 49-LIB34-068-Q1-E1-E10
ggagagaaactactgccgtaatcctgacggtgatgtcaacgggccctggtgctacaccatgaacccaaggaagctttttgactactgtgacgtccctcagtgtgagtcctcattcgactgtggaaagcccaaagtggagccgaagaaatgttctggaaggattgtaggtgggtgtgtgtccaagccacactcttggccc

SEQ ID NO: 11544 - DNA, 218 bp, Bos taurus
  Clone ID: 49-LIB34-068-Q1-E1-E2
tagatcgcgagcggccgccctttttttttttttttaagctttaaacttttttattgaatttaaacatccacatttttgccagtcctgttctacatttctgcttaacagtattgaccataaaaaaaattcaggtttataggacctggtttgcctattgaaccatcattgactatggaaatactttctaagcaatcaagagttagacaacattcttttat

SEQ ID NO: 11545 - DNA, 220 bp, Bos taurus
  Clone ID: 49-LIB34-069-Q1-E1-E2
gaatcccatggacagaggagcccggtgggctacagtccatggggtcacaaagagtcggacacgactgagcgacttcactcacttcactacattgtattaggtattgtaagtattctagagatgatttaaagtacagagttggatgtgcagatccatgtgcaaatgctacactattttgtgtaagggacttgagcatccatagaattagtgtctgtggggg

SEQ ID NO: 11546 - DNA, 245 bp, Bos taurus
  unsure (218): unsure at all n locations; Clone ID: 49-LIB34-070-Q1-E1-E10
acacgccgggaccgccgacaccatgagttggtcctcgcaccctccgagtgtaatcttctacattctttcattgctttcttcagcatgcctggcatatgttgctacccgagacaactgctgcatcttagatgaaagatttggtagttattgcccaactacctgtggaattgcagatttcctgaataattaccaaaccagttgtagacaaagatctacgnaacttttggaaggggcatcttatatca

SEQ ID NO: 11547 - DNA, 216 bp, Bos taurus
  unsure (80),(126),(132): unsure at all n locations; Clone ID: 49-LIB34-070-Q1-E1-E2
caccttctaaattgcccagatgatcttctagattctacatgctattgttggtttattcttgtgctttctgtatttaaaanctttgactgtactaataacaaatgaaggtataatttagcaatatantttaanacaattcaatgttatgatttatttggttaagctgtctagtatatttcgtaaggaaatgatgctgtagacaaatgtaaataaagc

SEQ ID NO: 11548 - DNA, 378 bp, Bos taurus
  Clone ID: 49-LIB34-071-Q1-E1-E2
aaggaatgctgccatggtgacctacttgaatgcgcagatgacagggcagatcttgccaagtacatatgtgataatcaagatacaatctccagtaaactgaaggaatgctgtgataagcctttgttggaaaaatcccactgcattgctgaggtagaaaaagatgccatacctgaaaacctgcccccattaactgctgactttgctgaagataaggatgtttgcaaaaactatcaggaagcaaaagatgccttcctgggctcgtttttgtatgaatattcaagaaggcatcctgaatatgctgtctcagtgctattgagacttgccaagggatatgaagccacactggaggaatgctgtgccaaagatgatccacatgca

SEQ ID NO: 11549 - DNA, 400 bp, Bos taurus
  Clone ID: 49-LIB34-072-Q1-E1-E2
aggaagagcatgtaagtctgtaattcacatctcctgccagcagagaaaagaagaaacatgagcacggcaggaaaagtaataaaatgcaaagcagctgtgctgtgggagctcaataaaccattttccattgaggaggtggaggttgcaccccctaaggcccatgaagttcgtattaagatggtggccacaggaatctgtcgctcagatgaccatgtggttaatggatctctggtcacacgtcttcctgtggtcttaggtcatgagggagccggcattgtggagagcattggagaaggggtgactacagtaagaccaggtgataaagtcatcccactctttattccccagtgtggaaagtgcaatgtttgtaaacacccagaagccaacctttgcctgaaat

SEQ ID NO: 11550 - DNA, 348 bp, Bos taurus
  unsure (32),(36): unsure at all n locations; Clone ID: 49-LIB34-073-Q1-E1-E2
agggtaacctgcacgagaaagaggtgatacangacntggtggcagaaaaatgaagaggatcctgggtttcctccttgctgtagcctttgtgcatgctctaaagagagccgagattatgagaaagataaagtctgcaagggacttgccagcctgggaagagatgacttcacatctttgtcaatggtcctatacagcagaaaatttcccagtggcacctttgaacagatcagccatcttgtgaatgaagttgtttccttaacagtaacctgctgtgcggaaggggccgatcctgactgctatgacaacaggacttcagcattgtctgacaagtcctgtgaaagcaactct

SEQ ID NO: 11551 - DNA, 442 bp, Bos taurus
  Clone ID: 49-LIB34-074-Q1-E1-E2
gggccgagccacgcgtccacattgcgactccgccaccatgttcgaggcgcgcctggtccagggctccatcttgaagaaagtgctggaggcgcttaaggatctcatcaacgaggcctgctgggacatcagctcaagtggcgtgaacctgcagagcatggactcgtctcatgtctccttggtgcagctaacccttcgctccgagggcttcgacacttaccgctgcgaccgcaacttggccatgggcgtgaacctcaccagcatgtccaaaatactaaaatgtgctggcaatgaagacatcattaccttaagagctgaagataacgcggacacgttggcactagtatttgaagctccaaatcaggaaaaggtttcagactatgaaatgaagttaatggatttagatgttgaacagcttggaattccagaacaagagtataactgt

SEQ ID NO: 11552 - DNA, 383 bp, Bos taurus
  Clone ID: 49-LIB34-075-Q1-E1-E10
cacctatgtgcagcatgggtctcacttgtctgcaagggagaaagctaatctctgagggtcggaggcctggccctgcaccacgttgccatccgcttgtgaagcagagcatggtgttcacacctgtacccacggatcgctggatggaagattctcctgcactagacatgcaaatgcaagtttgtgtctgtaaaatgataatccagatttctatagcaaatgatgtaataatggcttttaatcctactttcctgtgggtgaatgaaggttaaggcttaacaatcatttaaaagaaacatgtatttgcttttgacagctgattattcacttaaaatgactagaatgaaagtttctagcagaaatatgattttatttgaccagaaaaa

SEQ ID NO: 11553 - DNA, 241 bp, Bos taurus
  Clone ID: 49-LIB34-075-Q1-E1-E2
cctggcaacaacgggttgggccccaccaacatcttggaaaaccgcttcaccggaatgaagtcccggggtatctacaaaacccaagcggggacaatcctttaccacgctcatttagacatcaaggccttcacaatggaccgggaagtgcgcaaaatcaggcaacgcctcggcttgagatttcgccaagctggtctaaacgggtttctggcacagccccgagtgtgaaatttgtccgccactg

SEQ ID NO: 11554 - DNA, 374 bp, Bos taurus
  unsure (29),(62),(98): unsure at all n locations; Clone ID: 49-LIB34-076-Q1-E1-E2
ccacgcgtccgcggaaactgactagttcncctaataattggtgctcccgatatagcatttcnccgaataaataatataagcttctgactcctccctcnctcattcctactactcctcgcatcctctatagttgaagctggggcaggaacaggctgaaccgtgtaccctcccttagcaggcaacctagcccatgcaggagcttcagtagatctaaccattttctctttacacttagcaggagtttcctcaattttaggagccatcaacttcattacaacaattatcaacataaagccccccgcaatgtcacaataccaaacccctctggtcgtatgattcgtaataatttacgccgtactactactactctcgct

SEQ ID NO: 11555 - DNA, 277 bp, Bos taurus
  Clone ID: 49-LIB34-077-Q1-E1-E2
cttcgtaagggctagagaaaccaagagactgccaccatggcagggaagcccactcttcactatttcaatggacgcggcagaatggagtgcattcggtggctcctagctgcagctggagtggagtttgaagagaaatttatagaagaaccagaagacttggataagttaaaaaatgatgggagtttgatgttccagcaagtgccaatggttgaaattgatgggatgaagctggtgcagaccagagccattctcaactacattgccaccaaatacaacc

SEQ ID NO: 11556 - DNA, 404 bp, Bos taurus
  unsure (228): unsure at all n locations; Clone ID: 49-LIB34-078-Q1-E1-E2
gaggtgcgcgctccgctcccctcccccctgccctcccctcctccacctccccagcccccaagccccgggcagcctcgcgccgggcggggcgggggcggggcggggtgtcgggcggcgcctgcccaaaaggcggagtcgcgcggcggaggggccagagctgcgagcgccgtgctgactgcgctgccgagaaaccctgcgggaatccagactcggaggaccccctcgtcnccgcccggcctggccaggccccgcgctatggagttcttctgggcctctctcttgggtctgtgctgcagtctggccgctgctaaccgccacaccgtcttctggaacagttcaaaccccaagttttggaatgaggactacacagtacatgtgcggatagatgactacctggacatcat

SEQ ID NO: 11557 - DNA, 422 bp, Bos taurus
  unsure (339): unsure at all n locations; Clone ID: 49-LIB34-079-Q1-E1-E2
cacctgagcactaataagtagtatcaggccagagatttggggcagtcgataaatgtccgttttacagatgcacttttaggttttggtctgttcactgatttctagaagtctgtagctgcctttaggcaggggccacgcgaccaaacccctgatttcctgcaactttctgtttgcaggtgtagggggcagtactaatggggatcaccagctgctccccgtgagctgccacagtcagctggcccggaagggcaggcaaccttgggaatggttgtggctttggctgttcacagagcttcagcctaaggagggctggagccattgaaaactcattgctcgtangacaccatttttggctttccttgttcacaaccagtatacagtttgaccaattggctgctggttcgcagcgttacacatcaccg

SEQ ID NO: 11558 - DNA, 268 bp, Bos taurus
  Clone ID: 49-LIB34-080-Q1-E1-E2
acccacgcgtccagctaagggacagatagaaaagcaaaatatatttaagttaatccgcaatggacatgttatttggaatggctcattaatctcactgaaacaccattacgatgatacttcagttgtcaaaactggaatggactgtggtcttagtttggatgaagaacatatcccatttacagtgcgagatgctcttagttgcttcgatcatcacggagttcctgccactacttctcaggattcaggactccgttgagatttcatttca

SEQ ID NO: 11559 - DNA, 233 bp, Bos taurus
  Clone ID: 49-LIB34-081-Q1-E1-E10
ctttgacaagtacagcatggtgatccataacatcatcaaatctagctcgacataggtgcatgttatacaagaccgcaagttcatcaaccacatcacgtccagggaaacccttatgctgaccgagggggcacactatcgcgtgtagagcgtatcatctgacctgtggagctaaaagcccatgatcagctatatcatcgagaatgacaactgggtggtgctatagcacaacgcta

SEQ ID NO: 11560 - DNA, 435 bp, Bos taurus
  Clone ID: 49-LIB34-082-Q1-E1-E2
ccacgcgtccgactgaacacttttgcacatttggagggcaccactgcatgctcctttattactaggcaaccagaaagtgcctacttaagcgtcctcatgggagaccttaaatcgcgtacagactagcccaggagagtttgggcagtacacctgtcttaccccacaggattagcatgcccttctaggcttaaagttcactaatgattattagacaattggtttagtttcagtctttatgagcaggaaactttccctcctcaaagccaattaacggtcttggtacctttctgtctgagtggtagctccaaccttgtctgtcttaattacgggattttcctgagtaagattggggtctaaatcacaccatgccatttgtgactttgatgttactggtcacgattgaacatataacagctgggacatgatttgggctac

SEQ ID NO: 11561 - DNA, 415 bp, Bos taurus
  Clone ID: 49-LIB34-083-Q1-E1-E2
atcctataggtctactgagatggtgatagcaactagtctcttcgcttctatgcctagtacgttcaatgcgatctataatcgcatcagtaacgtgatcaatcgtgacatcatatagtacatgaacttccatggaaatgaatagcactctagatcttctatcactgtgtggcatatcctatgtctatctctaggattacactgatgtcattcatatagtactgatcatgtacttcactgtaatgtagtcaatcgccaccatttacttcatcggcatgtagacgtcaacgttcaatctggatatcacaaggaaggaactgttcgagtagctcatagggaatcatcttcaatctacatttagtagcatcatcgacagttctccaatttcgcgataacagccttaatttttcactactat

SEQ ID NO: 11562 - DNA, 390 bp, Bos taurus
  Clone ID: 49-LIB34-084-Q1-E1-E10
cacgcgtccatgtggactcacgaccggcacctgacaggctacgagcagcaggacgcacacgagttcctcatcgcagccctggatgtcctgcaccggcactgcaaaggtgacgataacggaaagaaggccaacaaccccaaccactgcaactgtatcatagaccagattttcacaggagggctgcagtctgacgtcacctgccaagtgtgccatggggtttcccacaccatcgaccccttctgggacatcagcctggacctccctggctcttccacacccttctggccgctgagccctggaagcgagagcagtgtggtaaatggggagagccacgtgtcaggaaccacgaccctcaccgaatgcctgcggagatttaccagaccagagcac

SEQ ID NO: 11563 - DNA, 439 bp, Bos taurus
  unsure (334): unsure at all n locations; Clone ID: 49-LIB34-085-Q1-E1-E2
attccaggccgacccacgcgtccagccagcctaatgcgctcagaagagactaaggaaaatgagcgtttcacagtaaaagctgaagggaaaggacaaggcaccttgtcggtagtgaccgtgtaccatgccaagctcaaaggcaaagtctcctgcaaaaagttcgacctccgggtttccatacgcccagcccccgaaacagtcaacaagcctcaggacgccaaaggttccatgatccttgacatctgtaccaggtacctgagagaccacgatgccactatgtccatcctggatatatcaatgatgacaggcttctcacctgatgttgaagacctcnaaacgctgagcactggtgtcgacagatacatctctaactatgagatgaacatagactccaacaagaacacactcatcatctacctggacaaggtctcacacacag

SEQ ID NO: 11564 - DNA, 379 bp, Bos taurus
  Clone ID: 50-BOVMS1-001-Q1-E1-E6
atgcgacgtcatagctcttctatagtgtcacctaaattcaattcactggccgtcgttttacaacgtcgtgactgggaaaaccctggcgttacccaacttaatcgccttgcagcacatccccctttcgccagctggcgtaatagcgaagaggcccgcaccgatcgcccttcccaacagttgcgcagcctgaatggcgaatgggacgcgccctgtagcggcgcattaagcgcggcgggtgtggtggttacgcgcagcgtgaccgctacacttgccagcgccctaagcgccgctcctttcgctttcttcccttcctttctcgccacgttcgccggctttccccgtcaagctctaaatcggtggctccctttaaggttccgat

SEQ ID NO: 11565 - DNA, 296 bp, Bos taurus
  Clone ID: 50-BOVMS1-002-Q1-E1-E10
gacccacgcatccaatgacttacgcactgatgcagataatgaacagtggtccagcggttcacaaacaattggttgacagtgcttatgaggtgatcaaactgaaaggctacacatcctgggccattgacctgtcaatggccgacttggcagaaagtataatgaacaatcttaggctgctccacccgaattccaccatgattaatggtctctatgggataaaacatgatatcttccttagtgttccttgcatcatgggacataatgggatcacagacgttgttaagatgacgctgact

SEQ ID NO: 11566 - DNA, 413 bp, Bos taurus
  Clone ID: 50-BOVMS1-002-Q1-E1-E6
acaatttaaaatcatgatcactgccctagaagtcatatatttcgtgtactttaaaaccagctatgaataacttggactgcttgggttatctttggctattaggacgtgaactgtaactatttattataatatgctacaaaaaaggtgcttttttgctttcttttccctgaaacaactttgatcgaccgttagaaaggatgagtccctctcaaaaaatttttttgttaatttgtccttggaggagggtggggagccagtgtgatagtaaaggagaaaagcccactgttcccttatttttgaagctaaagaaaacaattatgcctactgtgagttgtcttttgctcgcatacttttttctttttggtatcattaaattcagtgtattatgtggagcttctgtatttcaaactgga

SEQ ID NO: 11567 - DNA, 422 bp, Bos taurus
  Clone ID: 50-BOVMS1-005-Q1-E1-E6
gacaacttgttcctgctgctctcgctgacagtattcagcattgtgagtgtaacggcctacattgccttggccctgctctctgtgactatcagctttaggatatataagggtgtgatccaggctatccagaaatctgatgaaggccacccattcagggcatatttggaatctgaagttgctatatctgaggagttggttcagaagtacagcaattctgctcttggtcatgttaactgcacaataaaagaactcagacgcctcttcttagttgatgatttagttgattctctgaagtttgcagtgttgatgtgggtatttacctatgttggtgccttgttcaatggtctgacactactaattttggctctgatttcactcttcagtgttcctgttatttatgaacggcatcaggcgcaaataga

SEQ ID NO: 11568 - DNA, 455 bp, Bos taurus
  Clone ID: 50-BOVMS1-006-Q1-E1-E10
attgcattcagaagatattaatgaatatggaatcatggaaatgtccacctacaatatatgtttgtaagtgaagcacagatgtttataatgtgcttttatttttttcactgatagtgtaatatgtgttttgaatacaagcgaatattcaacacgtatatcttacacatatagtttacattggtgcgtaaatgactgcatgaggctactatgagacaaatcacaaagtattagaaatttattttctaagaaaatttttataaaattagtcttgagttccactttcctactttgagatggtttacattttcataatgcagaccttcagacatatttatgagaattttaaagaaaaaggtactatattaattttctaaaaataactctttttagtttgtgtacaaaagtgtattatattggtttcctgttaactgaaaactgttgacaagtttaacatg

SEQ ID NO: 11569 - DNA, 278 bp, Bos taurus
  Clone ID: 50-BOVMS1-006-Q1-E1-E6
gatcaacatctgtcaaaggaaaataaccacgaatgcacgctctcattgtcatgtaagattgttgtccgttccagagagatgctctgtaaagtttcatacaatcagaaggtactttgtgccgggcatcagattttgtcaaatcaggtgtgaacatgaaccacactcccaaagagaaatctcttcatttaaacatgaattgactgctaacagacagggaacgatcatctctggtattgagtatatacaaatatatgtatacatatttttatctgtatatg

SEQ ID NO: 11570 - DNA, 296 bp, Bos taurus
  Clone ID: 50-BOVMS1-009-Q1-E1-E6
gacaaaggtgaaatcttacaagagacaagctgaggaagcggaggaacaatccaatgtcaacctctccaaattccgcaagctccagcacgagctggaagaggctgaggaacgggctgacattgccgagtcccaggtcaacaagctgcgggtgaagagccgggaggttcacacaaaaatcatcagtgaagagtaactcatccaaatgctaaaaagtgaccaaagaaatgcacaaaatgtgaaaatctttgtcactctgttttgtacttatgatttttgcagataaaaaatttatctgc

SEQ ID NO: 11571 - DNA, 427 bp, Bos taurus
  Clone ID: 50-BOVMS1-010-Q1-E1-E10
gctactctgaaatctctcaacaaccagattgagacccttcttactccagaaggctctaggaagaacccagctcgcacatgccgagacttgagactcagccacccagaatggagcagtggttactactggattgaccctaaccaaggatgtactatggatgctatcaaagtatactgtgatttctctactggcgaaacctgcatccgggctcaacctgaagacatcccagtcaagaactggtacagaaattccaaggccaagaagcatgtctgggtaggagaaactatcaacggtggtacccagtttgaatataatgttgaaggagtaaccaccaaggaaatggctacccaacttgccttcatgcgtctgctggccaaccatgcctctcagaacatcacctaccattgcaagaacagcattgcataca

SEQ ID NO: 11572 - DNA, 441 bp, Bos taurus
  Clone ID: 50-BOVMS1-012-Q1-E1-E10
ctccaatgatgggtgtcctggatggtgtcctgatggagctgcaagactgtgcccttcccctcctgaaagatgtcatcgcaacagataaagaagagattgcctttaaagacctggatgtggccattcttgtgggctccatgccaagaagggatggcatggagaggaaagatttactcaaagcaaatgtgaaaatcttcaaatgccagggtgcagccttggacaaatatgccaagaagtcagttaaggttattgtggtgggaaatccagccaataccaactgcctgactgcctccaagtcagcaccatccatccccaaggagaacttcagttgcttgactcgtttggatcacaaccgagctaaagctcagattgctcttaaacttggagtgacttctgatgatgttaagaatgtcatcatctggggaaaccattcctcaactc

SEQ ID NO: 11573 - DNA, 258 bp, Bos taurus
  Clone ID: 50-BOVMS1-012-Q1-E1-E8
tgagagcgcccagtacatcctggacaagattgatgtcatcaagcaagacgactacgtgcccagcgaccagtatgtgctccgccgccgtgtcatgacttctggaatccttgagaccatgttccaagtggacaaagtcaatttccacatgtttgacgtgagaggccatcgcaatgaacgccgcaattggatctaatgcttcaatgatgtgactgcgatcatcttcatggatgccagcagcagctacaccatggtcattcg

SEQ ID NO: 11574 - DNA, 369 bp, Bos taurus
  Clone ID: 50-BOVMS1-014-Q1-E1-E10
gcccactcatgcgtgcgaacatgccacgtcatagctcatctatcgtgtcacctaaattcaattcactggccgtcggtttacaacgtcgtgactggcaaaacccgggcgttccccaacttaatcgccttgcagcacatccccctttcgccagctggcgtgatagcgaacaggcccgcagagatcgcgcttctgaacacttgcgcagcctgaacggccaatgggacgcgccctgtagcagagcattaaacgcggcaggtgtagtcgttactcacagcgtgagcgctacacttgccagcgccctatcgcccgctcctttcgctttcatcccatcctttctcgccacattcgccagctttccccgtcaagctc

SEQ ID NO: 11575 - DNA, 363 bp, Bos taurus
  Clone ID: 50-BOVMS1-017-Q1-E1-E10
aggatgactcgctcattggtggcaatgcctccgctgaaggccccgagggcgaaggtaccgaaagcacagtaatcactggtgtcgatattgtcatgaaccatcacttgcaggaaaccagcttcacaatagaagcctacaataagtacatcaaagattacatgaagtcaatcaaagggaaacttgaataacagagaccataaagagtaaaaccttttatgacaggggctgcagaacaaatcaagcacatccttgctaatttcaataactatcagttcattagtggtgaaaacatgaatccagatggcatggttgctctgctggactaccgtgaggatggtgtaaccccatatatgattttcatta

SEQ ID NO: 11576 - DNA, 440 bp, Bos taurus
  Clone ID: 50-BOVMS1-017-Q1-E1-E6
cagccgtgttcgctttcaatatttcccacatcagtaacaaggtccgaatcctagaactccttccagccctcacgactctgacgaatcacaacagatacttgattgaatctggaaatgaaaacggcttctttaaaatcaaccaaaaggaagggatcagctacctccacttcacaaagaagaagccagtggctggaacctattcattacaaatcagtagtactccactttataaaaagaaagaacttaatcagctagaagataaatatgacaaagactacctcagtggtgaactgggtgataatctgaagatgaaaattcagattttgcttcattaattcaccatccagagaccaaataattaaaaaaccaagatagataggtagaactgaatttttcccccaatcagaatcttcatattataggtacagtctttcaccacg

SEQ ID NO: 11577 - DNA, 369 bp, Bos taurus
  Clone ID: 50-BOVMS1-018-Q1-E1-E10
gcgagaagtccccgaggcagcctccgcggaggagcagaaggaaatggaagataaagtgactagtccagagaaagctgaagaagcaaaattaaaagcaaggtatcctcatctgggacaaaagcctggaggttccgattttttaaggaaacgattgcagaaagggcaaaaatattttgattctggggattacaacatggctaaagcaaaaatgaagaacaagcaacttcctactgcaaccccggataagacagaggtcactggtgaccacattcccactccacaggaccttcctcaacggaaaccatctcttgttgctagcaaactggctggctgattaaaaagagctgaactgcatgaatcttctaatgc

SEQ ID NO: 11578 - DNA, 360 bp, Bos taurus
  Clone ID: 50-BOVMS1-019-Q1-E1-E6
atgcgacgtcatagctcttctatagtgtcacctaaattcaattcactggccgtcgttttacaacgtcgtgactgggaaaaccctggcgttacccaacttaatcgccttgcagcacatccccctttcgccagctggcgtaatagcgaagaggcccgcaccgatcgcccttcccaacagttgcgcagcctgaatggcgaatgggacgcgccctgtagcggcgcattaagcgcggcgggtgtggtggttacgcgcagcgtgaccgctacacttgccagcgccctagcgcccgctcctttcgctttcttcgcttcctttctcgccacgttcgccggctttccccgtcaagctctagatccgggg

SEQ ID NO: 11579 - DNA, 428 bp, Bos taurus
  Clone ID: 50-BOVMS1-020-Q1-E1-E10
gctctacacgcttcagcctcaagtacgcgtgcaagcgacgtcaaaactcttctataatgtcaccaatcttcatttcaatggccgtcattttagaacgtcattcctgcgaaaaccctggtgttacccaggttagtcaccttgcatcatatctacctttcaccagatggagttctgtctaaaaagcccgcacagatcgctgcttcacaacagttagtcatgccagcatcactattgggacgctgccatgttgcggatcattaagcacgtgcgcatgtggaggatacgcacaaccttatacgctgactcttagtagctcgctatagctagcacctctcacttaccttcccacatttcacgtgacgttcgtctgcttacacgatcatacttgaagtcagttgctctatgtatggttcagatttactgcatca

SEQ ID NO: 11580 - DNA, 425 bp, Bos taurus
  Clone ID: 50-BOVMS1-020-Q1-E1-E6
gaaaaagccaagagactgcttttgagtgacatttattcaacagctgtaacttcacttatttcagggtctccaattgagaaacatggcactgtttttcctgcactctacccacctattgctggacttctgttgtaacaagttggcaaacactggctggaactgggctgcaataaaacatgccagtatcaatgctgacaagagcctaacaagtgccaacttacagatgattacgcattttgaattctaatgaactgttttaaccttcaggaagaattgtaaagacctgtacatagcacaacatgatccggataatatatatactgttcatgtacatccacaaatacaccttgtaccaaataatgctttcttgtagtagaataagaatcgtgtaaattctaaaaaattttagcaggttttctttccct

SEQ ID NO: 11581 - DNA, 282 bp, Bos taurus
  Clone ID: 50-BOVMS1-021-Q1-E1-E6
ggggttgcctgttcagtatctcaagcccagaaagatgagttgattcttgaaggaaatgacattgaacttgtgtcaaattcagctgctttgattcagcaagccaccacagttaaaaacaaggatatcagaaaatttttggatggtatctatgtttctgaaaaaggaacagttcagcaggctgatgaataagatctcagtgatcctgctgcagaaacaacaagatagatggttctatggactcagttgtgatgttttaaagagacaataaaaactcttgatttg

SEQ ID NO: 11582 - DNA, 364 bp, Bos taurus
  Clone ID: 50-BOVMS1-022-Q1-E1-E10
atgcgacgtcatagctcttctatagtgtcacctaaattcaattcactggccgtcgttttacaacgtcgtgactgggaaaaccctggcgttacccaacttaatcgccttgcagcacatccccctttcgccagctggcgtaatagcgaagaggcccgcaccgatcgcccttcccaacagttgcgcagcctgaatggcgaatgggacgcgccctgtagcggcgcattaagcgcggcgggtgtggtggttacgcgcagcgtgaccgctacacttgccagcgccctagcgcccgctcctttcgctttcttcccttcctttctcgccacgttcgccggctttccccgtcaagctctaaatcgggggctcc

SEQ ID NO: 11583 - DNA, 415 bp, Bos taurus
  Clone ID: 50-BOVMS1-022-Q1-E1-E6
gtcagtatgtagagaagtcagttggtagagaacatccaagcctaaaacgctcatttttgttttgggacatgtggctacatttctcatcttggacattcccttatcacttttcatttagaaaaatgtgatgtctagaaagcactgagagtttagttctcatgcttgatatttaatatatttccattaccttatctgactgctttaactccacgtgggataatattgaatatactgtcatgggacctatccttatgaaattaccatgtgtgagatgcccatgtctcaaattatagcaggtgcagaatatagtagcacgcaacagagtgacagtgacttttaacatccacagcagctggcacaagtgacacgtgtttacttcctcagtctttaagaataactgttgaaaagcctgcac

SEQ ID NO: 11584 - DNA, 444 bp, Bos taurus
  Clone ID: 50-BOVMS1-023-Q1-E1-E10
ggggccatccacgcgtccgcagacaatggctaaatgtgtcaaagctgttacagagggtgcccatgcagtagaggaaccatccatatgctgaaacatctactatggcccagttaatggacagttatgttggcacgatctcttgaaggtgtatctctttcaaaaataatcttgatgtaatatttaaggttctaccatgctttatttgaaaatgctattgcaattatcagagaactttgaagtttcaaaacaattatgtgttgaatgtaaatgttaaatagtttaataaacattatatagaggacttttcatgtaaaagcactgataatctttgtgacataaaaaagaaagtccttaaaatataaatttttttatcttcattgctcacttatgcttgtaaagtgaataaaataagaatagcttccattgctcctgttctatcctagt

SEQ ID NO: 11585 - DNA, 314 bp, Bos taurus
  Clone ID: 50-BOVMS1-023-Q1-E1-E6
acgcgaccggaaacatgcagctggaacatgagctggtgtcactgcaaaagatactcaaggccaccgtatatgatctggtcatgttctcagaagctctcattccatgcttatgagattctggggcttggggctaatcttgctatagactctaaatccgacataacttctctgaacagacacatcctactggttgatgaagagttggatcatgccgactagcgtctggcaacaactctgcagtcgctggacgaggtcgatcacgcagcatatgagactgagagatgcatgaccgtcattgagatccgatcccaaaa

SEQ ID NO: 11586 - DNA, 346 bp, Bos taurus
  Clone ID: 50-LIB188-001-Q1-E1-E10
cgacggccgcgggatacatggagacctcgggcaagacacgggccaacgtggacaaggtgttctttgacctcatgagagagatcaggacaaagaagatgtcagaaaacaaagataagaatggcaagaggggcagcaagaacaagaaaagttttaaagaaagatgttgcttactgtgaaggcccaggtgctggaccaaatgggtcgccactgaggaccgagggcgggttccttgagacaagacttccgttgacctctcagcctgttcctgtgcaccccaacctccatcacacacacttctgtaaatggggaaaaatatctgtgactcattggctggcagaagaaataa

SEQ ID NO: 11587 - DNA, 445 bp, Bos taurus
  Clone ID: 50-LIB188-001-Q1-E1-E6
acttggtcaaacatttttgtagatatttctatgaaggttttaggttgtgtttttttttttttttttttagaagagattaccctttaaatcagcagactttgagtaaagcagattaccctccatagtgtgggtgggcctcatcgaataagttgaaggactgaacagaccacgcttgcaaccccatggccctgaattctccaggccagaatactggagcctttcaccttggatcatcccaatccagggatcgaacccagatctcccagatctatattgcaggtagattccttaccagctgagccacaaaggaagtccaagaatactggagtgggtagtctatcccttctccagcagagcttcccaacccaggaatcgaaccagggtctcctgaattgcatgcagattctttaccaactgagctctcagagaagccctaacctccctc

SEQ ID NO: 11588 - DNA, 393 bp, Bos taurus
  Clone ID: 50-LIB188-002-Q1-E1-E10
acgtggagacctcggccaagacacgggccaacgtggacaaggtgttctttgacctcatgagagagatcaggacaaagaagatgtcagaaaacaaagataagaatggcaagaaaagcagcaagaacaagaaaagttttaaagaaagatgttgcttactgtgaaggcccaggtgctggaccaagtgggtcgccactgaggaccgagggcgggttccttgagacaagacttccgttgacctctcagcctgttcctgtgctccccaacctccttcacacacacttctgtaaatggggaaaaatatctgtgactcgttggctggcagaagaaataagtccttgaccctgccgtgggatggctcctttgtcaggaggttgcagagattgatctctcttt

SEQ ID NO: 11589 - DNA, 381 bp, Bos taurus
  unsure (353): unsure at all n locations; Clone ID: 50-LIB188-002-Q1-E1-E6
actttgcctggaaaatcccatggatggaggagcctggtaggctgcagtccacagggtcacgaagagttggacacgactgagcgacttcactttcacttttcactttcatgcattggcgaaggaaatggcaacccactccaatgttcttgcctggagaatcgcatggacgggggagcctggtggctgccgtctgtgggatcacacagagtcggacatgactgaagtgacttagcagtagcagcagcagcagcagcagcagcagctcattcctattctgtatgtaggttccttttgattcttcaaagaatgggaaattggggctgaatgcattttacttcgccaagaaagtgtangtgtgtgtgtctgtgtctgtgtgtgtgt

SEQ ID NO: 11590 - DNA, 409 bp, Bos taurus
  Clone ID: 50-LIB188-003-Q1-E1-E6
catgctaacgtgcgccatggcggccggatacttttacaagaaggggtaatggggcatcaggtagctggtgtcattgttaagggaatgagaaacacttgctaaattaacataatgctgtttcttttcaaaatgatccccaaatagctaaccgatgttccttgttcctattgcattccctcccccaaaggcaatggtcatgaccagtttcttattcagtcatccagaagtattctccagctacttatataatctatcaaatacaaatggtattcccaggtggcgctagtggtaaagaatctgcctgcaatgcaggagacccaggcccgacccccgggccgggaagatctcctggagaaggaagtagcaacccactccaatattcttgcctggaaaatcccggggacagaga

SEQ ID NO: 11591 - DNA, 435 bp, Bos taurus
  Clone ID: 50-LIB188-004-Q1-E1-E6
actccgtgtagattggcggctccatcctggcctcgctgtccaccttccagcagatgtggatcagcaagcaggagtacagacctgcctgacatgccagcgcagccaacggttcctcaacgacccgaggcatgtgctctggggagaccggcccgaggcccagctggggaaccaggcagcacttgaactctctagctgtggcatgcaaggctcagtagttgcacccaggcgtggtttcttcgtggcacttgggatcttagttccctgaccagggatacaacctgcatcccctgcattgctagtcagattgttaaccactggactaccagggaagtccctgatgctgtttttattttattcttttttaaatgttattattggcatataactaaaaaaaaacaaaatcaaccaaaataaagcttgtaccgtgccttgttt

SEQ ID NO: 11592 - DNA, 433 bp, Bos taurus
  Clone ID: 50-LIB188-005-Q1-E1-E6
acttcagaaggactctggaaacattctccagctgatcatctcagcttatgaagaactgcggtctgaggtggagctggaagtgttaggagacacggaaggactaaacctctcatttacagccatctgtaacaccgggatccccgttccacaccaaaagaaatgctctcacatgaaggtgggagacacagcttcattcaatgtgactgtgagtttaccaaactgtgagagaaggagcaggcacattatcctaaagcccgtggggctgggggacgctttggaaatcctcgtcagcccggaatgcagctgtgactgccagaaagaagtggaggtgaacagctccaagtgcaacaacggcaatggttccttccagtgcggggtgtgtgcctgccaccctggccacatggggtcacactgcgagttgcgggaggacacg

SEQ ID NO: 11593 - DNA, 430 bp, Bos taurus
  Clone ID: 50-LIB188-006-Q1-E1-E10
catgtaccctaccgccatgggggcgggatacagcgccaaatctaccttcgaggggatcctcaaaaacccaagagcagagtctttgaacagcaggtccctctggccgggtggagagccaaagagctggaagctccgagacttgttttttccaaatttctcctgcgccttgctgagaagcttccagatcaagtcttccttgccatccacacttcgggccacgacagcatgagaagggacctgggccaggtggcactccttgaacgcatccactggcgcccgactgttgttcagacagagaagctcatactggtccctgtcagccttctctggcaagttctcaaacactgtcgtctctttaacaaaagccacgtctccagccccgtcctgcagacacttgaaggcaccagaataaccgaagtatggttcccgg

SEQ ID NO: 11594 - DNA, 359 bp, Bos taurus
  Clone ID: 50-LIB188-007-Q1-E1-E6
acagaagaattaacaaagcaaatgaaaagcaccaataattccatccccagaaacaatcacttttaatatattggcatacgttagtctatttcaacatttctgaaatcatccatggttatctaatttttctcatataacctgtaatgtatttctgtgttgcttcaatttcttaataaaagtaatttacactggctgtgtgaatgtataatagaagagtcctactgatgaacgtgctgaggcaaggaagaaatcagcggtcagttatctgaggctatatcacctgtgaatgtcagaacagggagcttcaggattcagaggactgaaaaagtcattctccttctttagaactgcagtatcct

SEQ ID NO: 11595 - DNA, 375 bp, Bos taurus
  Clone ID: 50-LIB188-008-Q1-E1-E10
catgtaccctaccgccatgggcccgggatacatcacaaaaacagagcatacaatgaagcaaaggctgctggcccggtctgctcagactccggcggacagaggtgatctcgccaccatgtggccacctgtccttcaagcacgggtcaacacagtccacaacctgcagtgaagaaaggatgtgcacctgggatttatcactcacgtagtaggatacactattcacatggtcttcctgtcgtctagcgtcacatgatgggggttccactaatcatcaaccttggcatagtacggctggggtccttcatgcacatgaagatgtgaaacaccatgacctacaaacacctcaactcggctgataattatctctgactaatg

SEQ ID NO: 11596 - DNA, 406 bp, Bos taurus
  Clone ID: 50-LIB188-010-Q1-E1-E10
actctttcatgtcggtgatagagatcatcattgccgccatcttttctgttgtcgacatgtgtgacctgcacaccaagatacagatcagcaactggccttggagtgatttcttccgaacccttgcagcggccattctctacctgatcacctccattgtggtgctcgttgaaagaggaaacggctccaaactcgctgcaggggcgctgggccaatgcgctgcaggcctcattggctatgatgcctagattaccttccccttgcggcagcagatacatacagcagcccctacagatcctgcagatggcccggtgtaagtgaactctcttcatttctctcagcagtctgcaaataacacctcgagtgaaataattcctccccatcccgataacactcgcagtcaatttcc

SEQ ID NO: 11597 - DNA, 274 bp, Bos taurus
  Clone ID: 50-LIB188-010-Q1-E1-E6
gccaatcagttttgtgtatgaaattctaaagaaggttaccaaagaagagcaggtatgataacttctgcccagaagcagcaggccgcagtgccctggggagcccttcaaaggtcaattacaattgtgtgcaaacagaagatcccggtgaagccacagcctgctaggcttgtgtgcagctccagtatgttcaccaaagcagtcactgggttttctgcaccctgcctccatcctgtatcataggtgggaaattaaacagctttgtgagcctcaaaac

SEQ ID NO: 11598 - DNA, 349 bp, Bos taurus
  Clone ID: 50-LIB188-011-Q1-E1-E6
acaagcttattttttttttttttttttttttttttttagttatattccaataataacatttaaaaaagaataaaataaaaacagcatcagggacttccctggtagtccagtggttaacaatctgactagcaatgcaggggatgcaggttgtatccctggtcagggaactaagatcccaagtgccacgaagaaaccacgcctgggtgcaactactgagccttgcatgccacagctagagagttcaagtgctgcctggttccccagctgggcctcgggccggtctccccagagcacatgcctcgggtcgttgaggaaccgttggctgcgctggcatgtcaggcaggtctgt

SEQ ID NO: 11599 - DNA, 424 bp, Bos taurus
  Clone ID: 50-LIB188-012-Q1-E1-E10
acaccagggtcgtgtggtgtgccgtgggacctgaggagcagaagaagtgccagcagtggagccagcagagcggccagaacgtgacctgtgccacggcgtccaccactgacgactgcatcgtcctggtgctgaaaggagaacacgaatggagagagcactgcagactgggctaagaacttgaatcgtgaggacttcaggttgctctgcctcgatggcaccaggaagcctgtgacggaggctcagagctgccacctggcggtggccccgaatcacgctgtggtgtctcggagcgatagggcagcacacgtgaaacaggtgctgctccaccagcaggctctgtttgggaaaaatggaaaaaactgcccggacaagttttgtttgttcaaatctgaaaccaaaaaccttctgttcaatgacaacactg

SEQ ID NO: 11600 - DNA, 434 bp, Bos taurus
  Clone ID: 50-LIB188-012-Q1-E1-E6
cgccatggccccgggatacgtgattacagagctagggtttccagcagggctccagatggtcaggcatggcttctatagcaggtctaaggaagcagcggggacgtcacaggacgatgacagggcaggtaactaccagaggcccctgtgggcatcaccaggggcctcacactgctcggtgacatcagatgcaggtctaaggagccaacgagtgactgcatgggctcgcccacccacagcttacttggcgagcgggtttctgaagctcctgccggcaaacttggccttgctgcccacttcctcttcaattctgaggatctggttgtacgtagtatactttctagaacccaacatatacctagcgtataatataatcattcagttatagcaagaaatcttctgtcaatatacaaggctttatcatgtcatattgccgt

SEQ ID NO: 11601 - DNA, 402 bp, Bos taurus
  Clone ID: 50-LIB188-013-Q1-E1-E6
accgtgccttgtttttgacactctcctggtcgtcatacgccacccactggttgcccttggtggcataggggacctgctggtcacggaatctgtgggtggtggctccgtggaggaagtcacagatctcataataggcaaggatccctttctccttggtgaactggcctggaattcctggccctgagatgggggctcccacatctgtcttggaagaggccagagtgtagctcctcccaaaagtggggatacccatcaccagcttattggctggagcccccagcctcagcatgtagctcacagcgtagtcagcgttactgaatctgtcagaacttgcatcttcctggcctcgaaacagggggctgtggtgtccgactgtctggcgccaggctccgtgaaagtcat

SEQ ID NO: 11602 - DNA, 319 bp, Bos taurus
  Clone ID: 50-LIB188-014-Q1-E1-E10
cagggccgccggatacacccaacaaattatgaatcagggtggccgccagcgctatgctttcgatcgcacactcgtcggttcctctgcggctgcggaagttaccgttctcaccccaactggctgccccagctgtttttatcaatccagtaatccaatccagaggccgcgtcagtgccatagcccatcagcagcatagcatatttggtcacctcgaatgggttgaaagggtctcgcagtcccgtgtggtggtagacgcccttgcggtagtgaacgaagtcttcgtcgacttcaaaagcgattgcgataggcaccctgatgg

SEQ ID NO: 11603 - DNA, 343 bp, Bos taurus
  Clone ID: 50-LIB188-014-Q1-E1-E6
acagccggacagtgccatcctgtatgacgacgagaaccctgagcaggtgtgttctgtgttcaacggggcaccacgtattagcaaactcctgtcgacgttgtgctctgcagatgtccgcgactgcactgatgggaactgccctcgacagcgccgggccctgaagcttgggcatcatgacttggatggtatccggatgaactacgcctgcaacactccccgaatggacgacggcttccaggttaaggttctccgacacgacagcatggctgcattccgcatctttgagactcgtatgcaacaagtcgtgcatttcaccatggatgccatggccatcgctgatcag

SEQ ID NO: 11604 - DNA, 394 bp, Bos taurus
  Clone ID: 50-LIB188-015-Q1-E1-E6
acaaaaaccatggatgctcaagtctcttatataaaaatggtgtagtaattgcataaaacctaggtttatcctcccatatacttcaaatcacctctagattagttataatacttaatacaatgtaaatgctatgtaaatagttgtaaatacaatgtaaatgctatgtaaatagttgctgaatgtgtagcaaattcaagtgtttgctttttggaacttgactgaactttttttcttctttccaaatattgtcaacccatggttggctgaatccgtgaatgtggaactcatggataggagtgccagttgtattgtattctttctttctttattttttggccgtgctgagcagcttgtgggaatcttagttcccaccagggattgaagcccacccctc

SEQ ID NO: 11605 - DNA, 424 bp, Bos taurus
  Clone ID: 50-LIB188-016-Q1-E1-E10
acaagaatagttaagtattttgcacaaaggaaatttgttgatgatccagtagaactgatgcccatagaacgcagtttcttaaggattttgttttgcttctttgagggaggcggccatcgtcattgtcagttcagctgggggttccttccttcatgctgaggacctgtgtctttgaagttgctgacgtcctcggaatcccaggcaggctggtgaatgctcaggggctcccatggaggcatctggtggcctcgggccccctttgcttgtaggaggcttagcaagttccttgtcgcttcttcccactgggcatactccctcagctgctccttcaggctctcctcctcatgaagttgtggggactctgccacactcttttttcccattaagtgtccgacagcccagtggttgccgcgcgtgtatcact

SEQ ID NO: 11606 - DNA, 246 bp, Bos taurus
  Clone ID: 50-LIB188-016-Q1-E1-E6
actttttgtagtcggtgtccagcacaaggactttgttctcgttcaaggcatcgatcttgaacaccgcagggatcttggttttttctgcaatgatcttcttctgagcacactcaccgttctcccatttctgcagcaggatctccaggtcgccctcaggggtgggcttcagctcctccacatacactctcaggggggcactctgggcgtccagcagggagatgtcgctggccgccatggccaaggagt

SEQ ID NO: 11607 - DNA, 190 bp, Bos taurus
  Clone ID: 50-LIB188-017-Q1-E1-E6
actcgccatgatattcatcggggtattctgcctgataatcactatcactgatttctgacccattggttcctgttccttggcttccgttgtgaatgacaggttctgtgggagcagcacagtatttgggatcatacacttgccgcccaagcccatacacactcattcctttctgggaagcgactttgttggt

SEQ ID NO: 11608 - DNA, 352 bp, Bos taurus
  Clone ID: 50-LIB188-018-Q1-E1-E10
atgccaatcagttttgtgtatgaaattctaaagaaggttaccaaagaagagcaggtatgataacttctgcccagaagcagcaggccgcagtgccctggggagcccttcaaaggtcaattacaattgtgtgcaaacagaagatcccggtgaagccacagcctgctaggcttgtgtgcagctccagtatgttcaccaaagcagtcactgggttttctgcaccctgcctccatcctgtatcataggtgggaaattaaacagctttgtgagcctcaaaaaaaaactaaaaaaaacacaaaaacagaaaaagacaagaatataaaaaaaaaaattaaaaacctgctcgggtggcagc

SEQ ID NO: 11609 - DNA, 392 bp, Bos taurus
  Clone ID: 50-LIB188-018-Q1-E1-E6
atacaacctgcagaacttcccagccaactgcaaggatgcgttcagctgctggcgcaacaccgtctgagttgggttgctggtcgaacagtccacttccaggatgtcatgacacttctcgcagtggtccttcatccgaaggaaacacgtggagttgtagcggatctccttacacacagtacgggcgaaggattcccatagtggatgatccagcaaacggacctgacaaggcccgtatggcatgacttcaggccttgcagctggtccagctgaaatttgctgcccttctacaagactgctacagcataatagtcggtatggggagacactatcgtcccaaagatttctgcagctaatggtcgcagtttatatgggtcccaggccacctcagacac

SEQ ID NO: 11610 - DNA, 400 bp, Bos taurus
  Clone ID: 50-LIB188-019-Q1-E1-E6
acggcaacatggggctgcccgacatcgacagcaagatgctgatgggtatcaacgtgacgcccatcgccgccctgctctacacgcccgtgctcatcaggttctttggcaccaagtggatgatgttcctggctgtgggcatctacgccctcttcgtctccaccaactactgggagcgctactacacgcttgtgccctcagctgtggctctgggcatggccattgtgtctctttgggcctccatgggcaactacatcaccaggatggcccagaaatactacgagtactcgcgcagctgccgcgccatgtcctgcttggcgttcctcagagcggcctccagctcggccagcttggcctgagcatccttaacagccatctcaccacgctgctcagcgtcagcgat

SEQ ID NO: 11611 - DNA, 279 bp, Bos taurus
  Clone ID: 50-LIB188-022-Q1-E1-E10
accgcgtggacagcgccctgcccatccagcaccaggactggactggaggaaaggagttcaagtgcaaggtcaacatcaaaggcctctcggcctccatcgtgaggatcatctccaggagcaaagggccggcccgggagccgcaggtgtgtgtcctggacccacccaaggaagagctcagcaaaagcacggtcagcgtcacctgcatggtcatcggcttctacccagaagatgtagacgtggagtggcagagagaccggcagactgagtcggaggacaagt

SEQ ID NO: 11612 - DNA, 429 bp, Bos taurus
  Clone ID: 50-LIB188-023-Q1-E1-E10
accgcgtggacagcgccctgcccatccagcaccaggactggactggaggaaaggagttcaagtgcaaggtcaacatcaaaggcctctcggcctccatcgtgaggatcatctccaggagcaaagggccggcccgggagccgcaggtgtatgtcctggacccacccaaggaagagctcagcaaaagcacggtcagcgtcacctgcatggtcatcggcttctacccagaagatgtagacgtggagtggcagagagaccggcagactgagtcggaggacaagttcgagcggccgcccgggcaggtccacgtctgtcccagtgttataccaaggtctcaatgcctctgccgcagccctcagcagcttcatgaacccagacaagatctcagcccccttgctcatgccccagagactcccttctcccctgccgaac

SEQ ID NO: 11613 - DNA, 301 bp, Bos taurus
  Clone ID: 50-LIB188-023-Q1-E1-E6
ccctggccggccgatacttggagtcagtccctcccaccatcagctcggccccgggctgggctttcgggtccctgtgcatgacaagagagaagacgttcttgtccaccaacttctgctgcagcaagttgtccaatacaggcaccacattgttgacggacatgcgggggtacgccatgcccagaatgccgtctaacttggccgcgatgaggaacacagcgcgctgcatgatagcctccccgaaggtctgcctctgcagcgtgacgccatccgggctggatcaggatgggttacatggtacctg

SEQ ID NO: 11614 - DNA, 387 bp, Bos taurus
  Clone ID: 50-LIB188-024-Q1-E1-E6
aaaattttgaccgtgatcatgtcgctttgaagaactttgccaaatactttcttcaccaatctcatgaggagagggaacatgctgagagactgatgaagctgcaataccagcgaggcggccgaatcttccttcaggatatcatgaatccataccgtgatgactgggagaatgggctgactgcaatggaatgtgcgctgtgcttggatagaagtgtgaatcagtcactactggaactgcacatactggccactgaaaaaaatgatccccatctgtgtgatttcattgagactcattacctgaatgagcaggtggaagccatcacagaattgggtgaccacataaccaacctgcgcaagatgggggctcctggatctggcatggcagagt

SEQ ID NO: 11615 - DNA, 273 bp, Bos taurus
  Clone ID: 50-LIB188-025-Q1-E1-E6
cgccatgggcccgggataccttatacaaatgctggaaatgcaattgtgtagattgacttggggaatatatccaatttcatatatttaatttgaaggtcattttcacattttggccttattttttcagcttcacttggtgctggcttctgtggggttgagctgctgacctgctgcctgtcaggcagctggaggcaaacgtcactgtcaagattcaatgacattctcctccgccaaaaggccctgtcagctacacaaagaggggagcttttctgt

SEQ ID NO: 11616 - DNA, 195 bp, Bos taurus
  Clone ID: 50-LIB188-026-Q1-E1-E10
actcctattacaacctggatgaaacttgtatccgcttctatcacccggataaagaggacggaatgctgagcaaactctgccacaaagatacctgccgctgtgcagaggagaactgcttcatgcaccacacggagaaggaggtcactctggaggaccggctggacaaggcttgcgagccgggcgtggactatgtgt

SEQ ID NO: 11617 - DNA, 398 bp, Bos taurus
  Clone ID: 50-LIB188-027-Q1-E1-E10
acatattgaacgtcacccccaacttgccgaatctctttgagaatgcaggagagttcaaatacaagcagatccccatctcggatcactggagccaaaacctgtcccagtttttccctgaggccatttctttcatagatgaagcccggggcaaaaactgtggcgtcctggtgcattgcttagctggcatcagccgctcggtcactgtgactgtggcttaccttatgcagaagctcaatctgtcgatgaacgatgcttatgacattgtgaagatgaagaaatccaacatctcccccaacttcaacttcatgggccagctgctggacttcgagaggacgctgggactgagcagcccctgtgacaaccgcgtccccacacagcagctctatttcaccaccccc

SEQ ID NO: 11618 - DNA, 356 bp, Bos taurus
  Clone ID: 50-LIB188-027-Q1-E1-E6
gggatacaacagcacacctcccaccaatggtcaaagccccaactttgacctcagagacggataccctgatcgataccagccccgggacgaagaggtccaagaaaggctggaccacctgctacgctggctcctgaagcaccgaggccatctagaggggggtccaggctggctggcaggggccatagtgacgtggcgggggcacctgacaaaactgctgacaacaccatatgatcggcaggaaggctggcagctggcagcctcccggttccgggggacgctctacttgagtgaggtagagacgccggctgctcgggttcatacgcttacccggccaccacttctccgggagcttatgt

SEQ ID NO: 11619 - DNA, 338 bp, Bos taurus
  Clone ID: 50-LIB188-028-Q1-E1-E6
acagttaactcttcagcaatctgtaagccattgacagtgtaactccatagccaatgaagatagccaaagcgcgatttggctgcggaaggggtgtcaaatacgcaatcgtgtggtagattcgtgctccgacaaagagtctgaagtgcatgatggctgtacagaggtctggaccactcagggaatacagaaggccaataccaagaaatggcacgatgttttcaaggtcattcaagtgggctcttcgaacacgttccaccctgtcatctgtccgaagatacttcttggcattttctcctttgccaaagcccgcacagtcttctgggttggcaaaaaccttt

SEQ ID NO: 11620 - DNA, 407 bp, Bos taurus
  Clone ID: 50-LIB2809-001-Q1-E1-E6
actgctgggacacggtctccacctcctgcatcacgatgtccgtctcctccaccttcctggtcacctcagcggcctccctcttgaggttctccagcgtcgtgatgatcgtgtcgtcgtccaggatgcggcccttgacctcgttcagagcttgcagcagagacttctccagctgacgcaggcgcagctgaaactccccttggagtttcagaaggtcggaccgtttctcgtccacatcgggtctttctgctttgaggacttcgttgaggcactggctctgcaggctgctacgggtcacggtgaagttgacgaaggtcacccgggagcagaggtcaggggggaactcgacggtgggatcgcgagtggacaggaagatgacgaaggacggcgacaagtcgatgtcctggtcg

SEQ ID NO: 11621 - DNA, 261 bp, Bos taurus
  Clone ID: 50-LIB2809-002-Q1-E1-E6
actgtaatgggttaacgtcatctttagcatcctggtagcattattcagtagttaataaacagaacattaaacctctgcccagatggcttttggaaaaggaacccaagggaccacaaattcagccactcttgtagctttcctctccagttctttttatcctggccaagatggcagccttggatactttcttccggtcataagccagaccgatggcagccatgcaatcaatgaagaacgtggtaaagttgatgtgccagcggt

SEQ ID NO: 11622 - DNA, 407 bp, Bos taurus
  unsure (379),(389): unsure at all n locations; Clone ID: 50-LIB2809-004-Q1-E1-E10
acggctctgagaccagtctggccagccgtctccggaacctcagcagcccgctgggcctcatggctgtcaaccaagaagcctgggaccacgggctggcctacctgccctttaacaacaagaagccgagcccctgtgagttcatcaacaccaccgcccgcgtgccctgtttcctggcgggagattttcgagcctcagagcagattctgctggccactgcccacaccctccttctccgggagcacaaccggctggccagagaactaaagaaactcaaccctcactggaatggagagaagctctaccaggaagcccggaaaatcctgagagccttcatacagatcatcacctttagggactacctacccattgtgctaggtantgagatgcanaagtggatcccgccctac

SEQ ID NO: 11623 - DNA, 397 bp, Bos taurus
  Clone ID: 50-LIB2809-004-Q1-E1-E6
acagtattctataaaattttctttttaaattgaaagccaacaactctgcctttatgatgctaagctcatgttcttatttcttctcctatcttctttctcttctgttcccattatccttccctttgttttgtccctgtcaccttcctttctccttctcctcattgccccccaggcaagcaggtggtcagtcattggtgggtttccagcttccaaagcctagacaaccctgctgtagtctcaaactagtggtctttgccccggctgaccctttccttgagctgtctgagctttaaggtggatggctcaggctagagatatgacagagtcttctgggaagggccttgatgatcttcagcccagacttttgctaaatgaaatggaacaataactttagttt

SEQ ID NO: 11624 - DNA, 418 bp, Bos taurus
  unsure (408): unsure at all n locations; Clone ID: 50-LIB2809-005-Q1-E1-E6
atgggcaaaaccccccggggaaaagggactgccttctggggaaaaagcacgacttttgactgagaaagggacaacaccgactgaggaggaaacatgacagttggaggaaaaggctggtgaggctggtgcatccaagactggagcacaggcacaggaaggtgcacattttcaacatcagtgagagtcaggctctggctttcagtaaagggctcaactggatatttagggaaaggcatttctttgtgcttaggagccatagcctccttcactttggagactcccattacttcaggctgaacgaaaggcggcaccaccacaggggtttgagtaagatgagggatgttttgtgggaggctgttacggatgggcccacggaagggatagactagagactgtgtctgggcaaangggtggattt

SEQ ID NO: 11625 - DNA, 412 bp, Bos taurus
  Clone ID: 50-LIB2809-006-Q1-E1-E10
acaaaacaatgacagcacagaatatggactcttccagataaataatagaatttggtgcaaagacgaccagaaccctcactcaagcagcatctgtaacatctcctgtgacaagttcctgtatgatgatcttactgatgacattatgtgtgtcaagaagattctggagaaagtaagagttaactactggatggcccataaaacactcggttcggagaacctggatcagtggctctgtgaaaagttgtaaagacatgtcgtctttgctgcgtctgtcctctttctgtacctggaaatcctcagcaccgtaggtacatcgttttgcttcattgtcacacgtttatgcttactcagctctaagtcctgtgccatgtagtgacaaaggacatgtaaggacgaatctccaggggtgcat

SEQ ID NO: 11626 - DNA, 370 bp, Bos taurus
  Clone ID: 50-LIB2809-006-Q1-E1-E6
acattgaattcttccagctctcttgcaagggccagagccaccaggcaggcaaggatgaggaccttcatggctctcaattccttttttccaaagtagaggacaagaagtgaagtgatgcccagggaagacagggcgacctggaagtccaactacttccttaagatcatccaacttctggatgattatccaaaatgcttcattgtgggagcagacaacgtgggctccaagcagatgcagcagatccgcatgtccctccgcgggaaggctgtggtgctgatgggcaagaacacgatgatgcgcaaggccatccgagggcatctggaaaacaacccggctctggagaaactgttgcctcacatccgggggaatg

SEQ ID NO: 11627 - DNA, 440 bp, Bos taurus
  unsure (434): unsure at all n locations; Clone ID: 50-LIB2809-007-Q1-E1-E6
atgctcaaggaggccatggccgcggaatacaccaaaaagagcttaatgggcacaaccccccggggaaaaggcacagccttctcgggaaaacaggcgagattggactgagaaagggacagcacggactgaggaggagacatgacactttgaggaaaaggctggtgaggctggtgcatccaagactggagcacaggcacaggaaggtgcacattttcaacatcagtgagagtcatgctctggctttcagtaaagggctcaactggatatttagggaagggcatttctttgtgcttaggagccatagcctccttcactttggagactcccattacttcaggctgaaggaaaggcggcaccaccacaggggtttgagtaagaggagggatgttttgtgggacgctgttatggatgggcccaaggaaaggatagactanagactg

SEQ ID NO: 11628 - DNA, 404 bp, Bos taurus
  Clone ID: 50-LIB2809-008-Q1-E1-E6
cgggatacagaaagaaagtggctactttcaagtgcccccacacaaccctgtgatctttggcgaaactggaggtcgcaccctcttcaggctgctctgccgagattccgggggtgagactgagtccatgcttcttaatgagacggtgccacaatgggtaattcacatcactgtggataagaatatgcccaaattcaacaaaattcctttctgcgtccaagctcatgcatcttcaggagcaaaaaccttaaagaaggaccgactttctgctagtgacatgcttcaagtcctgaaagtaatggaacacgtctatgagaagatcatcaacttggataatgagtctcagaccactagctcttctaataatgaataaccaggagaccaggagaaagaggacgatattgctg

SEQ ID NO: 11629 - DNA, 351 bp, Bos taurus
  Clone ID: 50-LIB2809-009-Q1-E1-E6
ggcccgggatacagcagaaaggcctgaatgggcatatctctctggggatagggcactgctttctggggaacaggcaggactttggactgagaaagggacagcacggactgaggaggaaacatgacagttggaggaagaggctggtgaggctggtgcatccaagactggagcagaggcagaggaaggtgcagattttcaacatcagtgagagtcaggctctggctttcagtaaagggctcaactggatatttacggaagggcatttctttgtgcttaggagccatagcctccttcactttggagactcccattacttcaggctggaggaaacggggcaccaccacaggggtt

SEQ ID NO: 11630 - DNA, 381 bp, Bos taurus
  Clone ID: 50-LIB2809-010-Q1-E1-E10
acctggtgagattgtggaaagcctttcaagcagtgaggaatctattacacgcatcaataagaaaattgagaagtttcagagtgaggaacagcagcaaacagaggatgaactccaggataaaatccacccctttgcccagacacagtctctagtctatcccttccctgggcccatccctaacagcctcccacaaaacatccctcctcttactcaaacccctgtggtggtgccgcctttccttcagcctgaagtaatgggagtctccaaagtgaaggaggctatggctcctaagcacaaagaaatgcccttccctaaatatccagttgagccctttactgaaagccagagcctgactctcactgatgttgaaaatctgcacct

SEQ ID NO: 11631 - DNA, 424 bp, Bos taurus
  Clone ID: 50-LIB2809-010-Q1-E1-E6
actatgctatctaatcctctttttcttgattgcatcatctttctttttatacaacagccttattcagaagagtggaacataaactttcagccataaaataatgatattatcaaatgagctgtccatattaatctattaaatttcttcattttctgatttatgttgacaaataagaattttttttaaagctagacctgattttatttttatttttccaaaggaatctattacacgcatcaataagaaaattgagaagtttcagagtgaggaacagcagcaaacagaggatgaactccaggataaaatccacccctttgcccagacacagtctctagtctatcccttccctgggcccatccataacagcctcccacaaaacatccctcctcttactcaaacccctgtggtggtgccgcctctcctt

SEQ ID NO: 11632 - DNA, 86 bp, Bos taurus
  Clone ID: 50-LIB2809-011-Q1-E1-E6
gcgggatacagcagaaacgcctgaatgggcatatctctctggggatagggcactgctttctggggaacaggcaggactttgcactg

SEQ ID NO: 11633 - DNA, 388 bp, Bos taurus
  Clone ID: 50-LIB2809-013-Q1-E1-E6
acaacagaaaggcctgaatgggcatatctctctggggataaggcactgctttctggggaacatgcaggactttggactgagaaagggacagcacggactgaggaggatacatgacagttggaggaagaggctggtgaggctggtgcatccaatactggatcataggcatatgaaggtgcacattttcaacatcagtgagagtcaggctctggctttcactacagggctcaactggatatttagggaacggcatttctttgtgcttaggagccataacctccttcactttggagactcccattacttcaggctgaaggaaaggccgcaccaccacaggggtttgattaacatgagggatgttttgtgcgaggctgttatcgatgggccc

SEQ ID NO: 11634 - DNA, 392 bp, Bos taurus
  Clone ID: 50-LIB2809-014-Q1-E1-E10
cgtatgtgtatgatacataaggttatgtattaattgtagccgcgttctaacgacaatatgtacaagcctaattgtgtagcatctggcttactgaagcagaccctatcatctctctcgtaaactgccgtcagagtcggtttggttggacgaaccttctgagtttctggtaacgccgtcccgcacccggaaatggtcagcgaaccaatcagcagggtcatcgctagccagatcctctacgccggacgcatcgtggccggcatcaccggcgccacaggtgcggttgctggcgcctatatcgccgacatcaccgatggggaagatcgggctcgccacttcgggctcatgagcgcttgtttcggcgtgggtatggtggcatgccccgtggccggggg

SEQ ID NO: 11635 - DNA, 394 bp, Bos taurus
  Clone ID: 50-LIB2809-015-Q1-E1-E10
acagcaaaaaggcctgaatgggcatatctctctggggatagggcactgctttctggggaacaggcaggactttggactgagaaagggacagcacggactgaggaggaaacatgacagttggaggaagaggctggtgaggctggtgcatccaagactggagcagaggcagaggaaggtgcagattttcaacatcagtgagagtcaggctctggctttcagtaaagggctcaactggatatttagggaagggcatttctttgtgcttaggagccatagcctccttcactttggagactcccattacttcaggctgaaggaaaggcggcaccaccacaggggtttgagtaagaggagggatgttttgtgggaggctgttagggatgggcccagggaa

SEQ ID NO: 11636 - DNA, 356 bp, Bos taurus
  Clone ID: 50-LIB2809-016-Q1-E1-E6
ggatacaatgcactctaatcctctttttcttgattgcatcatctttctttttatacaagagccttattcagaagagtggaacataaacgttcagcgataaaataatgatattatcaaatgagctgtccatattaatctattaaatttcgtcattttctgatttatgttgacaaataggaattttttttaaagctagacctgattttatttttatttttcgagaggaatctattacacgcatcatcaagaagattgagaagtttcagagtgaggaacagcagcagacagaggatgaactccaggatattatccacccctttgcccagacacagtctctagtcgatgctttccctggg

SEQ ID NO: 11637 - DNA, 440 bp, Bos taurus
  Clone ID: 50-LIB2809-017-Q1-E1-E6
gccatgggcgcgggatacctggtgagattgtggaaagcctttcaagcagtgaggaatctattacacgcatcaataagaaaattgagaagtttcagagtgaggaacagcagcaaacagaggatgaactccaggataaaatccacccctttgcccagacacagtctctagtctatcccttccctgggcccatccataacagcctcccacaaaacatccctcctcttactcaaacccctgtggtggtgccgcctttccttcagcctgaagtaatgggagtctccaaagtgaaggaggctatggctcctaagcacaaagaaatgcccttccctaaatatccagttgagccctttactgaaagccagagcctgactctcactgatgttgaaaatctgcaccttcctctgcctctgctccagtcttggatgcaccagcctcaacag

SEQ ID NO: 11638 - DNA, 424 bp, Bos taurus
  Clone ID: 50-LIB2809-018-Q1-E1-E6
acagcagaaaggcctgaatgggcatatctctctggggatagggcactgctttctggggaacaggcaggactttggactgagaaagggacagcacggactgaggaggaaacatgacagttggaggaagaggctggtgaggctggtgcatccaagactggagcagaggcagaggaaggtgcagattttcaacatcagtgagagtcaggctctggctttcagtaaagggctcaactggatatttagggaagggcatttctttgtgcttaggagccatagcctccttcactttggagactcccattacttcaggctgaaggaaaggcggcaccaccacaggggtttgagtaagaggagggatgttttgtgggaggctgttagggatgggcccaaggaagggatagactagagactgtgtctgggcaaa

SEQ ID NO: 11639 - DNA, 407 bp, Bos taurus
  Clone ID: 50-LIB2809-019-Q1-E1-E10
acaaacagtccgtccaacagagagaaggggaggtgcagttctcaggcgaggggacggtgacatttctctcagtctgggtggcaaacatgagaaatactatgcattgtctacaaccctcacttctggtggggaatggagggaaattcggggcatcacgggagactccataggtgtggggcactgctttcacaagtccctctataaatgcaagcaaggtggcagccagagataagccaggagacatgaacataattagccaggaataacatgtccatgatgtgggctggtcctgtctgtcctacagcatgtttgtccatctagaaatcaacgacttaaggattctcactggttagttttgacttttcaggaatcctcgatttttctttctcccaaccttttatatgccc

SEQ ID NO: 11640 - DNA, 289 bp, Bos taurus
  Clone ID: 50-LIB2809-019-Q1-E1-E6
gatacagcctacacgcctgaatgggcatatctctctggggatacggcattgctttctggggaacaggcacgactttggactgacaaacggatcgcacggactgaggacgaaacatgggagttggatgaagatgtcgctgaggctggtgcatccaccactggagcacatgcacaggaaggtgcacattttcaacatcagtcacactcaggctctggctttcatttgacggctgaactccatctttaggggagggcctttctttctgcttacgactcatagccctccctca

SEQ ID NO: 11641 - DNA, 335 bp, Bos taurus
  Clone ID: 50-LIB2809-020-Q1-E1-E6
acctggagagattgtggaaagcctttcaagcagtgaggaatctattacacgcatcaataagaaaattgagaagtttcagagtgaggaacagcagcaaacagaggatgaactccaggataaaatccacccctttgcccagacacagtctctagtctatcccttccctgggccgatccataacagcctcccacaggagatccctcctcttactcaaacccctgtggtggtgccgcctttccctcagcctgaagtaatgggagtctccaaagtgaaggacgctatggctcctaagcataaggaaatgcccttccctaaatagccagttgagcccttta

SEQ ID NO: 11642 - DNA, 379 bp, Bos taurus
  Clone ID: 50-LIB2809-021-Q1-E1-E6
actgttatcctacccagacttggcatcgtgttcctacatttttcatccagaatttcagcatcagatgcctcatttgcttatcaccctgtagcatccccagccattagattaaaatagtggacaaagctttccttgaactatagtgccgaacagttcccagtgatgagatcagaaggtaaatacttcaccacctgtttttaagtccatttcttttgccactcttaagtgtctgcccagaggtgagacctcaagctgactcagatcctttctcttaaagtcactttaagggacttccctggtggtccagtggttaagattccccgcatccactgcaggggtcatgggttccatccctgattagggaaatatgctgcatggc

SEQ ID NO: 11643 - DNA, 395 bp, Bos taurus
  Clone ID: 50-LIB2809-023-Q1-E1-E6
gcatgaaccaagccgcgatcggcccgggatacgaccaaaactttggcgctgccaactgataatacacgtttataggaataatttttaaaaattgcttgattattcctcttaaaaattggtgttttataaaggcaggcttgttttatatacactgttagctcaacagccaaacaggtttatccctgttatcaaacaggtttaaccctgtttgataaagtggtagttaaaacacaagatgtgacttgaaacaatgacactgattttcctaacagatatttctaacaatgacacatcgctaaaataaagggataatctcccaaagtgtctacctcgaaagacaatattcccttaggtgtatacttcctgatggctcagacaataaagcgtcctgcccc

SEQ ID NO: 11644 - DNA, 408 bp, Bos taurus
  Clone ID: 50-LIB2809-025-Q1-E1-E6
gccactgggcgcgggatacatccaaagggttgagtagctgttctagccatgcttttgacaatgttcatctggaccctgattcattaataacaggcatttttcagataagccaatgccgagtagacatcctgtcaactgccttcaccatagttctagcctgaatctctctggttgtttaaggggttgaatactggattgggttatgagttgtgtaaatcacagttacaagaacacttgctgtgttagaatgagtcgtggaaaaacgcaatgggaagacatcccaggagaggatgaaacatggattgtggcccacagtcttatggactgaggcacagtcgaacatcaacctcattgagagctttaagagcatgccttaccttttctttcaatttgggagtccatactcat

SEQ ID NO: 11645 - DNA, 383 bp, Bos taurus
  Clone ID: 50-LIB2809-026-Q1-E1-E10
acctctattacaagctctgcccctgctccttcccctcactgacatagcccctcttccctgaagctatgaacatgtgagatacttgtagacacgcaagcacctggcaagtttgctttcaagagcctgctaatgaatgaggaaagtcagtccaggccaggcgtcagagcccccaccatgagaaaaagaggaatacaaaggactgagagtattaaacaaggcaaagctcttctttttctccaaaactagtcaggcctggagactacgtgatttgtttgaagacagaaccagcagagctgcagggtgactggaagccatcgccagagggaagaacacaagcttcaaggccagatgcccagctgagctctcagaacagtccagccagg

SEQ ID NO: 11646 - DNA, 432 bp, Bos taurus
  Clone ID: 50-LIB2809-028-Q1-E1-E10
gccatgggcccgggatacccctatacaccaagatagaacttgtgccgtctcattccactgcgacactgattgaggagcccaccgaagtggaagacccctgggacctgcccgagcttaaggacacggggctcaagtggtcagagagagacaccaaagggaagattctctgcgtcttccaagggattgggaaatttattttacttctggtttttctctacttcttcgtgtgctccttggatgtcctgagcagtgccttccagctggttggaggaaaggtagctgggaaattcttcaacaacaactccatcatgtctaatcccgtggcggggatggtgattggggtgctggtgacggtcctggtgcagagttccggcacctccacgtccatcgtcgtcagcatggtggcctcctcactgctgcccgtgcatgctg

SEQ ID NO: 11647 - DNA, 388 bp, Bos taurus
  Clone ID: 50-LIB2809-028-Q1-E1-E6
gggatacaagagaagcgggggcaagtcagtcagtatatttagaatccacgctactactagtgagaaattagagtatttattcagttcagttcagtttagtagctcagtcgggtcggactctttgcgacccgatgaatcgcagcagacgaggcctccctgtctagcaccgaggtccgggagtttacccatactcatgtccagcgaatcggtgatgccatccagccatctcatccgctgtcgtccccttctccgccagccgccagtcgctcccagcagcagggtctgtcccaatgagtcaggtcgtcgcatgaggtaggcagcatagtggagttacagtgtttactagagatgcaataagttgaaaattcagagtcctcactttcaaaga

SEQ ID NO: 11648 - DNA, 400 bp, Bos taurus
  unsure (381): unsure at all n locations; Clone ID: 50-LIB2809-029-Q1-E1-E10
acctaagaacaaaaataaacaggaaaaaagtgcaggaaattctctaattcaagcgttccctgaacatcattgcttcaatctttagtctggagtctacatcacctgtgttccatgtggtcattctggaaagttgagaaggaacgttatagcctgggaatgctttgaattcctccaagaaagggaacagattctgggacccgtgacactcagctgagagtatgagctggggaaggaaaagcacattcgaagagaatctggcactgagaggcaagagggtgtggccgcccactattggtgtgataagaagctgccaggataggtgtaaactacagaaacatcagagcagaagagacggtgaaggcaatgactgtagcaaagcanatgcacttattcttccgga

SEQ ID NO: 11649 - DNA, 447 bp, Bos taurus
  Clone ID: 50-LIB2809-029-Q1-E1-E6
accccaagacctcctgagcaggcccgtggaacatgagtcttcccgaggccaacaaggtgaggctatcaaacaacttgaagatggaataacgaggctgatgaatggagaagatgattgtccgtccttgtttagacatcctcttcaggagcaaaaggacagcatttgctgtgcttgaatctaagccagttgtgggctcatccaggaacaagatggatggatcagtaataagctccattgcaatactagtcctttttctttctcctccagacacaccacggataaactgagttccaaccttggaatctgccactttatccagacctaactcttgaataaccttgttaatccgtgcatttttttcgtaacttgtcatagttgttggaagccgaagggctgctgagaactgtaagttttctctcactgtcagagttcccatcacaacatcat

SEQ ID NO: 11650 - DNA, 414 bp, Bos taurus
  Clone ID: 50-LIB2809-030-Q1-E1-E6
gctcctaggcgccatgggcgcgggatactttatatgaaaagaagaaagacaaaatctcagttaatgcacacaattatttgatatgatggcacttacaggagaagtgattcaaaggcttttaaaacattttccatacagaaatttaatgaagactttaattccctttgactcagtggcctttataccagcatgatactactggaatttaggtaacaagctgttaggacaatttcacttaaggatgttacactatctaaaatacagtagagaactcaagaagaaagagtgccttcaatttgagattgccctattctaaaacagcagttgaagcctttggatagaatggtttgacatgatagatgaaaagacatgtagagcatggaattttcagaaccatcaaagaccataactgtg

SEQ ID NO: 11651 - DNA, 404 bp, Bos taurus
  unsure (336),(351),(378): unsure at all n locations; Clone ID: 50-LIB2809-031-Q1-E1-E10
acagcaaaaaggcctgaatgggcatatctctctggggatagggcactgctttctggggaacaggcaggactttggactgagaaagggacagcacggactgaggaggaaacatgacagttggaggaagaggctggtgaggctggtgcatccaagactggagcagaggcagaggaaggtgcagattttcaacatcagtgagagtcaggctctggctttcagtaaagggctcaactggatatttagggaagggcatttctttgtgcttaggagccatagcctccttcactttggaggctcccattacttcaggctgaaggaaaggcggcaccaccacangggtttgagtaagangacggatgttttgtgggacgctgttanggatgggcccagggaacggatagact

SEQ ID NO: 11652 - DNA, 388 bp, Bos taurus
  unsure (351): unsure at all n locations; Clone ID: 50-LIB2809-031-Q1-E1-E6
acagcaaaaaggcctgaatgggcatatctctctggggatagggcactgctttctggggaacaggcaggactttggactgagaaagggacagcacggactgaggaggaaacatgacagttggaggaagaggctggtgaggctggtgcatccaaggctggagcagaggcagaggaaggtgcagattttcaacatcagtgagagtcaggctctggctttcagtaaagggctcaactggatatttagggaagggcatttctttgtgcttaggagccatagcctccttcactttggagactcccattacttcaggctgaaggaaaggcggcaccaccacaggggtttgagtaagangagggatgttttgtgggacgctgttagggatgggccc

SEQ ID NO: 11653 - DNA, 282 bp, Bos taurus
  Clone ID: 50-LIB2809-032-Q1-E1-E6
gtggaaaaggcatgatatgtctggacagaaactcatggtgatactgcactccgactaaaaagggatgatcttccaactccacaatttccattctctctccttcaacatcttggccaacgaacttcaagccttgctcctccaaacactttttcaagactggattcacctcaaacctgtggcggtgcctctcttccaggtaatctggatctccgtagagtttcctcaagacggagttcttggtctggagcatacttctcgtcttgcgaagccgcatggtttcac

SEQ ID NO: 11654 - DNA, 322 bp, Bos taurus
  Clone ID: 50-LIB3057-001-Q1-K1-E10
atttttctcatatgtattctgtgccatactattgttaaaatgaactgttgctattgtgagatggattttaactgacctattaaaggtttctttcgaatggcactaccttagggacattctagtatttgcttctattgtttgggccttgtggataatgtacagatttaaaaacaaatcttgttgctgatttgtccatttctttccctgcactttgttacatctgggatacagtctaactcatctgatttaatatgcatttaaaaaaatgccataactattaaacaccttgtttacagacagatgaaataaatttattccaacc

SEQ ID NO: 11655 - DNA, 389 bp, Bos taurus
  Clone ID: 50-LIB3057-001-Q1-K1-E6
ggcggcccggcgggatggatggcttggcccggcgtttgggctgcgactgctgctggcgaccgtgcttcaaacggtctctgcattgggagcagaattttcctcagagtcttgcagagagttaggtttctccagcaacttgctctgcagctcctgtgatttgcttggacagttcaaccttctgcagctggatcctgactgtagagggtgctgtcaggaagaagcacaatttgaaactaaaaagctgtatgcaggagctattcttgaagtctgtggatgaaaattggggaggttccctcaagtccaagctttcgtcaggagtgataaacccaagctattcaaaggactacaaatcaagtatgttcgcggttcataccctgtgctaaagcttt

SEQ ID NO: 11656 - DNA, 386 bp, Bos taurus
  Clone ID: 50-LIB3057-003-Q1-K1-E10
cggacgcgtggggggccctataagatggagctgaccggggagaggctcgagcagtgtcgcgttcccgaggcccaggctgagagtgcggccgcccgggctgagctggagtatggcctggtggcggaagcagaagctgaagcggccgaaaagaaggactcggggccctataagatggaacacttccgctggggcagcccgcccaaggacaagcgctacggcgggttcatgacctccgagaagagccaaacgccccttgtcacgctgttcaaaaacgccatcatcaagaacgcccacaagaagggccagtgagggcgcagcgggcaagggcctctctgcgcggaaagttgaccctgaaagcctctctttggccttctaacggttttaaa

SEQ ID NO: 11657 - DNA, 403 bp, Bos taurus
  Clone ID: 50-LIB3057-004-Q1-K1-E6
aacatctaattgaaaattgcatcttttcatgactgcctggtttcacgcagattgatatgattattatatgctcctcatttaacggtgttactccctcttatcacatttcctaagctcctaataatctttttattgtatatctttatctttatatttcaaaattttatatattcactcatatttaatctatttttcattctttcttctttttttattgtttcttctttttttatcatcatctttttattttttttttagttttttatttatatttatattatttattctttttattattttttttttattttttttatttttttattatttttttattttttttttattttttttttttttttttttttttttttattttcttttttatatttctttctctttt

SEQ ID NO: 11658 - DNA, 391 bp, Bos taurus
  Clone ID: 50-LIB3057-005-Q1-K1-E10
aggcgccccacgaacgtgcggtgcgtgacgggcgagggggcggccacctttccggccgcgccccgtgtcccgggacgaagggctctccgcaccggaccccggtcccgacgcgcggcgggggcgcgccgcgccgcgccccgggggacgcgggcgacggcccgccggcggggacggcgggggaccggctatccgaggccaaccgaggctcccgcggcgctgccgtatcgttccgcctgggcgggattctgacttagaggcgttcagtcataatcccacagatggtagcttcgccccattggctcctcagccaagcacatacaccaaatgtctgaacctgcggttcctctcgtactgagcaggattaccatggcaacaacacatcatcagtagg

SEQ ID NO: 11659 - DNA, 453 bp, Bos taurus
  Clone ID: 50-LIB3057-005-Q1-K1-E6
ggcagccaccgctgccttcttcccatcccgctgcaaaggcgggctcggcaggtctgcaggcacctccagacaacactcaagaacagtccatttatgggcactatgcagggtttgggcacgctgggaggctgtctcagtccttcttcctagaacctctgctgcacctgtgccaggctgtatgcagaaaccccagtgccagcctgtttttagtttcattcttcagtctagactgattttaggttctttctcctccccatccttgtcaatgactgccagcatcttagtcctcttctttgtttgcctccttgcgctggtttgccgctgcgtcgcttcagtcgtgtccgactctgtgtgacccatagacggcagcccacaggctcctccattcatgggattttccaggcaagagtactggagtgggttgttgcactggtttagagaagtcttattgaa

SEQ ID NO: 11660 - DNA, 332 bp, Bos taurus
  Clone ID: 50-LIB3057-007-Q1-K1-E6
cggacgcgtgggcggacgcgtgggtttttttttttttttttttttggcctttcaaggctttatttgaagttcaggagccctgcacaccccactgcactgtgtgcaaacacccctgtctcactgtggcccggagtggggccgggtgtccaaccccagaagtgccagagcacccaccctccggggccgggcaggactgaggatggccgggccctcctatgggtcgagggaggatggccgtgtggcctggcccatgtagagctcacttctgccggggtgtgctcaggagcccccactgcagcgcgaggagagcccgggcctgtggctgcagcggc

SEQ ID NO: 11661 - DNA, 393 bp, Bos taurus
  Clone ID: 50-LIB3057-008-Q1-K1-E10
caccatgttgagaggagcgtggacattgtgctctccaagtctatggcacgtgcatcgccgctgatatcaaagtacattcgaagaggtaaaaccactctatcagaaaagtgactacatctgatgtgacaaatgctgcgatcttaccatacatagttaactccgaagacaccaacttgcgcagaaacacccgacagtcgtatcctgtcagagagtaagcagatcaatatatacatactgacatcttatgtaccatcaagacatgtgctctgattactatggctctaggaggcgatactcaccgcatcagtcaaggcgctgaaaggaacatgtggcatacgagccgcatgagagcgccaactacaacctgctgacgcttgcaccatacagagtata

SEQ ID NO: 11662 - DNA, 356 bp, Bos taurus
  Clone ID: 50-LIB3057-009-Q1-K1-E10
tcgcggacgcgtggggcaccaggcgcccttcgaacgtgcggtgcgtgacgggcgagggggcggccgcctttccggccgcgccccgtgtcccgggacgaagggctctccgcaccggaccccggtcccgacgcgcggcgggggcgcgccgcgccgcgccccgggggacgcgggcgacggcccgccggcggggacggcgggggaccggctatccgaggccaaccgaggctcccgcggcgctgccgtatcgttccgcctgggcgggattctgacttagaggcgttcagtcataatcccacagatggtagcttcgccccattggctcctcagccaagcacatacaccaaatgtctgaacct

SEQ ID NO: 11663 - DNA, 423 bp, Bos taurus
  Clone ID: 50-LIB3057-009-Q1-K1-E6
gcatttttaacactacagtgaaataatttaagataccgcttgtattcttagtgtatttatgtcatgttggcataagttgttctgtgaaggggaaggtgtttctcaccctgtttcagtgtttgtactgatagaaagtaagttactactttgcactaggcggtgtggccactgaagaatactgtactgcaaggaaacgatctcatttctgtagacagcaaacttacgttttaccaagttctttacttctgttgattgattcctaattgagtttatggttcaggctgggaattgagaagttatttgaagtaggataggtaaaacctcagtatattatataaaatgcaccctcagctcaactgctgtgtttaaaatacacattttaaatccctatttacagacactaaagtaagaaatactgctttc

SEQ ID NO: 11664 - DNA, 401 bp, Bos taurus
  Clone ID: 50-LIB3057-011-Q1-K1-E10
cgtgtcccgggacgaagggctctccgcaccggaccccggtcccgacgcgcggcgggggcgcgccgcgccgcgccccgggggacgcgggcgacggcccgccggcggggacggcgggggaccggctatccgaggccaaccgaggctcccgcggcgctgccgtatcgttccgcctgggcgggattctgacttagaggcgttcagtcataatcccacagatggtagcttcgccccattggctcctcagccaagcacatacaccaaatgtctgaacctgcggttcctctcgtactgagcaggattaccatggcaacaacacatcatcagtagggtaaaactaacctgtctcacgacggtctaatcccagctcacgttccctattagtgggtgaacaatccaacgct

SEQ ID NO: 11665 - DNA, 405 bp, Bos taurus
  unsure (251),(294): unsure at all n locations; Clone ID: 50-LIB3057-011-Q1-K1-E6
gtttcttgaaatcatcaccaccatggacagcaaaggttcgtcgcagaaagggtcccgcctgctcctgctgctggtggtgtcaaatctactcttgtgccagggtgtggtctccacccccgtctgtcccaatgggcctggcaactgccaggtatcccttcgagacctgtttgaccgggcagtcatggtgtcccactacatccatgacctctcctcggaaatgttcaacgaatttgataaacggtatgcccagngcaaagggttcattaccatggccctcaacagctgccatacctnctcccttcctacccctgaagataaagaacaagcccaacagacccaccatgaaatccttatgagcttgattcttgggttgctgcgctcctggaatgaccctctgtatcacct

SEQ ID NO: 11666 - DNA, 444 bp, Bos taurus
  Clone ID: 50-LIB3057-012-Q1-K1-E10
tagatcgcgagcggccgccctttttttttttttttttgtggctcaataaacttttgtgatttttttgttatttatttttattcaaaagaatttgtttccctatcacaaaaattagataagcataccaccaacagcagcaaagtccgtagagttacattgatggtggagagttcactgggtattcccaatgtcccgaatgtcaaaaggaggaaaaacagggggaaaaaaatactcaaaacaaatccaaaacccatggtgactttggggagagacactgcaagatctgtcttctcttattgtcggctgcacatgtatttcagcaggatctagtacaatttaacttgagcaaacccttcataccaactctagcaccttaattgtaccctgactgttagcagcaatcagcacattggactccccatctggaagtgccctccaacacac

SEQ ID NO: 11667 - DNA, 436 bp, Bos taurus
  Clone ID: 50-LIB3057-012-Q1-K1-E6
ttccgctgtctgccaccatcttgctttcctctaaggcggcagtgaccggggttcagagcaatcttgagcaatgaagctgttaaccagagccgggtccctttcgagattttattccctcaaagttgctcctaaagttaaagccacagaatccccttcatgagttcctccacatcctcaagaccttgagtttaccaggttaccaaatggtttaatgattgcttctctcgaaaactatgctcctgcatcaagaattggtttgttcattaaagcaggcagcagatatgagaactccaacaatttatgaacttctcatttgcttcgtcttgcatccagtttgactacaaaaggagcttcatctttcaagataacccgtggaattgaagcagttggtggtaaattaagcgtgacgtcaacaagggaaaacatggcctatact

SEQ ID NO: 11668 - DNA, 353 bp, Bos taurus
  Clone ID: 50-LIB3057-013-Q1-K1-E6
ctagatcggagcggccgccctttttttttttttttttttttttttcacgtgaactgcgggtttattagcactggtgctgcaacagagcgcctccagtgagcacgcggagctgcatgcgggtgactggacaggtgaggtgcagactcgggaccgcgggtccttacttcttccactcgttcttgtcgtagtcccacttggccgagaagccctggatgggggccaccttcatgtcgagcatcctcttggtctgcttggccacccactcctcttcaaaggtgtgcgggatggggccgtacacatagtgcttctcccagatgaggaggagcgcggtgaagccgatgaagaacatggcc

SEQ ID NO: 11669 - DNA, 319 bp, Bos taurus
  Clone ID: 50-LIB3057-014-Q1-K1-E6
caccaaatggcggatgacgccggtgctgcgggagggcccggaggccccgggggccccggaatgggaggccgcggtggcttccgcggaggcttcggtagtggcgtccggggccggggtcgcggccggggtcggggccggggcagaggccgcggagctcgcggaggcaaggccgaggacaaggagtggctccccgttaccaagctgggccgcctggtcaaggacatgaagatcaagtctcttgaggagatctaccttttctctctgcctatcatggagtctgagattattgactatttcctgggagcatccctgagggatg

SEQ ID NO: 11670 - DNA, 421 bp, Bos taurus
  Clone ID: 50-LIB3057-016-Q1-K1-E10
cggacgcgtgggttgaaatggatcatatgaggcatgtaatatcaagaattgttacttgacaatgttcccttaagcaaaatttaatttgctttgaattttagtcttgcataggctgataataaatctcttaactcctgcccagtcgatgtttaacatgatggaaataaaaactggcaaaaattggaagattttttttttcaacatacctgggatatggtatgcagctgtagtaagcagttttttaaagctgctgtgaactcaaaagccagctggaaaaattaaagctgcacccttaaactagattagaggtttaaaaaatcccactagtcttcacactggacaaaaggttgtccagttggtgtagagtctaagaagtttcaaggaagttagtttacctttgctttaggttgtaagttcattc

SEQ ID NO: 11671 - DNA, 229 bp, Bos taurus
  Clone ID: 50-LIB3057-016-Q1-K1-E6
gtctccttctgcacgtggtgttgccgcttttgtccccaacttgtctgcggacgccgtgcgcctgcagccatgtcggccggccagctcgctttatttttgtctctgacaaaaatggccttgtggagtttgccaggaacttagcttctgtcggtttgaatctgatcgcctctagagggactgcatatgcccttatagatactactaccgcattcacttatcatttttctcc

SEQ ID NO: 11672 - DNA, 452 bp, Bos taurus
  unsure (117): unsure at all n locations; Clone ID: 50-LIB3057-018-Q1-K1-E6
tcgtccggattcccggtcgcccacgctccgaaattgtaaaaaatgattaccttaacattatacaagtctggcaatgagctctgcaggagggaatggaaggaagaatatgaaaatganccaggaaagtaggtgggaggaaggagaatgggtttcccttttctgatcatgggctctggaagtattcattgcctctaccagcattcagtataaaccagagatatgtacttctgtatgtctgtgagcgtgtgcgtgcgtgtgtgtctgagttttattctgaactgctttttttttctgtattttttttatatttcttctttatattttttttgtgttggggttgttttttattattttttttttgtttttattatatattttattttattttagatctattatatttctattatttttttattattcttttttttatcttattttattattttatt

SEQ ID NO: 11673 - DNA, 322 bp, Bos taurus
  Clone ID: 50-LIB3057-019-Q1-K1-E10
cttggaataaaagctatggccaacctagacaaaatattaaaaagcagagacatggctttggcaacaaaggtccatctagttaaagctatgattttcccagtagtcttgtatgggtgtggagaaagcaatggtaacccactccagtactcttgcctggaaaatctcatggatggaggagcctgacggaggagcctggtaggctgcagtccatggggtcgcaaagaatcggacacaactcagcgacttcactttcacttttcactttcatgcattggagaaggaaacggcaacccactccagtgttcttgcctggagaatccca

SEQ ID NO: 11674 - DNA, 281 bp, Bos taurus
  Clone ID: 50-LIB3057-019-Q1-K1-E6
tagatcgcgagcggccgcccttttttttttttttttttttttttttttttttgttttgggtttttttttttttttttttttttttttttttttttttttttttttttttttttttttttttttttgttttttgtttttttatgttttttttctttattacttttactttgtttttacatgtggtttcataagtcttattcactctgtcttaacttacagacacgatgattcttttccgtttaataatcttagaaatcctcttaggcaatccctttctctaa

SEQ ID NO: 11675 - DNA, 410 bp, Bos taurus
  Clone ID: 50-LIB3057-020-Q1-K1-E10
gggctctccgtcctaggaccatggcccagtttgtccgtaacctcgcggaaaaggccgcggcgctggtcaacgctgctgtgacttactcgaagcctcgattggccactttttgatactatgccaaggttgagctggttcctccaacctctgctgagatccctacagcaattcatagcttgaaaaaaattatcaacagttctaaaaccggtagtttcaaacagctcactgttaaggaagctctactgaatggtttggtggccactgacgtgtggatgtggtcttatgtcggctagatcataggcaagcgtatcatcattggctatcatgtatgaagaccaagttctaacatgtgaatatatgctgctaatgattcaagcgttcttgtaccacgtgtgagcagactgctattt

SEQ ID NO: 11676 - DNA, 259 bp, Bos taurus
  Clone ID: 50-LIB3057-020-Q1-K1-E6
aggagagtggcaagaattaggacggttataatgggtttataccaaaatgaaggatcatgcaagagataacaaaaaggaacagcatcattctacccactttcatagcaatcacagctctactaaacttatatttttatatacgactcacgtattctaccacactaacaatatttccctccacaaacaacataaaaataaaatgacaatttccccttatgaaaaaaataacttttctaccaacaatagtcgtattatctac

SEQ ID NO: 11677 - DNA, 379 bp, Bos taurus
  Clone ID: 50-LIB3057-021-Q1-K1-E6
atttgtgccaatttctggctggaatggtgacaacatgctagaaccaagtgctaatatgccatggttcaagggatggaaagtcacccgtaaggacggcaatgccagtggaaccaccctgcttgaagctctggattgcattctgccaccaactcgcccaactgacaaacccttgcgtttgcctctccaggatgtctataaaattggtggtattggtactgtccctgtgggtcgtgtggagactggtgttctcaaacctggcatggtggtcacctttgctccagtcaatgtaacaactgaagtgaagtctgtagaaatgcaccatgaagcattgaatgaagcccttcctggggacaatgtgggctttaatgtcaaaaacgtg

SEQ ID NO: 11678 - DNA, 88 bp, Bos taurus
  Clone ID: 50-LIB3057-023-Q1-K1-E10
aactgaaggaagaaaagtgaccgagaggccgctgaacatcctcgcccgggcgcatcgggagccgtccgaggcagcttccccgtgacag

SEQ ID NO: 11679 - DNA, 294 bp, Bos taurus
  Clone ID: 50-LIB3057-025-Q1-K1-E10
cgcgagcacccgctctcttatttttactctatactcctccactgtccctcatggtccggtgacactcgaagtctcacttaaagtccttaagtaataatagtacagacggtacctgctccccataagcttccaatccaagcacatacacccaatgtactgaacctgtagttcatcactaccagaacaagattccaataccaactacccataatcaaccgcatctgactaccatgtctcacgacggtctaatcccaactcacattacctattagtggatgaacaattcaaagcttc

SEQ ID NO: 11680 - DNA, 396 bp, Bos taurus
  Clone ID: 50-LIB3057-025-Q1-K1-E6
gtacactttcatgtgcctagaagtcagtaaagactgaaataatgtcccatgttgagtgggttattttgaaatatgataattatcattgaggtaaaataattctattaactagaagatcacaagatgtacccatcgtatttttgggggaagatagtttttttctgtggggcaaataggtaaaattatatggtaattacgtttaggttctaaggaaaagaatctgcagagaaatctatgcaatatataatttgtccagattaagtttcatttggggaaagaagttctgaaatatccccaaagcagtttacttgtcaattcggagtcctccaaaaatagaactaactattgggaaaccgtggaatgtggggtggaaaagaaaagctccctcagtttttt

SEQ ID NO: 11681 - DNA, 418 bp, Bos taurus
  Clone ID: 50-LIB3058-001-Q1-K1-E10
cttaagcactcctccttttggaaagactatatcactgtttggttagtttaccatcacagttgaaaaccagaatgggatttctcaaaacaagaggagctgaccaaagtagagtctcaagatgattgctttttcttagctgccagttgatatgaaataaatatttttctggcacataaagataaggattgatgaatttagccaatactctaatatgccctcaaatttcaatatctataccatgatagatgaaacattcttgaaatatagataccagttagtatactattgtctctatacaaagatgagtgtattcctgtcaacagtaggacataaactttgagttgtttttgcagtggcttagctcctgtccccttgggtgaccagtggtacccatttttgagaagactggtcatacata

SEQ ID NO: 11682 - DNA, 405 bp, Bos taurus
  Clone ID: 50-LIB3058-001-Q1-K1-E6
ctcccatccaagtactaaccaggtccagccctgtttagcttccaagatcgggagggttcagggaggtataggcatagaccatacagagtttcttttaggggagatgaagatattccaaagttagattgtggtgatggctgcacaattcttgtgaatatactaagaactactgaattataaactttaaatgggtgaaatttatgaaatgtgaattataaatcagcaaagctgttcttaaaaagtaaaataaaaaaataagaaagctgaggctcagagcattaaatgtctccacttacacacctagtaagtggcatagccatcaaccaaagacaggcagggtctgtccccaaagtccaggctttcaccttcaaaccaaagagtgtctcctcttttttggtagagaat

SEQ ID NO: 11683 - DNA, 447 bp, Bos taurus
  Clone ID: 50-LIB3058-002-Q1-K1-E6
cgcgtacgcatgcgacgagttccggatgtacgagttcaaggtgcggcggtgctcgcgcgggcggagccacgactggacggactgcccctacgcgcacccgggggagaaggcccggcggcgcgaccccaggcggtaccactactccggcgcggcgtgcccggacttccgcaagggcgggtgcaagcgcggcgacgcgtgcgagctggcgcacggggtgttcgagtgctggctccacccgtcgcgctaccggacgcagccctgcaaggacggcaccgggtgccgccgccgcgtctgcttcttcgcgcacacgcccgaccagctccgcgtgccgcaggcgccttccggcgggtcgttcttggcaggcggctacccgttcgggtccccgaagtcgccggccggtctgtacagtctcccgtccacaccaccaaccaagccgtgcccggtgat

SEQ ID NO: 11684 - DNA, 423 bp, Bos taurus
  unsure (401): unsure at all n locations; Clone ID: 50-LIB3058-006-Q1-K1-E6
agatgataaactcatagtcactgggacatctgttcaaagaggatgtggcagcggcaaacttgtttttttcgagcgcaggactttccaaagggtgtatgaaatagacatcacagatgcgagtgttgtccgctgcctgtggcacccaaagctgaaccagatcatggtggggactggaaacgggttggctaaagtctactatgaccccaacaagagtcagaggggagcgaaattatgtgtagttaaaacccagcggaaggcgaagcaagcagagactctaacccaggactacatcatcacccctcatgccttgcctatgttccgcgaacctcgccaacggagtacaaggaaacagctggagaaggacagactggatccgctgaagtctcacatacccgagcctnctgtcgcaggcccaggtcgtgg

SEQ ID NO: 11685 - DNA, 403 bp, Bos taurus
  Clone ID: 50-LIB3058-010-Q1-K1-E6
gcaagatgcaggagcacatgcgcattgggcttctcgacccccgttggctggagcagcgggatcgctccatccgtgagaagcagagcgatgacgaggtgtacgcgccaggtctggatatcgagagcagcttgaagcagctggccgagcggcgtacagacatctttggtgtggaggaaacggccatcggtaagaagatcggcgaggaggagatccagaagccggaagagaaggtgacctgggacggccactctggcagcatggcccggacccagcaggccgcccaggccaacatcaccctccaggagcagattgaggccatccacaaggcgaagggcctggtgccggacgatgacaccaaagagaagatcggcccgagcaagcccaacgagatcccccagcagcc

SEQ ID NO: 11686 - DNA, 435 bp, Bos taurus
  Clone ID: 50-LIB3058-011-Q1-K1-E6
cggacgcgtgggcggacgcgtgggcagtccaagaacctgcctaaagccgacagacaggccctgaatgagcacttccagtccatcctgcagaccctggaggagcaggtatccggtgagcgacagcgcctggtggagacccatgccacccgagtcattgccctgatcaatgaccagcgccgggccgccttggaaggtttcctggcggcgctgcagggggatccgcctcagccagagcgggtcctgctggccctgcggcgctacctgagagctgagcagaaggagcagaggcacacgctgaggcactaccagcacgtggctgccgtggaccccgagaaggcccagcagatgcgcttccaggtgcagacccaccttcaagtaattgaggaaaggatgaatcagagcctggggctgcttgaccagaacccccgcctggct

SEQ ID NO: 11687 - DNA, 363 bp, Bos taurus
  Clone ID: 50-LIB3058-012-Q1-K1-E10
tcgatcgcgagcggctcgccctttttttttttttttttttttttttttttttttttgattatggttttattttttatttttattttttttttattttatttgttttttttatattgttaaaaagtaaaagtggctggtgctttgaaagcagctgaattttaggggagaaaatggctcactgttgaccaatattaataaggtgtgaaaaaggtgttttttaaacccgaagatagggaggtttcacggggttaaacgaaaaagatgaatttccttttagttaaaaacgtgttatatctagcataagcaaggttttggaaaagtacattgtttttcacacgccaagtttttaaaagcaggtaaatt

SEQ ID NO: 11688 - DNA, 440 bp, Bos taurus
  Clone ID: 50-LIB3058-012-Q1-K1-E6
tacaaccccgccactgtacccttcgtgcccatctcaggctggcacggcgacaacatgctggagccctcacccaacatgccctggttcaagggctggaaagtggagaggaaggaagggaacgccagtggcgtgtccctcctggaggccctggacaccatcctgccccccacacgccccacagacaagcccctgcgtctgccactgcaggatgtgtacaagattggtggcattggcactgtgcccgtgggccgagtggagacagggatcctgcggcctggcatggtggtgaccttcgcgcccgtgaacatcaccacggaggtgaagtcggtggagatgcaccacgaggctctgagtgaggcccttcctggggacaatgttggcttcaacgtgaagaacgtgtcagtcaaggacattcgtcggggcaacgtgtgtggggacag

SEQ ID NO: 11689 - DNA, 448 bp, Bos taurus
  Clone ID: 50-LIB3058-015-Q1-K1-E6
cccacgcgtccgtgggggtcctctatcccactcttttctaaccccagctgacatctcccgtgcttcccccataacctactgattcccaccttttgatttcagcatctcttccaccagacccccacgaagtccccacactggcgtcacaaccccccttaggatgaaaatgaggaatagtcaacgtaacgcccaaacgtggctctttaatccccttctaattctgaatatttcgcgtgggtttactataatgtctattaatacatagcctcaatgatgagaggataagaaaaaaagaagaaaatttcagaaacaaaatctccaaattgctcgacacacacactgcgtcattgagctggttgtgactgagtgacctccattcgtggccacacccaacagtgagagctgtgaccacgggtctcaaggaaagtatgcactggtcttgagtatt

SEQ ID NO: 11690 - DNA, 420 bp, Bos taurus
  Clone ID: 50-LIB3058-016-Q1-K1-E10
taaaacttgcggcttagtctgtgagaacagcttccgcagacccgctatctccaaggaccgccccgaggggcaccagagcttcacgtcgttgatcctgtgggccgttttcaggtttgaagcttatctcggagccgaaaaggcagggcaccggcatggcgaaaaacatggctatcggcatcgacctgggcaccacctactcctgcgtaggggtgttccagcacggcaaggtggagatcatcgccaacgaccagggcaaccgcaccacccccagctacgtggccttcaccgataccgagcggctcatcggcgatgcggccaagaaccaggtggcgctgaacccgcagaacacggtgttcgacgcgaagcggctgatcggccgcaagttcggagacccggtggtgcagtcggacatgaaacact

SEQ ID NO: 11691 - DNA, 392 bp, Bos taurus
  Clone ID: 50-LIB3058-017-Q1-K1-E10
acgcgtacgcatggaacgacagctgacatgtttgacttatagaaggccgtggtggaactcattgaggtcttccatcaatattcgctgagggaaggcgacaagcaccagctgcacaaatcagaggtcatggagctcatcaacaatgaactctatcatattttagatgaaatcaacgagcacgaggttgcggacataatcatcttaacactggacagtcatctggacgccgaatgttacttacaataatttatggctttcgatgccatgattaccactgcctgccacgagttgttcgaacacgaataacgaacagaaagcagaggaactgtttttgcaatagagacggattttgaccacaggaacacatgcaaggcattgcaggctgtaggagc

SEQ ID NO: 11692 - DNA, 245 bp, Bos taurus
  Clone ID: 50-LIB3058-017-Q1-K1-E6
cgaccacaacggtcctgaccataggcatgaacttttcccgaatgccaagggagagaaccaagcgcccattgaactgaacactaaagagatcagccacgacccttgcctgaagccatggacagcatcctatgacccaggctctgccaagaccattctaaataatgggatgacctgcaaggttgtgttggatgatacttatgacaggtcgatgctgagaggtggtcccatcatagcgccataccggc

SEQ ID NO: 11693 - DNA, 452 bp, Bos taurus
  Clone ID: 50-LIB3058-019-Q1-K1-E6
cagcccccagccccttgaccctctgcccagagagcatggctcggggaatgctccaggaaccgtcttactgaaccatgcagcccaggccgtggttgtcttacacttatttctgcagttaggagcagggttactaaccagataccacgtccgctgtgccacactggtgtcaggaacactaataaaatggaaagaaaggggagcactagggggtctgaagttttccccctccaatgcctctgcctcacactcacgtggagaaccaggccgggggcaggagggtcggggcccagaggaacctggggaaggggagcgataggaaagagagcaggggtcctggcactgcaggccaggccaggatgcccacccaggccaggagagcggcgccctgccagtccctgccctgcagagcgcacgtgtgctccagatgccccgggaccacgccgcactcccct

SEQ ID NO: 11694 - DNA, 427 bp, Bos taurus
  Clone ID: 50-LIB3058-020-Q1-K1-E10
ctcgatcgcagtcgacaaaattgtcctttctgagcagcgatgttcttcataggctttggtaagaactttgtatgtttcttggtattataccaagttggattttgtttatttaattaggagctttgagctcctgagttgccagatagaatatgcgaagagtggcagctcatagtaatccttctcctccctgtcatgcacctctccatgtcccctttcctcctttctcactttagccgtaatcctccaccagggacgtttactggggctgagggcgaataaaacatcaggagcatcgggaaatcgtcctggaagtgtcattcgagtatatggtgatgaaaacagtgataaagtgacaccagggacatttataccctattggtcaatggcacatgcacagctttgctttcatgggcacagggattctgtg

SEQ ID NO: 11695 - DNA, 472 bp, Bos taurus
  Clone ID: 50-LIB3058-021-Q1-K1-E6
gcggccgagatgggaaagggctccttcaagtatgcctgggtactggacaagctgaaggcagagcgggaacgcggcatcaccatcgacatctccctctggaaatttgagaccaccaaatactacatcaccatcatcgacgccccaggccaccgcgacttcattaagaacatgatcacaggcacatcccaggcggactgcgccgtgctgattgtggccgcaggagtgggtgagttcgaggcaggcatctccaagaatgggcagacccgggagcacgcgctgctggcctacacgctgggcgtgaagcagctcatcgtgggggtgaacaagatggactccacggagcccgcctacagcgagaagcgctatgatgaaattgtcaaggaggtcagcgcctacatcaagaagatcggctacaaccccgccactgtacccttcgtgcccatctcatgctggcacggcgacaacatgctgg

SEQ ID NO: 11696 - DNA, 449 bp, Bos taurus
  Clone ID: 50-LIB3058-022-Q1-K1-E10
tgggcacagcgtggaggaactgtgcaaggccttcgggcaggtgaagaaccagccaacagccatcattgccaagaccttcaagggccgaggcatcacagggatagaagataaggagtcttggcatgggaagcccctccccaaaaatatggccgatcagatcatccaggaaatctccggtcagatccagagcaagaagaagatcctggcgacccccccagaggaggacgccccctcagtggacatcaccaacatccgaatgcccaccccacccaactacaaagttggggacaagatagctacccgcaaggcctacggacaggccctggccaagctgggtcatgccagcaaccgcatcattgccctggatggggacaccaagaactccaccttctcagaactcttcaaaaaggagcacccggaccgtttcattgagtgctacattgctgagc

SEQ ID NO: 11697 - DNA, 347 bp, Bos taurus
  Clone ID: 50-LIB3058-023-Q1-K1-E6
cgtggctcagattgaagcccagaacaggctggagaagtccgagggtggccttgcacccgcacctgcccgggcggtgtccgctgtgaagaacatcaacctgccagagatgccccggaacatcaacattggcgatctcaacattaaggtccccaacctgtcccagtttgtctgagagcggaagacagccgaactgagtccttggagccagcagagcctagccagccctgcaacacagaccgctctgcgccctcaaggagtccagcctcgggccctggcccccactgtcctggagcaggaaagagccctgtgtacactgccagccttgtaacgtgtgctgacttgcccat

SEQ ID NO: 11698 - DNA, 414 bp, Bos taurus
  Clone ID: 50-LIB3058-024-Q1-K1-E10
cccacgcgtccgtcaccctctgcccctaccacagtgaccggcagcttatgagtcaagtggctgtggctgggctgctcaccgtgcttgtctctttcctggatgtccgcaacatcatcctaggcaagtcgcactatgtattatatggactggtggctgccatgcagccccgaatgctggtcacattcgatgaggagctgcggccattgccagtgtctgtccgtgtgggccaggcagtggatgtggtgggccaggccggcaagcctaagaccatcacagggttccagacacacacaaccccagtgttgttggctcacggggagcgggcagaattggccactgaggagtttcttcccgtcacccctattctagaaggttttgttatccttcggaagaaccccaactatgacctctaag

SEQ ID NO: 11699 - DNA, 216 bp, Bos taurus
  Clone ID: 50-LIB3058-026-Q1-K1-E10
tagatcgcgagcggccgtcctttttttttttttttggctttttgttttttaaataaacgaaagtcaggaacaaaaaaaaaaaaaaaaaaaaaaaaaaaaaaaaaaaaaaaaaaaaaaaaaaaaaaaaaaaaaaaaaaataaaaaataaaaaaaaaaaaaaaaaaaaaaaataaaaaaaaaaaaaaaaaggggctatcttttatttattctcatatt

SEQ ID NO: 11700 - DNA, 364 bp, Bos taurus
  Clone ID: 50-LIB3058-027-Q1-K1-E6
cgtaaatgtgcgatgttatgttctaaatcagaccacagtggtacccaaatattacgcgcgatatgacaactgtcagggtaactttttattacacatacactgccataggagatgaaacctatgcttcaatgataaataatccgtgtgtatatgtaaaatacacgagctttaatctatctgggtatgactatgaaagacaatgcaaccataccaattgtcaacagcggattataacagagaaataaaggcctagattttgtaagatcaaggtctgttgtattttctcttgcacatgccattcatttgctgattcttgtggtgtgaatatgccaccttattcattggaccatcatagcacaagcat

SEQ ID NO: 11701 - DNA, 400 bp, Bos taurus
  Clone ID: 50-LIB3058-028-Q1-K1-E10
ggtgtttcataaaatgtcacccaatgagactctctttttggaaagtaccaacgggatgtacaaagatgacatttgtaatagctcctttgtgaatttccaaatatgggattttcctgggcaaatggacttttttgacccaacttttgactacgagatgatcttcaggggaacaggagcattgatatatgtcattgatgcacaggatgactacatggaggctttaacaagacttcacattactgtttctaaagcctacaaagttaacccagacatgaaatttgaggtttttattcacaaagttgatggtctgtctgatgatcacaaaatagaaacacagaaggacattcatcaaaaggccaatgatgaccttgcagatgctgggctaggaaaactccacctt

SEQ ID NO: 11702 - DNA, 278 bp, Bos taurus
  Clone ID: 50-LIB3058-028-Q1-K1-E6
cagctgccaggcgttcgtccctgccgtgactcccgccgggcctggccaggcgggcggggcctcatctgaagagcgatgccccgggagatcatcaccctgcagctgggccagtgcggcaaccagattgggttcgagttctggaagcagctgtgcgccgagcatggtatcagccccgagggcatcgtggaggagttcgccaccgagggcactgatcgcaaggacgtctttttctaccaggctgacgatgagcactacatcccgagggcagtgctgctgga

SEQ ID NO: 11703 - DNA, 392 bp, Bos taurus
  Clone ID: 50-LIB3058-031-Q1-K1-E6
gccgggagaggccgcgttcagtcggatcccggcagcagctgcagcgcctctcgtctggtaggctctcctagctatcgccttttcgcttccggaaacatggcctccggtgtggctgtctctgatggggtcatcaaagtgttcaacgacttgtaagtgcgtttgtctgtttactctttttgtagtgttatttgtttttttattgttttttttttatttattttttttattttttttattttttatttttttttttttatttgtttttttattttttctttattttttctatatatttttatattttttattcattttttttttttgtctattttttttttagtttttattttttttctttttttgtaattttttttttatatttttttatttat

SEQ ID NO: 11704 - DNA, 220 bp, Bos taurus
  Clone ID: 50-LIB3058-032-Q1-K1-E10
ctgagggagctgcgcccaaggctctgctcacctacggaagggcccccagggctacggggttaacctgcacagcgacaagtcccggcccggacagtacatccgctcggtggaccccggctcccctgccgcccactcatgcctccgtgcccaggaccgactcatagaggtgaacgggcagaatgtggaggggttgcgccatgctgaggtggttgtcagcatt

SEQ ID NO: 11705 - DNA, 331 bp, Bos taurus
  Clone ID: 50-LIB3058-034-Q1-K1-E6
ggagatcacggccctggcccccagcaccttgaagatcaagatcatcgcccctcccgagcgcaagtactctgtctggattggtggctccatcctggcctctttgtccaccttccagcagatgtggatcagcaaacaggagtacgacgaagccgggccatccatcgtccaccgcaaatgtttctaagacactccctgctctcttgtctgtctctagtacacactgtgaatgttctgtggaataatgccttcaattctttttcaaatcattcctagcccaagctctgactcgttacctatgtgttttttaataaatctgagatatggtacctgt

SEQ ID NO: 11706 - DNA, 306 bp, Bos taurus
  Clone ID: 50-LIB3058-036-Q1-K1-E6
tggttttgctttatgacatgttaatgttcggtcatcaaaagactttattcttagaatgctttagatcattgtcaactctatagcctttcaatcctatgtatgagtatgagggatttttgcttgctttttttttctttaaaacttttgtacattccatctttataggtctgtttcatatattttgtgtgtacaacactaaatcttgcgctctttgacattggtactgatatattctcatcattggtcttccatgaatcatactgctgactgcctatttaaagaagagaatatacgccgagcatcaaa

SEQ ID NO: 11707 - DNA, 378 bp, Bos taurus
  Clone ID: 50-LIB3058-037-Q1-K1-E6
cagaacactgttgtgatgacctggattaagtaccaagggggaagtggggcaaattatgttgctaaaatctcagcctgttctgttaatgttccagctactgtaaacacaaaaggcttttcatcctctcttgactccctgtatgaattcttggacttcccagatggctcagtggtaaagaatacacctgctaatgcgggagacatgggttccatccctgggtcgggaagatcccttggagaaggaaatggcaacccactccagtgttcttgcctaggaaatcccatggataaagtctgagcctggtgggcgacagtccatggagtcgcaaagagtcggacaggactcagcaactgagcacacactcaatgaattcctccc

SEQ ID NO: 11708 - DNA, 426 bp, Bos taurus
  Clone ID: 50-LIB3058-038-Q1-K1-E6
tgactctcgtgggaatcccaccgttgagtttgatctcttcaccgcgaaaggtctcttcagagctgctgtgcccagtggcgcttcaactggaatctatgaggccctggagctccgggacaatgataagactcgctacatggggaaaggtgtctcaaaggctgttgagcacatcaataaaactattgcgcctgccctggttagcaagaagctgaacgtcgtggagcaggagaagatcgacaagctgatgatagagatggatggcacagaaaataagtccaagtttggtgcgaacgccatcctgggcgtgtccctggctgtctgcaaggctggtgctgtggagaagggggtgcccctttaccgtcacatcgccgacttgtctggcaatgctgaggtcatcctgccagttcccgctttcaatgtcattaa

SEQ ID NO: 11709 - DNA, 432 bp, Bos taurus
  Clone ID: 50-LIB3058-039-Q1-K1-E10
ccggtccccagccccccttttcgcccttccctgccgagctgccagccaacgtgaagcaggcctataggacgttcgcggctgtgcctggcctgcacccgcccctggacacccctgcccagcaccccatgctcgggcccacggcctcgccggagcagctgtccttccgcgagcggcagaagtacttcgagctggaggttcgggtgccccaggccgagggcccccctaagcgcgtgtcgctggtgggcgctgacgacctgcggaagatgcaggaggaggaggcccgcaagctgcagcagaagagggcgcagatgctgcgcgaggcggcggccaacacggggctcccggaagccgatgctcccgaggacgaggagcccgaggaggaaccaccctgggccggccagggccccatggcagaagggctcggtcccgcgt

SEQ ID NO: 11710 - DNA, 430 bp, Bos taurus
  Clone ID: 50-LIB3058-039-Q1-K1-E6
gtcgttgagccctacaactccatcctttctcacccacaccaccctggagcactctgattgtgccttcatggtagacaatgaggccatctatgacatctgtcgtagaaacctcgacattgagcgcccgacatatactaacctgaataggctgataggtcaaattgtgtcctccatcactgcttccctgaggtttgatggcgccctgaatgtggatctgacagagttccagaccaacctggtgccctatccccgcatccacttccctctggccacatacgcccctgtcatctctgctgagaaagcctaccatgaacagctttctgtagcagagatcaccaatgcttgctttgagccagccaaccagatggtgaaatgtgaccctcgccatgggaaatacatggcctgctgcctgttgtaccgtggtgatgtg

SEQ ID NO: 11711 - DNA, 338 bp, Bos taurus
  unsure (223): unsure at all n locations; Clone ID: 50-LIB3058-041-Q1-K1-E6
gtgttcaatcaagctatatactatgggtaatcaagatgctattggatctatctaatccgagatattacaaagaaagcatccttaaaatacaattaaggcttctatctgacgagtgcactgggcatattttaacaacatgtttctaaacaacaacacaaataataaaatgaatagatattacctagcactgctgagcttagtcgctcagccatgtccgactctntgccatcccttggactgtagcctgctaggctcctctgtccatggggattctccaggcaagaatgggttgccatgccctccaccaagggatcttcccaacaaagggattgaaccca

SEQ ID NO: 11712 - DNA, 315 bp, Bos taurus
  Clone ID: 50-LIB3058-044-Q1-K1-E6
gtgctagatcgcgagcggttgcccttttttatgataccttttttatgaacaagtattggaataacttaagtcactgagctcccagttctgaaaagattcctaaaataggcaactgtggccattccggaagccatcgctcaccctctagttatctatgcatctccctcctctgggtgctgactcggaagaaagcataaacacgcccagtaccatcctggctcccataggaccttcctattatctatgccttacatcaacaaccttagctggactaagatggtgactcagttaaaggggaagacaaatgctgactgt

SEQ ID NO: 11713 - DNA, 152 bp, Bos taurus
  Clone ID: 50-LIB3058-045-Q1-K1-E6
aggaaatgtctctatgaaggtttcttatgtacctgaatggggttcgattctgaaatggttctacctgttgcaccgatattcaaataaaaatgacagacacaggaaggtttggtaactttgggttttgtaaaaatcagcagagacagtgtgtc

SEQ ID NO: 11714 - DNA, 419 bp, Bos taurus
  Clone ID: 50-LIB3058-047-Q1-K1-E10
gaaatggcaacccactccagtgttcttgtctggagaatcccagggacggcagagcgtggtgggctgccatctatggggtcgcacagagtcagacacgactgaaatgacttagcagcatatattgtatttacatattatattaggtgtaatatataacacagtattgatgatgtggtagtggatatctttgtcttgtttttgactctaatagaaaagcttctaagcacttattttatatgataaaatttattatgatattatatatgtttttgttagatgcctttttccaaaccaaagatgttcaagtattcttctgtctatacttcattaagaatgtctttttaaatcacaaattagttctaaattttcttaaaagcttagtgtgcatcttttcagtgatcatgtcagttgtctctttt

SEQ ID NO: 11715 - DNA, 424 bp, Bos taurus
  Clone ID: 50-LIB3058-049-Q1-K1-E10
gtcacaaattgtagtgcctgaaaacattttaagacaatcagcttaataatgttttcaggcactacaatttgtgacaatcaacacagtcttctaatgggtccacggcgttcagagactcaagcccaatgcacttgggggtttggcacgtaaaacaatagcagaaatgaaatctggtttagaagcaactgtgattgtttcaagaatgcacagtcccttcaaatgctgcaagacatacacaacaggaaaatcaccttctgttggcactacatttgcttcaccagtgcatttatatcctacaaccactacaacagcacagttaagcaaatatacagaaactgaaaacaaataaaaacaaagatagaaaacaaaaaacctaaatatatttaacatgcaattttagttagttacactgaacattctactt

SEQ ID NO: 11716 - DNA, 426 bp, Bos taurus
  Clone ID: 50-LIB3058-049-Q1-K1-E6
aaaggacccttagaccagggattgttttacaggccaaatcttgcctgattttgtacaacccagaactaagaatggtttttatattcccaaatggttaggggaaaataaatcgaaagaacagtatttcatgacacatggaaattttctgaaattcagatatcagtgtccataactctttgcgatcccatggactgtagtccaccaggttcctctgtccatggaattctccaagcattactggagtggatagccattctcttctccaagggatcttcccaacccagggatcgaacccgggtctcctgcattgcaggcaggttcttcaccatctgaccccaagggaagccccaaataaaatgttattggaacccagccatgcccattcagttacatatgatctgtggctaccttctaggcagagctgag

SEQ ID NO: 11717 - DNA, 416 bp, Bos taurus
  Clone ID: 50-LIB3058-054-Q1-K1-E10
aaaaacttttggagaaaagcactgattaaaataaaacagtaacttttatttagcctcatcaaaaatttatgctatcacaagataccattaaggactgaaatatataagccactaatttggaaaaaatatagcatctatatccaacaaagggcttgtatctggtatatgtaaagaacccctataatcataaattagattgaacagtccaactgaaaaatgggcaaaagccttgagcagatacttcacaaacaaagatacatgagtggccaataatcacatgaaaaaggctcttaatgtcattaatcaccagggaaatgcaaattaaagctacagtaagatatctcttacacttactaggatggctaaaataggactgacagctttaaatgttagtgacagtttggagcaactagcaa

SEQ ID NO: 11718 - DNA, 430 bp, Bos taurus
  Clone ID: 50-LIB3058-056-Q1-K1-E10
gccactccctaccccttcaacatatccacaggacacctctgtaccatcacccccttgtgaaggtggctggagcaggcctctgggccacaggtgtgctggccctcatgtagatacagctgtgactccagggaccagaggctgatggacgagtgttcgatgccttgggtgctggggagcaccaagcacatctccacacaggcaaggggatgtctctgggaagcagtccaggccttctctataccctcccctgccccagtgtcatgagtaagggcactgcctcctctgtctacttcagggcccaatgcattcacagcgacaacccctgccccaccatcgcttagtccttgggaagagactgtggtctcagggcccatggtgagaggcagcagtggcagcaactatgtcctgtcttctggagcctgtggggagt

SEQ ID NO: 11719 - DNA, 430 bp, Bos taurus
  Clone ID: 50-LIB3058-058-Q1-K1-E6
gttgtatttgttcagtaactaagtcatgcctcactctttgtgaccccatgaactgcagcccaccaggcttccctgttcttcaccagctcccagagtttgctcacactcaggtccattgagttgatgatgccatttaatcacctcatcctcttccactcctttctccttttaccttcagtctttcccagcatcagggtcattttcataaatgagtcagctcttcgcatcaggtggccaaactattagagctttagtatcagtccttccaatgaacattcagggttgatttcctttaggatttactggtttgatgtccttgcaggccaagggactctcaagagtcttctgcagcaccacagtttgaaagcatcaatcctgcaaccatcggccttctttatggtccaattctcacataggtacatgactactg

SEQ ID NO: 11720 - DNA, 188 bp, Bos taurus
  Clone ID: 50-LIB34-002-Q1-E1-E6
acccacgcgtacaagagagaccaatccgacagagtatacaagatttacgtaaacactgtggattctgtttcccggacctcttcttccacctttcactatagaactctgcgaaaacacatggggaaacgaacgcacaatcaagtacaatacaatgacaatgtcgtacacgagtatccctcacatctgga

SEQ ID NO: 11721 - DNA, 379 bp, Bos taurus
  Clone ID: 50-LIB34-004-Q1-E1-E10
agaatttgagaagcaaaatacaaaaattagaatcggatgtctcaactcagatggaatactgccgcaccccgtgtactgttacttgcaatattcctgtggtgtctggcaaagaatgtgaggaaatcatcaggaatggaggtgaaacatctgaaatgtacctcattcagcctgaggattctagcaaaccatatagagtatactgtgatatgaaaacggaaaaaggacgatggacagtaattcataaccgtcaagatggtagtgttgactttggcaggaaatgggatccatataaacaaggatttggaaatattgcaaccaatgcagaagggaagaaatactgtggtgtaccaggtgagtattggctcggaaatgacaaaat

SEQ ID NO: 11722 - DNA, 381 bp, Bos taurus
  unsure (325): unsure at all n locations; Clone ID: 50-LIB34-004-Q1-E1-E6
ctcaacgggttggcagtaaaggatgcttgtcagactcttctgaaacgccttaaacccatcatcagcaagaatcccaaaggcacttggaaagattgggcacaggctgcctttaatgaaagcattagtctctcagctactggatacttcaggggttatgagtcgaacataaactgggagacaggcgaaggccaccctttcgaatactttgtttatggagcagcctgttccgaggttgagatagactgcctgacaggtgctcataagaacatcagaacagacattgtcatggatgttggctacagtataaatccagcccttgacgtangccagattgaaggtgcatttattcaaggcatgggactttatacaatagaggaactg

SEQ ID NO: 11723 - DNA, 410 bp, Bos taurus
  Clone ID: 50-LIB34-005-Q1-E1-E10
aaaatttgtataaacttctctgccgtggtatcccagagcaagggatgcttttcacattttaacaaaatgaaggtactcactgcagcactgctgtccatccttctgatcacacagcagtgttcttgtgctgtgaatcccacaggctgcgatgccgttgagcctgtggctgtgagagctctggacctgatcaataaaggacggtgggatggctaccttttccagttgctgcgggtcgctgatgcccacttggacaaagtggaatccatagctgtctactatttagtcttggatgtgaaagaatctgactgtccagtcctgtccaggaagcactgggacgactgtgagctggatgtttctcgtcgtccgtctgaaacagtgattggacaatgtaaggtaatcgctataacact

SEQ ID NO: 11724 - DNA, 398 bp, Bos taurus
  Clone ID: 50-LIB34-005-Q1-E1-E6
gaagatctctcagttaagtccaaagcgaaggatgatttcttgcaacttcgaaaaatttaaaaccatgaaacatctattactgctacttttctgtgcttttatagttcaggcccaatttcctactgactatgacgagggacaagatgacagacctaaggtaggtttgggtgcccgcggtcatcggccctatgacaagaagaaggaagaggcccccagcctgagacctgtgccccctcccatcagcggaggtggctatcgggctcgtcccgccacagcaactgtgggccagaagaaagtggagagaaagccccctgacgctgatggctgcctgcacgcggacccggatctgggtgtgttgtgtcctacaggatgtaagttgcaagatactttggtaagac

SEQ ID NO: 11725 - DNA, 407 bp, Bos taurus
  Clone ID: 50-LIB34-006-Q1-E1-E6
cgagtactcctcacatctggaaaagcaccagttatatatagatgagactgtgaagaataatatcccaactaagcttcgtgtgctccgttcaattctggagaatttgagaagcaaaatacaaaaattagaatcggatgtctcaactcagatggaatactgccgcaccccgtgtactgttacttgcaatattcctgtggtgtctggcaaagaatgtgaggaaatcatcaggaatggaggtgaaacatctgaaatgtacctcattcagcctgaggattctagcaaaccatatagagtatactgtgatatgaaaacggaaaaaggaggatggacagtaattcagaaccgtcaagatggtagtgttgactttggcaggaaatgggatccatataaacaaggatttggaaata

SEQ ID NO: 11726 - DNA, 398 bp, Bos taurus
  Clone ID: 50-LIB34-007-Q1-E1-E10
gagatatgccatccaatattttaacaacaacaccagtcattcccacctctttgatctgaaagaagtaaaaagagcccaaagacaggtggtgtctggatggaactatgaagttaattactcaattgcacaaactaattgttccaaggaggaattttcattcttaactccagactgcaagtccctttcaagtggtgatactggtgaatgtacagataaagcacatgtagatgtcaagctaagaatttcttccttctcgcagaaatgtgacctttatccaggggaggattttttaccccccatggtttgtgtcggctgccccaaacctatacctgttgacagcccagacctggaggaagctctgaaccattccatcgcaaagcttaatgcagagcatgatg

SEQ ID NO: 11727 - DNA, 404 bp, Bos taurus
  Clone ID: 50-LIB34-007-Q1-E1-E6
gtcacctttgctccagtcaatgtaacaactgaagtgaagtctgtagaaatgcaccatgaagcattgagtgaagcccttcctggggacaatgtgggctttaatgtcaaaaacgtgtctgtcaaagatgtccgtcgtggcaatgtggctggtgacagcaaaaatgatccacccatggaagctgctggcttcacagctcaggtgattattttgaaccatccaggccaaatcagtgctggatatgcacctgtgctggattgtcacacagctcacattgcttgcaagtttgctgagctgaaggagaagattgatcgtcgttctgggaaaaagctggaagatggccctaaattcttgaaatctggtgacgctgccatcgttgatatggttcctggcaagcccatgtgtgt

SEQ ID NO: 11728 - DNA, 420 bp, Bos taurus
  Clone ID: 50-LIB34-008-Q1-E1-E6
gagaatttgataagcataatacaaaaattacaatcggatgtctcaactcagatggaatactgccgcaccccgtgtactgttacttgcaatattcctgtggtgtctggcatagaatgtgaggaaatcatcacgaatggaggtgaaacatctgaaatgtacctcattcagcctgaggattctagcaaaccatatacagtatactgtgatatgaaaacggaaaaatgatgatggacagtaattcagaaccgtcaagatggtaatgttgactttggcacgaaatgggatccatatatacaaggatttggaaatattgcaactaatgcagaacggaataaatactgtggtgtaccaggtgagtaatggctcggaaatgacagaattagccagcttaccaatatgggacccacacagcttttgatt

SEQ ID NO: 11729 - DNA, 375 bp, Bos taurus
  Clone ID: 50-LIB34-009-Q1-E1-E6
atttggagaaagagctttaaaagcatggtcagtagctcgcctgagccagaaatttcccaaggctgagtttgtagaagttaccaagctagtgacagatctcacaaaagtccacaaggaatgctgccatggtgacctacttgaatgcgcagatgacagggcagatcttgccaagtacatatgtgataatcaagatacaatctccagtaaactgaaggaatgctgtgataagcctttgttggaaaaatcccactgcattgctgaggtagaaaaagatgccatacctgaaaacctgcccccattaactgctgactttgctgaagataaggatgtttgcaaaaactatcaagaaacaaaagatgccttcctgggctcgtt

SEQ ID NO: 11730 - DNA, 350 bp, Bos taurus
  Clone ID: 50-LIB34-011-Q1-E1-E6
attttcagaaaaagtttttaggacaaatgacattaaaaacagcacatggttttctttcatatttgtcatttccattgtgtaccaagaagtaactaaaaggatgattgtggacagtcagtgttcataatttccattccagtggattgtgagaagtttcaaattaggaagagaaattgaggtgaagtaaaatcatgtgtttaaaatccactttgaacctctctttatttatgtaagatctatcacagaaaactcaaaaagatttattcattaaaccggtttatgttacaataaaaaaaaaaaaaaaaaaaaaaaaaaaaaaaaaaaaaaaaaaaaaaaaaaagggcggccgc

SEQ ID NO: 11731 - DNA, 430 bp, Bos taurus
  Clone ID: 50-LIB34-012-Q1-E1-E10
gtcgacccacgcgaccgccagaagacaggaaaaactatgagctgctctgcggggacaacacccggaagtctgtagataattaccaagaatgctacttggcaatggttccttcccatgcggttgtggctcgaactgtgggcggcaaggaggatgtgatctgggaacttctcaatcacgcccaggaacattttggcaaagataaaccagacaatttccagcttttccaatcccctcatgggaaggacctgctgtttaaggactctgctgatgggtttttaaagattccttctaagatggattttgagctgtacttgggatatgaatatgtcactgctcttcagaatctaagagaaagtaaacccccggactcctcaaaggatgagtgcatggtgaagtggtgtgcaattggtcaccaagagaggacaaagtg

SEQ ID NO: 11732 - DNA, 407 bp, Bos taurus
  Clone ID: 50-LIB34-012-Q1-E1-E6
acagcgcgcagcccgaggtgagcagtgagcggcgagcgggacggcagcgaggcgttcgcggggcccctcctgctgcccgggcccggcccgctcatggcggccatccgcaagaagctggtggtggtgggcgacggcgcgtgcggcaagacgtgcctgctgatcgtgttcagtaaggacgagttccccgaggtgtacgtgcccaccgtcttcgagaactatgtggccgacatcgaggtggacggcaagcaggtggagctggcgctgtgggacacggcgggccaggaggactacgaccgcctgcggccgctctcctacccggacaccgacgtgatcctcatgtgcttttcggtggacagcccggattcgctggagaacatcccgagaagtgggtgcccgaggtgaagcac

SEQ ID NO: 11733 - DNA, 423 bp, Bos taurus
  Clone ID: 50-LIB34-013-Q1-E1-E6
agcagagcaactggacctcgcctaagctgtgtctctgactcatttctgactttatgcaagttcttccaatgggaaaaatggcgaagatgtttagtttcatccttgtcaccactgctctggtaatgggcaagggaagctcggctctggagaactgcctccaggagcatgcgcgggtcaaagcccaagtgtacctgctggagacccgggtcaagcagcaacaagtcaagatctcgcagcttttgcatgagaaacaagtccagctccttgataaaggagaggagaatagtgtcattgaccttggaggaaagaggcaatacgcagattgttcagatattttcaatgacgggtacaagcagagtggattttataaaatcaaacctctcgagatcccagcacaattctctgtttattgtgacatgtctg

SEQ ID NO: 11734 - DNA, 436 bp, Bos taurus
  Clone ID: 50-LIB34-014-Q1-E1-E10
actggagtgggttgccatttccttctccagtgcatgaaagtgaaaagtgaaagtaaagtcactcagtcgtgtccaactcttaggctcctccatccatgggaatttccaggcaaagtactggagtggggtgccattgccttctccgattattcccctacgtggtgcctaaacttaaaaaatttttttctgaattaggatgcattgtagacacaatgtctgtgcatggcatttaattactttatctctaagtctctctctccatattgaagtgaaatttatataacaaaattagccactttaacatgtaaaattcagtggtgattagcacatttacaatgctgtacaactatcacttctttttagttttgacagttttattcacccccaaaggaaaccccatatccactaagctctcactgcccattacaacctttcc

SEQ ID NO: 11735 - DNA, 407 bp, Bos taurus
  Clone ID: 50-LIB34-014-Q1-E1-E6
aagttctgaaaccctagaggacgcaactgtgagtgtctctgtcctagcctctcaacttgctttcctgtgtccagtgagtatcttcctgcctgaatgggcgctttatcctactggtgctgaggaaggcagggtctgtacagctgttccagtctaggaggatagcactgcagactccagtactagcctgtccagagcagcaagtgagaggaaacaagccagcattgtaagaggacatgcttctcctccctctctccgtgctgctcctgctcacacagccctggagatccctgggagcagaaatgacaaccttttctcagaaaatactggccaatgcctgtaccctggttatgtgtagccccctggagagtggcttgcctggtcatgatggacaagatgggatagaatgt

SEQ ID NO: 11736 - DNA, 388 bp, Bos taurus
  Clone ID: 50-LIB34-015-Q1-E1-E6
tcgacggggcgtccgcggatgcgtgggttcagaatgatttccctcttgacttacacttgagacaatcttcccaatagatgagaatgggccctcacattttgtatgagacctctgagcagttcctcgcagctacaagctgccgcagcttcccagactaaagcgagtcaaaccctagccaaaggcaacataaggaatattgtggtggtggatggtgttcgcactccatttttgctatcaggcacttcatataaagacatgatgccagatgatttggctagagcagcactttcgggtttgttgcatcggagcagtgtcccataggatgttgttgattatatcatcgttggcacagttatacatgaagtgaagacaagcaatgtggctagag

SEQ ID NO: 11737 - DNA, 396 bp, Bos taurus
  unsure (326): unsure at all n locations; Clone ID: 50-LIB34-016-Q1-E1-E10
agaagacgcgcagaaatggcacctcgcaaggggaaggaaaagaaggaagaacaggtcatcagcctcggccctcaggtggctgaaggagaaaatgtatttggtgtctgccacatctttgcgtccttcaatgacacttttgtgcacgtcaccgatctttctggcaaggaaaccatctgccgtgtaactggtgggatgaaggtgaaggctgaccgagatgagtcctctccatatgctgccatgttggctgcccaggatgtagcccagagatgcaaggagctgggcatcactgccctccacatcaaactccgggccacaggaggaaatangaccaagactcctggaccaggggcccagtcagcgctcagagccctcgcgcgctcaaggatgaagattggg

SEQ ID NO: 11738 - DNA, 403 bp, Bos taurus
  Clone ID: 50-LIB34-016-Q1-E1-E6
gctgggagctggggcccgggactgaaacagcccctgtgagcagcgcagacacctgtgtacaggagcagttctctttccaggatgtggctcttagctctggtcctgacctcccttggttccttcacagcttgggggctggcaccctcaccgcctattgtggacaccgctcagggcagagtcctggggaaacatgtcagcttaaaaggatttgctcagcctgtggccgtcttcctgggagtcccttttgccaagcctcctcttggatccttgaggtttgctccgccgcagcctgcagaaccatggacctttgtgaagaataccatctcttaccctcccatgtgctcccaagacccagtgggggcacagttgctctcagatctctttaccaacagaaaggagaaca

SEQ ID NO: 11739 - DNA, 397 bp, Bos taurus
  Clone ID: 50-LIB34-017-Q1-E1-E10
gttctagatcgcgagcggccgccccttttttttttttttttttttttttttttttattttttacagagatgtactgggggacagcccgcccataaagtcatatgtgtaagtgagaacacaaagcaaaagatatgcacactctggttttgggggtatatgctccaggttttccatggggactcctgaggttcaatcctgcctttgcatatcccgaacctccttcctcatgacctttgccacaggtggacctcctgcacccaatactgtagtattccgctatttccttgcaatgatccctgcagaaaggcttcttatctcatcctgctagacattgggacccagcatttggctgtttatcaccatccttttcaccattacttttcaaatcacatctttt

SEQ ID NO: 11740 - DNA, 403 bp, Bos taurus
  Clone ID: 50-LIB34-019-Q1-E1-E10
agtgaccacactgtgacagagatcctggaaggtctcaagttcaacctcacagagacccccgagacagaaatccaccagggcttccagcacctcctgcagacgttcaatcagcccagcaaccagctgcagctgagcgtgggcaacgccatgtttgtgtcagaggagctgaagctgctggacaaattcaggaaagatgccgaggctttttacgcctctgaggttttatccactaacttcaaggattctgaagctgccgtaaagcttatcaatgaatatgtgaagaataaaactcatggaaaaattgagaagctcttcaatgatcttgacgtgctcacaaatttaatcttgttgaattagatcttcgttaaagcccagtgggagacgccatttaatcccaaccata

SEQ ID NO: 11741 - DNA, 333 bp, Bos taurus
  Clone ID: 50-LIB34-020-Q1-E2-E6
acaaaattcacagcaaaagtccacattatgtcagctttctcatattgagagctctgctatgccactgttgaatttttcccaagattttttcttcccctctcaaactctgcgtccttggacagatttggcaatagctttgtaagtgatgtggacataatcgcctacaataatgaaaaacctaccaggaatttttttatttttcatttccccttatgcatacctagtctttttcccccgaggcagatcattctgagtgtgcgagtgtgtgtgcacatgttacaaagacaactaccatgttaataaaatattcaatttgaaaaactaaacctaaaa

SEQ ID NO: 11742 - DNA, 338 bp, Bos taurus
  Clone ID: 50-LIB34-021-Q1-E1-E6
cggacacttgggcgccagcctgcggtccgtgacggccttgcctcagccccgggcaccggcgctgcaggccggcagctgggagtcccgcgcccctcggacggccgcgagacgcggaaatctttctaggaacagtgagaaagacagaataaccccttgggctgccgagcgctgctgccagcatgcccaagagaaaggcaaaaggcgatgctacaggtgacaaagggaaggtgaaggatgagccacagatgagatcagcacggttgtctgctaaacctgcccttcgaaaaccggagcccaggccaaaaagagcccctgcaaagaagggagagaagctggcc

SEQ ID NO: 11743 - DNA, 435 bp, Bos taurus
  Clone ID: 50-LIB34-022-Q1-E1-E10
gcgcatcctgcttgcggtcaatgggaaagtcttcgacgtgaccaaaggcagcaagttctacggcccggcgggtccatatggaatatttgctggtagggatgcctccagaggactggcaacattttgcctagataaagatgcacttaaagatgaatatgatgatctctcagatttgaatgctgtacaaatggagagtgttcgagaatgggaaatgcagtttaaagaaaaatatgattatgtaggcagactcctaaaaccaggggaagaaccgtcagaatatacagatgaagaagataccaaggatcacaataaacaggattgaactttgtaaacaaccaaagtcaggggccttcagaactgcaattcttactccctttcacagaatgtcgagcatctttgggtttggttcagctgctgcaaaaaacattcaaccga

SEQ ID NO: 11744 - DNA, 347 bp, Bos taurus
  Clone ID: 50-LIB34-023-Q1-E1-E6
ggattggagagtaaatcagttctattcagttaagtttagtcgctcagtcgtgtccgactctttgcgaccccatgaatcacagcacgccaggcctccctgtccatcaccaagtcccggagttcacccagactcacatccatccagtcaatgatgccatccagccatctcatcccctgttgtccccttctcctcctgcccccagtccctcccagcatcagagtcttttccaatgagtcaactcttcgcatgaggtggtcaaagtctggagttgcagctttagcatcattccttccacagaaatcccagggctgatctccttcagaatgaagtggttggatcgccttgcc

SEQ ID NO: 11745 - DNA, 328 bp, Bos taurus
  Clone ID: 50-LIB34-024-Q1-E1-E10
agaatgagtcttataaggtcctggctgctgtatacaaggccctgaatgaccatcacgtttacttggagggcaccctgttgaagcccaacatggtgactgctggacatgggggcaccaagaagtatactccagagcaagtgggaatggccacagttacagctctccaccgtactgttcctgcagctgttcctggcatctgctttttgtctggtggcatgagtgaagaggatgctactctcaacctcaatgctatcaacctttgcccgcgaccaaagccctggaaactaagtttctcttagggacgggccgtccaggccagttcactggc

SEQ ID NO: 11746 - DNA, 415 bp, Bos taurus
  Clone ID: 50-LIB34-024-Q1-E1-E6
gtgacatgaataatgctgtgaagggggcgctgatggccaacttccttactcaaggcgaggtttgttgtaatggtacaagggtatttgtgcaaaaggaaattcttgatcaatttacagaggaagtggtgaaacagacgcaaaggataaaaattggagatccccttctggaagatacaaggatgggtcccctcatcaaccgaccacatctggagcgagtccttgggtttgttaaagtggcaaaggagcagggtgctaaagtgttatgtggtggagacgtctttgtacctgaagaccccaaattaaaggatgggtattacatgagaccttgtgtgttaactaattgccgagatgaacatacctgtgtaaaagaaagaaatctttggaccagttatgtccattttatcatttgacactg

SEQ ID NO: 11747 - DNA, 388 bp, Bos taurus
  Clone ID: 50-LIB34-025-Q1-E1-E6
gaaaaccaccgttaaacctaagccaaaatgggaaaggagaagacccacatcaacatcgttgtcattgggcacgtagattcagggaagtctaccacgactggccatctgatctataaatgtggcgggatcgacaagagaacaattgaaaagttcgagaaggaggctgccgagatgggaaagggctccttcaaatatgcctgggtcttggacaaacttaaagctgaacgtgagcgtggtatcaccattgatatctccctgtggaaatttgagaccagcaagtactatgttaccatcattgatgccccaggacacagagacttcatcaaaaacatgattacaggcacatcccaggctgactgtgctgtcctgatcgttgctgctggtgttg

SEQ ID NO: 11748 - DNA, 413 bp, Bos taurus
  Clone ID: 50-LIB34-026-Q1-E1-E6
tttatagccaattcccccacccccacccccatccccatcatgggcatcagcttcatgaaaatgctcatctttcagagtctccaaaaccagacacaccagatacccctgagaatccccctccttcaggtcttcatcaccaccaccacaggcacaagggtccccaaagacagggtcactcagataactgtgatacaccagtaggaagtgaaagtttacaaccttctcttccacaaaagaagctctgacgaaagagatgcataaatcagttactctgacagtttcccaaagattcagaatctgctttgagtagctgctgttgccactgtcgacatctggtatttgaaaaaacagggtctgcaatcacctgacagtgtacagaaaagctcgcctctttgtgtagctgacagggcctt

SEQ ID NO: 11749 - DNA, 337 bp, Bos taurus
  Clone ID: 50-LIB34-027-Q1-E1-E6
ccgcggctgcctggctgcctggccctggctgccctgttcagcctcgtgcacagccagcatgtgttcctggcccatcagcaagcatcctcgctgctccagagggcccgccgtgccaacaagggcttcctggaggaggtgcggaagggcaacctggagcgagagtgcctggaggagccatgcagccgcgaggaggccttcgaggccctggagtctctcagtgccacggatgcgttctgggccaagtacacagcttgtgagtcagcgagaaatcctcgagaaaagctcaatgaatgtctggaaggaaactgcgctgaaggtgtggggatgaactaccgag

SEQ ID NO: 11750 - DNA, 355 bp, Bos taurus
  Clone ID: 50-LIB34-028-Q1-E1-E10
ggcggccatggctcccaacgtgcctgcggccgaaccggtcccggagtctcctaaaggcatccgggccgtgctcttagggccgcccggaaccggcaagggtacccaggcaggcaaattgactaaatacttctgtgtctgccatttggctaccggagatatgctgagggccatggtggcttccggctcacagctgggaaagaagctgaacgcgactatggataccgggaagctggtgactgatgaaatggccttggagctcattgacaagaatttggagacctctccatgcaaaaatggctttcttctggatggcttccctccgaccgtgaagcacgcagaaattcatgataacctc

SEQ ID NO: 11751 - DNA, 385 bp, Bos taurus
  Clone ID: 50-LIB34-028-Q1-E1-E6
gcattgacctggtgattaacctccccaataacaacactaaatttgtccacgataattatgtgattcggaggacagctgttgacagtggaattgctctcctcactaatttccaggtgaccaaactttttgctgaagctgtgaagaaagctcgcaatgtggactccaagagtctcttccactacaggcagtacagagctgggaaagaactatagagaaatagagacacgctgtctccattcttaaatcaacctaagccactctttatctaaaggaactgatttgcagctttcttttctagagacaaatattgataccaaactttatttcagtatacttaggtgtgccttaatattctttctttcacaattaaattgttgtcagtcac

SEQ ID NO: 11752 - DNA, 420 bp, Bos taurus
  Clone ID: 50-LIB34-029-Q1-E1-E6
gatcaacctaagcagggtgctgagactgttcaagaactcttagaggtggccaaagactcaatccctccaagtcactggaagagaacgccagtggtcctgaaggcaacagcggggctgcgcttactgccagaagagaaggctgaggcgctgctctttgaggtaaaagagatcttcaagaaatcacctttcctggtaccagatgacagtgttagcatcatggatggatcctatgaaggcatattagcttgggttactgtgaattttctgacaggtcagctgcacggccacaaccaggagactgtggggaccctggacctgggaggggcctccacccaaatcacgttcctgcctcagtttgagaaaaccctggaacaaacccctagggactacctcacttcctttgagatgtttaacagcact

SEQ ID NO: 11753 - DNA, 223 bp, Bos taurus
  Clone ID: 50-LIB34-030-Q1-E1-E6
catgcctttcatgaacttcctaacggaggatggctttgaaaagagcccagaggagctccgtgccatgttcgaggccaagaaagtggacctcacaaagcccctcatcgccacatgccggaagggtgtcaccgcctgccacattgccctggctgcttacctctgtggcaagcccgatgtggccatctacgatggctcctggtttgagttgttccaccgggccccc

SEQ ID NO: 11754 - DNA, 421 bp, Bos taurus
  Clone ID: 50-LIB34-031-Q1-E1-E6
caaccttcttcgacccggcaggaggatgagaccctattctatagcaacacttattctgattctttggacaccccgaagtctatattttaatcttacctgggtttggaataatctctcatatcgtgacctactactcatgaaaaatagaaccattcggatatatgggaatagtttgggctataatgtcaatcggatttctaggtttcatcgtatgagcccaccatatattcactgtcggaatagacgtcgatacacgagcctacttcacatcagccactataattattgctattccaagcggggtaaaagtcttcagctgattggcaacacttcatggaggtaatatcaaatggtctcctgctataatgtgagccctatgctttattttcgtacttacagtacggggtttaactggaattgt

SEQ ID NO: 11755 - DNA, 416 bp, Bos taurus
  Clone ID: 50-LIB34-032-Q1-E1-E10
tggctacccaagaacttgtactttggatttttcaatttcttttgaatttcgctcacttctacactctcagcttgccacgttgtttttcgatgaagttgtaaagcagatggtaactgcctttgaaagaagagcgtgtaagctgtatggtccagaaacaaacatacctcgggaactgatgcttcatgaagttcatcacacgtaaagaaaaaaggaaatggtcacctacttgtatctagtttattcacttttaggaagtgctttcatcatttgctttcagaagtcagaaagcatttgtcaaacccagctttgattataaacccatactgttgaaaatttgcacttggaatatggaaccacatgtacatagaattcaatcaagtataattcagagtagtatgtatattagcatatttaca

SEQ ID NO: 11756 - DNA, 407 bp, Bos taurus
  Clone ID: 50-LIB34-032-Q1-E1-E6
gcggcggctctggatccactgcccacatcccgctctcgcaggcagacatgagggcagagagaacttccttcctcctggccctggggctcctggtggctgggatccgcagtgtccactgcctcccagagaatgtggtggtgaaggaccagcacagaagggtggatggccatacgttagcctccagcaacaccgacttcgccttcagcctctacaagcaattggctttgaagaaccccaataagaatgtcatcttatccccgctgagtgtctccatagccttggccttcctgtctctgggggcccgtggctccaacctgacagagattctggaaagtctcaagttcaacctcacagagatccaggagagagacatacaccatagctttcagcacctcctgcaggcgctc

SEQ ID NO: 11757 - DNA, 334 bp, Bos taurus
  Clone ID: 50-LIB34-033-Q1-E1-E6
gcaactctttattggctacttatcccttttggccaagttatcttgaagggtctaaagggtttattgagaaagaactcttattgtcgtcatactgtgttctcgtcagtgggttgtaacagcttttggatgcaaattttcctcagcatcctttcgcactcagctttttacaggtaggtagtgcctaagaaaagttagaggactaaaggccaagtccttttacatttcctccaactgaaaggtaagtgaaaatgttccttttgtggtacgaccaactgttttacggacacttcctaaagcagatgggcctgggaagaaatttcggcccttgtgttca

SEQ ID NO: 11758 - DNA, 286 bp, Bos taurus
  Clone ID: 50-LIB34-034-Q1-E1-E10
aacctggctcgcatggaactgttcctgctcttggacgccatcctgcaacactttaacttaaagtcacttgttgaccccaacgatatccacctcagccccattgcaattgggtttggcaatatcccgccccgttacaaactctgtctcactccccgctcaaaagtgtaaggtgcaaacgccttgaaaccccgagcacccctgcatcccctctgcgatgactctacaagcccaggctccagacggaacgacctgtgccaaagacactgctttccaggccacgttcctc

SEQ ID NO: 11759 - DNA, 429 bp, Bos taurus
  Clone ID: 50-LIB34-035-Q1-E1-E6
ggcggcggcttcggattcactgcccacatcccgctctcgcaggcagacatgagggcagagagaatgtcccccctcctggctctggggctcctggtgtctgggctctgctccagggtccactgcctcccagagaatgtgaccccagaagaacggcacaaagggacgtctgtggatggccactcattagcctcaagcaacactgacttcgccttcagcctctacaagcagttggctttgaagaaccccaataagaatgtcatcttctcccctctgagcatctccatagccttggccttcctgtccctgggggctcgtggccccactgtgacagagatcctggagggtctcaagttcaacctcacagagactcccgagagagaaatccaccaaggtttccagcacctcctgcagatgctcagtcgacccagc

SEQ ID NO: 11760 - DNA, 402 bp, Bos taurus
  Clone ID: 50-LIB34-036-Q1-E1-E10
actggagggtgaccgcctcaccaaatttctgaacacagccaaagaaaagaaccgctgggaggaacccaaccagaagctctacaatgtggaggccacgtcctacgccctcttggctctgctggcacgcaaagactacgacactacgcctcctgtcgtgcgctggctcaacgagcagagatactatggaggtggttatggctccacgcaggccactttcatggtgttccaagccttggcccaataccagaaggatgttcctgatcacaaggagctgaacctggatgtgtccatccaactgcccagccgcaactctgcggtcaggcatcgtatcctctgggaatctgccagcctcctgcgctcagaagagactaaggaaaatgagcgtttcacagtaaaagctga

SEQ ID NO: 11761 - DNA, 414 bp, Bos taurus
  Clone ID: 50-LIB34-036-Q1-E1-E6
tacttatacccctaacctggttatcaaaaaataatataatttgggttaactccacagcacacagccttctaattagctttacaagcctcctcctcataaaccagtttggcgacaacagccttaatttttcactactatttttctccgactccctatccactccactactaattttaaccatatggctcctccctctaatactaatagctagccaacatcatctatcaaaagaaaacctaacccgaaaaaaactatttattactatgctgatctcactacaactattcctaattataacctttaccgccatggaactaatcttattttatattctatttgaagcaacactagtcccaacactcattattattacccgatgaggaaaccaaacagaacgcctaaacgccggactct

SEQ ID NO: 11762 - DNA, 407 bp, Bos taurus
  Clone ID: 50-LIB34-037-Q1-E1-E10
cagcgaggaagatcaggctgctgaacttcgcgcttatttgaagtctaaaggagctgaaatttcagaagagaattcagaaggtggacttcatgtagatttagctcagattattgaagcctgcgatgtatgtctgaaggaagatgataaagatgttgaaagtgtgatgaacagcgtggtatccctcctgttgatcctggaaccagataagcaagaagctctgattgaaagcctatgtgagaaactggtcaaatttcgggaaggtgaacgtccgtctctgagactgcagttgctaagcaaccttttccatgggatggataagaatactcctgtaagatatacagtgtattgcagcctcattaaagtggcagcatcttgtggggccatccagtatattccaactgagctgg

SEQ ID NO: 11763 - DNA, 359 bp, Bos taurus
  Clone ID: 50-LIB34-037-Q1-E1-E6
acacgcctctgaagtaagtcataatagcggttggccaatctcaagccagaagatgaaggttctgtgggttgccgtggtggtcgcgcttctggcaggatgccacgccgatatggagggagagctggggcccgaggagcccctgactaggcagcatccccgggggaaggacaaccagccttgggagcaggcactgggccgcttctgggattatctgcgctgggtgcagaccctgtctgaccagctgcatgacgagctgctcaacacccaggtcagtcaggaactgactgtactgatgtgaggagactcatgaaagaggtgaaagccttcaatgatgagcttgagggacagctatgccccat

SEQ ID NO: 11764 - DNA, 347 bp, Bos taurus
  Clone ID: 50-LIB34-038-Q1-E1-E10
atgacacccatgccaactcccggcccgttacacccctgcagctatttgacggtcggatgaaccgccggaggagggaggcacccagtgcagctgaggaacaggaatccagggtgcaatacactgtgtgcatctggcgaactgtcaaggtgaggctgtcaagcatggacattgccgaaatcaccctcctgagtggattccacgccctgcaggctgacctggagaagctgagctccctctccgaccgttacgtgagccactttgataccgacggttcccacatcatgctgtacttcgactcagtccccacctctcgggactgtgtgtgctttggacctgtgcacgaggtc

SEQ ID NO: 11765 - DNA, 362 bp, Bos taurus
  Clone ID: 50-LIB34-038-Q1-E1-E6
ctcgcgggtcgacacacgcctctagaatgagtcgatgaattgggcagaggtggaaatgaagaaagtacaaagactggaaacgctggaagtcgtttggcctgtggtgtaattggaattgccaagtaaacattccttgggacatggtcttagtcctagtaactcatctgttatcttgctagttgtagaaatttaatttgataagcatttaacactgtaaacttaaaaagtgtaatatgtgtgactttttaaaaattgctttaagtacctgtaatgagaactgacttatgatcacttgaaagatttgtataattttataaaactcatatgcaattaaaatgtgtttcattcatctctgtattttg

SEQ ID NO: 11766 - DNA, 435 bp, Bos taurus
  Clone ID: 50-LIB34-039-Q1-E1-E6
actcaagttactgtctactgtcgcccaggcagtgaaaggacaaggcaccatctgctgggtggactgtggtgacgcagaaagtagaaaattgtgcaagaagatgaaagttgacctgagtgcaaaggacaaaaaggttgaattattccattaccaggatggtgcatttcatactgaatataaccgagctgtgacggttaagtccatagtggcctttctgaaggatccaaaagggcccccattgtgggaggaagatcctggagccaaagatgttgtccacattgacaatgaaaaggacttccgtcggctcctgaagaaggaagagaagccgatcctgatgatgttttatgctccatggtgcagcgtgtgcaagaggataatgccacacttccagaaggctgcaacccagctgcggggccagttcgtgctggccgggat

SEQ ID NO: 11767 - DNA, 397 bp, Bos taurus
  Clone ID: 50-LIB34-041-Q1-E1-E6
aacagataaagacccaaatagaacaaaccaatgaagagcgcaaattactgctcagctccctagaggaagccaagaagaagaaagaggacgccctgaatgacaccagggattctgaaaacaagctgaaggcgtcccagggggtgtgcaatgagaccatgacagccctttgggaggaatgtaagccctgcctcaagcagacctgcatgaagttctacgcgcgggtgtgcagaagcggatcgggactggttggccaccagcttgaggagttcctaaaccagagctcccccttctacttctggatcaacggtgaccgcatcgattccctgatggagaatgaccgggagcaaagccacgtgatggacgtcatggaggacagcttcaaccgggcgttcaacat

SEQ ID NO: 11768 - DNA, 388 bp, Bos taurus
  Clone ID: 50-LIB34-042-Q1-E1-E6
cctgccccaagccagatgagctaccgttttccacggtggttccactgaaacggacctatgagcccggggagcagatagtcttctcctgccagccgggctacgtgtcccggggagggatccggcggtttacatgcccgctcacaggactctggcccatcaacacgctgaaatgcatgcccagagtatgtccttttgctgggatcttagaaaacggaacggtacgctatacaacgtttgagtatcccaacaccatcggcttttcttgccacacggggttttatctgaaaggagctagttctgcaaaatgcactgacgaagggaagtggagcccagaccttcctgtctgtgcgcctataacctgccctccaccacccatacccaagtttgc

SEQ ID NO: 11769 - DNA, 410 bp, Bos taurus
  Clone ID: 50-LIB34-044-Q1-E1-E10
ggccgacccacgcatccagcttgatatggggtttgaaccccaaataaggaagattgtggaccagatcagacctgacaggcagaccctaatgtggagtgctacttggccaaaataagtatgacagcttgctgaagatttcctgaaagactagattcatatcatcattggtgcactacaactgagtgcgaatcacgacattcgtcagattgtggatgtgtgtcatgacgtagaacacgatgagaagcttagtcgtctaatggaagagatcatgactgaaaaggacaacaaaaccattgtttttgttgaaaccaccagaagatgtgatgaactcacgagaacaatcaggagagatgggtggcctgccatgggtatccatggtgacaagagtcaacaggaacgtgactgggttc

SEQ ID NO: 11770 - DNA, 252 bp, Bos taurus
  Clone ID: 50-LIB34-044-Q1-E1-E6
agacccatactattatccacaaaagtccggccactatgctgaaagctcaactggattctgccaagaatccggccagccagatcacaaacgtggctgactgccatcaaagactgagactactaaagcctgagtacagacatcacctgccacacagacactcaggtgtgccactacgcagggattagtagaaataacattaacagcattgacagtaacgcgcctgatctatatatttctcacagctaacttagt

SEQ ID NO: 11771 - DNA, 226 bp, Bos taurus
  Clone ID: 50-LIB34-046-Q1-E1-E6
tgtatctctgaatcatttcggacctgaaggaagtgtcttccaatgggaaaaatggcgaagatgtttagtttcatccttgtcaccactgctctggtaatgggcaagggaagctcggctctggagaactgcctccaagagcacgcgcggctcacagcccaagtgtacgtgctggaaacccgggtcaagcagcaacaagtcaagatctcgcagcttttgcatgagaaac

SEQ ID NO: 11772 - DNA, 441 bp, Bos taurus
  unsure (323): unsure at all n locations; Clone ID: 50-LIB34-047-Q1-E1-E6
gcggaggcgtggggcttttaggttctgtagctggtcgcaatggcaagcaaaggagggtacatcgtgcttgggctcctgttcctggctgtcctctgccaactcggtcacagcctgcagtgctacagctgtattaaccaagttaactgcacttcaatcgtcaattgttcacataatcaagatgcttgtctcttcgttaaggctgtgccgctaaaattttaccaccagtgttggaagtacgaagaatgcagttttgagttcattgcaaaagccttaggggagaaggagctccactatgactgctgccagaagaacctgtgtaacanaagtggcgggaggagcgtatccgagaagatactgctgctgctcaccctgctgctggaggcagtctgccacttttatcgctaaatctatgccaggagggcttctcctgaatatcctgtt

SEQ ID NO: 11773 - DNA, 338 bp, Bos taurus
  Clone ID: 50-LIB34-048-Q1-E1-E6
agctcagccagcgctcccgccagccttcccgcagcagacacagaccctccgagctgagacccatggcccgagccgcgaccgccgccgccccccggctcctccgcacagcgatgctgctcctgctcctggtggccgccggccggcgcgcagcaggggcgcccgtggtcaacgaactgcgctgccattgcctgcaaactttgcaggggattcacctcaggagcatacatcgcgtgaatgtgatgccccgcggtccccactgtggccaacccgatgtcatagccactcttagcaatggtcaggaaccttgtctcaagcctgaagctcccatggttatgaaa

SEQ ID NO: 11774 - DNA, 205 bp, Bos taurus
  Clone ID: 50-LIB34-049-Q1-E1-E10
cccacacagtctccaccctgaggccatctgagatctcagtaccccaagtccacctgcctgtccatcctactagctccttgggtccagcagcctcccagggctgcccccaaaggtcacttacaagaacagcattctcagtgccctcccaccccaccccagacctggcccaccccaatgtgctggccttccaataaagctggatgag

SEQ ID NO: 11775 - DNA, 425 bp, Bos taurus
  Clone ID: 50-LIB34-049-Q1-E1-E6
aagcggctctggatccactgcccacaccccgctctcgcaggcagacatgaggacagagagaacttccttcctcctggctctggggctcctggtgtctgggttctgctccagggtccactgcctcccagagaatgtgaccccagaagaacagcacaaagggacgtctgtggatggtcactcattatcctccagcaacactgacttcgccttcagcctctacaagcagttggctttgaaggaccccaataataatgtcatcttctcccctctgagcatctccataaccttggccatcctgtcactgggggctcatgaccacactgtgacagagatcctggaatgtctcaagttcaacctcacagagacccccgagacattgatccaccagggcttccagcacctcctgcagaagttcaatcatccca

SEQ ID NO: 11776 - DNA, 425 bp, Bos taurus
  Clone ID: 50-LIB34-050-Q1-E1-E6
gactcttccatccccagaccagccaagcctgtgagtgacaccccagacagaggaaccagagccatgcggagtctcagcggactgctgttgttactgactgcctgcctggcagtaaacgccagctccgtgcccacattgcccgatgacattcaagtgcaggagaacttcgacctgtctaggatctatgggaagtggttcaatgtggccgtgggctccacctgcccatggctgaagaggttcaaggagaagatgaccatgagcacagtggtgttgaaagcggggccgacgagcaaggagatcagcgtcaccaacactcacaggcggaaaggtgtctgtgaatcgatctctggtacttatgagaaaacaagcactgatgggaagtttctctatcacaaagccaagtggaatatgcacatggagtccta

SEQ ID NO: 11777 - DNA, 231 bp, Bos taurus
  Clone ID: 50-LIB34-051-Q1-E1-E6
ggaatctgccaccagtcccacacagtctccaccctgaggctaccaaggccgaggagggatcccttctggacaagatgcagggctatgtgaaggaggccaccaagaccgccaaggatgccctgagcagcgttcaggagtcccaggtggcccagcaggccagagactggatgactgagagcttcagctccctgaaagactactggagctcgttcaagggcaagttcactgacc

SEQ ID NO: 11778 - DNA, 233 bp, Bos taurus
  Clone ID: 50-LIB34-054-Q1-E1-E6
cctcagaccacactatctccactcgctcagacctgtggaagattagcgaccatgatttccaatgggataggaaccgtcaccgctggaaaaaggagtatatgtcttctccctttgctgcttattggcctctggggctgtgtgacctgtcatcggagccctgtggaagacgtctgcacagccaaacctcgggacattcctgtgaatcccatgtgtatttaccgttcctcagagaa

SEQ ID NO: 11779 - DNA, 351 bp, Bos taurus
  Clone ID: 50-LIB34-055-Q1-E1-E6
ggagctgaacctggatgtgtccatccaactgcccagccgcaactctgcggtcaggcatcgtatcctctgggaatctgccagcctcctgcgctcagaagagactaaggaaaatgagcgtttcacagtaaaagctgaagggaaaggacaaggcaccttgtcggtagtgaccgtgtaccatgccaagctcaaaggcaaagtctcctgcaaaaagttcgacctccgggtttccatacgcccagcccccgaaacagtcaagaagcctcaggacgccaaaggttccatgatccttgacatctgtaccaagtacctgggagaccaggatgccactatgtccatcctggatatatccat

SEQ ID NO: 11780 - DNA, 288 bp, Bos taurus
  Clone ID: 50-LIB34-056-Q1-E1-E10
aatcaagtgcccatggacaaagcctgggacaagggtcatttggttcctttgactctagtcgtcaatatatctaatacgcgtctattgcagaagcatatgattcatatatcgcatatcacttaacttcagaagcagtatacatttttgcaagtaatggatttagtacaggatatcgtgctcgagaattaatgagagataccagtatctagcacatttatcacggtgacaaactagttcaaacagcttattataacccatgaacacattgagacgtatcaagactaacca

SEQ ID NO: 11781 - DNA, 373 bp, Bos taurus
  Clone ID: 50-LIB34-056-Q1-E1-E6
cagacaagtgtgcctgctccaaccacgaaccatacttcggctactcaggggcctttaaatgtctgatggagggcgctggggatgtggcctttgtcaagcactcaacggtattcgacaacctgcctaacccagaagacaggaaaaactatgagctgctctgcggggacaacacccggaagtctgtagataattaccaagaatgctacttggcaatggttccttcccatgcggttgtggctcgaactgtgggcggcaaggaggatgtgatctgggaacttctcaatcacgcccaggaacattttggcaaagataaaccagacaatttccagcttttccaatcccctcatgggaacgacctgctgtttaaggactc

SEQ ID NO: 11782 - DNA, 221 bp, Bos taurus
  Clone ID: 50-LIB34-057-Q1-E1-E6
cccacccactaataaaaattgtaaacaatgcattcatcgaccttccagccccatcaaacatttcatcatgatgaaatttcggttccctcctgggaatctgcctaatcctacaaatcctcacaggcctattcctagcaatacactacacatccgacacaacaacagcattctcctctgttacccatatctgccgagacgtgaactacggctgaatcatccga

SEQ ID NO: 11783 - DNA, 233 bp, Bos taurus
  Clone ID: 50-LIB34-058-Q1-E1-E6
acaaacctctagacttgatcgaagaaagtgaatcgataatggcactctccatcacgcggggccttctgctgctggcagccctgtgctgcctggcccccatctccctggctggagttctccaaggacacgctgtccaagagacagatgatacatcccaccaggaagcagcgtgccacaagattgcccccaacctggccaactttgccttcagcatataccaccatttggctcat

SEQ ID NO: 11784 - DNA, 234 bp, Bos taurus
  Clone ID: 50-LIB34-060-Q1-E1-E6
cttgtttttgcacatgtttttcctctagtttctttgttcatagcccagtaggctttgttacttttgaggtaagttaagtaagtcgatttggttattccccatctttcttccctaatctacagtcaggagacagcatcagggtttttaagaagactttttcttttttttttttgactaggagaaccaaatccaggagccaatgtctaggttagtttgtgtcttgtctgagtttat

SEQ ID NO: 11785 - DNA, 419 bp, Bos taurus
  Clone ID: 50-LIB34-061-Q1-E1-E6
ccctgatctgcagaagccctggtgaggatcatgtcgctgtttacatcacttccttttcttctcctgactgcggtgacagcatcttgtgcagacacagaaacagagaactgtgagaacatccggaagacctgccccgtgattgcctgtggtcctccgggcatcaatggcatcccaggcaaagatgggcgtgatggtgccaagggagaaaagggagaaccaggtcaaggactcagaggctcgcagggcccccctggaaagatggggcctcaaggaacgccagggatccctgggataccaggaccaataggccaaaaaggagaccctggagaaaatatgggtgactatattcgcctggctaccttaaaaaggagcaattctacaatctgaattgaaccagatcaaaaactggctaatcttct

SEQ ID NO: 11786 - DNA, 186 bp, Bos taurus
  Clone ID: 50-LIB34-062-Q1-E1-E6
gctccactctctgctgcctccactggtcaaccgtcacgatttccgacaaaggctccgtagttcaggcctacattgagggcctgttcacatcctgtatcctcatatggtctaaatgagcatagctatgatcgtaattgcctacttagcttacatccggtaaatacaagtctttgaagtacccagtaa

SEQ ID NO: 11787 - DNA, 216 bp, Bos taurus
  Clone ID: 50-LIB34-063-Q1-E1-E10
agccatggtgacctacttgaatgcccagatgacagggcagatcttgcaaattacatatgtgataatcaagatacaatctccagtaaactgaaggaatgctgtgataagcctttgttggaaaaatcccactgcattgctgaggtagaaaaagatgccatacctgaaaacctgcccccattaactgctgactttgctgaagataaggatgtttgcaaa

SEQ ID NO: 11788 - DNA, 213 bp, Bos taurus
  Clone ID: 50-LIB34-065-Q1-E1-E6
gcgagaggcacgccttcattctgaaggatgtacaggcgctgagccaggtcttcgagcacatgctggatgtctcccagctcacagaccccatctgtggggtagggaacatgtctgccaatgcctctgcccaggagaggacaccctggcacgtcactattaagcccaagagccaggagacctgccggggggccctcatctccgaccagtgggtcc

SEQ ID NO: 11789 - DNA, 260 bp, Bos taurus
  Clone ID: 50-LIB34-066-Q1-E1-E6
ggtttctgtaggtgtgtaaagcagttgggcactcgcaaacgaacatatcactgttctgtgggttgccgtggcggacgctcttctggcaggctgccatgtggtcatcgttggatagcttgggcacgatgagccccttacttctgaacatccccggcggaaaggcagacaaccttgtgagcacgctttgggtcgcttctgggattacctacgctggatgtagacactgtctgaccaagtgcgcgacgagctgctcaacattc

SEQ ID NO: 11790 - DNA, 206 bp, Bos taurus
  Clone ID: 50-LIB34-067-Q1-E1-E10
agatgagactgtgaagaataatatcccaactaagcttcgtgtgctccgttcaattctggagaatttgagaagcaaaatacaaaaattagaatcggatgtctcaactcagatggaatactgccgcaccccgtgtactgttacttgcaatattcctgtggtgtctggcaaagaatgtgaggaaatcatcaggaatggaggtgaaacat

SEQ ID NO: 11791 - DNA, 232 bp, Bos taurus
  Clone ID: 50-LIB34-067-Q1-E1-E6
ggagcctggaaggcagagcaactggacctcgcctaagctgtgtctctgactcatttctgactttaggcaagttcttccaatgggaaaaatggcgaagatgtttagtttcatccttgtcaccactgctctggtaatgggcaggggaagctcggctctggagaactgcctccaggagcaggcgcggctcagagcccaagtgtacctgctggagacccgggtcaagcagcaacaa

SEQ ID NO: 11792 - DNA, 256 bp, Bos taurus
  unsure (201),(237): unsure at all n locations; Clone ID: 50-LIB34-069-Q1-E1-E10
tcgacacacgcgtccgatgctgccaagctgaagataaaggtgcctgcctgctaccaaagattgaaactatgagagaaaaagtactgacttcatctgccagacagagactcaggtgtgccagtattcaaaaatttggagaaagagctttaaaagcatggtcagtagctcgcctgagccagaaatttcccaaggctgagtttngtagaagttaccaaagctagtgacaagatctcacanaaagtccaacaagggaatg

SEQ ID NO: 11793 - DNA, 215 bp, Bos taurus
  Clone ID: 50-LIB34-069-Q1-E1-E6
tgtttcaactcaaacagccttagcctaaacacgacacaaccacaggcatctcagcctaccctgagagtaagaggaaaaaagagaaatgaaaactcagagcttattcatctgttttccttttctgttggtgttaaaccaacactctcactaaagaacgtaaatttctttaaatattttgcttcttttgtttgtgctacaattaataaaaaatgaat

SEQ ID NO: 11794 - DNA, 226 bp, Bos taurus
  Clone ID: 50-LIB34-070-Q1-E1-E6
cttgctgaagttgcttgtggtgatgatcggaagcaaacgatagataattcccaaggagcttaccaagaggctttcgatataagcaagaaagagatgcaacccacacaccccatccggctggggctggctcttaacttttctgtgttctactatgagatcctcaataacccggaactggcctgcacactggctaaaacggcttttgatgaggctattgcagaactcg

SEQ ID NO: 11795 - DNA, 389 bp, Bos taurus
  unsure (335): unsure at all n locations; Clone ID: 50-LIB34-071-Q1-E1-E6
agtggtgttccagccagaacacatcagctttgaggaactgctcaaggtcttctgggagaatcatgacccgacccaaggcatgcgccaaggcaatgaccacggctctcagtaccgctcagccatctacccgacctctgccgagcacgtgggggcagccctgaagtccaaggaggactaccagaaggttctgtcggagcatggtttcggcctgatcaccacggacatccgggagggacaaaccttttactatgcggaagattaccaccagcagtacctgagcaaggaccccgacgggtactgcggcctcgggggcaccggagtgtcttgtcccctgngtattaaaaagtaatttctccccatgtggtcagccctcgaggtcacagcaaaaa

SEQ ID NO: 11796 - DNA, 414 bp, Bos taurus
  Clone ID: 50-LIB34-073-Q1-E1-E6
agggatttttgtctcagaaaacatgcaatgtaatcattcccgtgttttccaatcccagttcacgttctccctttgtctggccagacacaaattgggactggatatctcagtcacgctggcttgctccaaacggaacttattggatatgtggttcttacctatgggcatggctcccccctggttggatagggagatgcaccctgggtctagcctttactcatggctttatattttcagagcttccagaaaagcctgctaatttaccctaccttaaaactcggtgggcaagttctgtatttcattggtatgattatttggctgcagcgtttgttccctctttgggaactacagatgttatgttacgagtggatgctttgactaattttactcaacaggcattacaagattctcaaa

SEQ ID NO: 11797 - DNA, 403 bp, Bos taurus
  Clone ID: 50-LIB34-074-Q1-E1-E6
acgagcggccgcccgcgatctagaactagtctgcaagccctcacgtatccgctgcactggttcctgctggagcagcctgagatccaggtggctcatttcccctttaagaacaacatgagcttcgtggtcctgatgcccacccgctttgagtggaacgcgtcccaggtgctagccaacctgacctgggacatcttgcaccagccctcgctgtcggagaggcccaccaaggtccagctgcctaagctgcatctcaaataccaactggacctggtggccaccctcagccagctgggcctgcaggagttattccaggccccggacctacgtgggatctccgatgagaggctggtggtctccagcgtgcagcatcagtcggcactagagctcagcgaggccggcgtgc

SEQ ID NO: 11798 - DNA, 422 bp, Bos taurus
  Clone ID: 50-LIB34-075-Q1-E1-E6
acccaaacgtccacgcctccgtactgcttgtgagcgtgctaagcgcactctctcttccagcacccaggccagtattgagattgattccctctatgaaggaatcgacttctatacctctattagccgtgcccgatttgaagaattgaatgctgacttgttccgtggcaccctggaccctgtggagaaagcccttagggatgccaaactggacaagtctcagattcatgatattgtcttggttggtggctcaacccgtatccccaagattcagaaacttctccaggacttcttcaacgggaaagaactgaataagagcatcaaccctgaatgaggctgttgcatatggtgcagctgtcaaggcagccattttgtctggagacaaatctgaaaatgttcaagacttgctgctgttggatgtcact

SEQ ID NO: 11799 - DNA, 412 bp, Bos taurus
  Clone ID: 50-LIB34-076-Q1-E1-E10
cgacccacacgtcaggtgggtgacttttatttctcttctccttctcttcagctctgcttattccaggggtgtgtttcgtcgagatacacacaagagtgagattgctcatcggtttaaagatgtgggagaagaacattttaaaggcctggtactgattgccttttctcagtatctccagcagtgtccatttgatgagcatgtaaaattagtgaacgaactaactgagtttgcaaaaacatgtgttgctgatgagtcccatgccggctgtgaaaagtcacttcacactctctttggagatgaattgtgtaaagttgcatcccttcgtgaaacctatggtgacatggctgactgctgtgagaaacaagagcctgaaagaaatgaatgcttcctgagccacaaagatgatagccca

SEQ ID NO: 11800 - DNA, 475 bp, Bos taurus
  Clone ID: 50-LIB34-076-Q1-E1-E6
ccgggtggacccacgagatccggccatgatctatcagatttatgaaggtacagcacaaattcaaaggcttattatagcccgtgaacacattggcaggtataagaagtaaccagatcaccgtgttaataatcgttgagtaattagaatatgatctactatttaaactccaggaaagaataagggctttaaggttttttttccagcgaaaattttaacataggttctcatgtactaaacctgtataactgattctaatagtattaggttggccaaaaagtttgtttgggtttttttataatgttatgaaggagcctggatgaacttctgggccaacccaagttttctacttttgtttaactttatgacttgccttttctataacacatttggttttattaaagttaagtagtttcctttagttccagtggtactgaattacattagcctaaaaaatacgtttggtttggtgtttaac

SEQ ID NO: 11801 - DNA, 454 bp, Bos taurus
  unsure (271): unsure at all n locations; Clone ID: 50-LIB34-077-Q1-E1-E6
ggaagactgttaaatcatgaaattaatcaccatccttttcctttgttccaggctgctaccaagtttaacccaagagtcttctcaagaaatcgactgcaacaaccaggatgtatttaaagctgtggacgctgctctgacaaaatacaacagtgaaaacaagagtggcaaccagtttgtattgtaccgcataaccgaggttgccagaatggataatcctgacacattttattccttgaagtaccaaatcaaggagggcgactgtccttttcanagtaacaaaacttggcaagactgtgactacaaggactctgcacaagctgccacaggagagtgcacagcgaccgtggccaagagagggaatatgaagttctccgtggctatccagacctgcctgatcactccagccgagggccccgtggtgacagcccagtatgagtgccttggctgtgtgcat

SEQ ID NO: 11802 - DNA, 453 bp, Bos taurus
  Clone ID: 50-LIB34-078-Q1-E1-E10
caacaccctatagtaagtcgtattaccagtgggggcaagatgaaggtcatcggggcgccccgagaggaagcccggcctgtgccccagggctcctgccagagtgagctgcaccgggcgctggagcggctggccgcctcacagagccgcacccacgaagacctttacatcattcccatccccaactgcgaccgcaacggcaacttccaccccaagcagtgccacccggccctggatgggcagcgcggcaagtgctggtgtgtggaccggaagacgggagtgaagcttccggggggcctggagccgaagggggagctggactgccaccagttggctgacagcttccgagagtgagcctgtcagcaggcagggggctcagtgccccctgctgcccccttccctggaggctgcagagctgacctggagcctaggtctgagtcctggctttgcctctgg

SEQ ID NO: 11803 - DNA, 415 bp, Bos taurus
  Clone ID: 50-LIB34-079-Q1-E1-E10
aaccactccaggccgcagagcagccgcccggtgctgctgagcaagatagaggggcaccaggacgccgtcacggccgcgctgcttatccccaaggaggacggagtgatcacggccagcgaggacaggactatccgagtatggctgaaaagagacagcggtcagtactggcccagcatttaccacacaatggcctctccctgctctgctatggcttaccatcatgatagtacacggatatttgtgggccaggataatggagctgtgatggaattccacgtttctgaagattttaataaaatgaactttatcaagacctacccagctcatcagaaccgggtgacggcgatcatcttcagcctggccaccgagtgggtgatcagcactggccacgacaagtgtgtcagttggatgtgca

SEQ ID NO: 11804 - DNA, 422 bp, Bos taurus
  Clone ID: 50-LIB34-080-Q1-E1-E6
agagacacaaacagaacagcaagtgtatgatattgggtttgtattgagctacaagtgccattttggctataagccagagacagatggacctacaactgtgacttgtcagagcaatttggagtggagcccatacatagaatgtaaggaggtatgttgcccagaaccaaacctgaataattatggaagcatcactctacacagaagacctagcactagtactcactgtacctatatcagtggagataagatttcatatgaatgtcatagtaaatatatgtttgatgctttatgtacaaaacatggcacttggagtcctagaacaccagaatgcagaccagattgtaaatcccctcctgtcattgcccatggacaacataaagtagtctctaaattctttacatttgatcaccaagctgtatatg

SEQ ID NO: 11805 - DNA, 424 bp, Bos taurus
  Clone ID: 50-LIB34-082-Q1-E1-E6
ctcttctccttctcttcagctctgcttattccaggggtgtgtttcgtcgagatacacacaagagtgagattgctcatcggtttaaagatttgggagaagaacattttaaaggcctggtactgattgccttttctcagtatctccagcagtgtccatttgatgagcatgtaaaattagtgaacgaactaactgagtttgcaaaaacatgtgttgctgatgagtcccatgccggctgtgaaaagtcacttcacactctctttggagatgaattgtgtaaagttgcatcccttcgtgaaacctatggtgacatggctgactgctgtgagaaacaagagcctgaaagaaatgaatgcttcctgagccacaaagatgatagcccagacctccctaaattgaaaccagaccccaatactttgtgtgatga

SEQ ID NO: 11806 - DNA, 293 bp, Bos taurus
  unsure (15): unsure at all n locations; Clone ID: 50-LIB34-083-Q1-E1-E10
gaagggagttggtanggggagctgaggcagcgagaaggttcctgaagctctcggattctcgcggctgagttagggattcaactgccaccatgtcgagcaaaagagcaaagaccaagaccaccaagaagcgcccccagcgcgcgacctccaacgtgttcgccatgtttgaccagtcccagattcaggagttcaaggaggccttcaacatgatcgaccagaacagggatgggttcattgacaaggaagacttgcatgacatgcttgcttccctgggaaaaaatccaactgatgag

SEQ ID NO: 11807 - DNA, 411 bp, Bos taurus
  Clone ID: 50-LIB34-083-Q1-E1-E6
cagacctgccttggagtctgtgctgagcataaagaatgtgttcagtgccgagccttcaataaaggagagaagaaagacacatgtgctcaggaatgttcacatttcaacattaccaaggttgaaaatcgggacaaattgccccagccaggccaggtggatcccttgtcccactgtaaggagaaggacgttgacgactgctggttctacttcacatactccgtgaatgggaacaatgaggccactgttcatgttgtagagactccagagtgccccactggtccagacattattccaattgtagcaggtgtggttgctggaattgttcttattggccttgcattgctgctgatttggaagcttttaatgatcattcatgacagaagggaatttgccaaatttgagaaggaaaaa

SEQ ID NO: 11808 - DNA, 316 bp, Bos taurus
  Clone ID: 50-LIB34-084-Q1-E1-E6
agatggatgaggcctgtcacgatggcaacatctatgacacgaacacgggcagtactgacatcaatcatggttagcacttcgatcagaagactgatgatgacattgtgtgtagtattgagcacgttgatgtgcacatagagttcaattggctgacctagatagctgtgcataaagtaagtatcgcgcgacaagtggatcgcgacttgttgcagaagagacgccgcagcatcctgcaggccgaggagcagctggatcatctgagctgtgccatgggccatcctagctttgtgatgatcaactccatcaccactcagtg

SEQ ID NO: 11809 - DNA, 389 bp, Bos taurus
  Clone ID: 50-LIB34-085-Q1-E1-E10
agttgggacctccaaccggcctggggcgagatttggaccccgacggatccgagaagaatcggtgctgcttaggaccaccaatcctagcacaggagctgttcccttccagttccttagggttgcagacctaggcgacgtgaatgtcaatctttacaaccttcaggacagctgccgcctgattcgagcggactatcagaaaatcgtagcagccggctgtgttcctctgaccttgggtggagatcatacaatcacctatcctatattgcaagcgatagcagaaaagcatggtcctgtggggctggtgcacgtggacgctcacatggacatggctgacaaggccctcggggagaagctctatcacgggacccccttccgccggtgcgtggatg

SEQ ID NO: 11810 - DNA, 412 bp, Bos taurus
  Clone ID: 50-LIB34-085-Q1-E1-E6
aggttcaggcgcttcgtagaggttggccgggtggcctacgtctcctttgggcctcatgccgggaagctggtcgcgattgtagatgttattgatcagaatagggctttggtggatggaccttgcactcaagtaaggagacaggctatgcctttcaaatgcatgcagctcactgacttcatcctcaagttcccacacagtgcccgccagaagtatgtccggaaagcctgggagaaggcagatatcaatgcaaagtgggcagccacaaggtgggccaagaagattgaagccagagagaagaaagccaagatgacagactttgatcgttacaaagtcatgaaggcaaggaaaatgaggaacagactaatcaagattgaagttaagaaacttcaaaaggcagctctcctgaaagctt

SEQ ID NO: 11811 - DNA, 480 bp, Bos taurus
  Clone ID: 50-LIB34-086-Q1-E1-E6
cgggtggacccacacgtccgcgtattggtgctaaatgtgttgctgttggtgagtctgatggcagcatatggaatccagatggtattgacccaaaggaactggaagacttcaaattgcaacatggaacaatcctgggctttcccaaagcaaagatctatgaagggagcatcttggaggttgactgtgacatactaatccctgctgccagcgagaagcagctgaccaagtccaatgcaccaagagtcaaagccaagatcattgctgaaggtgccaacggaccgacaactccagaagctgataagattttcctagagaggaacattatggttattccagatctctacctgaatgctggaggagtgacagtgtcttactttgagtggctgaagaatctaaatcatgtcagctacggtcgtttgaccttcaaatatgaaagggattctaactaccacttgcttatgtctgttcaagagagtttgg

SEQ ID NO: 11812 - DNA, 418 bp, Bos taurus
  Clone ID: 51-BOVMS1-001-Q1-E1-E12
atggactaatctttctatctttctgatctgtaaatacttaaaaaaaagagtagttttgtatcaacctaaatgagtcgaagttcaaaaataatacatttcagtcttttcataattgttgacctaagaagattacacattttctagtgacatgtacatactgtatatagccggattaacggttataaagttttgtaccatttattttatgacattttacactgtaactattgaaactaacggttggtaggagaaagtttcttatggaacgaataccctgctcaacacttaatcaatctttgtgcctcaacatactgttgatgtctaagtatgcctcagtgggtcgaggaattccccattgaagatgtcctatccaccgaaaaatgctgtgcacatcacctgatatgcaccgatacttatg

SEQ ID NO: 11813 - DNA, 422 bp, Bos taurus
  Clone ID: 51-BOVMS1-001-Q1-E1-E4
acaaccctgaggaataaagggcctgggcactgcctctctgcacgccactgctttgaaatcgggttgcaatgagaaagcatttgtttttccaccaggctcccaagtgtggtcgttttttttcctcctgatgctgaagaaaaaaaaaaaatgtttgcacggattgcttaattaaaaattgcaaacaaaatctcatttgaagttagcattttggtcattgttgtctttgcttggtcactgtactttccaaaaaaatgcaagctatagaataatcagaaacagttattttagcttaacataatagactctgaaatctttttttcccttagagtaaatatatatatatatatatacacacacacacacacacaataaacagcaatgtaaccttaaaacgcatctttctctggatctaagaaattttt

SEQ ID NO: 11814 - DNA, 245 bp, Bos taurus
  Clone ID: 51-BOVMS1-003-Q1-E1-E12
atgcgacgtcaaagctcttctaaagtgtcacctaaattcaattcactggccgtcgttttacaacgtcgtgactgggaaaaccctggcgttacccaacttaatcgccttgcagcacatccccctttcgccagctggcgtaatagcgaaaaggcccgcaccgatcgcccttcccaacagttgcgcagcctgaatggcgaatgggacgcgccctgtatcggggcattaagcgcggcgggtgtggtggt

SEQ ID NO: 11815 - DNA, 383 bp, Bos taurus
  Clone ID: 51-BOVMS1-003-Q1-E1-E4
aattataactggttaaccttttctgagaatagctaaatcactttttaaaatttaaaattcttagatttacatctgagggcgaattgaattgggtaacctgaattccctaggtaaagaaaattagcaaaataaaataaaataaaattaaaaaaaaaattagttacagcatatgatgaaagtataagactccaacagctgccttacaactcattcattccagatagaagacgcatttattgaatgtctgttatgagctatttttctgttaatcatagttatcaatatgccgttcaaactttcttttggtacctagtcagttggacaacatttatgtctgggaaagagaaaaaaatattgttttataagaggaaaaaagtgaatct

SEQ ID NO: 11816 - DNA, 197 bp, Bos taurus
  Clone ID: 51-BOVMS1-004-Q1-E1-E4
atgcaacgtcatagctcttctatagtgtcacctaaattcaattcactggccgtcgttttacaacgtcgtgactgggaaaaccctggcgttacccaacttaatcgccttgcagcaaatccccctttcgccagctggcgtaatagcgaaaaggcccgcaccgatcgcccttcccaacagttgcgcagcctgaatggcga

SEQ ID NO: 11817 - DNA, 217 bp, Bos taurus
  Clone ID: 51-BOVMS1-005-Q1-E1-E4
ccttgaatgcaacttcaaaccccttcaaaagtgtcaccaaaattcaattcaagggccgtcttttaaaaatttcttaactggaaaaaccctggctttacccaacttaacccccttgcaaaaaatccccctttcccaacctggcgtaaaaccaaaaaggcccgaaccgataccccttccaaaaatttgcccaccctaaatggcaaatggaaccccccct

SEQ ID NO: 11818 - DNA, 368 bp, Bos taurus
  Clone ID: 51-BOVMS1-006-Q1-E1-E4
acccgtccgacgcaaagaacgccatcacggtatgcactcatgatgtgcttgcgagctaaataacgagcactgccaccagtgtccacctgcttgcggtttaatgaataatctgtttcaaacggtgaaagagctgcagcaccgcctgtacgaagctgaacagctggccctgataggccggtatcaccagatccagaaactggaagccagcgtacatgaattgtactgagaacttgttactcaacataaacgcactgttgaagctgtcaagggtctacgcaagtacgacagaagagtgtaggagctcacttaccatactgaggaagacttcaataacattctcaggctccacaatttgggggataccctgc

SEQ ID NO: 11819 - DNA, 428 bp, Bos taurus
  Clone ID: 51-BOVMS1-007-Q1-E1-E4
ctgaaagagactaggacgtgatttattaacgaccaacttctgttattgtgtgttaagtttttcatctgtgcatcaaatcacaaagaataaatagatctttttcctttatcagtcccttgggcacaggaggtcctgaacaccttgctctagaatgttgcatcaagagttccaaacatcaaaataaaatattaagaggaaatccccaccctatgactctagtcccttcggtccacggggctggttacctcttttgctaataggaagattaaattactacaaaatggggagaaagctgtctgcctgtgttagacaccgcgagcacgggattgaagacagtacaggctcctgtacagagaattctctcccatctgaactgcgtactgagcgggcaagttggttgtgagttcagtaaaaccctctgatgatgc

SEQ ID NO: 11820 - DNA, 365 bp, Bos taurus
  Clone ID: 51-BOVMS1-008-Q1-E1-E4
atgcgacgtcatagctcttctatagtgtcacctaaattcaattcactggccgtcgttttacaacgtcgtgactgggaaaaccctggcgttacccaacttaatcgccttgcagcacatccccctttcgccagctggcgtaatagcgaagaggcccgcaccgatcgcccttcccaacagttgcgcagcctgaatggcgaatgggacgcgccctgtagcggcgcattaagcgcggcgggtgtggtggttacgcgcagcgtgaccgctacacttgccagcgccctagcgcccgctcctttcgccttcctcgcttcctttctcgccacgttcgccggctttccccgtcaagctctaaatccggggctccc

SEQ ID NO: 11821 - DNA, 280 bp, Bos taurus
  Clone ID: 51-BOVMS1-009-Q1-E1-E12
aatgcaacgtcaaaccccttcaaaagggtcaccaaaattcaattcactggccgtcgttttacaacgtcgtaactggaaaaaccctggcgttaccaaacttaacccccttgcagaaaatccccctttcgcaagctggcgtaataacgaaaaggcccgcaccaatcgcccttcccaaaatttgcccaccctgaatggcaaatggaacgccccctgtaacggggcattaaccccggcggttgtgggggttacccgcactttgaccgcaaaacttgcaaacgcc

SEQ ID NO: 11822 - DNA, 491 bp, Bos taurus
  unsure (203),(344),(473): unsure at all n locations; Clone ID: 51-BOVMS1-009-Q1-E1-E4
ggggcgcccgacgattcaagcctacgatcgccttgaatgcaacgtcaaagctcttctatagtgtcacctaaattcaattcactggccgtcgttttacaacgtcgtgactgggaaaaccctggcgttacccaaattaaatcgccttgcagcacatccccctttcgccagctggcgtaatagcgaagaggcccgcaccgatcgcncttcccaacagttgcgcagcctgaatggcgaatgggacgcgccctgtagcggcgcattaagcgcggcgggtgtggtggttacgcgcagcgtgaccgctacacttgccagcgccctagcgcccgctcctttcgctttcttcncttcctttctcgccacgttcgccggctttcccgtcaagctctaaatcgggggctccctttaaggttccgatttagtgctttacggcacctcgaccccaaaaaacttgattaaggtgatggttcacgtantgggccatcgccctgata

SEQ ID NO: 11823 - DNA, 298 bp, Bos taurus
  Clone ID: 51-BOVMS1-011-Q1-E1-E12
cgtgcatgcgacgtcatacctcttctatagtgtcacctaaattcaattcactggccgtcgttttacaacgtcgtgactgggaaaaccctggcgttacccaacttaatcgccttgcagcacatccccctttcgccagctggcgtaatagcgaagaggcccgcaccgatcgcccttcccaacagttgcgcagcctgaatggcgaatgggacgcgccctgtagcggcgcattaagcgcggcgggtgtggtggttacgcgcagcgtgaccgctacacttgccagcgccctagcgcccgctcc

SEQ ID NO: 11824 - DNA, 408 bp, Bos taurus
  Clone ID: 51-BOVMS1-012-Q1-E1-E4
ctttatcacaaacaaactatttcaaagtgttggtttaattagggtcatctctttggttagtaaataaatctgtttgtgctacaccagtgttgcatgcttttttaaactttagaggaatttagtgatgagttttaacatttacaaatggactaaatgggatagccttgaagataccatattgagattatatttactaatttatatatagaactacttttgtggccaataagctaccaatcattaatcttgttttgaactttatatcaacttaagaatcttaaatttgtggcagagactgttcttattgaaaaacagctacataaactttataatttaaatataagaataaagattaaatcaccatcattggctagtaatcatactttcaatagtgtgtttaaaactact

SEQ ID NO: 11825 - DNA, 385 bp, Bos taurus
  Clone ID: 51-BOVMS1-013-Q1-E1-E4
atgcgacgtcatagcgcttctatagtgtcacctaaattcaattcactggccgtcgatttacaacgtcgtgactgggaaaaccctggcgttacccaacttaatcgccttgcagcacatcgccctttcgccagctggcgtaatagcgaagaggcccgcaccgatcgcccttcccaacagttgcgcagcctgaatggcgaatgggacgcgccctgtagcggcgcattaagcgcggcgggtgtggtggttacgcgcagcgtgaccgctacacttgccagcgccctagcgcgcgctcctttcgctttcttcccttccattctcgccacgttcgccggcgttccccgtcaagctctaaatccggggctcactttaaggtttcgagttagtg

SEQ ID NO: 11826 - DNA, 318 bp, Bos taurus
  Clone ID: 51-BOVMS1-014-Q1-E1-E4
accgagtccactctgcacctggtcctccgcctcaaaggtgggatgcagatcatcgtgaagaccttgaccggcaagaccatcaccctgtaggtggagcccactgacaccatcgagaacgtcaaggccaagatccaagacaaagagggcatccccccagaccagcagaggctgatctttgccgggaaacagctggaagatggccgcaccctgtctgactactacatccagatagagtccactctgcacttggtcctgcgcttaaggggaggtgctttaagttctcccttttaagctttcgatcacttagattgcactttt

SEQ ID NO: 11827 - DNA, 427 bp, Bos taurus
  Clone ID: 51-BOVMS1-016-Q1-E1-E12
ggcaaattgtctctggctcccgagacaaaaccatcaaactatggaatactctgggtgtatgcaagtatactgtccaggatgaaagccattcagagtgggtgtcttgtgtccgcttctcgcccaacagcagcaatcccattattgtttcctgtggctgggacaagctggtcaaggtatggaacttggcaaattgtaagctgaagaccaatcacatcggccacacaggctacctgaacactgtgaccgtctctccagatggatccctctgtgcttctggaggcaaggatgggcacgctatgttgtgggacctcaatgaaggcaagcacctttacacactagatggtggggacatcatcaacgccctgtgcttcagtcctaaccgctactggctctgtgctgccacgggtcctaacatcaagatctggga

SEQ ID NO: 11828 - DNA, 301 bp, Bos taurus
  Clone ID: 51-BOVMS1-016-Q1-E1-E4
atgcgacgtcatagctcttctatagtgtcacctaaattcaattcactggccgtcgttttacaacgtcgtgactgggaaaaccctggcgttacccaacttaatcgccttgcagcacatccccctttcgccagctggcgtaatagcgaagaggcccgcaccgatcgcccttcccaacagttgcgcagcctgaatggcgaatgggacgcgccctgtagcggcgcattaagcgcggcgggtgtggtggttacgcgcagcgtggacgctacacttgccagcgccctaagcgccgctcctttcgctt

SEQ ID NO: 11829 - DNA, 405 bp, Bos taurus
  Clone ID: 51-BOVMS1-017-Q1-E1-E4
caacagtgtactctttcactatatcacaaatcagcaacaacgtcagaatcctaaaactccttcgaacacacagaatcccgactaatcacagtatcaacttcaatgaatcagtaaagtgaaaagtgcttcatactctttcaaaagacagaatgggtcagctcaattgacatcacattttacatggccctgacagggacatcatacatagacacctgaagaaaacaacattataaatcaatatcccttatgcagattgacacagaagtccttaagtacaatttttggcaaattagggtccaccaatacagtaaaatcggttaatgttaccatgataaattggaattgattctaaagaatcaaggattgtccacccttcacaaatcagtcaacatgatatatcacatt

SEQ ID NO: 11830 - DNA, 366 bp, Bos taurus
  unsure (307): unsure at all n locations; Clone ID: 51-BOVMS1-018-Q1-E1-E4
atgcgacgtcatagctcttctatagtgtcacctaaattcaattcactggccgtcgttttacaacgtcgtgactgggaaaaccctggcgttacccaacttaatcgccttgcagcacatccccctttcgccagctggcgtaatagcgaagaggcccgcaccgatcgcccttcccaacagttgcgcagcctgaatggcgaatgggacgcgccctgtagcggcgcattaagcgcggcgggtgtggtggttacgcgcagcgtgaccgctacacttgccagcgccctagcgcccgctcctttcgctttcttcncttcctttctcgccacgttcgccggctttccccgtcaggctctaaatcgggggctccct

SEQ ID NO: 11831 - DNA, 360 bp, Bos taurus
  Clone ID: 51-BOVMS1-019-Q1-E1-E4
atgcgacgtcatagctcttctatagtgtcacctaaattcaattcactggccgtcgttttacaacgtcgtgactgggaaaaccctggcgttacccaacttaatcgccttgcagcacatccccctttcgccagctggcgtaatagcgaagaggcccgcaccgatcgcccttcccaacagttgcgcagcctgaatggcgaatgggacgcgccctgtagcggcgcattaagcgcggcgggtgtggtggttacgcgcagcgtgaccgctacacttgccagcgccctagcgcccgctcctttcgctttcttcccttcctttctcgccaagttcgccgggttttcccgttaagctctaaatcggggg

SEQ ID NO: 11832 - DNA, 451 bp, Bos taurus
  Clone ID: 51-BOVMS1-022-Q1-E1-E4
acgcttcggcttaattacaaaggctgatgtatgttttatttctgtttttctaaatgacctacagtacttggtaggtgtactaaaattgtttggggagtggggtttagagacttctaatagatgtatagttaatttggtaattctctcgcatgaggtgtaagcttccatatgctggttatttaatagatttgctacataagtaaaacatggttcacctagatagtttgatatgtatgggcattactcctagtagtatttgtttgttgtcttttgttgcttatgctccttccgtgcaggctgagacctaatctcctgcaagtacagtaaaataatttacctatttttgcagaccctattcataggataaaaaaaattaagattgccttttacttttgaaacatttatattcgatgaagttgctgtcttgagtttagtattgatattgtgaaaa

SEQ ID NO: 11833 - DNA, 397 bp, Bos taurus
  Clone ID: 51-BOVMS1-023-Q1-E1-E4
gtccgccatctaaaactaatagctagccaacatcatctatcaaaagaaaacctaacccgatcaaaactatttattactatgctgatctcactacaactattcctaattataacctttaccgccatggaactaatcttattttatattctatttgaagcatcactagtcccaacactcattattattacccgatgaggaaaccaaacagaacgtctaaacgccggactctatttcctattctatacactagctggctccctaaccctattagtcgcactaatttatatccaaaacacaatacgattcctaaatttcctaatattacagtactgagtacaacctgttcataactcttgatctaatgtcttcatatgactagcatgtattatagctttca

SEQ ID NO: 11834 - DNA, 450 bp, Bos taurus
  Clone ID: 51-LIB188-001-Q1-E1-E4
acctgctaagtttgtatttaatggtgtttttgttttgttactcgaaaatgagacaagagttggcgatataatttttattaattttttttactactatttatagcttcagacagggcctttttttccctcttttgccttttttcttttttttttcccccccatgcttttgtttttttaattcttcctacttccccgctcatgaccttggccctttctgaagctgcttcctctaagaagcttttgctgaaatataggtttttttttttttttttagcagatcccaaactataacgtacgggatggtgggatatttgtgtctctttcatgtaatatattattattcttccttggttctagaaaaatagataaatatattttttcagcatatagtgtgatgtattcctgtgtgaagttggctgggtggttgagtgagtgcatgtttgtggggct

SEQ ID NO: 11835 - DNA, 187 bp, Bos taurus
  Clone ID: 51-LIB188-002-Q1-E1-E4
tggccgcggcatactctgaactgggcagtgtcaggatgctgctgaggctgtaggtgcttttcttgctgtcctggtctgtgaaactgttttggaagttgctgctgctctgagtaaccccatccactttccacttgacattgataaccttgggggaaaaatcaatcaacaagcaaaacaaaaggaaaat

SEQ ID NO: 11836 - DNA, 447 bp, Bos taurus
  unsure (177),(381): unsure at all n locations; Clone ID: 51-LIB188-003-Q1-E1-E12
gccaaggccgcgggatacagacacattcagatgcagctgcagaaagaggggtccagtgatctgaagtcacatagcgggatgcagcattactcagtccccacaaggcagctgtctcaaactttaggaaccgtgagagacacatcagagccctggtcactgtcaccacttgcagcctgngtgtaggtctgtcttttttcacctgagcgcttcttcctccagatcacagctccagccaccacagctactacgaggagaaccaggccaacaatgatgcccatggtgaggggctcctgaagcccttcgtgctgcacatggcacgtgtatctctgctcctctccagaaggcaccaccagggccgcccacttctggaagtttccgtcncctgaaggcctggtctccacaagctccatgtcctgggtctggtcctctccactgcgctgccaggtc

SEQ ID NO: 11837 - DNA, 396 bp, Bos taurus
  unsure (40): unsure at all n locations; Clone ID: 51-LIB188-004-Q1-E1-E4
ccggacacatccatatcacaaactactaattagcaataanaaagactacagatacaaggaacaacttgggtgaatggccagaaaaatttggcggattgggaaaaaacccaagcccctaaggttaacatacaatacaatccaattccggtaacgtcctcaaaatgacaaaattcagaaatgggaaacagatttgtgattgccacggatttagtgtggagggaaaggagaagcaggggtggctgtgaagggtcaacaggatgaacggcggtggcgatgggactgttctgcatcttgttccgtatcaatgtccacatcctggtggtgacgtggcggtgaagttctgtgagatgttgccattgggagaaactgtgtaaggggcacaagaaagctctgcat

SEQ ID NO: 11838 - DNA, 381 bp, Bos taurus
  Clone ID: 51-LIB188-005-Q1-E1-E12
tcccgaccgctatgggcgcgggacaccgcacgatgcaaacagggtctggggcatcttcaaaagctgcatcagacgcggctttgtagttctcagtcacgtgcggtatgaacacgctaacgctgccccgggtgcacatggtgcccgcctccagcagtggtttcagaacatgggtgcagcgagcagctacgtagtctcgggcctcaaaagtgtccagggcagcatccacgccattcacaccagagaagaagtcatccccaaagatgtcctctgtactgggatccagctggacgttgagtggggtaacctgcaagtctgcattcatgcggcgactggcctctgcagccacctctagctttttcctaggaatgtcctgagacctga

SEQ ID NO: 11839 - DNA, 391 bp, Bos taurus
  Clone ID: 51-LIB188-005-Q1-E1-E4
tggcggcgggataccaaaatgatccactgcgacctactcatatcggtccacagcgatcagtccataatgaacagtttgtatcatattatcgtcctggcaaacttcgtggttcagccagctgccctaattaccgggaagtcgggataaaatgctgcgaaagacatatatgatgcaggaatgagtctacacaactttcagaagctgttgcatgatacaggctttgccagaaatcgcccgacaaacacgatagtgtttatcgaaatcaagctactcagtctcatcgccatgtgtgcaatctggcaacagatgatcatcggtcaaggcagtatccgcgagaacaacactattgaacattggggaatggagcttggaaatcaactggctatgaaaa

SEQ ID NO: 11840 - DNA, 291 bp, Bos taurus
  Clone ID: 51-LIB188-006-Q1-E1-E4
ctcccgagcgacatgggcgcgggatactcttgcatggaaaatcccatggatggaggagcctggtgggctgcaatccatggggtcctgaagagtcggacacgactgagcgacttcactttcacttttcactttcctgcattggagaacgaaatggcaacccactccagtgttcttgcctggagaaccccaaggatgggggagcctggtgggctgccgtctatggggtcgcacagagtcggacacgactgaagtgacttagcagcagtagcagcgatcttgaatcatacaagt

SEQ ID NO: 11841 - DNA, 417 bp, Bos taurus
  Clone ID: 51-LIB188-007-Q1-E1-E12
tgggcccgggataccaaaagaccttcctcctgatactgcgctgctggacctgcaaaacaacaaaataactgagatcaaagatggagactttaagaacctgaagaaccttcatacactgattctcatcaacaacaaaattagcaaaatcagccctggggcatttgctcctttggtgaaattggaacgactttatctttccaagaatcaactgaaggaattgccagagaaaatgcccaaaactcttcaggagctgcgtgtccatgagaacgagatcaccaaagtgcgaaagtctgtgttcaatggattgaaccagatgatcgtcgtagaacttggcaccaacccgctgaagagctcaagcattgaaaatggagcctttcagggaatgaagaagctctcctacatccgcattgctgacac

SEQ ID NO: 11842 - DNA, 390 bp, Bos taurus
  Clone ID: 51-LIB188-007-Q1-E1-E4
gcctagggcgcgggatcacaaatgcactagcaggctttccagaaaccaacaggaagaataccaggtgcttggcttcacaggcatttgtgaaacggaagatgcttcctcaaattacaggggttcaaaagcgctgacaagttcctccttcagcatcaacattatatgacagaaagatgaccaggcaaatcaaaaagagccatatctctacagatatgccaagtttgactgttcttccaagctccttggatactgtgtgcctgactatgaattccttctgttacttaatgaacggtaaccaagatagctcacagcgtccaagagttgttaacatgcagacagtaaaatatagttttctaaagatatattttatcaagtattagtccttaagcc

SEQ ID NO: 11843 - DNA, 353 bp, Bos taurus
  Clone ID: 51-LIB188-009-Q1-E1-E12
tggcggccggctactttgtatatttacagtctgagaagctgttccagataacccaggtaacgctcagagggcacatcttccttttgaatgtgcttctcaacactattgggaacaatttcctcacttgacgaaatgctttcagcttccatttgcgtaatatcttccatggcgtgatcctcagttgattcacacccagtatccttgctcatttcagtgaccttctcctttccacacacttccgcattgggtgccacgcctacattgacttcactttccattacgacttcctccaggagtccttagtgattcagaagatgtctaggtctaactagagcagcttcaattctctcagt

SEQ ID NO: 11844 - DNA, 411 bp, Bos taurus
  Clone ID: 51-LIB188-010-Q1-E1-E4
actcattctggatgaccaagtcacgggaccaggacttctggggtctttggttaggcatctgggagactgagtagatgctgaagcccacagcaggcactaaggctgagaaaagcagctcctgactgtctgaactgggaatggtcaccacatcgctgggcacaattttgccaccggggtccttcacgaggtaaacgtgtttgctgacaggcagccgcaccatccagtccactttccgccccagggggttataaacgatcacctggaatctctctgctgtctgcgtgagtggacaaatgctgatgttgagcttgcgacaaaaggcgaagtcctcctttaagccgctgagatgcgccagcgcattgctcatgagaacctcgcaaggcctccagccttctgaaagttggcgggcat

SEQ ID NO: 11845 - DNA, 263 bp, Bos taurus
  Clone ID: 51-LIB188-011-Q1-E1-E12
ccgagccgcatgcgcagtacgccatggaggccggatacggtcgttattttctgtgaattccatcgtggggaagtggtagggagtcctctgcaggtgggcgtccatggcctgctgggcctggtggatcatgtcgtagaagggctgaaacacatcgtggaagttgaagggttccaacaaggggaaaggcatcacgttccgggcaaagcgggacttgggattgaagaagagtgaccccctcgggaacgagctgaagggggagtagt

SEQ ID NO: 11846 - DNA, 333 bp, Bos taurus
  Clone ID: 51-LIB188-011-Q1-E1-E4
gggacaccttcgcagtgtaagagatggagagactgtggagtttgatgttgttgaaggagaaaagggtgcggaggcagcaaatgttacaggccctggtggagttccagtgcaaggcagtaaatacgtagcagaccgtaaccattacagacgctatccacgtcgcaggggtcctccacgcaattaccagcagaactaccagaatagtgagagtggggaaaagaatgagggatcggagagcgctcccgaaggccaggcccaacagcgccggccctaccgcaggcggaaggttcccaccttactacatgcggagaccctatgggcgtcgaccacagt

SEQ ID NO: 11847 - DNA, 383 bp, Bos taurus
  Clone ID: 51-LIB188-012-Q1-E1-E4
acctgcagacgctgatcaccattgctgctgagaaaaactccaccatcatcttccctcggccatagacatgcggcaggctatcatggggccaaaacagtgagccacggtggccgcagagctgagactggcccaaaccagccctcagccgggaggtggaggggtgcacgctgggcctttctccctcactcgcctgttccatacgttgagtgtgatattcttacaacgcatagtgatcctagcaacagatgaacgttgttaacttgtaaatacgacatgagagagagacgtgattaatgtaagataaccttactctaaaatatttaacagttcatgtgtttagattgctccacgataggtgaagtccatcttctttcagatttcat

SEQ ID NO: 11848 - DNA, 419 bp, Bos taurus
  unsure (212): unsure at all n locations; Clone ID: 51-LIB188-013-Q1-E1-E4
acagcgccgaatctaccttcgaggggatcctcaaaaacccaagagcagagtctttgaacagcaggtccctctggccgggtggagagccaaagagctggaagctccgagacttgttttttccaaatttctcctgcgccttgctgagaagcttccagatcaagtcttccttgccatccacacttcgggccacgacagcatgagaagggacctgngccaggtggcactccttgaacgcatccactggcgcccgactgttgttcaagcagagaagctcatactggtccctgtcagccttctctggcaagttctcagacactgtcgtccctttaacaaaagccacgtctccagccccgtcctgcagacacttgaaggcaccagaataaccgaagtatggttcccgggaggagcaagcacactgg

SEQ ID NO: 11849 - DNA, 306 bp, Bos taurus
  Clone ID: 51-LIB188-015-Q1-E1-E4
acgtgattacagagctagggtttccagcagggctccagatggtcaggcatggcttctatagcatgtctaatgaagcagcggggacgtcacatgacgacgagagggcaggtaactaccagacgcccctgtgggcatcagcaggggcctcacactgctcggtgacatcagatgcaggtctaacgagccaacgagtgactgcaggggctcgcccacccacagcttacttggcgagcgggtttccgaagctcctgccggcaaacttggccttgctgcccagttccacttcaattctgaggatctggttgt

SEQ ID NO: 11850 - DNA, 340 bp, Bos taurus
  Clone ID: 51-LIB188-016-Q1-E1-E4
ccatgacggccggatgaacgtgacaaccggggtgcacaggggctccagctccgtggccataggccccatccccagggagccaccatgcaggggctcccagtctgctgcatacaaggaaccagacaggtccatgtctggcacagagcgggcggtctccgagccgctgggcctggatgatgctgggaacatgtagtcatcaaagggctcagccttcagctccatgctgccgacgctcttgacgggctccactgagggcttgggctcagggtcattgaggagtggcagggtgaaggcctcctcagattcaggggtggcagcctcaggcaggcccccactcaga

SEQ ID NO: 11851 - DNA, 466 bp, Bos taurus
  Clone ID: 51-LIB188-017-Q1-E1-E12
ccgaggctgcatgcggccgtacgccatggaggccggatacggctacgacggcagagattacatcgccctgaacgaggacctgcgctcctggaccgcggcggacacggcggctcagatcaccaagcgcaagtgggaggcggcagattatgctgagtctttgaggaactacctggagggcacgtgcgtggagtggctccgcagatacctggagaacgggaaggacacgctgctgcgcgcagaccctccaaaggcacatgtgacccatcaccccagctctgagcgtgaggtcaccctgaggtgctgggccctgggcttctaccctgaggagatctcactgacctggcagcgcagtggagaggaccagacccaggacatggagcttgtggagaccaggccttcaggggacggaaacttccagaagtgggcggccctggtggtgccttctggagaggagcagagatacacg

SEQ ID NO: 11852 - DNA, 212 bp, Bos taurus
  unsure (34),(97): unsure at all n locations; Clone ID: 51-LIB188-018-Q1-E1-E4
cccgggcgctgaagtgttcttaagtgtccccaanataagtgtgggtctccaggccttgccgttctgactggaacagctgatgttcaagccatcatangatgccaagtttgtaaccagacatgacagcttggctgacttcgtgaggaagatgtcggcgaaggatggggggatggtgaagaccccgatgggagatggtggtgcaacattacatg

SEQ ID NO: 11853 - DNA, 435 bp, Bos taurus
  unsure (367): unsure at all n locations; Clone ID: 51-LIB188-019-Q1-E1-E12
gccgcgggacacaaagccgtctggcttatcttcttcatactgggtctggggacgctgctgccctggaatttcttcatgacagccactaagtatttcacaaaccgcctggacatgtcccagaatatgtccttgggccctgctgaagtaagcacggacatccaggcctcagccagccccctggcaccctcgccagagcggactcatctcagcaccatcttcaacaacgtcatgaccttatgtgccatggtgcccctgctgatcttcacctgcctcaactccttcctgcatcagaggatcccccagtctgtgcggatcctgggcggcctggtacccatcctgttggtgttcctgatcactgccatcctgntgaatgtgcccctacacgcgctgtccttcttcgtcatcagcatgctcaagatcatgctcattaactct

SEQ ID NO: 11854 - DNA, 390 bp, Bos taurus
  Clone ID: 51-LIB188-019-Q1-E1-E4
accggctggggcatggcaggcggctctggcttcccacccttctgttcagagatgggggtggtgggcagtatttcatctttgggttccacaatgctcacgtgatcaggcagaggcttcttagggccaatcttaccagtcgggtcccaaggcagcatgatctttaccttgatgcccagcacaccctgtctgagcagcacatggcgcacggcggtgtccacatagtagttaacagggtccccactgtggatcatgaggccatccacaaacttcatggatttagccctctgtcctcgaagtttcccagacaccacgacctcgcagcctttggccccactctccatgatgaaccgcagcacaccatagcaggccctccgcacagcaaggcctcct

SEQ ID NO: 11855 - DNA, 416 bp, Bos taurus
  Clone ID: 51-LIB188-020-Q1-E1-E4
gggctacccataaatgaaagactaaggtaaaataaatgaggcataaataaatattgctagttctaggatggctgaaagttttctaaaccagaaatggttagaaaggaactttattgcaccaagtcaattataagcaagtttgcagttcacaggcattattcaaccttgagtcacaaaggaaacacactgcaagaatatagagttggcatcaaatatgatgacataccagtagggaaaacctactccggccaggccccagcagggtctgagcttaggtcagccgtgaaaacgcacacacaggttaacagggaacaacaggatgaggactacccagatgctagcatcctgccgccagtgggtatgtggaacaagaactgaatctatatgagagaaaatgaaatatacacaatactaaa

SEQ ID NO: 11856 - DNA, 219 bp, Bos taurus
  Clone ID: 51-LIB188-021-Q1-E1-E12
actggtgaactttgaaggacagacagtcctccactgtgtgtgagaccttgtccaggtagatgatgagtgtgttcttgttggagtctctgttcatctcatacttagagatgtatctgtcgacaccagtgctcagcgttttgaggtcttcaacatcaggtgagaagcctgtcatcatggatatatccaggatggacatagtggcatcctggtctcccaggt

SEQ ID NO: 11857 - DNA, 272 bp, Bos taurus
  unsure (98): unsure at all n locations; Clone ID: 51-LIB188-021-Q1-E1-E4
gatacttgttcacttcaggtaggttctgtcttggccagcggcacattgatccgtgggccccggggacagtctttgtgtctgatcagtctacaaggtanactcactctctctcctgatgggaaaaggcaccatgcgaagccacaaggcatctggtgcataaaggttgtgagagcaacattgcaacgtggaaactgtagcgtttcattttcccccttcatgttccgaagtttgtgcatgtatattactgatttctcagaactaaccttcgatcc

SEQ ID NO: 11858 - DNA, 446 bp, Bos taurus
  Clone ID: 51-LIB188-022-Q1-E1-E4
ccgaggcgcatgcgcccgtacgccatgtacgccggatactcttgcagaggccctgaggcaactggaaaacctttgaaccctgcccggataacttgcccacaacaaccaacccaaattcgggaacaacttgggtaaccaaaatcttgaacctgatcaacaagaagggtgacttgaaaaattgtcaaaaagccccggtcttcttgcgggtgcccttccttgatttaaccgcccctggggttccaacaggtgttgagcttctgaaagataaaccagccccacggctcctcaagacacacttgcctctggccctgcttccgaagaccctgctggatcaaaaagtcaaagtgatctacatcgcccgcaacgccaaggatgtggccgtctcctattaccacttctatcgcatggccaaggtgcaccctgaccctggcacctgggacagcttc

SEQ ID NO: 11859 - DNA, 248 bp, Bos taurus
  Clone ID: 51-LIB188-023-Q1-E1-E4
catggaagccggatacggctggataaagtccagataggaggtgacgcgggtgtagatgccgggccggttgggcttcgcgcaaccatcgccccagctgaccacccccgcctgcagccaggtgccattcaccttgcagaccaggggccctccagagtcgccctggcagaagttcctcccgctgtccccagcacacagcatgtcctcccgcacgatggggacgttgtcccccgtggacaggccagagtggt

SEQ ID NO: 11860 - DNA, 288 bp, Bos taurus
  Clone ID: 51-LIB188-024-Q1-E1-E12
ccatagccgccggatactcgatccccggccggggcacagtggtgacaggcacgctcgaacgtggcattttgaagaaaggagacgagtgtgaattcctgggacacagcaagaatattcgcactgtggtgacaggcattgagatgttccacaagagcctggatagggcagaggcgggcgacaaccttggggccctggtccgaggcttgaagcgggaggacctgagacgtggcctggtcatggccaagccaggttccatccagcctcaccagaaggtggaggcacaggtgt

SEQ ID NO: 11861 - DNA, 423 bp, Bos taurus
  Clone ID: 51-LIB188-024-Q1-E1-E4
ccatgaccgccggatacaccagggacgtgtggtgtgccgtgggacctgaggagcagaagaagtgccagcagtggagccagcagagcggccagaacgtgacctgtgccacggcgtccaccactgacgactgcatcgtcctggtgctgaaaggggaagcagatgccctgaacttggatggaggatatatctacactgcgggcaagtgtggcctggtgcctgtcctggcagagaaccggaaatcctccaaacacagtagcctagattgtgtgctgagaccaacggaagggtactcctcctgggtgtccctccccctccatatctcaccggccctccagagccacccccaaagagatgccttgagattctcaatgcagccatgccttggggctgccttggtgctgccacacttcaggctctcctcct

SEQ ID NO: 11862 - DNA, 423 bp, Bos taurus
  Clone ID: 51-LIB188-025-Q1-E1-E12
gggatacatcgcactggacaagtgggccggctgcttcggcatcaaggagaaggacatcgacaaggacctcgtgatctaaagccatgcctcctcctgcagaaccagattctctctctttgaccttccccctcctgttttccccaatgtttaaaatgtttggatggtttgttgttctgcctggggtcaaggtgctaatatagacttaaacgaatacattaacggtgctaaacacagacattttaacccaagtcacgacattcttagctgtaactcagctctcacggcctcttgctcacccatgaatggtcccgttttcctcttgccgcgtgcacctccacccattgtcttggtggcacatgggtggaacacttgatctgctcgagtctgccttcaacacacattgcatcttcagattttctactt

SEQ ID NO: 11863 - DNA, 422 bp, Bos taurus
  Clone ID: 51-LIB188-025-Q1-E1-E4
gggcgcgggatactctcagatcctgttttcccgggctacggaaatgcagcccaaatgacccggccacggaccggtggcttgggtcaaaaattgcctccaaaaatccggtcaaagccttcaaggaggtcggcccccttcacgtgtgtcctcagccttcgaaattcttcattcggtacctgggatattgtcagagggtatcggaataatatccagggtcagaccttcgctgcagggcgggatggtgagagagccttcatagacccagtaatcacgcagcaagggatctggtaataaagtgttaggattaaagcagggtagtgttttggatttccccttatactgaatatcctggaggatttcagtcacagccttcaggcccacgtgctcttttccgatctggacaaacaaagcgatgatagcga

SEQ ID NO: 11864 - DNA, 247 bp, Bos taurus
  Clone ID: 51-LIB188-026-Q1-E1-E4
tcttcaatgacacccgcaggatcatgctccgttagctggtcaaggcaacggctatcatccaggccatgggccgctaggtgtcatctctcaagatcatcctcaggcaagggaacgagacctcatttgttcccactccaaagtctgcaagacatcgagttattataacctcagatgcttttgaggatgaagatgacgttcaacatgtcgtcttcatcggtaccattgccagtcaatcaatgatttgctc

SEQ ID NO: 11865 - DNA, 319 bp, Bos taurus
  unsure (41): unsure at all n locations; Clone ID: 51-LIB188-028-Q1-E1-E4
atgcgccaagccgccatgagcccgggatacctcttaggtcnccacattcaccgttgttcttgctaccctccacccaggctgaaccactggtggaggggctcagctgggacttctcccaaccccctctcaggggtgtccgtccggaaatgaatgaatatcccgagaaccgggctggggtttacttaagcttttctgtgtgggtttagggacggcgggcactttaatgttattagggctggtttgggtgggggcaaagaatcttggccacaaagcgtcagtttgcttagttttgtcccctggtctataccacctgcactgc

SEQ ID NO: 11866 - DNA, 373 bp, Bos taurus
  Clone ID: 51-LIB2809-002-Q1-E1-E12
actgatggaggcggccgtgggagaggagttgggcaccgtgttagtgctcgtctcgctgatatagatcttagagatggggatcttcagagctttgctggccacctgcaccatcttggtgtgaaggccttggcccatctctgtgcccccgtggctcaccagcacggagccatctgtgtatacgtggatcagggctcctgcctgatttagaaaaggaactgtgaagcttattccaaatttggtaggaattatgcacaatcctctctttttccaacaattctccttgttgaacttgtcgacctcactcttccgagcgtaatactcagagctcttcaggcactcatcccagcacctgggcacgctgaacccctcaagc

SEQ ID NO: 11867 - DNA, 432 bp, Bos taurus
  unsure (378): unsure at all n locations; Clone ID: 51-LIB2809-002-Q1-E1-E4
acagcagaaaggcctgaatgggcatatctctctggggatagggcactgctttctggggaacaggcaggactttggactgagaaagggacagcacggactgaggaggaaacatgacagttggaggaagaggctggtgaggctggtgcatccaagactggagcagaggcagaggaaggtgccgattttcaacatcagtgagagtcaggctctggctttcagtaaagggctcaactggatatttagggaagggcatttctttgtgcttaggagccatagcctccttcactttggagactcccattacttcaggctgaaggaaaggcggcaccaccacaggggtttgagtaagaggagggatgttttgtgggaagctgttanggatgggcccaaagaagggatagactagagactgtgtctgggcaaaggggtgga

SEQ ID NO: 11868 - DNA, 359 bp, Bos taurus
  Clone ID: 51-LIB2809-003-Q1-E1-E12
atggccaggggatacaggagcaaggcctgaatgggcatatctctctggggatagggcactgctttctggggaacaggcaggactttggactgagaaagggacagcacggactgaggaggaaacatgacagttggaggaagaggctggtgaggctggtgcatccaagactggagcagaggcagaggaaggtgcagattttcaacatcagtgagagtcaggctctggctttcagtaaagggctcaactggatatttagggaagggcatttctttgtgcttaggagccatagcctccttcactttggagactcccattacttcaggctgaaggaaaggcggcaccaccacaggggtttgagt

SEQ ID NO: 11869 - DNA, 461 bp, Bos taurus
  Clone ID: 51-LIB2809-003-Q1-E1-E4
tgagatagtggaaagcctttcacgcagtgaggaatctattacacgcatcaataagaaaattgagaagtttcagagtgaggaacagcagcaaacagaggatgaactccaggataaaatccacccctttgcccagacacagtctctagtctatcccttccctgggcccatccataacagcctcccacaaaacatccctcctcttactcaaacccctgtggtggtgccgcctttccttcagcctgaagtaatgggagtctccaaagtgaaagaggctatggctcctaagcacaaagaaatgcccttccctaaatatccagttgagccctttactgaaaaccagaacctgactctcactgatgttgaaaatctgcaccttcctctgcctctgctccagtcttggatgcaacagcctcaacagcctcctcctccaactgtcatgtttcctcctcagtccgtgctgt

SEQ ID NO: 11870 - DNA, 424 bp, Bos taurus
  unsure (107): unsure at all n locations; Clone ID: 51-LIB2809-004-Q1-E1-E4
atacaccagaaaagcctgaatgggcatatctctctggagatagggcactgctttctggggaacacgcaggactttggactgagaaagggacagcaccgactgaggangaaacatgacagttggaggaagaggctggtgaggctggtgcatccaagactggagcagaggcagaggaaggtgcagattttcaacatcagtgagagtcaggctctggctttcagtaaagggctcaactggatatttagggaagggcatttctttgtgcttaggagccataggctccttcactttggagactcccattacttcaggctgaaggaaatgcggcagcaccacaggggtttgagtaagaggagggatgttttgtgggaggctgttatggatgggcccagggaagggatagactagagactgtgtctgggca

SEQ ID NO: 11871 - DNA, 313 bp, Bos taurus
  Clone ID: 51-LIB2809-005-Q1-E1-E4
acgacgagccaatagtcggtactgtccggggacccttctctactaatgtctaagatgatttcaaagtgaatgccccctcctcacttttgaattgactgcaactggtaatatggcaacttttcaatccttgcatcatgttactaagacaatttttaaatgagtatacatggtacaaaaaatgaagactttattccttgatgtactttatgctttttcatcttaaattgaatttgagtcataaactatatatttcagaattttaaatcatcattagcatactggttcaactttaacttgagaatatcaatgacat

SEQ ID NO: 11872 - DNA, 425 bp, Bos taurus
  unsure (54),(80),(403): unsure at all n locations; Clone ID: 51-LIB2809-008-Q1-E1-E12
atggccccggcatacagcagaaaggcctgaatgggcatatctctctggggatanggcactgctttctggggaacaggcangactttggactgagaaagggacagcacggactgaggaggaaacatgacagttggaggaagaggctggtgaggctggtgcatccaagactggagcagaggcagaggaaggtgcagattttcaacatcagtgagagtcaggctctggctttcagtaaagggctcaactggatatttagggaagggcatttctttgtgcttaggagccatagcctccttcactttggagactcccattacttcaggctgaaggaaaggcggcaccaccacaggggtttgagtaagaggagggatgttttgtgggaggctgttagggatgggcccanggaagggatagactagagactg

SEQ ID NO: 11873 - DNA, 440 bp, Bos taurus
  unsure (49): unsure at all n locations; Clone ID: 51-LIB2809-008-Q1-E1-E4
tacataaatatcagaaaacaattagtctttgaaataatttacgttccgnggaaactttcaagggtttgggtaatcaatttccgggggttaattaacctttaaggttccaaaggtttcacaacctcaattttcattttccccccaaccacgttcattcttgccaaatttatataccagtcttcgtccatccacacgttccagaatttctcttttgtagtaatatctcatggctcggctgagtttttcgtaggtcatgctgctgttgtttttctttttcccccatagctgggccacagcctctgatttcaagaacctgaacatgccctcaggccggtcttcccacttgattaaccctggattcttgtctgggtttagcaggatgtcgcggatgaattcccataagtgagtccctctccgattgtgctttttggtgtggggct

SEQ ID NO: 11874 - DNA, 323 bp, Bos taurus
  Clone ID: 51-LIB2809-009-Q1-E1-E4
atgagaaaaactgtctgggaaagggaaaaccatacccttggctcaagacccttaaggaaaacccggaaaactcctaactaacaaccaagaaaggtgccttaatggttttccagggccacgggtcggtctggaatggagagccaatggcctcctaaagataccaatgtgtcatctagaaaggatatgcgggattcagtttgccacatctcactaggccgactttgtaaccttgtttgtcacctgtctacactgcttaagcatttgatattgaatgaataatgtacagttgatgaaaactttaaaattaaacatgttttcagtca

SEQ ID NO: 11875 - DNA, 434 bp, Bos taurus
  unsure (419): unsure at all n locations; Clone ID: 51-LIB2809-013-Q1-E1-E12
gataccccagctggaaatagttccaaatagtgctgaggaacgacttcacagtatgaaagagggaatccatgcccaacagaaagaacctatgataggagtgaatcaggaactggcctacttctaccctgagcttttcagacaattctaccagctggatgcctatccatctggtgcctggtattacgttccactaggcacacaatacactgatgccccatcattctctgacatccctaatcccattggctctgagaacagtgaaaagactactatgccactgtggtgaagagtcaagtgaattctgagggactccacagttatggtctttgatggttctgaaaattccatgctctacatgtcttttcatctatcatgtcaaaccattctatccaaaggcttcaactgctgttttagaatanggcaatctcaaattg

SEQ ID NO: 11876 - DNA, 356 bp, Bos taurus
  Clone ID: 51-LIB2809-014-Q1-E1-E4
cctccgtacgccaaggcggcgggatccataacagagacagcacagaatatggactccttccagataaataataaaatttggtgcaaagacgaccagaaccctcactcaagcaacatctgtaacatctcctgtgacaagttcctggatgatgatcttactgatgacattatgtgtgtcaagaagattctggataaagtaggaattaactactggttggcccataaagcactctgttctgagaagctggatcagtggctctgtgagaagttgtgaacacctgctgtctttgctgcttctgtcctctttctgttcctggaactcctctgccccgtggctacctcgttttgcttctttgt

SEQ ID NO: 11877 - DNA, 413 bp, Bos taurus
  Clone ID: 51-LIB2809-016-Q1-E1-E12
gccatgtaaccgggatggcaacaatctgtgaacctatggatatagccctccaggctcctttgttcatggaattctcaaggtaagaatactagagtgggttgccatgccctcctccaggggattttcccaacccagtgatcaagcctgagtctcctgcattggtagaggggttccttaccactagcaccacctgggaagccccatttgttttctgatttttgcaaattaaatcagaatattggatgaagggaaaaatgatgtttctgatactagccacatttaccgagggcttacttcgcaattcaaaatggctcagacggtaaaccgtctgtctacagtgcgagagacctgggttcgactcctgggttgggaaaatcctctgcagaaggaaatgttgcctggaaaatcccatg

SEQ ID NO: 11878 - DNA, 421 bp, Bos taurus
  Clone ID: 51-LIB2809-016-Q1-E1-E4
tgggcccgggataccccagatggaaattgttcccaatagtgctgaggaacgacttcacagtatgaaagagggaatccatgcccaacagaaagaacctatgataggagtgaatcaggaactggcctacttctaccctgagcttttcagacaattctaccagctggatgcctatccatctggtgcctggtattacgttccactaggcacacaatacactgatgccccatcattctctgacatccctaatcccattggctctgagaacagtgaaaagactacgatgccactgtggtgaagagtcaagtgaattctgagggactccacagttatggtctttgatggttctgaaaattccatgctctacatgtcttttcatctatcatgtcaaaccattccatccaaaggcttcaactgctgtttt

SEQ ID NO: 11879 - DNA, 406 bp, Bos taurus
  Clone ID: 51-LIB2809-017-Q1-E1-E12
acgtggtgagattgtggaaagcctttcaagcagtgaggaatctattacacgcatcaataagaaaattgagaagtttcagagtgaggaacagcagcaaacagaggatgaactccaggataaaatccacccctttgcccagacacagtctctagtctatcccttccctgggcccatccctaacagcctcccacaaaacatccctcctcttactcaaacccctgtggtggtgccgcctttccttcagcctgaagtaatgggagtctccaaagtgaaggaggctatggctcctaagcacaaagaaatgcccttccctaaatatccagttgagccctttactgaaagccagagcctgactctcactgatgttgaaaatctggcacctcctctgcctctgctccagtcttgg

SEQ ID NO: 11880 - DNA, 368 bp, Bos taurus
  Clone ID: 51-LIB2809-019-Q1-E1-E4
gggctacctgcaaagattgtggaaagcctttcaagcagtgaggaatctattacacgcatcaataagaaaattgagaagtttcagagtgaggaacagcagcaaacagaggatgaactcgaggataaaatccacccctttgcccagacacgagtctctagtctatcccttccctgggcccatccataacagcctcccacaaaacatccctcctcttactcaaacccctgtggtggtgccgcctttccttcagcctgaagtaatgggagtctccaaagtgaaggacgctatggctcctaagcacaaagaaatgcccttccctaaatatccagttgagccctttactgaaagccagaccctgactctcactg

SEQ ID NO: 11881 - DNA, 384 bp, Bos taurus
  Clone ID: 51-LIB2809-022-Q1-E1-E4
gatacagctctactgaaaccacattatctgcttctgaaaaccccttcttgaggtctcctttctcaatcttcagctcagatccataaaaggaattattttttatagcatcctcaattgtgataatggcaggaagatcctcataggtgactttcactacatgggcagctctctctgcatgttctggggtgtcagcgaccacagcaccaatgatgtgaccaacacaagtcaccgtatccttcgcaaagactgtctcatcattaaagagtccggtttcattactcccgggaatatcatcagcagagagaaagcagacagatcctggcactttctgagcttctgaaacatcaatggacttgatcttggcgtgggcccgggtgctggtga

SEQ ID NO: 11882 - DNA, 146 bp, Bos taurus
  Clone ID: 51-LIB2809-023-Q1-E1-E4
tactgttgaattaaaagcgccatcagggacatcgagcaagggtcaaaagtccagagcgccattcatgcacccctggagattactccttacatgtccattgtcactacagggcccagggctcagacatgagttagcttcaagggggt

SEQ ID NO: 11883 - DNA, 359 bp, Bos taurus
  unsure (16): unsure at all n locations; Clone ID: 51-LIB2809-024-Q1-E1-E12
ctcaaatagggaatangctttgtcttaggttgaatccatggcttcatagctttctgatgctgataaacagtcttgagatactggggcaaggcgaatttctggtaacgctgggggatttttttcagaaaatttacgcgattcttttcttcttcagtcagtttagttttcttagtgaatacttctgttgattccatgtcaacggtcttctttgaattttcctcactggtggagagctgctctctgttcatagtgggagtaatgggaacagcatttctcttaacctgatcccatgggttcaaaacaattggtccttgatacagatactggagatactgggggaacttctgataataactgat

SEQ ID NO: 11884 - DNA, 408 bp, Bos taurus
  unsure (112): unsure at all n locations; Clone ID: 51-LIB2809-024-Q1-E1-E4
catggccgccggatacctggtaaaattgtggaaagcctttcaagcagtgaggaatctattacacgcatcaataaaaaaaattgagaagtttaagagtgaggaacagcagcanacagaggatgaactccaggataaaatccacccctttgcccagacacagtctctagtctatcccttccctgggcccatccctaacagcctcccacaaaacatccctcctcttactcaaacccctgtggtggtgccgcctttccttcagcctgaagtaatgggagtctccaaagtgaaggaggctatggctcctaagcacaaagaaatgcccttccctaaatatccagttgagccctttactgaaagccagagcctgactctcactgatgttgaaaatctgcaccttcctctgcctct

SEQ ID NO: 11885 - DNA, 355 bp, Bos taurus
  Clone ID: 51-LIB2809-025-Q1-E1-E12
gcaaaaccccccggggaaaaggcaacgccttccggggaacaaggcaggacttttggcctgggaaaaggaacacacggcctgagaggaaacatgacagttggaggaagaggctggtgaggctggtgcatccaagactggagcagaggcagaggaaggtgcagattttcaacatcagtgagagtcaggctctggctttcagtaaagggctcaactggatatttagggaagggcatttctttgtgcttaggagccatagcctccttcactttggagactcccattacttcaggctgaaggaaaggcggcaccaccacaggggtttgagtaagaggagggatgttttgtgggaagctgt

SEQ ID NO: 11886 - DNA, 161 bp, Bos taurus
  Clone ID: 51-LIB2809-028-Q1-E1-E4
tcatccagatttccgccaatgcctgcttggctcccatctgcaccttgcaccacctggctgtgactaccgtggaaagaactggaagcaccaagacgaggctgcatcctgtgcacgagataatcgccaaaagtcacggcgctcagtgtgggttccgcaccccc

SEQ ID NO: 11887 - DNA, 443 bp, Bos taurus
  Clone ID: 51-LIB2809-030-Q1-E1-E4
acaggacaggcccagaaaaggtccacaaaattcacatggtttaacactaaataacccagcagcaagctcagtgtaattaacatccttcagaattaatgatccaaggaacagtgaagggatcagcccttagcctctgtcctttcaacttgagctcaattccttcttcacgctcctggcccagacttctcctctcaccatcacatcaagggcccgaggcagttgacctttccggacccaggagtgcacagcacccagttccctccgctggtcctccgagaaccgaggctgctgcttctgcatggcccggagccgctcccggtcctgcttcagcacagaggccatgtccctgctccaggaagaggttcaagaagcagagaatgggagctggggccaagggccaccaggaaggctggcacttttcttctatcgcagcccccaactac

SEQ ID NO: 11888 - DNA, 320 bp, Bos taurus
  unsure (283),(292): unsure at all n locations; Clone ID: 51-LIB2809-032-Q1-E1-E4
gccaagggcccgggatacagcagaaaggcctgaatgggcatatctctctggggatagggcactgctttctggggaacaggcaggactttggactgagaaagggacagcacggactgaggaggaaacatgacagttggaggaagaggctggtgaggctggtgcatccaagactggagcagaggcagaggaaggtgcagattttcaacatcagtgagagtcaggctctggctttcagtaaagggctcaactggatatttagggaagggcatttctttgtgcttangagccatancctccttcactttggagactcccattac

SEQ ID NO: 11889 - DNA, 270 bp, Bos taurus
  Clone ID: 51-LIB3057-001-Q1-K1-E4
ctcctgtgccattccaccagcatgttatccagcgccgcgcatgaatggggcgtcccctgtgccctctcgccagaggagcacttgccaaggtcagtgaggggctggtaggcccctggagaagcagcaccgacaatgacgacaacaagagatcccttccccacccctttgcacccctcccactgcgggtgccatagagggggacacggctctaagggagcgcacactcgagatctctgcacacacgaagcatttagatatgtagccaatttg

SEQ ID NO: 11890 - DNA, 172 bp, Bos taurus
  Clone ID: 51-LIB3057-003-Q1-K1-E4
ctagatcgcgagcggccgccctttttttttttacttttttttacaagacagataaaggtactgtaatattcacatgtaaaagttacacatcacaagagattggacagtaatttagcagttaactaacatagctatagtgaaaatcatttttataaaacaataatctagatgc

SEQ ID NO: 11891 - DNA, 409 bp, Bos taurus
  Clone ID: 51-LIB3057-004-Q1-K1-E12
attgaggaagaaaccaaacgacttctggaaggcatggagatgatatttggccaggttattcctggagccaaagagactgagccctaccctgtgtggtcaggactcccgtccctgcaaactaaggatgaagatgcacgttattccgctttttataacctgctccactgcctgcgcagggattcaagcaagattgacacttaccttaagctcctgaattgcagaatcatctacaacaacaactgctaagcccacattcatcctatccatttctgagatggttcttaatgatccattccctggcaaacttctctgagctttatagctttgtaatgcatgcttggctctaatgggtttcatcttaaataaaaacagactctgtagcgatgtcaaaatctaagactgcaatttt

SEQ ID NO: 11892 - DNA, 413 bp, Bos taurus
  Clone ID: 51-LIB3057-004-Q1-K1-E4
atcagacagcgtctgcggcgagccgagacgcgcccccagcccatcatggcccggctcgtccgggcatcctgccttctctccctgctcctggccggcttcattcccccgagccagggacaggagaagtcgaagacggactgccacgctggtgtgggtggcaccatctatgagtacggggccctcaccatcgatggggaggagtacatcccctttaagcagtacgctggcaaatacatcctcttcgtcaacgtggccagctactgaggcctgacgggccagtacgttgaactgaatgcactgcaggaagagcttgaaccatttggtctggtcattctgggcttcccctgcaaccaatttggaaaacaagaaccaggagagaactcggagatcctagccaccctcaagtatgttcg

SEQ ID NO: 11893 - DNA, 451 bp, Bos taurus
  unsure (103): unsure at all n locations; Clone ID: 51-LIB3057-005-Q1-K1-E4
gacgactcagggtcctgtggacagctcaccagctatgatggctgcaggcccccggacctccctggtcctggctttcgccctgctctgcctgccctggactcangtggtgggcgccttcccagccatgtccttgtccggcctgtttgccaacgctgtgctccgggctcagcacctgcatcagctggctgctgacaccttcaaagagtttgagcgcacctacatcccggagggacagagatactccatccagaacacccaggttgccttctgcttctctgaaaccatcccggcccccacgggcaagaatgaggcccagcagaaatcagacttggagctgcttcgcatctcactgctcctcatccagtcgtggcttgggcccctgcagttcctcagcagagtcttcaccaacagcttggtgtttggcacctcggaccgtgtctatgagaagctg

SEQ ID NO: 11894 - DNA, 432 bp, Bos taurus
  Clone ID: 51-LIB3057-006-Q1-K1-E12
tctcgctccggtgtccccgcgccagagacgcagcagcgctccctctgcccacacccaccgcgccctcgcgctcgcctctccgggagaagttgcaggaggagatgcttcagagagaggaagccgagagcactctgcagtctttcagacaggatgttgacaatgcctctttggcacgtcttgacctggagcgtaaagtggaatccttgcaagaagagattgcctttttgaagaaactgcatgatgaggaaatccaggagcttcaggcccagattcaagaacagcatgtccaaatcgatatggatgtttccaagcctgacctcacggctgccctgcgtgatgtccgtcagcagtatgagagcgtggccgccaagaaccttcaggaggctgaggaatggtacaagtccaagtttgctgacctctctgaagctgcta

SEQ ID NO: 11895 - DNA, 431 bp, Bos taurus
  Clone ID: 51-LIB3057-006-Q1-K1-E4
gcggaccaggggaatccgactgtttaattaaaacaaagcatcgcgaaggcccgcggcgggtgttgacgcgatgtgatttctgcccagtgctctgaatgtcaaagtgaagaaattcaatgaagcgcgggtaaacggcgggagtaactatgactctcttaaggtagccaaatgcctcgtcatctaattagtgacgcgcatgaatggatgaacgagattcccactgtccctacctactatccagcgaaaccacagccaagggaacgggcttggcggaatcagcggggaaagaagaccctgttgagcttgactctagtctggcacggtgaagagacatgagaggtgtagaataagtgggaggcccccggcgcccccccgtttcccgcgagggggcggggcggggtccgccggccttgcgggccgccggtgaaata

SEQ ID NO: 11896 - DNA, 317 bp, Bos taurus
  Clone ID: 51-LIB3057-007-Q1-K1-E4
atggagcgaaaggaatgccaagaccctgcccagacagacgtgggccagcctcagcaccatcagccagctcgcagatagcagagcctcaggttaaatgaactggtggtgggggacaccagcggaaagctgtcagtgtataagaatgatgatagccggccgtggctcacctgctcctgccagggaatgctcacttgcgttggggttggagacgtgtgtaataaaggaaagaacctggtggtggctgtgagtgccgagggctggtttcacttgtgtgacctgacgcctgccaagtccctggatggttcgggcaccacgag

SEQ ID NO: 11897 - DNA, 378 bp, Bos taurus
  Clone ID: 51-LIB3057-008-Q1-K1-E4
cgccgggtgtgcgagagcatccggggtctcctttcgggaggtggaccgggaagacctaggcgtgggttctgtggatttgaacctgcgcatttctaacccaagatctcgaaatgcatcgtgattcctgtccattggactgtaaagtttatgtaggtaatcttggaaacaatggtaacaagactgaattggaacgagcttttggctattatggaccactcctaagtgtgtggttcgctagaaacccttccggctttgcttctgttgaatttgaagatccgtgtgacgcatctaatgctgtccgagagctagatgggagaacactctgtggctgccgagtaactatgtaactatcgaacggcgtaatgagaagtcctacta

SEQ ID NO: 11898 - DNA, 443 bp, Bos taurus
  Clone ID: 51-LIB3057-009-Q1-K1-E4
gcctgttgttaggaacctgcttggcctcggatctgaggggctttaggttggctgttgctgtgacttgaagcaggcgctggggagagtccactgcaaggaaggcgccatggacgatcagggctgcccccggtgtaagaccaccaagtaccggaacccttcgttgaagctgatggtgaatgtgtgcggacacactctctgtgaaagttgtgtggatttactctttgtgagaggagctggaaactgtcctgagtgtggcactccacttcgaaagagcaacttcagggtacagctctttgaagatcctactgttgacaaggaagttgagattcggaaaaaagtgctaaagatatacaataaaagggaagaagactttcctagtctaagagaatataatgatttccttggaagaagtggaagaaattgttttcaatctgaccaacaat

SEQ ID NO: 11899 - DNA, 317 bp, Bos taurus
  Clone ID: 51-LIB3057-010-Q1-K1-E12
gacacaggcgactgcccgccggctgtgactgcaggtgaccggctatcctaggccaaccgaggctcccgcggcgctgccgtatcgttccgcctgggcgggattctgacttataagcgttcagtcataatcccacaaatggtagcttcgccccattggctccttagccaagcacatacaccaaatgtcttaacctgcagtttctctcgtacttaacaggattaccatggcaacaacacatcatcagtaaggtaaaactaacctgtctcacaacggtctaatcccaactcacgttccctattagtgggtgaacaattcaa

SEQ ID NO: 11900 - DNA, 249 bp, Bos taurus
  Clone ID: 51-LIB3057-011-Q1-K1-E4
gcgagcggccgcccttttttttttttttttttttttttttttttcgtgaaacttgaaaggttttagttcttaactacagacagctttaaaagtcgggatacctggcgccatcactgcctgggcgaatcctcacccaggcttcgaggcggcaggagggcacaagagaggccttcggggtcaactttccgcggagagagacccctgcccgctgcgccctcactggcccttcttgggggcgttcttgatgat

SEQ ID NO: 11901 - DNA, 455 bp, Bos taurus
  unsure (426),(436): unsure at all n locations; Clone ID: 51-LIB3057-014-Q1-K1-E12
ccgggtcgaaccaagccgtccgcgaccccttggccgaacccttggaataccattcacagtatctgtggtaggactactagtatggggatccaacctagtatcctccctcctatgcttaaaaggaataatgctatccctattcgttatagcagccctaacaatcctcaactcacattttacattagctagcataatacctattatcctactagtcttcgcagcctgtgaagcagccctaggtctatctctactagtaatagtatcaaatacatatggtactgattatgtacaaaacctcaacttactccaatgctaaaatacattattccaacaattatacttatacccctaacctggttatcaaaaaataatataatttgggttaactccacagcacacagccttctaattagctgtacaagcctnctgctcatanaccagtttggcgacaacag

SEQ ID NO: 11902 - DNA, 440 bp, Bos taurus
  Clone ID: 51-LIB3057-014-Q1-K1-E4
gctgcccgcgccgctctgctgccgtcgccgccgcccggtctcccggcccggcctccgggcctgccctgccggcccatcagcaagcccgcccgcgtcccgacctggttccccgccgccgcctcccggagcagcatggacggcgccggggctgaggaggtgctggcacctctcaggctagccgtgcgccagcagggagatcttgtacgaaaactcaaagaagataaagcaccccaagtagatgtagataaggcggtagctgagctcaaagcccgcaagaggattctggaagcaaaggagctagcgttacagcccaaagatgatgttgtagacagagcaaaaatggaagataccctgaagaggagggttttctatgatcaaacttttgctatttatggaggtgttagtggtctttatgattttggcccagttggatgtggctt

SEQ ID NO: 11903 - DNA, 336 bp, Bos taurus
  Clone ID: 51-LIB3057-015-Q1-K1-E12
ggccgatctacgtgctcgttcgccttgcgaccgttgcgcgcgagcccggtgtctccggggcgggcagcaacaacagcagctgctgcgaatgtgtcggtagaacgctgagtgagctgaaggagtcctcggcagtctcaaccgcagctgctgcagcatccaaatggcggaaaccgtggcagacaccccgcagctgatcaccaagctgtagaacatgaatgacgcctacgggcctccaagctacttacttgagatagatgcgagcatctctcatacagtgtgcgtcggtcgggaatgatttaccaactacgagatcagggtcaagacatatcagtatat

SEQ ID NO: 11904 - DNA, 448 bp, Bos taurus
  Clone ID: 51-LIB3057-016-Q1-K1-E4
ctaaattgcagacctaatctattgtatttctccagtctcacacactcactgttttgaggtcaagatagtaagttggagaggttcttgaatgaacacatgcccattttgatcagaatgaaaggaaattttgctaatgaatttctaggaatctttacttctatgagctaaacagcctcacaaggttataacctggctcctttctaatttcttagagattaagaaaatttgatagcttttaaaacagttactatgtcaaattcttttatacatttaatattgtgttttattaatttttctatttctgggggtgttttttttttattattatcatcttattttttttttttttttatattttcatatttcttctcttatattatatcttttttaattctttttttattttattcttctttttttttatttttcttatatatttttatatttt

SEQ ID NO: 11905 - DNA, 286 bp, Bos taurus
  Clone ID: 51-LIB3057-017-Q1-K1-E4
ccagcatgggagccagcgccgcgcaggaatggggcgtcccctgtgccctctcgccagaggagcacttgccaagggcagtgaggggctggtaggcccctggagaagcagcaccgacaatgacgacaacaagagatcccttcctcacccctttgcacccctcccactgcgggtgtcctagagggaggaacggtgcttagggggagcagactcctgagatctgggcacaggcaacgcattcagatctggaccaagtcgtgacagcatcatcccagccccgcagccatgg

SEQ ID NO: 11906 - DNA, 312 bp, Bos taurus
  Clone ID: 51-LIB3057-018-Q1-K1-E12
tttcccaaggattactctaacaaacctttgcaccttactgtcttttttggctacaaaacttacttgacccacattcttacggaagaacctagtccaatgtccaacattaacaataaagaaatttttcacgctttaaccatcttagttactccttccatttttattgcttgcataatgaactacctacaaacacccctaggccttcctaccttataaaccatattttctgagcatattaactaccagttcaaaaggcgcttttacaataacttgcataattccaataagaaagcctttaccaaatactttaat

SEQ ID NO: 11907 - DNA, 301 bp, Bos taurus
  Clone ID: 51-LIB3057-018-Q1-K1-E4
actctcgcaatactacttaactactctcacctttcacttactagatcggcatttatcccttccgtagcgtttgtaactctgcttaggaaacatatatcatgaaaataagttttaacaaggtaaattttatcttcttacttataccaacatcttatacttttctatttatttatacacaaacctttatacttattatattcctcattcttttatataataacgatctacttctttatctcatctttaacatcttctttcataatctaaacctattttttatttctttttatatcctttttct

SEQ ID NO: 11908 - DNA, 321 bp, Bos taurus
  Clone ID: 51-LIB3057-019-Q1-K1-E4
gcagcggatgctttgagctgcctacccttatcctaaaggaccaaaacatccaagatgtgtgtgtgtacatgtgcgtaggctgcagaccaccacgggagaccctactgatctctgctctcctgagaaggggagctccaggaatggagagggctggggcctgtcaccactcagacctgtattctacatctggttccataagtcttattcactctcacttaacttacagacacgagggtgctttcccgtttaataatcttagaaatcctctcaggcaatcccttcctctaaaagctagggatacggtcccccgggaaggaaatc

SEQ ID NO: 11909 - DNA, 438 bp, Bos taurus
  Clone ID: 51-LIB3057-020-Q1-K1-E4
ggagaatggagaccaaacctgtgataacctgtctcaaaaccctcctcatcatctactcgttcgtcttctggatcactggggtgatcctgctggccgttggagtctggggcaaacttactctgggcacctacatctcccttatcgccgagaactccacaaatgctccctatgtgctcatcggcactggcaccaccatcgtcgtgtttggcctgtttggatgctttgccacatgccgtggtagcccatggatgctgaaactgtacgccatgtttctgtccttggtgtttctggctgagctcgtggctggcatttcagggttcgtgtttcgtcatgagatcaaggacaccttcctgaggacttacacagacgccatgcagaattacaatggcaacgacgagaggagccgggcagtggaccacgtgcagctcagcctgagct

SEQ ID NO: 11910 - DNA, 239 bp, Bos taurus
  Clone ID: 51-LIB3057-021-Q1-K1-E4
aggtacacaggtgtcgtgaaaccgaccgttaagcctaagccatgatgtaagaggggaagaccctcatcatcttcggcgtcattgtgcacgtagattcatggaagtctaccacgactgaccatctgagctataactgtaactgaatctacatgagatcaactgataaggtctagaaggatgctgccgagctgggagatgcctgctgtaaatatgcctgagtattgcacacacttagctct

SEQ ID NO: 11911 - DNA, 414 bp, Bos taurus
  unsure (317),(320): unsure at all n locations; Clone ID: 51-LIB3057-022-Q1-K1-E4
agagcttcctggtgaagtgtgtttcttgaaatcatcaccaccatggacagcaaaggttggtcgcagaaagcatggtcccgcctgctcctgctgctggtggtgtcaaatctactcttgtgccagggtgtggtctccacccccgtctgtcccaatgggcctggcaactgccaggtatcccttcgagacctgtttgaccgggcagtcatggtgtcccactacatccatgacctctcctcggaaatgttcaacgaatttgataaacggtatgcccagggcaaaaggttcattaccatggccctcaacagctgccatacctnctnccttcctacccctgaagataaagaacaagcccaacagacccaccatgaagtccttatgagcttgattcttgggttgctgcgctcctggaatgac

SEQ ID NO: 11912 - DNA, 292 bp, Bos taurus
  unsure (31): unsure at all n locations; Clone ID: 51-LIB3058-002-Q1-K1-E12
gaagttgcgagttatggggccgcgaaccctncttctgctactctcgggggtcctggtcctgaccgagacccgggcaggctcccactccctgaggtatttcagcaccgccgtgtgccggggcggcctcgaggagccccgctttatcatcatcggctacttggacgacacgcagctcgtgcggctcgacagcgactccccgaatacgagggcagaaccgcgggcgccgtggatggagcacgaggggccggagtattgtgatgagcagacgcgaatagtcaaggacaccgcacag

SEQ ID NO: 11913 - DNA, 453 bp, Bos taurus
  Clone ID: 51-LIB3058-002-Q1-K1-E4
gcaactgcaaagcagcaagctctactcttcttctgtactgaacgtgtgactagataacaacaagcgtgaaccatggcggacgagtacggccgcagcggctacggcaggtccggcgccggcgacgactacgacagcggctacaacagcaagtccggcactgatgactacggccgtggcgaaggtggctacaacaagtcgggcggcgatgacgactacggccgcagcggcggcgatgggtacggcaggtccggcggcgacgactacggccgtggcaccggcggcggtggctacaacaagtccggcggcggagacgactacggccgcagcggcggcgacgactacggccgtggcaccggcggcggcgggtacaacaagtccggagacgacggctacgacagcgggtacaacagatcgggcaccaccaacgacgacgaatacggccgtggcaccggc

SEQ ID NO: 11914 - DNA, 317 bp, Bos taurus
  Clone ID: 51-LIB3058-004-Q1-K1-E12
ctcccgcacctgcctcggcggcgggggcggctttcccgacgagccccgcgacgtccccggctacggaagcctgtctcgagggctgggcgtccggcccccacgcggaggccccccaggcccaggccccggcgatggctgcttcaccctgcccagccgccgggaggcctttcctgtggggccagggccggagccggggccgccggccagccgctcacagcccgagcggttccaggcggagccgtatggcttggaggacgacgctcgcagcctggcagccgacgaagaagggcccctgagctggagccgggctactgcac

SEQ ID NO: 11915 - DNA, 443 bp, Bos taurus
  Clone ID: 51-LIB3058-004-Q1-K1-E4
gttgtcaggatgaagatcgaggaggtgaagagcaccactaagactcagcgtatcgcctcccacagccacgtgaaggggctggggctggacgagagcggcctggccaagcaagcggcctcgggactcgtgggccaggagaacgcgcgtgaggcatgtggtgtgatagtagaattaatcaaaagcaagaaaatggctggaagagctgtcctgttggcaggacctcctggaactggcaagacggctctagctctggctattgctcaggagctggggagtaaggtccccttctgcccgatggtggggagtgaagtatactccacggagatcaagaagacggaagtgctgatggagaacttccgcagggccattgggcttcggataaaggagaccaaggaggtgtacgaaggagaggtcacggagctcaccccatgtgagacggagaa

SEQ ID NO: 11916 - DNA, 439 bp, Bos taurus
  Clone ID: 51-LIB3058-006-Q1-K1-E4
tccagagttaccattatgagtatgtcagctctattctacaaaggatggataaaaatgggtagccttattttcttgcagtgtagtgctgtgaattttacatctgttaacatgaaaggcgaagtcagagccaccctgggcagcaagtacactggtttattttctgagacagtagagactaatacgtttgggaccaaaaccaccaaaatcgaacattttggggtcacaaaggggccaggtgttctctggagcagtcactggttggtgcttcattgcaatcattttacattgatacccaacagttaggacctggaccctgggaataagctgagggtgctgtactgttgggggaaggtgactgtagccatacagaagataaaataagggtttttctgcaaaatttccatttgaggatttttacatttaatattttttaaaacag

SEQ ID NO: 11917 - DNA, 388 bp, Bos taurus
  Clone ID: 51-LIB3058-007-Q1-K1-E12
cagcgagggagctgctctgctacgtacgaaaccccgacccagaagcaggtcgtctacgaatggtttagcaccaggcgccccacgaacgtgcggtgcgtgacgggcgagggggcggccgcctttccggccgcgccccgtgtcccgggacgaagggctctccgcaccggaccccggtcccgacgcgcggcgggggcgcgccgcgccgcgccccgggggacgcgggcgacggcccgccggcggggacggcgggggaccggctatccgaggccaaccgaggctcccgcggcgctgccgtatcgttccgcctgggcgggattctgacttagaggcgttcagtcataatcccacagatggtagcttcgtcccattggctcctcaggcaagcaca

SEQ ID NO: 11918 - DNA, 418 bp, Bos taurus
  Clone ID: 51-LIB3058-007-Q1-K1-E4
cctgcccgttcgacagatagccgtaacttctgtgctgagccagccgcatccctgagacaagatggtgaacgtcggagtgaacggattcggccgcatcgggcgcctggtcaccagggctgattttaattctggcaaagcggacatcgtcgccatcaatgaccccttcattgaccttcactacatggtctacatgttccagtatgattccacccacggcacgttcaacggcacagtcaaggcagagaacgggaagctcgtcatcaatggaaaggccatcaccatcttccaggagcgagatcctgccaacatcaagtggggtgatgctggtgctgagtatgtggtggagtccactggggtcttcactaccatggagaaggctggggctcacttgaagggtggctccaaaagggtcatcatc

SEQ ID NO: 11919 - DNA, 310 bp, Bos taurus
  Clone ID: 51-LIB3058-008-Q1-K1-E4
gttctagatcgcgagcgggcgccctttttttggttggcttcttttagttctgtaccatgatctgagcgttctgggccatctgccccttatttacaaggtattgaggaggggaggggagcaaacctcagcatgatctttgattcttaattattgtttactcaggaggtaactttcactgtaagaattaaaaacttgtaaaataacctattttactgcgcaccccctttccctgtaacgctcaagctgtcaacacaaggaagtgggtaagcgttaaacaggaacctggaccaacagggaccagactgggcca

SEQ ID NO: 11920 - DNA, 354 bp, Bos taurus
  Clone ID: 51-LIB3058-012-Q1-K1-E4
tcgcggagccgtgctggttctgcagctctgtggcaagccgcggagtctgggttctgatccgcaggatggggtttgttaaagttgtcaagaacaaggcctacttcaagagataccaagtgaaattcagaagaaggcgagagggcaaaactgactactatgctcggaaacgattggtaatccaagataaaaataagtacaacacacctaaatacagaatgattgttcgtgtaacgaacagagatatcatttgtcagattgcttatgcccgtatagaaggagatatgataagttgggcagcttatgctcacgaactcccaaaatatggtgtgaagggttggcctgacaaattatgct

SEQ ID NO: 11921 - DNA, 236 bp, Bos taurus
  Clone ID: 51-LIB3058-015-Q1-K1-E12
tccagtccttcgtcaaagactgccttactaaagatcacaggaagagaccaaagtataataagctacttgaacacagcttcatcaagcgctacgagacgctggaggtggatgtggcgtcctggttcaaggatgtcatggcgaagaccgagtcaccgaggacaagcggggtcctgagccagcaccacctgcccttcttcaggtagccgcacggtggcggtcggcccgctgggggacgc

SEQ ID NO: 11922 - DNA, 234 bp, Bos taurus
  Clone ID: 51-LIB3058-016-Q1-K1-E4
gctcgtggccaccctggcgctggcctttttctcactgtgtggcaaggtcaagaagtgggagcataatggagtctgcatcttggtcacggccttgctatacgtgctcatgtgggtggcttggatgaccatgtaccggtttgtcaacgctgagctactacagggagatgcgtgtggcgaccccaccttggccatcatgctggtggaaagttgctgggtcttcggaatcttccatgc

SEQ ID NO: 11923 - DNA, 159 bp, Bos taurus
  Clone ID: 51-LIB3058-017-Q1-K1-E4
acttccatggtcctataggagagtatagatcctttaccctaagtattctctgactgtaataaattttcctttcgtctaaccaaatttttcattgttctttttaagttatttctatataatctctttttctgtcttctctcaattagtactccagattta

SEQ ID NO: 11924 - DNA, 374 bp, Bos taurus
  Clone ID: 51-LIB3058-018-Q1-K1-E12
cagccaaggaccactgacatgtctgagttagagaaggccgtggtggccctcattgacgtcttccatcaatattccgggagggaaggtgacaagcacaagctgaagaagtcagaactcaaggagctcatcaacaatgaactttctcattttttagaggaaatcaaagagcaggaggttgtggacaaagtcatggagacactggacagtgatggggacggcgaatgtgacttccaggaatttatggctttcgttgccatgattaccactgcctgccacgagttcttcgaacacgaataaggaaaagaaagcagcggagctgtttctgcagcaaagacggagtttgaccaggggaacacaggcagggcttgcaaggc

SEQ ID NO: 11925 - DNA, 458 bp, Bos taurus
  Clone ID: 51-LIB3058-018-Q1-K1-E4
aggagatcaaaccagtcaattctaaaggaaatcagtcctgaatattcattggatggactgatggtgaagctgaagctcgaatactttggccacctgatgcaaagaaaagaccctgatgctgggaaaaattgacggcaggaggagaaggtgacgacagaagatgagatgggtggatggcatcaccgactcgatggacatgagtttgagcaagctctgaaagttggtgatggacaaggaagcctggtgtgctgtaatccatgattttgcaaagagtccgacatgactgagcgactgaactgactgaactgaattttagcatcccacgtggggagccatcacagagtttcaagcagagccatgttattatttgaatatatttagaaagggttagctcactgctgtgctgaaatcagacttcaggagagtacttaggaggtaactccaataattcacatgga

SEQ ID NO: 11926 - DNA, 433 bp, Bos taurus
  Clone ID: 51-LIB3058-019-Q1-K1-E12
caaaatcacagtaaacaaaattgtcctttctgagcagcgatgttcttcagaggctttggtaagaactttgtatgtttcttggtattataccaagttggattttgtttatttaattaggagctttgagctcctgagttgccagatagaatatgcgaagagtggcagctcatagtaatccttctcctccctgtcatgcacctctccatgtcccctttcctcctttctcactttagccgtaatcctccaccagggacgtttactggggctgagggcgaataaaacatcaggagcatcgggaaatcgtcctggaagtgtcattcgagtatatggtgatgaaaacagtgattaagtgacaccagggacatttataccctattgttcaatggcacatgcacagctttgcttccatgggcacagggatgctgtgaaattt

SEQ ID NO: 11927 - DNA, 276 bp, Bos taurus
  Clone ID: 51-LIB3058-021-Q1-K1-E4
gataaatatcgtgcgactttaatcggtaaatatgttgtcagaaccgagtacttaatcttttacgggatggcttcagctatttggatgttaattcagtaacttcaatggtctgaaacatgattcttagctttacttgaatactgtcttactgtggaatccaaacgtttcgccgtaaaactgacagctgatattacctaagtgccctgttggtatccatgatgcatgtacacattccttacttcagagcttcattcggacttttaccctgaaatactt

SEQ ID NO: 11928 - DNA, 411 bp, Bos taurus
  Clone ID: 51-LIB3058-023-Q1-K1-E12
aaatctctgcaagtggactgcgtctactttgtcatgtcgttcagtctgtagttcgatgtctaattgtatgaatccatgactcgttccacaggacaccacagacagtcaggagagaatacagcgctcccgagcttgttgtgaggacggttctgcctttgtgttaccatgtgtagatgccttcatgttcatgtgactttcaataggaaatacctaagcttccatgtttgctccgtgtcttacagttttcaaggaacagtgtataacaattgcccatttcatatgcagagtatgaaagtggcttctattttgtaatgctccaaatacctaacagtgtatagaatgcttatcagatgagatcctttccaatgttgattctgacctgtcagagttttggaagacaaactaacttct

SEQ ID NO: 11929 - DNA, 415 bp, Bos taurus
  unsure (282): unsure at all n locations; Clone ID: 51-LIB3058-024-Q1-K1-E4
tcgcggactcgtgggcggacgcgtggggcttcagtgcatgagtagggtgatgcagtaccacgggtgccgaagcaacattaaggaccggagtaaagtgaccgagctggaggacaagtttgatttgctggtcgacaccaatgatgttattctggaaagagtgggcattttactggacgaagcatcaggcgtgaataagaatcaacaacctgtcctccctgcagggttacaggtcccccaaaccatagtgtccagctggaaccggaaggcaggagaatatagcanaaaaacaaaatctgaaactttccggctgcttcatgcaaaaaacatcatccgacctcagcttaagttccgagagaagatcgacaactctaacacaccatttcttcccaaaatcttcattaagcccaatgctcag

SEQ ID NO: 11930 - DNA, 398 bp, Bos taurus
  Clone ID: 51-LIB3058-025-Q1-K1-E12
tagatcgcgagcggtcgccctttttttttttttttggctttttgttttttaaataaaggaaagtcaagaacaaaaaaagaaaaaaaaaaaaaaaaaaaaaaaaaaaaaaaaaaaaaaaataaaaaaaaaaaaaaaaaaaaaaaaaaaaaaaaaaaaaaaaaaaaaaaaaaaaaaaaaaaaataaaaaaaggacaggaattttcttaattcaaaattatcttctgctgcattaggagctacagcttctgcaataacatgactaaatactattttaaaagtagttcttttcatagataataaaatagtaatactcaatgttcatccaaattacaagtttgtcgtcaacatagactttaacatagacatcaattatgtaacacccaaataccatatggcct

SEQ ID NO: 11931 - DNA, 441 bp, Bos taurus
  Clone ID: 51-LIB3058-025-Q1-K1-E4
tgtgagtccacaagccgctttctctgctgtctgacccgctcggctccgcgatgccggtggaccttagcaagtggtccgggcctctgagcctgcaggaagtggatgagcggccgcagcacccgctgcaggtcaaatacggcggggcggaggtcgacgaactgggcaaagtgctgacacccacccaggttaaaaaccggcccaccagcattacatgggatggccttgatccaggtaaattgtacaccttggtcttgacagatccggatgctcccagcaggaaggaccccaaatacagggaatggcaccatttcctggtggtcaacatgaagggcaacaacatcagcagtggcacggttctctccgattatgtgggctctgggccttccaagggcacaggcctgcaccgctatgtctggctggtttacgagcaggaaggaccac

SEQ ID NO: 11932 - DNA, 441 bp, Bos taurus
  Clone ID: 51-LIB3058-027-Q1-K1-E12
cgggtcggaccaacccttccggcgaaagggtcctgccaatgctcgaatgcccgagaaggtaacctggatgaggaggatgggaattctgcgccgggtgcttagacgataccgtgaatctaagaagattgaccgccacatgtatcacagcctgtacctgaaggtgaagggtaacgtgttcaaaaacaagcggatcctcatggaacatatccacaagctgaaggcagacaaggctcgcaagaagcttctggcggaccaggctgaggcccgcaggtctaagaccaaggaagcccgcaagcgccgtgaagagcggctccaggccaagaaagaggaaatcatcaagactctgtccaaggaggaagagaccaagaaataaagttctccccctcttctctgtacatagtggcctcggcaattgcatagatcactcattcaataaaagac

SEQ ID NO: 11933 - DNA, 136 bp, Bos taurus
  Clone ID: 51-LIB3058-029-Q1-K1-E4
gtcagcacccagaggaggagatgccgagacaacgagagggtgagcgctggcttccggaatggccacagttgcctcttttaggaatctcttcagaactgggagcacagtgacttgagttattaaaatacttgttcat

SEQ ID NO: 11934 - DNA, 374 bp, Bos taurus
  Clone ID: 51-LIB3058-030-Q1-K1-E4
ctcgcctgaagccctccgaggccggcctctactccttccaggctagaaatgccagaggcgaggacaccctgacctttgaactcaccctcctataccccccggaagtagaagtcatgtggaccctctccagtggctctaaagccctgctctgtgaagcctccgggtacccccaggccaatgtgacgtgggtgcagtgcagcagccacaccaacagatgtgataagacccacgtgctggtcctggaggagccgaaccctgatgagctgcgccaggagccctttcacaaagtgaccgatcagagcctgctgacccctgggaccttggaacacaacaggacgtacgagtgcaggggccgaaacatgatggggaacacc

SEQ ID NO: 11935 - DNA, 323 bp, Bos taurus
  Clone ID: 51-LIB3058-032-Q1-K1-E4
gtccagagccgccttcggacatggggctagtaggacgagcaaaggatgctgaccggatgcggagatcccaaggaggaggaagaggaggaggaggaattagtggatcccataacaacagtgagagagcaatgctagcagctggagaaatgtgtaaaggctcgggagcggctcgagctctgtgattagctgttatcctatacgttacagacagatgatgactgcacagaggagctatatgattacttgcatgctatgtaccattgtgtgttccacagactgtttaacatttttgaaattatttgagcatattattttatcattat

SEQ ID NO: 11936 - DNA, 425 bp, Bos taurus
  Clone ID: 51-LIB3058-034-Q1-K1-E12
ggggatccttctctgatgagtacaagctgttggtcgaggacctggctgcctgttgccgccgggatttccgggtcctggtgctggatgataccaaccatgagcgggagcggctggagcagctctttgagctggccgaccagtaccagtaccaggtggtgctggtggagcccaagacggcctggcggctggactgtgcccagctcaaggagaagaaccagtggcagctgtcagcagatgatctgaagaagctgaagcctgggctggagaaggacttcctgccgctttacttcggctggttcctgaccaagaagagttccgcggccctctggaaaactggccagaccttcctggaggagctgggcaatcacaaggccttcaagaaggagctgcgacactttgtctctggggatgagcccagggagaag

SEQ ID NO: 11937 - DNA, 433 bp, Bos taurus
  Clone ID: 51-LIB3058-034-Q1-K1-E4
ggcctacctggggctgctggagctgttgtccgtccggcagaagcacgaggagttctgtgtccccatggtcatggtccccgccaccgtctccaacaacgtgcccggctccgacttcagcatcggggcggatactgccctcaacaccatcaccgatacgtgtgaccgcatcaagcagtcagccagcgggaccaagcggcgcgtgttcatcattgagaccatggggggcttctgtggctacctggccaacatgggaggactggcagctggcgcagacgctgcctacatcttcgaggagcccttcgacatccgggacctgcagtccaacgtggagcacctgacggagaagatgaagaccagcatccagagggggctggtgctcaggaacgagagctgcagcgagaactacaccaccgacttcatctaccagctctac

SEQ ID NO: 11938 - DNA, 434 bp, Bos taurus
  Clone ID: 51-LIB3058-036-Q1-K1-E12
ggggccctgggcctggagcctgcggcttcgcacgtatgtccgaacagcctgcagcctgcgaaccgagttcctgcagagcctcctgagtcctcaggcccagggaggcggcgttctaaccctgcaagatgaccactttggaacttcctaccagcagtggcttagctcagtggagagcctactgacaaaccacccaccaggccacgtcctggctgccttgcagcatctggctgcagagcgggaggcagagatccagtccctgtgcagtgtggatgggctccaggatatggagagaaccaggtcccaggcaccaaaccagtcagactccagccagaccctgccatccgtggtgcatctcatccaggagggctggcggtctgtgggtgagctggtcacccagcgggaacccctcctgaaagagcatcaagtcctgaccc

SEQ ID NO: 11939 - DNA, 312 bp, Bos taurus
  Clone ID: 51-LIB3058-036-Q1-K1-E4
gcggagaagcatggcgttgtttcctcgttcagttgttccagccctcaggttctggggcctgcgaggtgcgcgggcgtggacccgctggcctcgtattccaggtggaggatggtccatatcttgttttgctggtgcctcaagtgacactggagggggagaccacagtcagaagaagtttctcctgcaggacatcgctgagctgattaagaccagagcctgccagaaggtggtggtcatggtgggggccggcatcagcacacccagcggcatcccaaacttcaggtctccgggggttggctactacagcatcct

SEQ ID NO: 11940 - DNA, 400 bp, Bos taurus
  Clone ID: 51-LIB3058-037-Q1-K1-E12
ggccggtcccgccgcggcgaacgtgatagctggtggaagccgaggcggtaggacctgcagcagcggctgagaccctggcggaagcgccatgtccgagccgccctcgcggggggccgagcgcgaccttttccgggacacgtgggtgcggtacctgggctacgccaatgaggtgggggaggccttccgctccctggtgccggcagctgtcgtgtggctgagctacggtgtgtccagctcctacgtgctggccgatgccattgacaaggtcaagaaagccagagatgtaccgggccctgaggcaggccgcagcagcagggtgaccgtggccgtggtggacacctttgtgtggcaggctctggcctctgtggccattccaggcttcactatcaaccgggtgtgt

SEQ ID NO: 11941 - DNA, 370 bp, Bos taurus
  Clone ID: 51-LIB3058-039-Q1-K1-E4
cttggaaggtggaaggccaccctagcgctctggtgtgtgtgtgtgtgtgtgggtgtgtgtgcgcgtggctggaatcagcatgtgaagggtgctccgggcatgctgctgcttgtatggctcctttggcctctgaccctgctgcccacactttctctccaacaccacagaaactggctctcctgcttccttcctggggagcccagtggccggagagggaagttggtggagcccgggtgttgccaggccctgtgcccgtgagtctcaggggccctatcaaagccagctgggctgaactcataccaagagggaaacacctggaagcaataaaccgaagttcgagaaaaaaaaggtataaaaaaaaaaagggcgg

SEQ ID NO: 11942 - DNA, 415 bp, Bos taurus
  unsure (369): unsure at all n locations; Clone ID: 51-LIB3058-043-Q1-K1-E12
gggggaaggaagggtgggaagtcaggttggaaaatgccctagatctcctggtgtggtgcttcccttgcctggggctcaatgccctaacaggctccgcataaatggatggatggccctaccttaaagaaaaagttcttattatgtggtcctccatttataacacaaagcagagtagtatttttatatttaaatgtaaaaacaaaaaaattatatatatgggtgtgcagataaatgtgtgttttctctttagggagaaaaagccattctggttacggggaacccaaatttgagactaagtagtctggttagaaataaggatctccttttgagtgggccgtgggatgggagaggctgtgctgaaagagttgngctgttggggctgatattccctcacgaccacttgagggcttctctc

SEQ ID NO: 11943 - DNA, 446 bp, Bos taurus
  Clone ID: 51-LIB3058-045-Q1-K1-E12
gaaaagtggagggaaaaaaatccatatttccaccatccattgatgacagatatgctcctcactacattgtgtattcttctttctgtgcacaggcttataactgtgtcccaaacgtgtactcagattaagtgttagctttgtggaattatggttaaacgctttcatcctaatgttttcagatggcccttaaaatagtttcctgataacaaagttgattctgcttgcttcaattagcaagcataatacacacccagaggaataattggaaaatacaaaataaatgagaaaagaacaaaaaaagtcgcccatattcccaacgcccaacgactactgttaacatcttgtttcctccatctcgtatcagtgcacaagcttgtgatttatgaccgtggtgaatatgtgtgcatacagtctaaaatgaaaaaaaatcacagaaaattattaaa

SEQ ID NO: 11944 - DNA, 441 bp, Bos taurus
  Clone ID: 51-LIB3058-045-Q1-K1-E4
aggaaatgtctctatgaaggtttcttatgtacctgaatggggttcgattctgaaatcgttctacctgttgcaccgatattcaaatatgcgcaatgagctggaggagatgcagcggatagctgaccagctggccgatgagtctctggaaagcacccgtcgtatgcttcaactggttgaagagagtaaagatgctggtatcaggactttggttatgttggatgaacaaggagaacaactggaacgcattgaggaagggatggaccaaatcaataaggacatgaaagaagcagaaaagaatttgacggatctaggaaaattctgcgggctttgtgtgtgtccctgtaacaagcttaaatcaagtgatgcttacaaaaaagcctggggcaataatcaggatggagttgtggccagccagcctgctcgcgtggttgacgaacggga

SEQ ID NO: 11945 - DNA, 447 bp, Bos taurus
  Clone ID: 51-LIB3058-047-Q1-K1-E4
tcccggctcgacccactcgttcgaaggccagtaaagtcttcacaagagaatatattggtgatagcaagaacctttttcaacggcgcaagataagattctacatgtggacatcatcagttagtcaacaccaaaatcagattgattatattctttgcagacaaaaatggggagctctatacagtcagcaaaagcaagactgggagctgactgtgcctctgctcatgaacacctaattgcaaaatacagacttaaattgaagaaagtagggaaaaccactagatcatttagatatgacctatatcaaaccccttactactatacagtggaagtgggaaatatatttaagggactagatctgatagacagaatgcctgatgaactatagacagaggttcatgacattgtacaggagacagggagcaagaccatccccaagatagagaaaag

SEQ ID NO: 11946 - DNA, 415 bp, Bos taurus
  Clone ID: 51-LIB3058-049-Q1-K1-E4
tctttacattctaggaataaaataaccatgtgacccagcaatcccactactgggagtatagagaaaaccacggttgacatctaccccaatgttcattacagcactaatttacaatatccaggacatggaagcaacctagatgtcctttgacagatgagtggatgaagaagatgtgtatgatatacaatggaatattacttacccataaaaaggaactagtctgagtcaatggtagtgaggtggatgaatctggagtctgttatacagagtgaagtaagtcagaaagacacaacaagtattatatgttagcgcatatatatagaagttaacctggagaaaaaaaatggcaacccattccaggattcttgcctggaaaatcctatggacagaagagcctggcaagccacaatccctg

SEQ ID NO: 11947 - DNA, 420 bp, Bos taurus
  Clone ID: 51-LIB3058-051-Q1-K1-E12
gtctgatccgcaagctggccgcactcagccagtatgaggaagttctggccaaaatcagttccacgtcgacagatcgactcacagttctcaagaccaaaccacagtccatccaaagggacatcatcactgtctgcagtgacccttacacgttggcccagcagctgactcacatagagctggagaggctcaattacattggcccagaagaatttgtacaagcctttgtgcagaaggaccctttggacaatgacaagagttgctacagtgaacggaagaaaacacggaacttagaagcctacgtggaatggtttaatcgcctcagctacttggttgctacagaaatctgcatgcctgtaaagaagaagcattgagcaaggatgattgaatatttcattgacgtggctcgggaagtgtttaaca

SEQ ID NO: 11948 - DNA, 381 bp, Bos taurus
  Clone ID: 51-LIB3058-051-Q1-K1-E4
ggatgaagttgatgatcaaggcagcaatggggttcagcttgggggggtgtagccgacacctccagacctcccctctcactcagaccctccctcagcccaagcggaggagaaggacaaggtactccacggtggcccctgtgagcagacgtctcacccctaccaagctgccctctacacggcgggccacctgctctgcggaggcgtcctcattcacccgctgtgggtcctcaccgctgcccactgcaaaaaaccgaatctgcaggtcttcctggggaagcacaaccttcagcaaagggagtttttccaggaggagagctctgtcattcggaccgtggcccacccgggcttcaatgccgccacccacgaccaggacatcatgct

SEQ ID NO: 11949 - DNA, 400 bp, Bos taurus
  Clone ID: 51-LIB3058-052-Q1-K1-E12
cgaaatcccaaagagcaactgcaatgtgggcgtcgtgaacgtgggtgcgcccgcggccggcatgaacgcggccgtgcgcgctgccgtgcgcgtgggcatctctgagggacacaagatgtttgccgtgtacgacggcttcgagggcttcgccaaaggccagataaaggaaatcggctggggggacgttggaggctggacgggccaaggcggctccatccttgggacaaaacgcaccctccctgggaagtacctggaggacatcgcggcgcagatgcgaacccatggcatcagtgcgctcttgatcatcggtggattcgaggcctacctggggctgctggagctgttggccgcccggcagaagcacgaggagttctgtgtccccatggtcatggtccccggc

SEQ ID NO: 11950 - DNA, 271 bp, Bos taurus
  Clone ID: 51-LIB3058-052-Q1-K1-E4
atcgcgagcggccgccctttttttttttttttggtggtgaacacatttatttaatatggggggtggggtattgctgcctctgtcagtgtgtatagggtggtagggagacaaccagagggactttcgccctggagtaagaggctgttctggccccaggctgatgggtggggagcagactgaggagacggggaggtgtgtaaggtggggaggggagggtgatactctgcacacattcttggcaccatggttcatgcccagccagtcaccaaag

SEQ ID NO: 11951 - DNA, 428 bp, Bos taurus
  Clone ID: 51-LIB3058-053-Q1-K1-E4
caaggctccgtggccaacccgtccctgtcgccccgacccaggcgccacgcccgcccacaccgctaccatggctgaggacgcggacatgcgcaatgagctggaggagatgcagcggagagctgaccagctggccgatgagtctctggaaagcacccgtcgtatgcttcaactggttgaagagagtaaagatgctggtatcaggactttggttatgttggatgaacaaggagaacaactggaacgcattgaggaagggatggaccaaatcaataaggacatgaaagaagcagaaaagaatttgacggatctaggaaaattctgcgggctttgtgtgtgtccctgtaacaagcttaaatcaagtgatgcttacaaaaaagcctggggcaataatcaggatggagttgtggccagccagcctgctcgcgtgg

SEQ ID NO: 11952 - DNA, 405 bp, Bos taurus
  Clone ID: 51-LIB3058-057-Q1-K1-E12
cttgggttcttgtatccaaatttcaaggactagtcagtcttctagagcttcccatcatagttttgcccttatttttaagttaagaaataatgattaacttatgaagaaattatctggggacaagaatgggatccttcccttgttttgttgtagtaagcattgttgatttgttttaattggttttttgctatatcgttattttctaatttttgggttttggatttttttgttgtattttatatgtgtcatttttagaatttttttacctttattttttgtatatattatttggtgatttttttcttttggtgggttatttatttggatgtttttttgtaatttttgtatatttatttgttttttttattgaaatatattttttatttattattaattttttttttt

SEQ ID NO: 11953 - DNA, 448 bp, Bos taurus
  unsure (431): unsure at all n locations; Clone ID: 51-LIB3058-057-Q1-K1-E4
gataccctttccctattactctgcacttcctttctcaaatccctactatctttcttagtcctgggttctgctcagggaggcttctcctcagtctttttttttgcaatttgtctccaggaaatggagaagtccccctgcgccctgctttgcccgcagcaaagccagcaggattgccctggtctcctctcctttcacccccacagagagttcccatcctctttgataaaagctcaaagttgttaggggtcaggagaaaaatgcaggccctgagaaacctatctctgtagaaagtttcccttggcccgtgctttgggttttctgctctttatagtttaattttactctccatttttctcccctccccttgctctaggtctaagctcagcacaggtgtgtgctcagggcagctcctaggcctggacagctctcanggaggaattagaatttg

SEQ ID NO: 11954 - DNA, 332 bp, Bos taurus
  Clone ID: 51-LIB3058-058-Q1-K1-E4
gcaagcaccaggcggcggctcagagcgagatgagcgcccggggactccgggcggcggctgcggaggcggaggctgcggcggttgcggttcatttgatgaattctttctcttcccgttctgtttcttctttttttcttttcttttttttcttccttttttctttttgttttcttctttcttttttctttttttctcttctttttttttttttttttttttttatctttttttctttttttttattttttttctttctctttctttattttctttttttttttttatcttttctttcttttttttttgtttttttttttttttttttttttttt

SEQ ID NO: 11955 - DNA, 268 bp, Bos taurus
  Clone ID: 51-LIB34-001-Q1-E1-E12
aataagagatttgctcaactcattgagggaagtcattaataatccttccgacaaggagaatgtgatgagattaacaacgattcaacatgataagcctatgaagaccttggtcagagcaatcgtctggatcgagtttgtcatgcgccacacatgcagcaagcacttgcggccagctatcacatgacactcacctgattccagtaccactctctggatgtcattgggttcctagtggactgtgttgcaactggcatatttgtcaacataa

SEQ ID NO: 11956 - DNA, 292 bp, Bos taurus
  Clone ID: 51-LIB34-001-Q1-E1-E4
gtgaactgatccctaccgtgctcgagtggccaactaccagcgtgacggccccatgtgcatgatggacaatcagggtggggctccaaattactaccccaatagctttagtgctcccgagcatcagccttctgccctggaacacaggacccacttctctggggatgtacagcgcttcaacagtgccaacgatgacaatgtcactcaggtgcggactttctatttgaaagtgctgaatgacgagcagaggaaacgcctgtgtgagaacattgcgggccatctgaaagacgcacag

SEQ ID NO: 11957 - DNA, 398 bp, Bos taurus
  Clone ID: 51-LIB34-002-Q1-E1-E12
cgggtcggcccaagcgtccagctagcagacccataggatcgctgcggggtccggcgcccgccacttctcgcgcttctccgagcctcctccggacgcatccagaccaaccagcattgccgaacgccgagtgcccttctcgctcctgctgggccccagctgggaccctttccgcgactggtatccggcccacagcagactcttctaccagtccttcgggctgccacggctgcccgatgaatggtcgcagtggctgagccagagtcgatgcgcgggctacgtgcgcgcactgtccgccgcaacgatcgagggttccgcctataatcgcgcgctcagccggcatctcagcagtggggtctccgagattcagcataccgccgaacgctggcacgtgtccctgg

SEQ ID NO: 11958 - DNA, 402 bp, Bos taurus
  Clone ID: 51-LIB34-002-Q1-E1-E4
agaagcgggtgagaaaaacttctgtttccaccgttttgcccatttctgcagatttgttccgaggccgaggagcctttgttggaagagatggtcatggtcctgagccccctgtttttggtcttcatactgggtctgggtctgaccccagtggccccggctcaagatgactacagatacatacacttcctgacccagcactacgatgccaaaccaaagggccggaatgacgaatattgttttaacatgatgaaaaatcgacgcctgaccagaccttgcaaagaccgcaacacctttattcatggcaacaagaatgacattaaggccatctgtgaggacagaaatggacagccttacagaggcgatctcagaataagcaagtctgaattccagatcaccatctgc

SEQ ID NO: 11959 - DNA, 410 bp, Bos taurus
  Clone ID: 51-LIB34-003-Q1-E1-E12
agtatggattccaaaatgcgctcatagttcgttacaccaggaaagtaccccaagtgtcaactccaactctcgtggaggtttcaagaagcctaggaaaagtgggtactaggtgttgtacaaagccggaatcagaaagaatgccctgtactgaagactatctgagcttgatcctgaaccggttgtgcgtgctgcatgagaagacaccagtgagtgaaaaagtcaccaagtgctgtacagagtcattggtgaacagacggccatgtttctctgctctgacacctgatgaaacatatgtacccaaagcctttgatgagaaattgttcaccttccatgcagatatatgcacacttcccgatactgagaaacaaatcaagaaacaaactgcacttgttgagctgttgaaacacaag

SEQ ID NO: 11960 - DNA, 385 bp, Bos taurus
  Clone ID: 51-LIB34-003-Q1-E1-E4
aaagattgaaactatgagagaaaaagtactgacttcatctgccagacagagactcaggtgtgccagtattcaaaaatttggagaaagagctttaaaagcatggtcagtagctcgcctgagccagaaatttcccaaggctgagtttgtagaagttaccaagctagtgacagatctcacaaaagtccacaaggaatgctgccatggtgacctacttgaatgcgcagatgacagggcagatcttgccaagtacatatgtgataatcaagatacaatctccagtaaactgaaggaatgctgtgataagcctttgttggaaaaatcccactgcattgctgaggtagaaaaagatgccatacctgaaaacctgcccccattaactgctgac

SEQ ID NO: 11961 - DNA, 414 bp, Bos taurus
  Clone ID: 51-LIB34-004-Q1-E1-E4
gcgacagacatggcggcggccaagcccgagaacctctccctgctggtgcacggacccggagacttgcgcttggaaaactatcctatccctgaaccaagcccaaatgaggtgcttctgaagatgcattctgttggaatttgtggctcagatgtccattactggcatcatggtcgaattggagattttgttgtgaaaaagccaatggtgctggggcatgaagcttcacgaacagtcgtaaaagtgggatcattggtcaggcacctacaaccaggtgatcgtgtcgccatcgagcctggtgctcctcgagaaactgatgagttctgcaagattggacgatacaatctgtcacctaccatcttcttctgcgccacgccccccgatgatgggaacctctgccggttctacaagcacaat

SEQ ID NO: 11962 - DNA, 324 bp, Bos taurus
  Clone ID: 51-LIB34-005-Q1-E1-E4
gggtcgacgcacgcctctagaggcagttctggatccactgcccacaccccgctctcgcatgcagatatgaggacagagagaacttccttcctcctggctctggggctcctggtgtctgggttctgcgccaggggctactgcctcccagataatgtgacgccagaataacagcacacagggacgtctgtggatggccactcattagcctccatcaacactgacttcgccttcagcctctacagacagttggctttgaatgaccccagtaagaatgttatcttctgccctcggagcatctccatatccttgggcttcctgtccctg

SEQ ID NO: 11963 - DNA, 404 bp, Bos taurus
  Clone ID: 51-LIB34-006-Q1-E1-E12
gtcctgtttgctttgttttaatatcatttcaagtacttatttgacttctattgttttaacctgagggtgataagattacatattaattttctacctatgttatgtgttaattcccataccctgtataatgaccgttgagtgcaattcagatatctgtgtcattaaaaatgagagagagaagacagatgtggtcagttgctatagcataatacttactttccctttttactggtatttatggaacacttcatctgtgttttctccatcttccatgattaagggaagccttttctctaacatttcttttattttaaaaagctgcccattatcatggtgtgagactaacaacacatcactgttaggcgtgcaggaacatatgcccatacttcatatttctgcgtttc

SEQ ID NO: 11964 - DNA, 297 bp, Bos taurus
  Clone ID: 51-LIB34-006-Q1-E1-E4
gaacgtggcagtgtgttacgtgactttaatacctaactaaggcgagacgtcatctgcccgcctgtgattcacgactaagctgccatagatcaccactgaggcacacgaggatacctttctgagcagccatccatcatagcacgttgtcatgtgacttttccactacaaatcggataactaatggcgaggactgcgacccgtagtggaattaatgcctctcatggctgatacggcacaatggttataacctgactcgtgttaagttttcgctaaacagtttcttaactgcactgtata

SEQ ID NO: 11965 - DNA, 319 bp, Bos taurus
  Clone ID: 51-LIB34-007-Q1-E1-E4
caaaaatttggaacatggaatcggatgacctatacttctcctcaccgtcacttcaactctgcctagtccagaggtgtgtctcgtctagataaatacacaactgacactgctcagctgttggccaatatgtcacagagaaattttaaaccgcctggtcacgaatgccttttctcagtatcaccaacaatgtcgatatgatcagcaagtcccagtacagcaccaactaactgaatttgcaccggcatatgttgctaatcattcccaggcaggcagtgaaaagtcacctcatactcacgttgtcaaataacatgcgtaatgt

SEQ ID NO: 11966 - DNA, 363 bp, Bos taurus
  Clone ID: 51-LIB34-008-Q1-E1-E12
gcagtcatggcggctcggtgcgtgcgtctggcccggggcagcctcccggctttcgcgttgtctctcaggtcttctcctcggctgctgtgcacagctgcaaaacagaagaacaacggccagaacctggaagaggacgcgggtcagaatgaacagaagacagatcttccttccacggagaagacactcatggaagagaaggtcaagctggaagagcagctgaaggagaccatggaaaaatataagcgagctctagcagatactgagaacttgcggcagaggagccaaaaattggtggaggaggcaaaactatatggcatccagggcttctgcaaggacttgctggaggtggcagacatcctggag

SEQ ID NO: 11967 - DNA, 412 bp, Bos taurus
  Clone ID: 51-LIB34-008-Q1-E1-E4
cgcctccagctgcctgcctgctgacacaccggggcctctctgaagccaccatgaaatccttcgttctgctcttttgcctggctcagctctggggctgccactcgatcccgcttgacccggttgcaggttataaggaatcggcctgtgatgatccagacacagaacaagcagccttgtctgccgtggactatatcaacaagcatcttcctcggggctacaagcacaccttgaatcatattgatagtgtgaatgtgtggccgacgcggcccacgggataggtgtatgatattgacatatataccctggaaaccatctgccacgtactggatctcacgcacctggtcaactgcatcgtgacgcagcagacgcaacacgcggtggaatgagactgctatatccatgtactgacaca

SEQ ID NO: 11968 - DNA, 399 bp, Bos taurus
  Clone ID: 51-LIB34-009-Q1-E1-E12
ctcagaccacactatctccactcgctcagacctgtggaagattagcgaccatgatttccaatgggataggaaccgtcaccgctggaaaaaggagtatatgtcttctccctttgctgcttattggcctctggggctgtgtgacctgtcatcggagccctgtggaagacgtctgcacagccaaacctcgggacattcctgtgaatcccatgtgtatttaccgttcctcagagaagaaggcaactgagggccaaggctccgagcagaagatccctggggccaccaaccggcgggtctgggaactgtccaaggccaattcccactttgccactgccttctatcagcatttggcagactccaagaataacaatgacaacattttcctggtcaccctgagtatct

SEQ ID NO: 11969 - DNA, 352 bp, Bos taurus
  Clone ID: 51-LIB34-009-Q1-E1-E4
gagatattccgccagcgcttcaggcagtttgggtaccacgacacccctggcccgcgggaggccctcagccaactccgggtgctctgctgcgaatggctgccgcccgagatccacaccaacgagcagatcctggagctgctggtgctcgagcagttcctgaccatcctgccccatgagctccaagcctgggtgcaggatcactgcccatagagcgccgaagaggccgtcactctcctggaggatctggaacgggagctggatgagccggcaccggaggtgtccccacctccccgtgagcagaaacggtcatgggaaaagatgtcaccctcaggaatgggggaagagtccctga

SEQ ID NO: 11970 - DNA, 438 bp, Bos taurus
  Clone ID: 51-LIB34-010-Q1-E2-E12
cctgaaatacatacaatttaagacaattgtatccagtgtaaataagcgtcccgatttccaaaccactggccaatgggatgttatcactgaaaaggatggtaaaaaggaatcagctgtctttgatgccgtaatgatttgttctggacatcatgtgtaccccaacatacctaaagagtcctttccaggaataaaactttttaaaggcaaatgcttccacagccgggactataaagaaccaggaatcttcaaggggaagcgagtcctggtgattggtctggggaactcaggctgtgacatcgcctcagaactcagccacatagctgaaaaagtcatcatcagctcccgaagtggctcctgggtgatgagccgggtctgggatgaaggctatccatgggacatgctgtttatcactcgatttgaaacattcctcaagaacac

SEQ ID NO: 11971 - DNA, 272 bp, Bos taurus
  Clone ID: 51-LIB34-010-Q1-E2-E4
gggtccacgcacgcgtccgtacagtgctataatacattattccaacaattatacttatacccctaacctggttatcaaataataatataatttgggttaactccacagcacacagccttctaattagctttacaagcctcctcctcataaaccagtttggcgacaacagccttaatttttcactactatttttctccgactcactatcgactccactactaattttaaccatatggctcctccctctaatactaatagctaaccagcatcat

SEQ ID NO: 11972 - DNA, 379 bp, Bos taurus
  Clone ID: 51-LIB34-011-Q1-E1-E12
ggcggctctggatccactgcccacaccccgctctcgcaggcagacatgaggacagagagaacttccttcctcctggctctggggctcctggtgtctgggttctgctccagggtccactgcctcccagagaatgtgaccccagaagaacagcacaaagggacgtctgtggatggccactcattagcctccagcaacactgacttcgccttcagcctctacaagcagttggctttgaaggaccccaataagaatgtcatcttctcccctctgagcatctccatagccttggccttcctgtccctgggggctcatgaccacactgtgacagagatcctggaaggtctcaagttcaacctcacagagacccccgagacagaaa

SEQ ID NO: 11973 - DNA, 373 bp, Bos taurus
  unsure (355): unsure at all n locations; Clone ID: 51-LIB34-011-Q1-E1-E4
aagacctgggatcgtgatcagaggcaaaggcctgaatgttttcctcaatcatgcaaagaccctgttcttccccggaaaccaggaaaaagatccactgctcaagaaccaaccaggaattctttgaatcttcagccttacttctaaccaacagctcatcctcggcaccatttatgtcagcttgctagagtggatgatgataactttctaaaaagattaatgtaaaatatagattgtgtgagggaggtccaattttttttaaatttttataggttaaatgacattttagggacatggctgaggttgcatgtagtttaattcttttccatgttatataactgataaagccaattaatanagcttcctttcatgatga

SEQ ID NO: 11974 - DNA, 417 bp, Bos taurus
  Clone ID: 51-LIB34-012-Q1-E1-E4
cgggtccagccacgcgtccgatttcttgcaacttcgaaaaatttaaaaccatgaaacatctattactgctacttttctgtgcttttatagttcaggcccaatttcctactgactatgacgagggacaagatgacagacctaaggtaggtttgggtgcccgcggtcatcggccctatgacaagaagaaggaagaggcccccagcctgagacctgtgccccctcccatcagcggaggtggctatcgggctcgtcccgccacagcaactgtgggccagaagaaagtggagagaaagccccctgacgctgatggctgcctgcacgcggacccggatctgggtgtgttgtgtcctacaggatgtaagttgcaagatactttggtaagacaggagagaccaatccgaaagagtatagaagatt

SEQ ID NO: 11975 - DNA, 307 bp, Bos taurus
  Clone ID: 51-LIB34-013-Q1-E1-E12
aggactagtggtattggccgcacgatggttttacagtctcttacttccaaccactgaaattgcccttcccgtgaagcggcggaaatgcacaagttgcacaagaagaccctagagcgctttagctaaccaagcccactagagcctcttcatccattatggaataacatcaatctccatgagttggtgtttccagttggggtgacctctgcgaatactaatccctccgcacgactttaaagaccagatccacacatcatgtcacccgatcacgcagtgatccatacacatgctcatcggaacaagttac

SEQ ID NO: 11976 - DNA, 362 bp, Bos taurus
  Clone ID: 51-LIB34-013-Q1-E1-E4
cacgcgtccgactacatgcaacttcggtaagtttaaaaccatgacacatctactactgctacttttctgtgctttcatacttcaagcacaatttcctactgactatgacgaaggacaatatgacatacctaaggtacgtttgggtgcccacggtcatctgccctatgacaataataaggaagaggcccccagcctgagagctgtgaccccgcccatcagcgcaggtggccataggactcgtcaggccacagcaaatgtcagccagaataaagtcgccataaaaactcctgacgcggatggctgcctgcacacggaccccgatctgagtgtgttgtatcatacgggatttaagtaggaggata

SEQ ID NO: 11977 - DNA, 317 bp, Bos taurus
  Clone ID: 51-LIB34-015-Q1-E1-E12
caggatgcaggctggctggctgtgcacatgctgatcctatgtatcacccatccaatcgggaacaagcgctatgtggtagccgacctcgccactgcctgtcgcaagacatgtctggacataatgccgatagcacatgctagccgggaaagtgtgctgtgtgggggatgacatcgcggtgaatgacgtttgacagttacttgaccactcctcgccatcacccctgacaattgctactctacggtggcccctgtcacctctggcaatagcaagaccatgtctatggccacgcttgatagtaatccgattttcaccaacgt

SEQ ID NO: 11978 - DNA, 195 bp, Bos taurus
  Clone ID: 51-LIB34-018-Q1-E1-E12
agcgaagaagaaagaaagaggatggtggcctcctgggcgcagaggctgaagaccctctgggaggaggagcccatccagtgctcgcccccgtggtactttgggcagtgacggaggccacgccacactgcgggggccacacgggagctgtgacgcgtgtaatgccactcaggcgcatgtaataaaggatgtcacgac

SEQ ID NO: 11979 - DNA, 243 bp, Bos taurus
  Clone ID: 51-LIB34-018-Q1-E1-E4
attccaagccgacccacgcgtccgtttttttattttttttttttttttttttttttttttttttttttttttttttttttttttttttttttttttttttttcttttttttttttttttttttttgaagggggccccgactttgttccctccaaaaagcggttcccacgacccaagcccaaacccccccctccccgcttctgccgcggggcagccacatcgccaaacggcccacgcaccgccc

SEQ ID NO: 11980 - DNA, 390 bp, Bos taurus
  Clone ID: 51-LIB34-019-Q1-E1-E3
gggtcaacccagcgtccggcctttctgaaaaaccggttgtgtgtccgccaccttagggagaaaatgtacccgtccgtggggcactaaccccggggaacccccttaaagcgcctcacactggaattttggcacaataggctcgcggggggccccacagaaacccccccgggccccggggcacaccgcggctctctcaaactgtgaaaccccccgctgtaaaagagtacatttgtgaatagggccccgcaattttttacccactgtgtggctttgggggggtcaaaagttgtggtctgacacacactgctgttgttcctctggacttagtgaaatgccctatgcaggtggccccacaatagtacaagagcatatttaatgggttttcagtta

SEQ ID NO: 11981 - DNA, 400 bp, Bos taurus
  unsure (346): unsure at all n locations; Clone ID: 51-LIB34-020-Q1-E1-E12
aacagaaacgtaaactataacctaggggtttctgttggatggttggcaactaagaatggaggaagaacaacaaagacatgttctccactttcttatttctcaaaacaatgttatcttcgtctttttaatcttaggtttttaacagattaaacctttaaagcaagaagtgaattctgtcttttcagacccagaaatacacatgaatactttgctatgattacattttagatattcatttatacttttctatatctaagactcatatcttgatttttactatcatatatgaatgaagcctttatatcttgtttttttgccaatcttgaaagatagatgggaaaagatnaaagaatgttgtctaactcttgattgcttagaaagtatttccatagtcaatgat

SEQ ID NO: 11982 - DNA, 374 bp, Bos taurus
  Clone ID: 51-LIB34-020-Q1-E2-E12
aacagaaacgtaaactataacctacgggtttctgttggatggttggcaactaagaatggaggaagaacaacatagacatgttctccactttcttatttctcaaaacaatgttatcttcgtctttttaatcttaggtttttaacagattaaacctttaaagcaagaagtgaattctgtcttttcagacccagaaatacacatgaatactttgctatgattacattttagatattcatttatacttttctatatctaagactcatatcgtgatttttactatcatatatgaatgaagcctttatatcttgtttttttgccaatcttgaaagatagatgggaaaagataaaagaatgttgtctaactcttgattgct

SEQ ID NO: 11983 - DNA, 397 bp, Bos taurus
  Clone ID: 51-LIB34-021-Q1-E1-E12
cagtcaccagccctgacctaggacagtgaatcgataatggcactctccatcacgcggggccttctgctgctggcagccctgtgctgcctggcccccatctccctggctggagttctccaaggacacgctgtccaagagacagatgatacatcccaccaggaagcagcatgccacaagattgcccccaacctggccaactttgccttcagcatataccaccatttggctcatcagtccaacaccagcaacatcttcttctcccccgtgagcatcgcttcagcctttgcgatgctctccctgggagccaagggcaacactcacactgagatcctgaagggcctgggtttcaacctcactgagctcgcagaagctgagatccacaaatgctttcagcatc

SEQ ID NO: 11984 - DNA, 398 bp, Bos taurus
  unsure (375): unsure at all n locations; Clone ID: 51-LIB34-021-Q1-E1-E4
gaagatctgagaagcagaattgagatcctgaggcgcaaagtcatagaacaagtacaacgtatcaacgttctgcagaaaaatgtcagggatcaactggtagatatgaaacgattggaggtggacattgatattaagatccgatcttgcaaagggtcatgcagtagagctttagaacataaggtagatctggaggactataaaaatcagcagaagcaacttgaacaggttattgccataaacctacttccctctagagacattcaatacttaccattgataaaaatgagtacaattacaggccctgttcccagagagttcaagagccagctccaagaggcccctctagaatggaaagcactgctggaaatgcaacanacgaaaatggtgttggaaacttt

SEQ ID NO: 11985 - DNA, 437 bp, Bos taurus
  Clone ID: 51-LIB34-022-Q1-E1-E4
attattcccatcctattggccgtagcattccttacgttagtggaacgaaaagttctaggctatatacaactccgaaaaggtccaaatgtcgtaggtccatatggcctacttcaacccatcgccgatgcaatcaaacttttcattaaagaaccactacgacccgctacatcttcagcctcaatatttatcctagcacctatcatagctttaggcctagccttaaccatgtgaattcccctaccaataccctatcctcttatcaacataaacctaggagtcctatttatactagccatatcaagcctagccgtatactccattctctgatcaggctgagcttccaactcaaaatacgcactaatcggagccctacgagcagtagcacagacaatctcatatgaagtaacgctagcaattatcctgttatcagtactcct

SEQ ID NO: 11986 - DNA, 388 bp, Bos taurus
  unsure (350): unsure at all n locations; Clone ID: 51-LIB34-023-Q1-E1-E12
cagtggctaatgacacggtttctggaggcgaagaacgcggttggccaatcgcaagccagaagatgaaggttctgtgggttgccgtggtggtcgcgcttctggcaggatgccaggcggatatggagggagagctggggcccgaggagcccctgactacccagcagccccgggggaaggacagccagccttgggagcaggcgctgggccgcttctgggattacctgcgctgggtgcagaccctgtctgaccaggtgcaggaggagctgctcaacacccaggtcattcaggaactgacggcgctgatggaggagaccatgaaggaggtgaaggcctacaaggaggagctgganggacagctaggccccatggcccaggagacacacgcccg

SEQ ID NO: 11987 - DNA, 379 bp, Bos taurus
  Clone ID: 51-LIB34-023-Q1-E1-E4
gggcacgcaggaaaaagtgttccaggatacaatgttatgattttggatgacaacatgcaaaaactgaaggctcggtgtttaggaaacatcgtggtaaagttgccattaccacctggagctttttcaggactctggaagaatcaagaggcattcaagcatttatactttgaaaaatttcctggatactatgacaccatggatgctgggtacatggatgaagaaggctatgtttatgttatgtctcgagttgatgacgtgataaatgttgcacgtcacaggatttctgcaggtgcccttgaggagtctatcctttcccttggcattgtggctgactgtgctgttgtttggaacgaagattctttgaaacggcatatcccaa

SEQ ID NO: 11988 - DNA, 451 bp, Bos taurus
  Clone ID: 51-LIB34-024-Q1-E1-E4
ctcacgggtcgacgcacgcctctacagtcactcgtgctatgaacaagctctttggcctgtcttctgcagccgttgacagatgcatcagattcaccagcggcctggggacctgtggcctgctgacagccctgaagtctctcttcaccaagtatgtgtctgacttcactagtactcttcactcaatacgaaagaagtacagactggacgatattcctctcaactctctttttcaagaagattggacggcttttcagaattccattaggataatagccacctgtggagagctcttaaggcaatgtggggacttcgagcagcagctggcaaacaggattttgtccacagctgggaagtatctctctgactccttcagccctcggagcctgaccggttttcaagatagcatcttgacagacaagcagagctctgccaagaacccatggcaagaata

SEQ ID NO: 11989 - DNA, 366 bp, Bos taurus
  Clone ID: 51-LIB34-025-Q1-E1-E12
gctgggctggcctgtgttcggcaggttcgcagaccagcacggggcgcgggcagccttcacgctgtccttcctggcctcgtccgccctctacctgctcctagcggctgcctgcatccccgccctgcccggcgtggccttgctcttcgcctcgcgcctgcccggtgcactcatgcacacgctgccagctgcccagatggtcatcgcagacctgtccacacctgacgagcggcccgcggccctaggccggctgggcctgtgctttggcgtcggtctcatcttcggctccctgctcggtggaaccctcagcagctcgtgcgggattcagtgtccggtcattgtggccttcgtggtcaccctcctgggagc

SEQ ID NO: 11990 - DNA, 428 bp, Bos taurus
  Clone ID: 51-LIB34-025-Q1-E1-E4
caaccaacgccttccggggtggaaactccaaaaaggacaagttgtctgttttgatgccaagataaactttgatgacaacgcagaattccgacaaaaggatatatttgctatggatgacaaatcagagaatgagcccattgaaaatgaagctgccagatatgatctaaaatacataggactggatgggaacattgcctgttttgttaatggtgctggactcgccatggctacctgtgacatcattttcctgaatggtgggaagccagccaactttttggatcttggtggtggtgtaaaggaatctcaagtatatcaagcattcaaattactcacagctgatcctaaggttgaagccatcctagtcaatatttttggtggaattgtcaactgtgccatcattgccaatgggatcaccaaagcctgccggg

SEQ ID NO: 11991 - DNA, 408 bp, Bos taurus
  Clone ID: 51-LIB34-026-Q1-E1-E12
tttgattccttagaggggcaacaggatgcatgcttatgtacagtggtaggaagagtggggcaatatgagaggtgaaggagaaatctgacaatatcttcaattctcttacttggtgctagattaaatgaaacgagtcattgtataagctgttattaactgcctttgaaaatttggcccattttattccaggcactgaaaatacaaatgctagcaagtgattcttatgtatcttgtgggggaaaaaagctgacttttctttgatttttaaaagttcagtattgatctttcaaaaatgtactgaggcttttaaaaaggattatggtaaacattcatataactgccttatttcaatgttagtatgtacattctaaaaatgttgggtactaattatccagtttatcaatgaat

SEQ ID NO: 11992 - DNA, 403 bp, Bos taurus
  Clone ID: 51-LIB34-027-Q1-E1-E12
attcattagtgagagtgttggtttaacaccaacagaaaaggaaaacagatgaataagctctgagttttcaattctcttttttcctcttactctcagggtaggctgagatgcctgtggttgtgtcgtgtttaagctaaggctgtttgagttgaaacaacaagttttggaccctccacagcaaagcaggcttctttgtcatcagctgcacagcacttgtctacaaaagccacaaaattctccatgacggttttcaattgttcctctgttgccttgggcttgtgtttcaacagctcaacatgtgcagtttgtttcttgatttgtttctcagtatctggaagtgtgcatatatctgcatggaacgtgaacaatttcccatcaatgggctttgggtacatatgtttca

SEQ ID NO: 11993 - DNA, 341 bp, Bos taurus
  unsure (10),(178): unsure at all n locations; Clone ID: 51-LIB34-027-Q1-E1-E4
tgagaagcanaatacaaaaattaaaatcggatgtctcaactcagatggaatactgccgcaccccgtgtactgttacttgcaatattcctgtggtgtctggcaaaaaatgtgaggaaatcatcaggaatggaggtgaaacatctgaaatgtacctcattcagcctgaggattctagcanaccatatagagtatactgtgatatgaaaacggaaaaaggaggatggacagtaattcagaaccgtcaagatggtagtgttgactttggcaggaaatgggatccatataaacaaggatttggaaatattgcaaccaatgcagaagggaagaaatactgtggtgta

SEQ ID NO: 11994 - DNA, 396 bp, Bos taurus
  Clone ID: 51-LIB34-028-Q1-E1-E4
ctgaagacaaaggtggcacgcctccaagctgaaaaggcagatctgctgggcatcgtgtctgaattgcaactcaagctgaactcaagcggctcctccgaagactcctttgttgaaatcaggatgggtgaaggcgaagcagctgtgggagcacaagaaatcaagccagatcctgggcccacaagaactgattccgttgacacgagcaaatctgcagaaggtaccaggaattatgtggagtttggggaattaactgtgagccagctcctgcattgtccaagggaatgaaaccagaaggtggagagacttgaagttgccctcaaggaagccaaagaaagaatttctgattttgaaaagaaagccaaggatcattccgagaccggagacccagacagagga

SEQ ID NO: 11995 - DNA, 429 bp, Bos taurus
  Clone ID: 51-LIB34-029-Q1-E1-E4
gagaacgtcaaggccaagatccaagacaaagagggcatccccccagaccagcagaggctgatctttgctgggaaacagctggaagatggccgcaccctgtctgactacaacatccagaaggagtccactctgcacctggtcctccgcctcagaggtgggatgcagatcttcgtgaagaccttgaccggcaagaccatcaccctggaggtggagcccagtgacaccatcgagaacgtcaaggccaagatccaagacaaagaaggcatccccccagaccagcagaggctgatctttgccgggaaacagctggaagatggccgcaccctgtctgactacaacatccagaaagagtccactctgcacctggtcctccgcctcagaggtgggatgcagatcttcgtgaagaccttgaccggcaagaccatcact

SEQ ID NO: 11996 - DNA, 291 bp, Bos taurus
  Clone ID: 51-LIB34-031-Q1-E1-E12
gaatcatgctgtggtctcacggaaagataaggcaacttgtgtggagaaaatattaaacaaacagcaggatgattttggaaaatctgtaaccgactgcacgagcaatttttgtttattccaatcaaattccaaggaccttctgttcagggatgacactaaatgtttggcttcaattgcgaaacatttatagtcatcccagataagggagtactaggtcagtgcttggactaacctgatacagcgcgcaaactcagcaatccagttaccatgcacatcctgctgaccgtaaaa

SEQ ID NO: 11997 - DNA, 436 bp, Bos taurus
  Clone ID: 51-LIB34-031-Q1-E1-E4
cccaaagataccctctcgactaaacaaccaagatagaataaaacaaaacatttaatcccaatttaaagtataggagatagaaatctaagtacggcgctatagagaaagtaccgcaagggaacgatgaaagaaaaaactaaaagtataaaaaagcaaagattaccccttgtaccttttgcataatgaattaactagtataagacttaacaaaatgaattttagctaagcagcccgaaaccagacgagctactcacaaacagtttaccaagaactaactcatctatgtggcaaaatagtgagaagatttgtaagtagaggtgacatgcctaacgagcctggtgatagctggttgtccagaaaatgaatctaagttcagctttaaagataccaaaaattcaaataaaccccactgtagctttaaaagttagtctaaaaa

SEQ ID NO: 11998 - DNA, 406 bp, Bos taurus
  Clone ID: 51-LIB34-032-Q1-E1-E4
attttaatgcttgcttttcccatttatagacgttgtagcagtaattgcaagaagttcttgagctgaattcctgttgtgacaacttcctatatatctataattataatagataactttttcttttagttgtatataacttttctataatttccgatgggcaagagatatgctgatccaataaaaataagtttaaatattagatgctcttgggtcaaaatgccttttaccaaattgactgaccttttttatgagttcttgggtagatgctttttgaaaagctttttgtaattttaaagaaccctttgaaagcatatcacatctttaaaccagtggtgcacatgtggatttacagctcatggactctactgttcagctttaatttataaaacatatcacacatttaatg

SEQ ID NO: 11999 - DNA, 427 bp, Bos taurus
  Clone ID: 51-LIB34-033-Q1-E1-E12
cagttataccgagagagacatggagctgatatacccctttaagaagatcttcttcagcttactgagggagagcggctacttgcacatccagagcaccaagccggacaccgtgggctgtgctctgaatgactctcccgtgggactggctgcctatattctagagaagttttctacctggaccaattcggaattccgagacttggaggatggaggcctagagaggaagttctccctggacgacctgctgacgggcatcatgctctactggacaacaggcaccatcacctcctcccagcgcttctacaaggagaacctggggcaagtcaataagcatgagatgttgaacgtgtatgtgcccacgggctttgctgccttcccctgtgagctgattcacttgccagaaaagtgggtgaacaccaagtacccg

SEQ ID NO: 12000 - DNA, 241 bp, Bos taurus
  Clone ID: 51-LIB34-033-Q1-E1-E4
ctctctttatttatgtcatttccattgtgtaccaagaagtaactaaaaggatgattgtggacagtcagtgttcataatttccattccagtggattgtgagaagtttcaaattaggaagagaaattgaggtgaagtaaaatcatgtgtttaaaatccactttgaacctctctttatttatgtaagatctatcacagaaaactcaaaaagatttattcattaaaccggtttatgttacaataa

SEQ ID NO: 12001 - DNA, 372 bp, Bos taurus
  Clone ID: 51-LIB34-034-Q1-E1-E4
gggtcgacaacgcgtccgggagatcgaagttggcggtggccggaaagctattattatcttcgtccccgtcccgcagctgaagtctttccagaaaatccaggtgcgcctggtgcgcgagctggagaagaagttcagcgggaagcacgtcgtcttcatcgcccagaggagaattctgcctaagccaactcgaaaaagccgtacgaaaaataagcagaaacgtcccaggagccgcactctgaccgctgtgcacgacgccatcctggatgacttgggtttcccaagtgagatcgtgggcaagaggattcgcgtgaaactggaacggagccgactcatgagagtccatctggagagagctcagcagaacaacgtgga

SEQ ID NO: 12002 - DNA, 430 bp, Bos taurus
  Clone ID: 51-LIB34-035-Q1-E1-E12
ttcccgggtcttaccacgcgtccaaagccgcgcacggaaccgggaaggggacccacccgagggtccggtcggcagccccctgcactgatagcggccaccccggagcaacggcggcggcggcagcagcggcgggggcgacacaggagcgactgttcggaaccgggagggctcgcgagctgcgggccggcctgcgcgggcagccctagggcctctcgccgggcacccgcttttatgcatacgcctgctagtctgggaggcagcactgtcttcggtctggtttcatcgccggctttccttgatggtcgatggcatgtggccggttgtggttaagcggctgtgctcctcggcaattctgcggtcaggcatcgtagtcctctgggaaatcttgccaccctccttgcgcctcagaagagactacgggaagatgagc

SEQ ID NO: 12003 - DNA, 401 bp, Bos taurus
  Clone ID: 51-LIB34-035-Q1-E1-E4
gaatgctacttagcactggttccttcccatgcggttgtggctcgaactgtgggcggcaaggacgatgtgatctgggaacttctcaatcacgcccaggaacattttggcacagataaaccagacagtttccagctttgccaatcgcctcatgggaaggacctgctgtttaaggactctgctgatgggtttttaaagattccttctaagatggattttgagctgtacgtgggatatgaatatgtcactgctcttcagaatctaagagaaagtataccccggactcctcaaaggatgagtgcacggtcaagtggtgtgcagttggtcaccaggaagaggacaaagtgtgatcagtggactgggttcagcggcggagcaatacagtgtgaaacagcagagaacac

SEQ ID NO: 12004 - DNA, 421 bp, Bos taurus
  unsure (142): unsure at all n locations; Clone ID: 51-LIB34-036-Q1-E1-E4
ggtgctcctcttgagtcagccctatccacggcagagatgttttccgtgagggacctctgcctggtcctgagtttggtgggtgcaattaagacagaagatggtagtgatcctcccagtggtgactttttaactgaaggaggangggtgcgtggcccaagacttgtggaaagacagcaatctgcctgcaaagagacaggctggcccttctgctctgatgaagactggaatacaaaatgcccttctggctgcaggatgaaagggttgattgatgaagtcgatcaagattttacaagcagaataaataaactaagagattcactatttaattatcagaagaacagtaaggactctaatacattgaccaagaacatagtggaactaatgagaggggattttgccaaagctaacaacaatgataata

SEQ ID NO: 12005 - DNA, 429 bp, Bos taurus
  Clone ID: 51-LIB34-037-Q1-E1-E5
cacactaatatcaattgtaaacaatgcattcatcgaccttccagccccatcaaacatttcatcatgatgaaatttcggttccctcctgggaatctgcctaatcctacaaatcctcacaagcctattcctagcaatacactacacatccgacacaacaacagcattctcctctgttacccatatctgccgagacgtgaactacggctgaatcatccgatacatacacgcaaactgagcttcaatgttttttatctgcttatatatgcacgtaggacgaggcttatattacgggtcttacacttttctagaaacatgaaatattggagtaatccttctgctcacagtaatagccacagcatttataggatacgtcctaccatgaggacaaatatcattctgaggagcaacagtcatcaccaacctcttatc

SEQ ID NO: 12006 - DNA, 422 bp, Bos taurus
  unsure (384)...(385): unsure at all n locations; Clone ID: 51-LIB34-038-Q1-E1-E4
tgcggtgacgcggacttcgactggcaccatacttttccttcgaggggtaacctagatgatttctttcatagagacaaggatgatttcttcacccgtagttcacacgagtttgatggtaggacaggcttagcacccgaatttgcagccttaggggaatcgggctcttccagtagtaaaacttcaactcacagcaaacagtttgtaagcagcagcacaactgtcaacagaggtggctccgcgattgaaagcaagcactttaaaatggaagatgaggccgaaagcctagaggatcttggctttaaaggagcacacggcacccagaaaggccatactaaagctcgtcctgccagaggtatccacacttctccttttggggagccttcnnctgacccctagactaagttcattactcctgcaacgtg

SEQ ID NO: 12007 - DNA, 428 bp, Bos taurus
  Clone ID: 51-LIB34-039-Q1-E1-E4
agcagaatttttctttgaagatgtacggttgccagcaggtgccctgcttggagaagagaataaaggctactattacctcatgcaagagcttccacagacggtgaagcataagctagcagaattaaaaacatccatatgtgtaaccagagcttttgtggacagctgtctccagctgcacagagtgaaacgtctggacgttgccactgctgccatggcgaaatactgggcatctgatttgcagaacagagtagcttatgactgtttgcagctgcatggaggttggggatacatgtttgagtgtcccattgcaaaagcttatgtggatgcccgtgtccagacaatctatggtggtaccaatgaaataatgaaggagctgattgcaagagagatcatccatgacgagtagacatctgcccacatcccggaat

SEQ ID NO: 12008 - DNA, 406 bp, Bos taurus
  Clone ID: 51-LIB34-040-Q1-E1-E12
ggtcgtcaattccgggttaaccacgcgtccgggcggcggctctagatccactgcccacaccccgctctcgcaggcagacatgaggacagagagaacttccttcctcctggctctggggctcctggtgtctgggttctgctccagggtccactgcctcccagagaatgtgaccccagaagaacagcacaaagggacgtctgtggatggccactcattagcctccagcaacactgacttcgccttcagcctctacaagcagttggctttgaaggaccccaataagaatgtcatcttctcccctctgagcatctccatagccttggccttcctgtccctgggggctcatgaccagactgtgacagagatcctggaaggtctcaagttcaacctcacagagaccccccga

SEQ ID NO: 12009 - DNA, 433 bp, Bos taurus
  Clone ID: 51-LIB34-040-Q1-E1-E4
gttctagatcgcgagcggccgccctttttttttttttttttttggtgtgaagtgtgcattttattcatcacttgggcaactcgaaattaccatctcccccctgtgcgccccattggtttcaaggtgacaaaggaactggtggtgagtgcgagctgtttttcctcccagtccacagctgccaagtcatctgctacggaggtcacatcgttcactgcccctcggatcccgcttctcccggctgctctcccggcaggaagccatccagtgcaggcgcggagccggcggctccccggctcgcccccatgtcagcctgtgtggcatttccaccgtgcctgtcctcggtgctcagggccatcactggctgtcacgtgaacgtcaacccctagttccttcaaaccacgggagcgccaccccggtgcctgtgacaatggga

SEQ ID NO: 12010 - DNA, 284 bp, Bos taurus
  Clone ID: 51-LIB34-041-Q1-E1-E12
agataacagagatgctccgtgatcgtcacacgtctccacatcagattttccaagagatacaccgtgggcttaaacgcgtcaaggataaaaaattgactgatttcataaagcaacagctacaggatatcagaacaatcgcccacataaacagttcacatgtttttacattcctgaaagaccacctataccagcactttattcagtttaatcaactactcgtcaacatacctcaggtatcgtctcaagaattataccagctccttcagtatgtgcaggctcttcag

SEQ ID NO: 12011 - DNA, 423 bp, Bos taurus
  Clone ID: 51-LIB34-041-Q1-E1-E4
acaaacctgtggaagattagcgaccatgatttccaatgggataggaaccgtcaccgctggaaaaaggagtatatgtcttctccctttgctgcttattggcctctggggctgtgtgacctgtcatcggagccctgtggaagacgtctgcacagccaaacctcgggacattcctgtgaatcccatgtgtatttaccgttcctcagagaagaatgcaactgagggccaaggctccgagcagaagatccctgtggccaccaaccggcgggtctgggaactgtccaaggccaattcgcactttgccactgccttctatcagcatttggcagactccaagaataacaatgacaacattttcctgtcacccctgagtatctccacagcttctgctattaccaagctggggtgcctgtgacaacacactca

SEQ ID NO: 12012 - DNA, 430 bp, Bos taurus
  Clone ID: 51-LIB34-042-Q1-E1-E4
aagctgtgggctccacagtctatatttacctgctgcctcaggcacgccggagcaaccactggctccgggcacacggggcctgggcagtggtgacaggagccaccagcggcattggcaaggcttacgcacatgagctcgcccggagaggtctgaacgtcgtcctcatcagtcgagacctgagcaagttgaagcacgaggcaaaggagatagaggggctttacggcaaaagaacacgagtgattcaggtggatttcaccgggggcttggaaatctacgagaccattgaggcaggactgaagggcctggaggtcggagtactggtaaacaacgtgggccaaaaatatacaccccgcttgagtaaactgctcgactgtgaggacacggcagaaaaactccaggatattattaactgcaacatggtgtccgtggc

SEQ ID NO: 12013 - DNA, 386 bp, Bos taurus
  Clone ID: 51-LIB34-043-Q1-E1-E12
aatttcttgcaacttcgaaaaatttaaaaccatgaaacatctattactgctacttttctgtgcttttatagttcaggcccaatttcctactgactatgacgagggacaagatgacagacctaaggtaggtttgggtgcccgcggtcatcggccctatgacaagaagaaggaagaggcccccagcctgagacctgtgccccctcccatcagcggaggtggctatcgggctcgtcccgccacagcaactgtgggccagaagaaagtggagagaaagccccctgacgctgatggctgcctgcacgcggacccggatctgggtgtgttgtgtcctacaggatgtaagttgcaagatactttggtaagacaggagagaccaatccgaaaga

SEQ ID NO: 12014 - DNA, 365 bp, Bos taurus
  unsure (214): unsure at all n locations; Clone ID: 51-LIB34-043-Q1-E1-E4
atcgagatcgcgagcggccgccctttttttttatattttttttttttagagtcttttcattttttattaattgtagcacatacaaaagaagcagaatatttaaagaaatttacgttctttagtgagagtgttggttgaacaccaacagaacatgaaaacatatgaataagctcagagttttcacttctcttgtttcctcttaatcgcaaggtangctgacatgcctgtggttgtgtcatgtttaagctaaggctgtttgagttgaaacaacatgttttggatcctccacagcaaaccatgcttccatgtcatcagctgtaaagcacttgtctacaggggccacagaattctccatgacggttttc

SEQ ID NO: 12015 - DNA, 370 bp, Bos taurus
  Clone ID: 51-LIB34-044-Q1-E1-E4
aaagttccgaagggtcttggagagcaagatttgcgaaattattgaggactcggtgacctctgagctacagccttatcttcaaactctgccagtcacaacagagattgatcatctcgctggccttgattacagcttaatgggggcccctcaagcaacagcccaaatgctggatgtgatgttcaagggtgaaatttttagccgagatgaccgcttcccagttgctttccttgctcctgtcatgaaccttcctgaggaacacagccgaatggtttactttgccatctctgattatgccttcaacaccgccaggctagtttaacataaagcgggattcctgaactttactatcacggatgacgtgattccgcct

SEQ ID NO: 12016 - DNA, 340 bp, Bos taurus
  Clone ID: 51-LIB34-045-Q1-E1-E12
cacgagcgcattgatgcccaaagcaactcggtggacctgctcttcttcacggacgagtcaggggacagccggggctggaagctgtactacaccagtgaagtcatcaagtgcccccagcccaagaccctggactcattcaccatcattcaggacctgcagcctcaataccagtaccgggactatttcatcgccacctgcaaaaaaggctacgagcttgtggaggggaacaaggcactcctgtccttcacagctgtctgccaggatgatggcacatggcaccgtgccatgcccaggtgcaggatcaacgactgcgggtagccccgaatcctgcccaacgggg

SEQ ID NO: 12017 - DNA, 388 bp, Bos taurus
  Clone ID: 51-LIB34-045-Q1-E1-E4
gtactttgtgctgacggctgcacactgtttcactgtggatgatgagaaacactcaatcaaggtcagcctgggaggacagaggaaggagtgggaggtaaaagaaatcctatttcatccgaagtacgacctcaatgcaaaaaaagcaaaaggcattcctgagttttatgactatgacgtggccctcgtcaggctcaaggaaaagctcaagtatgagaccaccatcaggcccatttgtctcccctgcactgagggatcgattcaagccttgaggcttccaaggtcaaccacatgccagcaacagatgcaagagctactccctgcaaaggacattgaagctctgtttgtgtctgagtctaagaagaccctgactcggaaggcagtctacatc

SEQ ID NO: 12018 - DNA, 391 bp, Bos taurus
  Clone ID: 51-LIB34-046-Q1-E1-E4
tgggtgcagagagaggagcctgcaaggcaaagcaactggacctcgcctaagctgtgtctctgactcatttctgactttatgcaagttcttccaatgggaaaaatggtgagtgatgtttactttcatccttgtcaccactgctctggtaatgggcaggggaagctcggctctggagaactgcctccaagagcaggcgcggctcacagcccaagtgtaccggctggagacccgggtcaagcatgaacaagtcaagatctcgcaacttttgcatgaaaaaaaagtccagctccttgactgatgataggcgaatagtgtgcttgaccttgggagaaggaggcagtccgcagaatgttcatagattttcaatgaacggtacatgcagcatgggttt

SEQ ID NO: 12019 - DNA, 404 bp, Bos taurus
  Clone ID: 51-LIB34-047-Q1-E1-E12
gagctggtggctcttccatccccagaccagccaagcctgtgagtgacaccccagacagaggaaccagagccatgcggagtctcagcggactgctgttgttactgactgcctgcctggcagtaaacgccagctccgtgcccacattgcccgatgacattcaagtgcaggagaacttcgacctgtctaggatctatgggaagtggttcaatgtggccgtgggctccacctgcccatggctgaagaggttcaaggagaagatgaccatgagcacagtggtgttgaaagcggggccgacgagcaaggagatcagcgtcaccaacactcacaggcggaaaggtgtctgtgaatcgatctctggtacttatgagaaaacaagcactgatgggaagtttctctatcacaaa

SEQ ID NO: 12020 - DNA, 109 bp, Bos taurus
  Clone ID: 51-LIB34-047-Q1-E1-E4
gttctagatcgcgagcggccccctttttttttttttttggtttcattcactttattattccctttataaaattatgtggtggctcgacccggacgccggtgtcctctgc

SEQ ID NO: 12021 - DNA, 374 bp, Bos taurus
  Clone ID: 51-LIB34-048-Q1-E1-E4
ggtccacatcgcaagcctccgcttaccaatttctgcacaaagcatcgctaaatgcagtcagcaagagaccatcaaactgaacgcatcagatagaaatttcatcatctatagagggctcctcttcaggtgttcctgcatagcttggtgtgaagacagctttccaggcttacgtgtcttgcatgatgttcctgctgcaacgtgcccagatgctgcagatgcaggagaaatccttgatgaagagccttcctatgtccttaaacgtttatgggaccgtcatgcacatgagccatggaaacgcattcaatctaaacgccctggtggacaagtggcctgattttcagaccgtggatatccgccctcaggagcacgacatg

SEQ ID NO: 12022 - DNA, 407 bp, Bos taurus
  Clone ID: 51-LIB34-049-Q1-E1-E4
gtaagaagcatgggcacagtggtaagaaccgggtccagggccctggtcggggtggcctgtctgctcctggcattctctgctacagacactgggccgggggtcactcagcctgaagtggacacacccctgggccgtgtgcgaggccggcaggtgggcgtgaagggcacagaccatcttgtgaacgtcttcttgggcatcccattcgcccagccgcccctggggccccaccggttctcggccccgcgcccagcggagtcttgggagggcgtgcgagatgccagcagggcccacgccgtgtgcccacaggatccggagagaatgaacaacagcagatttacgctggacggaaagcaccagaccttccccatttcggaggactgcctgattctcaacatatacagcccggc

SEQ ID NO: 12023 - DNA, 422 bp, Bos taurus
  Clone ID: 51-LIB34-050-Q1-E1-E12
ttccggagccacccacgcctccgcatctttcagagtctccaaaaccagacacaccagatacccctgagaatccccctccttcaggtcttcatcaccaccaccacaggcacaagggtccccaaagacagggtcactcagataactgtgatacaccagtaggaagtgaaagtttacaaccttctcttccacaaaagaagctctgacgaaagagatgcataaatcagttactctgacagtttcccaaagattcagaatctgctttgagtaactgctgttgccactgtcgacatctggtatttgaaaaaacagggtctgcaatcacctgacagtgtacagaaaagctcccctctttgtgtatctgacagggccttttggcggaggagaatgtcattgaatcttgacagtgacgtttgcctccacct

SEQ ID NO: 12024 - DNA, 244 bp, Bos taurus
  Clone ID: 51-LIB34-051-Q1-E1-E12
acggatgtctcaactcagatggaatactgccgcaccccgtgtactgttacttgcaatattcctgtggtgtctggcaaagaatgtgaggaaatcatcaggaatggaggtgaaacatctgaaatgtacctcattcagcctgaggattctagcaaaccatatagagtatactgtgatatgaaaacggaaaaaggaggatggacagtaattcagaaccgtcaagatggtagtgttgactttggcagga

SEQ ID NO: 12025 - DNA, 234 bp, Bos taurus
  Clone ID: 51-LIB34-051-Q1-E1-E4
ggagctggcttgagtcaaaggactgaccaagctataatccccccagagaagcccttccatgaggacccagaaactgcaggggtggatgagtgttggcaggggttaaacggttctgtgaatgtttccaggcctacatgctgtagcccccctgagactgcaaatggtgacatccttacatttgaccccactggactgctgaccactgttccccccacagctgcagagactgacctg

SEQ ID NO: 12026 - DNA, 233 bp, Bos taurus
  Clone ID: 51-LIB34-052-Q1-E1-E4
cttgattgggagatccactgagagtcctgtggacttcaaggagattactccagtcaatcctaaaggaaatcaaccctgaatactcattggaaggactgatgctgaagctctaatactttggccacctgatgcgaagaaccaactcattgcaaaagacactgggaaagattgaaggcaaaagtagaaagaggtggcagaggatgagatggttggatggcatcaccaactcaatg

SEQ ID NO: 12027 - DNA, 353 bp, Bos taurus
  Clone ID: 51-LIB34-055-Q1-E1-E12
cgcgcgcccccgccgctctgcccccaaacttcagctgcagctacattcgaagccatctaatttattcctcaaaaaaatcagaaacggagcagcgacacagggaaggagtccgcggaggagtaaaaccacagcagagcaacaagatcctccgagccgcctcccccgcccggagccacaatccggcctcgggagtggaggagccaacaagtgagaaggcgccgcggtcccggggcgcagccggaggaagcgggcgctccggagcccggagccccccgagtcccctcgagccccccgaacagcgatcgctgcggcagctctgctccggatcgttctgcgcgagcatcgccgggcgc

SEQ ID NO: 12028 - DNA, 351 bp, Bos taurus
  Clone ID: 51-LIB34-055-Q1-E1-E4
gaaaaggccatggggcctctgatgttgttctctacaaaattgacgtccctgccaatagatatgacctgctgtgtctggaaggattggttcgaggacttcaagtcttcaaagaaaggataaagactccgatgtataaacgggtaatgcctaaaggagaaatccagaagttgatcatcacagaagagacagctaaaatacgcccgtacgctgttgcagcggttctccgaaacataaagtttacaaaagatagatatgacagcttcattgaacttcaggagaaattacatcagaacatttgcaggaaaagagccttggttgctattggtacccatgatttggacactttgtcag

SEQ ID NO: 12029 - DNA, 379 bp, Bos taurus
  Clone ID: 51-LIB34-056-Q1-E1-E4
ctgcacctggctgaggatggtgtgctgagtcccctggcactgacagagagtgggaagggttcctccccttccatcagaccaagccaaggcagccaggggtctggcagcccagaggagaaggaggtggtggaggctgtggacagcagagagaagccagggctggtcaggcctagcgagtccttgaatggggagaagtattcacccaaggagctgctggcgctgctgaagtgtgtggaggctgaaattgcaaactatgaggcctgtctcaaggaagaagtggagaagaggaagaagttcaagattgacgaccagagaaggacccacaactacgatgagttcatctgcaccttcatctccatgctggctcaggaaggcatgc

SEQ ID NO: 12030 - DNA, 223 bp, Bos taurus
  Clone ID: 51-LIB34-057-Q1-E1-E12
atggcactaagttaagttatacatgtgaagaaggcttcgagatacctgaaaataatgtgataatatgccacatgggaaagtggagctctccacctcagtgcgtaggacttccttgtggacttccaccttatattcagaatggtgttatatctcacaagaaagacagttaccaatatggagaagaagttacttatgactgtgatgaagggtttggaactgatgg

SEQ ID NO: 12031 - DNA, 222 bp, Bos taurus
  Clone ID: 51-LIB34-057-Q1-E1-E4
gtttgagcgtatgtcttcctgtggcaccatgtcgtccaacgaggagctggccgaccaggagggcagtgcaggggcatcagcctttgatcaggctgacctcaatggcatgactccagagctgcctgtggctgtgcccagcgggcccttccgccacgtggggctgtccaaggcggcccggacccaccggcttcggaagctccgcacaccggccaagtgccggga

SEQ ID NO: 12032 - DNA, 229 bp, Bos taurus
  Clone ID: 51-LIB34-058-Q1-E1-E4
agcctacagccgcagaccccttccccagccccagtctgtagctgcctcgagcagggagctggtggctcttccatccccagaccagccaagcctgtgagtgacaccccagacagaggaatcagagccatgcggagtctcagcggactgctgttgttactgactgcctgcctggcggtaaacgccagctccgtgcccacattgcccgatgacattcaagtgcaggagaacc

SEQ ID NO: 12033 - DNA, 209 bp, Bos taurus
  Clone ID: 51-LIB34-059-Q1-E1-E4
tcgagattacgcattctgtccagtcaatgccatggatgagcatccccacggttttactgttcctgctagaggtgagaggttacagcagactctatgacggcataggagagtttccatatggctggtttcaactcgttgctagtgtcttgtcttttcttttcttcactgacattgctgatctactgggattcacagatggccttcatcat

SEQ ID NO: 12034 - DNA, 305 bp, Bos taurus
  Clone ID: 51-LIB34-060-Q1-E1-E12
ctagttctagatcgcgagcggccgcccttttttttttttttttttttttttttttggccattttacgattttaaaattgttttaacataaaaaatatcttttttctcttctccaaaaatactccgggctctttctcttataagtcactttttttttttcttcttccccctccttgtaaaaagtcccccttgccctgccttcttacataaagcacttattatgcgccgaaagtgcccttgagactggaagatgggaggcaactatgagggggggagggggaggggggaggggggaggggaagatgc

SEQ ID NO: 12035 - DNA, 351 bp, Bos taurus
  Clone ID: 51-LIB34-061-Q1-E1-E4
acttcataagttaatatatttattcatctactcaatggatattcattgagttcttactgcgtgtgctggatcctattctaagacgctggggttaccactgtgaatagcacttcaaaatacctgtgccttcatggatcttatattctagtggaggaagagaaacaataaagaaaaataagtaaaaatatctagtaaaataataagtactttttttataaaagcaggaaaagaagatataaaacgggggataaattctggaagtgtagataacgtggcttgggaaggctcgctcacatttgtttttaggtaaagaactgaagaaaatgatgatccagccatgcagaagtctgc

SEQ ID NO: 12036 - DNA, 208 bp, Bos taurus
  Clone ID: 51-LIB34-062-Q1-E1-E12
gcctctacaagcagttggctttgaagaaccccaataagaatgtcatgttctccccgctgagtgtctccatggccttggccttcctgtctctgggggcccgtggccccaccctgacagagatcctggaaggcctcaagttcaacctcacggagatccaggagacacagatccaccagggcttccagcacctcctgcaggcgctcaatcg

SEQ ID NO: 12037 - DNA, 135 bp, Bos taurus
  Clone ID: 51-LIB34-062-Q1-E1-E4
cgatcgaaaaagagaaatgaaaactcagagcttaatcatctgttttccttttctgttggtgttaaaccaacactctcactaaagaacgtaaatttctttaaatattttgcttcttttgtttgtgctacaattaat

SEQ ID NO: 12038 - DNA, 91 bp, Bos taurus
  Clone ID: 51-LIB34-063-Q1-E1-E4
aggcaaaccaggtccaataaacctgaatttttttaatggccaaaacggttaagcagaaatgtaaaacaggactggcaaaaatgtggatgtt

SEQ ID NO: 12039 - DNA, 203 bp, Bos taurus
  Clone ID: 51-LIB34-066-Q1-E1-E12
ggtgaaacaggtaatggatcccaaaggccagagagtgaagcttaatgatggccacttcattcctgtcctgggatttggcactgctgaagctaaagaggttcctaagagtgaagctctggaagtcaccaaatttgctatagaggttgggttccgccatattgactgtgctcatgtgtaccaaaatgaagagcacgttggccagg

SEQ ID NO: 12040 - DNA, 263 bp, Bos taurus
  Clone ID: 51-LIB34-066-Q1-E1-E4
ctgctggacaaattcaggaaagatgccgaggctttttacgcctctgaggttttatccactaacttcaaggattctgaagctgccgtaaagcttatcaatgaatatgtgaagaataaaactcatggaaaaattgagaagctcttcaatgatcttgacgtgctcacaaatttaatcttgttgaattatatcttctttaaagcccagtggaagacgccatttaatcctaaccatacttacgaatcagagttccacgtgagccagaa

SEQ ID NO: 12041 - DNA, 237 bp, Bos taurus
  Clone ID: 51-LIB34-067-Q1-E1-E4
cccatctctccgcttcctcctttcctcaggcatcaaagcagagaccacgggaacctagttcaccaggctcgaggctggaggccccgccatgacatccctaaggccccttctgatgctggccctgctggcgtgggttgttgtggctgaccaagagtcctgcaagggccgctgcaccgagggcttcaacgccaccaggaagtgtcagtgtgacgagctctgttcttactaccagagctg

SEQ ID NO: 12042 - DNA, 236 bp, Bos taurus
  Clone ID: 51-LIB34-068-Q1-E1-E4
ccgggtccaacccaagcttcgggaaatttgttcaaacctgggaaaataattaaatttaatctgaagggcttcccaggtggtgctagtggtaaggaacccacctgccaatgcaggagatacaagagacatgggttcaatccctgggtttggaagatcccctggtgaagggcgtggccacccatttcagaattcttgcctggagaatctcatggagagaggagcctggagggctatag

SEQ ID NO: 12043 - DNA, 219 bp, Bos taurus
  unsure (189): unsure at all n locations; Clone ID: 51-LIB34-069-Q1-E1-E4
acatagatggcatcaagcgggccacagatgtcatgattgcgggcaaggtggcggtggttgcaggctatggcgacgtgggcaagggctgtgcccaggccctgaggggatttggggcccgcgtcatcatcacggagattgaccccatcaacgcacttcaagctgccatggagggctacgaggtgaccaccnatggatgaggcctgtcaggagggcaacatc

SEQ ID NO: 12044 - DNA, 254 bp, Bos taurus
  Clone ID: 51-LIB34-070-Q1-E1-E12
tcgagccacgcgtccgggctgaccaagagtcctgcaagggccgctgcaccgagggcttcaacgccaccaggaagtgtcagtgtgacgagctctgttcttactaccagagctgctgtgccgacttcatggctgagtgcaagccccaagtgactcgtggggatgtgttccatctgccagaagatgagtacgggttccatgactacagcgacgcgcagaccgtcaacagcaacgtggaagcacagcccgagagcacc

SEQ ID NO: 12045 - DNA, 375 bp, Bos taurus
  Clone ID: 51-LIB34-071-Q1-E1-E4
aaaattatttgtaaataaggtgaaagaatacgaaatattcagttatgagtaagcaggcaatcatatcctctttaacatgtacagggaatgatattcttaacatgtcattgtaagacctctaagaaagtgtagcaaaaataagtgtcattttaagatactattaatacttgctttactcttgatagactgataaccagtatataatcattaaaaagccgtatattttggtgagttattccaagatttgtacacagctttatgttttggaaaattaatatgaaatattaaactcactttaaattcaaaaaaaaaaaaaaaaaaaaaaaaaaaaaaaaaaaaaaaaaaaaaaaaaagaaaaaagaaaaaaaagaatgg

SEQ ID NO: 12046 - DNA, 428 bp, Bos taurus
  Clone ID: 51-LIB34-073-Q1-E1-E4
acggacgcgtggggaaaaattgagaagctcttaaatgatcttgacgtgctcacaaatttaatcttgttgaattatatcttctttaaagcccagtggaagacgccatttaatcctaaccatacttacgaatcagagttccacgtgagcaagaacgagagggtgaaggtacccatgatgacccttcgcctggaaaccccttacttccgggacgaggagctgggctgcacgctggtggagctcacgtacaccagcaatgacagcgccctcttcatcctccccgatgagggcaaaatgcaggacctggaagccaagctgaccccggagacgctgacgcggtggcgaaactccctgcagcccagacatatagatgaactcagcctgccaaggttttccatctccagtgactatcagctgagagacatcctttc

SEQ ID NO: 12047 - DNA, 430 bp, Bos taurus
  Clone ID: 51-LIB34-074-Q1-E1-E4
gggccgagccacgcgtccacaaaactttggcacaatgaagtgggtgacttttatttctcttctccttctcttcagctctgcttattccaggggtgtgtttcgtcgagatacacacaagagtgagattgctcatcggtttaaagatttgggagaagaacattttaaaggcctggtactgattgccttttctcagtatctccagcagtgtccatttgatgagcatgtaaaattagtgaacgaactaactgagtttgcaaaaacatgtgttgctgatgagtcccatgccggctgtgaaaagtcacttcacactctctttggagatgaattgtgtaaagttgcatcccttcgtgaaacctatggtgacatggctgactgctgtgagaaacaagagcctgaaagaaatgaatgcttcctgagccacaaagatgat

SEQ ID NO: 12048 - DNA, 396 bp, Bos taurus
  Clone ID: 51-LIB34-075-Q1-E1-E12
gtcgtattatccctctgctctcgctgcagggagatggctcagcgacttcttctgaggaggttcctgacctccataatctccgggaagccctctcagagtcggtgggcacccgtcgcctccagggccctgaagaccccacagtacagtcctggttacctgacagtaacacccagccaagcccggtctatatacaccaccagagtctgttcaacaacctttaacatccaggatggacctgattttcaagaccgagttgtcaatagtgagacaccagtggttgtggatttccatgcacaatggtgtggtccctgcaagatcctggggccccggttagagaaggtggtggccaagcagcatggaaaggtggtgatggccaaagtggatatcgatgaccac

SEQ ID NO: 12049 - DNA, 307 bp, Bos taurus
  Clone ID: 51-LIB34-079-Q1-E1-E4
agtcttctcagcaggaagtgtgaccacgatcaatcatgacgacttacagcgacaaaggagagaagcctgaaagaggccgattcctccactttcactctgtgaccttctgggttggcaatgccaagcaggctgcgtcatattactgcagtaagctgggctttgagcccctagcctacaagggcctggagaccggttcccgggaagtggtgagccatgtggtcaagcaagggcagatcgtgttcgtcttctcctctgccctcaacccctgggacaaagagatgggcgatcacctggtgaaacaccgcga

SEQ ID NO: 12050 - DNA, 393 bp, Bos taurus
  Clone ID: 51-LIB34-080-Q1-E1-E12
acccacgcgtcagctggaaggcagagcaactggacctcgcctaagctgtgtctctgactcatttctgactttaggcaagttcttccaatgggaaaaatggcgaagatgtttagtttcatccttgtcaccactgctctggtaatgggcaggggaagctcggctctggagaactgcctccaggagcaggcgcggctcagagcccaagtgtacctgctggagacccgggtcaagcagcaacaagtcaagatctcgcagcttttgcatgagaaacaagtccagctccttgataaaggagaggagaatagtgtcattgaccttggaggaaagaggcaatacgcagattgttcagagattttcaatgacgggtacaagcagagtggattttataaaatc

SEQ ID NO: 12051 - DNA, 389 bp, Bos taurus
  Clone ID: 51-LIB34-080-Q1-E1-E4
aggcgacgacgtggatgtctgtggtgtctctctatgcgggtgtgagcaatgctagagaccattctggtgacgccagtgtcgagctcatgatgacgttcgcatgatacggactcaaggagtcagttttgcacatgttcgctaatttccacgacctccctattgccatgatagctgacgatttttaggacacacagtgcctgttttcaccgcacgatatgtactggtactatcatgttacctgtgacaccaatgttgactggctcttacgatgtgactggtctggctgtccaatcatctcaggaatcagaaatgagctgtaatcctcgctcctgctctctcggactcacgctcaagtctcgctttacgctcatttagcacacgtccacctg

SEQ ID NO: 12052 - DNA, 423 bp, Bos taurus
  Clone ID: 51-LIB34-081-Q1-E1-E12
aaccaaccctccaacggggttaccattaccaacggggtgaagggtaaaccttgcctccggcaatttggccctgaacccttcggaaggttgccccaatgactatttcaacatttcggctgatcagcaagaccatggggaggttctgtgggcagctgggttctcccctgagcaatcccccaggaaggaaggtattcatgtcccaagggaacatgatgctgctgaccttccactcggacttctccaacgacgagaacggcaccatcatgttctacaagggcttcctgacatactaccaagccgtggacgtggacgaatgtgccttgcagctcaactcagtcgatgatgaccccccggccgggtgccagcacctgtgccacaactacgtcagcggctatttctgctcctgccgtccacgctatgagc

SEQ ID NO: 12053 - DNA, 382 bp, Bos taurus
  unsure (376): unsure at all n locations; Clone ID: 51-LIB34-082-Q1-E1-E4
ccgcaataattactttgaattccacaagggacctcaaggacaaggtggtgaagaattaataaagaaggtgtaacggaattaactgggcaatccaaaatccaggaacaatggccccttgctaaacaacctgaaatccgctgcatcaaaggatccatcgtgcatcatgctggcagtttaaacgaaactgtttgcctctgtctttgagacatacttccagttccaagaagagggcaaggaatgagagaacagggcagttatcaattatagggatgatgagaccatgtatgttgagtcaaaaaaagacagagtcacagtagtcttcagcacagtgtttaaagatgacgacgatgtggtcattggaaacgtgttcatgcangagttc

SEQ ID NO: 12054 - DNA, 413 bp, Bos taurus
  Clone ID: 51-LIB34-083-Q1-E1-E4
caaaaattaatggaagatggaaccagcaggtttacctgcaaaggaaaaccaatttaccatttcatggggaccagtaccttcagtcagtacactgtggtctcagacgtcaaccttgccaaactagaggacgatgccaatttagagagagtttgtctgcttggatgtgcattttcaactggctatggagctgtcatcaacaatgccaaggtcacacctggttctacctgtgccatctttggcctaggaggtgtcggtctctctgctgtaatgggttgtaaagcatcaggagcttcccgaatcatagttgttgacatcaatagtgagaagtttacaaaggccaaagcccttggagccactgactgcctcaatcctaaagacctagacaaacccattcaagaggtcattgttgaaat

SEQ ID NO: 12055 - DNA, 340 bp, Bos taurus
  unsure (209): unsure at all n locations; Clone ID: 51-LIB34-084-Q1-E1-E4
gcgtccgaaaaaaactacagagagttgcgaagaccatatactgtggccattgctgcctatgccctggctttgttgggcaacctggagggtgaccgcctcaccaaatttctgaacacagccaaagaaaagaaccgctgggaggaacccaaccagaagctctacaatgtggaggccacgtcctacgccctcttggctctgctggcacgcanagactacgacactacgcctcctgtcgtgcgctggctcaacgagcagagatactatggaggtggttatggctccacgcaggccactttcatggtgttccaagccttggcccaataccagaaggatgttcctg

SEQ ID NO: 12056 - DNA, 403 bp, Bos taurus
  unsure (390): unsure at all n locations; Clone ID: 51-LIB34-086-Q1-E1-E12
gggccgacccacgcgtcagaattattttctgaattaggatgcattgtagacacaatgtctgtgcatggcatttaattactttatctctaagtctctctctccatattgaagtgaaatttatataacaaaattagccactttaacatgtaaaattcagtggtgattagcacatttacaatgctgtacaactatcacttctttttagttttgacagttttattcacccccaaaggaaaccccatatccactaagctctcactgcccattacaacctttccccaggacctggtaactactaatagacatttctgtatctctggatttaatatctcaatattttatataaagggaatgatacaatatgtgacctttggtgactggcttctttcnctcagcatgatac

SEQ ID NO: 12057 - DNA, 429 bp, Bos taurus
  Clone ID: 51-LIB34-086-Q1-E1-E4
ccacgcgtccgggcaatgctgggacgcaatgactaccagactacgcctcctgtcgtgcgctggatcagctatcatacatactatggctgtggtatatggatccactcatgccactttcatggtgttccatgccttggcccaatatgataatgatgttcctgatcacaatgtgctgaacctggatgtgtcgatccagctgaccagccgcaattctgctgtcacgcatcgtgtcctctgggaatctgccagcctcctgcgctcatgttagactcacgaagatggccgtttcatagttaaagctgctgggaaatgccatagctccttgtcggtagagtccgtgtatcatgccaaagctcatgttgaatagtctcctgcaccattgttcgaccctccgggttttcatacgcccagccccccgaaacagtcaag

SEQ ID NO: 12058 - DNA, 361 bp, Bos taurus
  Clone ID: 52-BOVMS1-001-Q1-E1-E8
atgcgacgtcatagctcttctatagtgtcacctaaattcaattcactggccgtcgttttacaacgtcgtgactgggaaaaccctggcgttacccaacttaatcgccttgcagcacatccccctttcgccagctggcgtaatagcgaagaggcccgcaccgatcgcccttcccaacagttgcgcagcctgaatggcgaatgggacgcgccctgtagcggcgcattaagcgcggcgggtgtggtggttacgcgcagcgtgaccgctacacttgccagcgccctagcgcccgctcctttcgctttcttcccttcctttctcgccacgttcgccggctttccccgtcaagctctaaatcgggggc

SEQ ID NO: 12059 - DNA, 391 bp, Bos taurus
  Clone ID: 52-BOVMS1-002-Q1-E1-E12
ccagccagagccactgccttgcccacaggagacctaagacatggcacccaagaaggccaagagaagggcagcggcagagggcggaagctccagtgtcttctccatgtttgatcagacccaaatccaggagttcaaggaggccttcacagtaattgaccagaaccgggatggcattattgacaaggaagacctgcgggacacttttgcagccatggggcgtctcaatgtgaagaatgaggagctagacgccatgatgaaggaagccagtgggcccatcaacttcactgtcttcctgaacatgtttggggagaagctcaaaggtgccgaccctgaggatgtgatcactggagccttcaaggtcttagaccctgagggaaaaggcaccatcaag

SEQ ID NO: 12060 - DNA, 430 bp, Bos taurus
  Clone ID: 52-BOVMS1-002-Q1-E1-E8
ctttatgcacgattcaacaaaattaaaaagctgaccgccaaagattttgcagacatacctaacttaagacgacttgattttacgggaaatttgattgaagacatagaagacggtactttttcaaaactttctctgttagaagaacttacactagctgaaaatcaactactgaagcttccagttctccctcccaagcttactttatttaatgcaaaatataacaaaatcaagagtagaggaatcaaagcaaatacattcaaaaaactgcataacctctccttcctctacttggatcacaatgctttggaatctgtgcctcttaatttaccagaaagtctgcgtgtaattcatcttcagtttaacaacataacttcaattacagatgatacattctgcaatgctaatgacaccagttatattcgggaccgca

SEQ ID NO: 12061 - DNA, 148 bp, Bos taurus
  Clone ID: 52-BOVMS1-003-Q1-E1-E8
ctgaaaatggtggaaaaggaccaagatgggggccgcaaactgacgcctcagggacagagagatctggacagaatcgctggacaggtggcagctgccaacaagaagcattagaacaaatgatgctgggttaataaattgcctcgttcgt

SEQ ID NO: 12062 - DNA, 384 bp, Bos taurus
  Clone ID: 52-BOVMS1-004-Q1-E1-E12
attattttttttttctgttagataaattaacccatttaataggctaccatgggtatcgaatggtggtgcctctactggtccttcagttccttcagtcatctgatggcagacttgactgtgacggcataggtggtgttgtaagtccaggcaccaccagctactgttttcatgcaggaaccacagtgccaaatgcccacagctcttcttttcatcttggttttgccacagaacgagcaggtatacttggcgtgctggctgatttcaattttcatcaccatttacctgatggaggcaccataacgggtcacgtaattgcccacgattccgaccttcttggtgcgtttagccatgttaacgcaacctagatccgcccacgcgtccgct

SEQ ID NO: 12063 - DNA, 209 bp, Bos taurus
  Clone ID: 52-BOVMS1-005-Q1-E1-E8
caaaactgctcgcggcgcaggcggctgacctcgagccaccgcgcagcagctgctctccaaccatcagcgttgccgctgccgcaaactgacacactgtttataatgtgtacatacattgtttacctcattttgttatttttaaaacgaagccctgtggaaggaaatggaaaacttgaagcattaaactcagccgttctgttttgctgcgt

SEQ ID NO: 12064 - DNA, 449 bp, Bos taurus
  Clone ID: 52-BOVMS1-007-Q1-E1-E8
cttatgagcgggaacttctcggtcgcgcacagagaaagaacgatttaaaaatgggtgatgttgagaagggcaagaagatttttgttcagaagtgtgcccagtgccatactgtggaaaagggaggcaagcacaagactgggccaaacctccatggtctgtttggacgaaagacaggtcaggctcctggattctcttacacagatgccaataagaacaaaggtatcacctggggagaggagacgctgatggagtacttggagaatcccaagaagtacatccctggaacaaagatgatctttgctggcattaagaagaagggagagagggaagacttgatagcttatctcaaaaaagctaccaatgagtaatagttggccactgccttatttattatgaatcagaagtgtctcatgactttttatgtgtaccatatttaaattgactcatat

SEQ ID NO: 12065 - DNA, 354 bp, Bos taurus; identical to SEQ ID NO: 4016
  Clone ID: 52-BOVMS1-008-Q1-E1-E12

SEQ ID NO: 12066 - DNA, 411 bp, Bos taurus
  Clone ID: 52-BOVMS1-008-Q1-E1-E8
agcacccgacctcctcggagacccagataactacaccccagccaatccactcaacacaccccctcacatcaaacccgagtgatacttcttatttgcatacgcaatcttacgatcaatccccaacaaactaggaggagtactagccctagccttctctatcctaattcttgctctaatccccctactacacacctccaaacaacgaagcataatattccgaccactcagccaatgcctattctgagccctagtagcagacctactgacactcacatgaattggaggacaaccagtcgaacacccatatatcaccatcggacaactagcatctgtcctatactttctcctcatcctagtgctaataccaacggccggcacaatcgaaaacaaattactaaaatgaagacagaa

SEQ ID NO: 12067 - DNA, 468 bp, Bos taurus
  unsure (430): unsure at all n locations; Clone ID: 52-BOVMS1-009-Q1-E1-E8
caaagatccagcagaagacaatattcagtcccgaagtttacacatgattaatgcacaagctcagcgccggagccgggagcagtctcgatcagccagtgggctgagcatcagtggtggtgaggagaagtctgagcattcagaagctgcccacctctctacctacagtgacgggggcgtcttcttctctgcagcctcaacaggttacaaacatgcaagaaccacagagctcccacagcaacgatcatcttcagttgctacccagcagacaacggtatcctccatcccatcccatccatccactgctggaaaaatcttccgtgccatgtatgactatatggctgctgatgcagatgaggtatccttcaaagatggagatgccattgtcaatgttcaagctattgatgaaggttggatgtacggcactgtgcanaggactggcaggactggcatgctcccagccaactacgt

SEQ ID NO: 12068 - DNA, 365 bp, Bos taurus; identical to SEQ ID NO: 4275
  Clone ID: 52-BOVMS1-010-Q1-E1-E12

SEQ ID NO: 12069 - DNA, 365 bp, Bos taurus
  Clone ID: 52-BOVMS1-012-Q1-E1-E12
gcagagggctcgccgccgccatgtctaccggcaggccactcaaatccgtggactacgaagtgttcgggagagtgcagggtgtttgcttcaggatgtacactgaagatgaggctaggaaaattggagtggttggctgggtgaagaataccagcaaaggcactgtgacaggccaagtgcaaggcccagaagagaaagtcaattccatgaagtcctggctgagcaaggttggaagtcctagttctcgcattgaccgcacgaacttttccaatgaaaaaaccatctctaaacttgaatactctagttttaatattcgatactaataggagttaaattaaaattgtaatgcttatactgtacaatagaat

SEQ ID NO: 12070 - DNA, 326 bp, Bos taurus
  Clone ID: 52-BOVMS1-014-Q1-E1-E8
gtcgggaatcactggtcgatccacgcatccgtccgaatcgactctgcacctggtcctccgcctcaaaagtgggatgcaggtcttcgtgacgacattgtccggcatgaccatcaccctgatggtggagcatagtgcctccatcgagaacgtcaaggtcaagatactggacatcgatggcatccctccagaccagcaaaggctgatctttgccgggaatcagctggaagatggccgtaccctgtccgactactggatcagaacgagtcaagtctgcacttgttcctgcgcttaacgtgacgtgtcttaagttctcccttttaagcttt

SEQ ID NO: 12071 - DNA, 408 bp, Bos taurus
  Clone ID: 52-BOVMS1-017-Q1-E1-E12
ctcaaattgagaagcgtatccaagagatcattgagcagttagatatcacaactagtgaatatgaaaaggaaaaactgaatgaacgtctggcaaaactctcagatggtgttgctgtgttgaaggttggtgggacaagtgatgttgaagtgaatgaaaagaaagacagagttacagatgctcttaatgccacacgagctgctgttgaagaaggcattgttctgggagggggctgtgccctgcttcggtgcattccagccttggagtcaataactccagctaatgaagatcaaaaaacaggtatagaaataataaaaaaaacactcaaaattcctgcaatgaccattgctaagaatgcaggtgttgaaggatcattgatagttgagaaaattatgcagagttcttcagaag

SEQ ID NO: 12072 - DNA, 440 bp, Bos taurus
  Clone ID: 52-BOVMS1-017-Q1-E1-E8
ctgcactgcagtcagattctttaccatcagtaatcaaaaacctcacaacaaagaaaaatccaggaacagatggcttcactatttaattctgtctcatagtcaataaagaattaatgccaatgtttttcaaactctttccaaggacagaaaaggagggaacaactgcaaactcattttacatggccctgatatggaaatcagacaaggacacctgaagaaaagaaaattatagatcaatatccctaatgaacatggacacagaaatccttaataaaagtattggcaaatcaggttcaacaatatattaaaaggattatgtaccatgatcaattgggattgattctagagattcaaggattgttcacccttcacaaatcagtcaacatgatatatcacattaataagatagacaaaaaaatcatatcatttcaatagacgca

SEQ ID NO: 12073 - DNA, 309 bp, Bos taurus
  Clone ID: 52-BOVMS1-018-Q1-E1-E12
atgcgacgtcatagctcttctatagtgtcacctaaattcaattcactggccgtcgttttacaacgtcgtgactgggaaaaccctggcgttacccaacttaatcgccttgcagcacatccccctttcgccagctggcgtaatagcgaagaggcccgcaccgatcgcccttcccaacagttgcgcagcctgaatggcgaatgggacgcgccctgtagcggcgcattaagcgcggcgggtgtggtggttacgcgcagcgtgaccgctacacttgccagcgccctagcggccgctcctttcgctttcttccct

SEQ ID NO: 12074 - DNA, 394 bp, Bos taurus
  Clone ID: 52-BOVMS1-018-Q1-E1-E8
acggtatgctacgaatcacactaattctaaaccctatgaccgactttatagcatacccattcattatactctccctatgaggcataattataaccagctcaatctgcctccgtcaaacggacctaaaatcactcatcgcatactcctctgtaagccacatagcactcgttatcgtagccatccttatccagacaccttgaagctacataggagcaaccgcccttatgattgcccacggcctcacatcctccatacttttctgtctagcaaactcaaactacgaacgaatccacagccgaaccataattctagctcgaggcctacaaacgctccttccactaatagccacctgatgactactagcaagtctaaccaacttagctctacccccaac

SEQ ID NO: 12075 - DNA, 283 bp, Bos taurus
  Clone ID: 52-BOVMS1-019-Q1-E1-E8
aaaaaaaaaaaaaaaaaaaaaaaaaaaaaaaaaaaaaaaaaaaaaaaaaaaaaaaaagggcggccgctcgcgatgaaatttttttaaacgtgcctttagtagacaaatgtatttcaaaatatatttatagtcaaacagttccgaaatttgaagtggagccataggaatgtcagtaggttacatttctctattaacgtaaactattggccatttgtaaagaattacatatgacatataacgtgtgatcgcagctttttaaggttacccacagtgtattttttca

SEQ ID NO: 12076 - DNA, 414 bp, Bos taurus
  Clone ID: 52-BOVMS1-020-Q1-E1-E12
gcccctgggacgtataaccatggaattattttcaaacattgttcctaaaactgctgagaacttcagagcactgtgcactggagagaagggctttggtttcaagagctccatattccacagagtgattccagattttgtttgccaagggggagatatcacaaaacatgatggaacaggaggacggtccatttatggagataaatttgaagatgaaaattttgatgtgaaacatacaggtcctggtttactatcaatggccaatcgaggccaggacaccaataattctcagtttttcataacactgaaaaaagcagaacgtttggactttaagcatgtagtatttgggtttgttaaagatggtatggatactgtgaaaaagattgagtcatttggttctcctaaagggtctgttag

SEQ ID NO: 12077 - DNA, 366 bp, Bos taurus
  Clone ID: 52-BOVMS1-020-Q1-E1-E8
tggctttgcctctgaagtccttgagtcggggcttggccagtgcggccaagggagaccatggtgggacaggagcccgcacctggcgcttcctgactttcgggctggcgctcccgagcgtggccctctgcaccctcaactcctggctccactcgggccaccgcgagcgcccggcattcatcccttaccatcacctccggatccgcaccaagcccttctcatggggagacggcaaccacacttttttccacaatccccgggtcaaccctctgcccacgggctacgaaaagccttgatgcttggctgatgcccccagacacaataaaattgtggaagctgaaaaacaaaaaaaaaaagggctggcgctct

SEQ ID NO: 12078 - DNA, 96 bp, Bos taurus
  Clone ID: 52-BOVMS1-022-Q1-E1-E12
agaaataaggccaactttaaatcaagcgccttaagacaaccaatgataacatctcaactgacaacacaaaaccctgccctagaacagggcttagtt

SEQ ID NO: 12079 - DNA, 401 bp, Bos taurus
  unsure (370): unsure at all n locations; Clone ID: 52-BOVMS1-022-Q1-E1-E8
atgcgacgtcatagctcttctatagtgtcacctaaattcaattcactggccgtcgttttacaacgtcgtgactgggaaaaccctggcgttacccaacttaatcgccttgcagcacatccccctttcgccagctggcgtaatagcgaagaggcccgcaccgatcgcccttcccaacagttgcgcagcctgaatggcgaatgggacgcgccctgtagcggcgcattaagcgcggcgggtgtggtggttacgcgcagcgtgaccgctacacttgccagcgccctagcgcccgctcctttcgctttcttcccttcctttctcgccacgttcgccggctttccccgtcaagctctaaatcgggggctccctttangggttcgatttagtgctttacggcacctcga

SEQ ID NO: 12080 - DNA, 165 bp, Bos taurus
  Clone ID: 52-BOVMS1-023-Q1-E1-E12
aagcaatcccaggccgtctaaaccaaacaacccttatatcgtcccgtccaggcttatattacggtcaatgctcagaaatttgcgggtcaaaccacagtttcatacccattgtccttgagttagtcccactaaagtactttgaaaaatgatctgcgtcaatattat

SEQ ID NO: 12081 - DNA, 251 bp, Bos taurus
  Clone ID: 52-BOVMS1-023-Q1-E1-E8
atgcgacgtcatagctcttctatagtgtcacctaaattcaattcactggccgtcgttttacaacgtcgtgactgggaaaaccctgacgttacccaacttaatcgccttgcagcacatccccctttcgccagctggcgtaatagcgaagaggcccgcaccgatcgcccttcccaacacttgctcagactgaatggccaatgggacgcgccctgtatcggcgcattaagcgctgacggtgtggtggttacgcg

SEQ ID NO: 12082 - DNA, 389 bp, Bos taurus
  Clone ID: 52-LIB188-001-Q1-E1-E12
ccgacctcgcatgtacccagccgccatacacgcgcggcaaccactgggctgtcggacacttaatgggaaaaaagagtgtggcagagtccccacaacttcatgaggaggagagcctgaaggagcagctgagggagtatgcccagtgggaagaagcgacaaggaacttgctaagcctcctacaagcaaagggggcccgaggccaccagatgcctccatgggagcccctgagcattcaccagcctgcctgggattccgaggacgtcagtaacttcaaagacacgggtcctcagcatgaaggaaggaacccccagctgaactgacaatgacgatggccgcctccctcaaagaagcaaaacaaaatccttaagaaactgcgctctatgggcatc

SEQ ID NO: 12083 - DNA, 444 bp, Bos taurus
  Clone ID: 52-LIB188-001-Q1-E1-E8
acggctacgacggcagagattacatcgccctgaacgaggacctgcgctcctggaccgcggcggacacggcggctcagatcaccaagcgcaagtgggaggcggcagattatgctgagtctttgaggaactacctggagggcacgtgcgtggagtggctccgcagatacctggagaacgggaaggacacgctgctgcgcgcagaccctccaaaggcacatgtgacccatcaccccagctctgagcgtgaggtcaccctgaggtgctgggccctgggcttctaccctgaggagatctcactgacctggcagcgcagtggagaggaccagacccaggacatggagcttgtggagaccaggccttcaggggacggaaacttccagaagtgggcggccctggtggtgccttctggagaagagcagagatacacgtgccatgtgcagcacg

SEQ ID NO: 12084 - DNA, 270 bp, Bos taurus
  Clone ID: 52-LIB188-002-Q1-E1-E12
acttctcattagagttgggcacacacttgtccaggccctggtcatcgccagcacacaaggcacagagtctggatttcgggtcagccccaggggcacagctctgactaaagaattcatcaaatgcgcaggagcctgtctggttgacgatcaggcccatggggatgttccagcctgcagtcctgtccacggcggtgtggcacgacttcttgtctttcagagaattccatgtgagcccctcatttgctttcttgacaactgccacggcaaggt

SEQ ID NO: 12085 - DNA, 417 bp, Bos taurus
  Clone ID: 52-LIB188-002-Q1-E1-E8
actcagtataaggctgacggtttacttgctgcaagccgtgtatcgtgcagttacattctcccagttgatcacattccaaatggccttcaggtaatcgggcctgacatttttatactgaaggtaataagcatgctcccacacgtcaatccccagcaggggaataagacctgttgttccttgcaggggatcctggttagaacaagcagcaatctgtaagcgtccctgctccttattgaagccgagccaaccccaaccggagccttggacaccaacagatacagcagtcaacttttccttaaatttggcaaaggaaccaaagtcacgtttgatggcttccagcaattccccttggggtttctcacaccgttagggctcagatttgtccagaagatgctgtgattgatatggcccccaacg

SEQ ID NO: 12086 - DNA, 442 bp, Bos taurus
  Clone ID: 52-LIB188-004-Q1-E1-E8
acgacctcaatgcaaaaaaagcaaaaggcattcctgagttttatgactatgacgtggccctcgtcaggctcaaggaaaagctcaagtatgagaccaccatcaggcccatttgtctcccctgcactgagggatcgattcaagccttgaggcttccaaggtcaaccacatgccagcaacagatgcaagagctactccctgcaaaggacattgaagctctgtttgtgtctgagtctaagaagaccctgactcggaaggcagtctacatcaagaatggggacaagaaagccagctgtgagagagatgctctacgcgccccaggttatgaaaaagtcaaggacgtctctgaggtagtcacccccaggttcctctgcactggaggtgtggatccctacgctgaccccaacacttgcaaaggtgattctggtggccccctgattattca

SEQ ID NO: 12087 - DNA, 436 bp, Bos taurus
  Clone ID: 52-LIB188-005-Q1-E1-E8
acgaacactccccgtagaagcagacgttgttggctggggagatgaagaaggtcctccacagcttcttgtccctcgtgacgtcccggatctccttggtcatgttgactagcctgccggccacgggaggaacccggcggaaatccaggatcctgtccaggtggaaggcggcgatctccgcattatgcctctcatagtcggagaagtaaaagaagtcgggaggcgtctcctgctcccttgtttgcttcatgggtttgaacagcgcctgcccgtagttctggaaggtcatgatgagcttgagctgtgtgccgccggacttcatggccacactggtgatcttctgggtgcccaggtcttggagcagggcccccactgctgggttgtgtctagagtacccgtctccagctcctcccccaacacaatcaaaacagtcagataa

SEQ ID NO: 12088 - DNA, 414 bp, Bos taurus
  Clone ID: 52-LIB188-006-Q1-E1-E12
gggatacatgaaaagcgtagcagctccaaaacattggatgctggataaactgaccggtgtgtttgcccctcgtccatctaccggcccccacaagctaagggagtgtctccccctaatcattttcctaaggaatagacttaagtatgccctaactggagatgaagtaaagaagatttgcatgcagcgtttcattaagatcgatggcaaagtccgcacagatataacctaccctgctggttttatggatgtcatcagcattgataagactggagagaactttcgtttgatctatgacaccaagggtcgctttgctgttcatcgtattacacctgaggaggccaagtataaattgtgcaaagtaagaaagatatttgtgggaacaaaaggaatccctcatctggtaacccatgatgc

SEQ ID NO: 12089 - DNA, 173 bp, Bos taurus
  Clone ID: 52-LIB188-006-Q1-E1-E8
cgcatgcaccctaccgccatcggcccgggatacttcatgacagacacaatctctcggttcacccggaaggagatttttatccgatattccacaccctccttcagcacaaaggactgcttcttgaagctctccagatcacctgtcaggtccagctccagggggcccggggcagt

SEQ ID NO: 12090 - DNA, 248 bp, Bos taurus
  Clone ID: 52-LIB188-007-Q1-E1-E8
gccatgggcgcgggatacgacaatgaatttggctacagcaacagggtggtggacctcatggtccacatggcctccaaggagtaaggtccctggacccccagccccagcaggagcacgagaggaagagttcctcagctgctggggagtcctgccccatctccgccacactgagaatctcctgacttccacatgtttccatctctaaggccctgaggaaggggaggggcttagggagccctgccttgtgt

SEQ ID NO: 12091 - DNA, 225 bp, Bos taurus
  Clone ID: 52-LIB188-008-Q1-E1-E12
acccttccgttggtctcagcacacaatctaggctactgtgtttggaggatttccggttctctgccaggacaggcaccaggccacacttgcccgcagtgtagatatatcctccatccaagttcagggcatctgcttcccctttcagcaccaggacgatgcagtcgtcagtggtggacgccgtggcacaggtcacgttctggccgctctgctggctccactgctggt

SEQ ID NO: 12092 - DNA, 455 bp, Bos taurus
  Clone ID: 52-LIB188-008-Q1-E1-E8
gcgatgggggcgggatacaactcaaaagcacaacatcctgcaggggaggctcctttattccaggatttggcagaatttattttcatcttctacacatgagccaccaaagtaaaaaacaaaagtcactcctcttcagtaaagcagtgtcctcagttaaggataaggttttcatgtaaccttagggctctcagggcgcttctcgtgaagagcagccactataaagacgactatggagcaattttttcattcttcatgcatgagacataaagaatattatagaatagtccaagtttagaagtcactctcaaacatatatgtagaaaagttattgtcagaatactctcaagctttaacaaattggaaaagcctgtaatctttgcactgtttcttagagtcagtggctctaaagggtgatattcaccatcagtgacttcacccagggtttcctttcatga

SEQ ID NO: 12093 - DNA, 340 bp, Bos taurus
  Clone ID: 52-LIB188-009-Q1-E1-E8
actcgtccacaccctcccgttcatcgaacaccggttctgcctcgttagcatccaggtatttcatcccccggctcggtaaaaatgcggttcagcaccaccatgcggaccggaaccttaaggataaggatgaaggggaaggccagggaggccccgttggccataacggcccagagcacggccaggcagagcagctgcagggccgtaacaaggtccatacacagggtccggaccttcttgacgtatgtaatctccgggtggtgtttgggcggcatgagcagcatgtacagccgctcatagaactggttcccattcagggaggtcacgcccatgtatcactagt

SEQ ID NO: 12094 - DNA, 441 bp, Bos taurus
  Clone ID: 52-LIB188-010-Q1-E1-E12
cgccatggcggcgggatacagttccaactcatgtggagacagtggttttatttttcccggatgtttggcattgccttcccacccgctcagagtgggaaaccctctcccgaggatacaagcagcagctggtcgagaagcttcagggtgaacgcaaggaggctgatggagaacaggatgaagaagagaaggatgatggtgaagctaaagaaatttccactcctacccattggtctaaacttgacccaaagacaatgaaggtaaatgatctccgaaaagaattagaaagtcgagctcttagttccaaaggcttaaaatcccagttaatagcccgactgacaaaacagcttaaagtagaagagcaaaaagaagaacaaaaggaattagagaaatctgagaaagaagacgaagacgacgatgatagaaaatctgaagatgattaag

SEQ ID NO: 12095 - DNA, 393 bp, Bos taurus
  Clone ID: 52-LIB188-010-Q1-E1-E8
actgtggcactccgtgaaattagacgttatcagaagtccactgaacttctgattcgcaaacttcccttccagcgtctggtgcgggaaattgctcaggacttcaaaacagatctgcgcttccagagtgcagctattggtgctttgcaggaggcaagtgaggcctatctggttggcctttttgaagacaccaacctgtgtgctatccatgccaaacgtgtaacaattatgccaaaagacatccagctagcacgccgcatacgtggagaacgtgcttaagaatccactatgatgggaaacatttcattctttaaaaaaaaaaaaaaaaaaattctcttcttcctgttattggtagttctgaacgttagatattttttttccatggggtcaaaaggt

SEQ ID NO: 12096 - DNA, 392 bp, Bos taurus
  Clone ID: 52-LIB188-013-Q1-E1-E8
acaagaatgctccagcgaaactgtcttaaatatttttctacaggtgtaaaaccaaagtttcctgcaaaacccagtccacgcccttcatgaatctactgtgtatctattttgcctcactagttctagagaagtagagacaactttgaatccaaggtttggagctgcaccgcgtctgtctttcctatgcactctgagttaaaacgggactcgcgggaccgttggcggcatgctcaggcccctcagcaacttctgtgggtatggtgcctccgggatctttgtcacattcgggaatctccagggcctccggggggattgtgcatttagcatcaggtgtagctttggtcacctcgttagtaatctcaaccttaacttctggatgcttgcttttcttt

SEQ ID NO: 12097 - DNA, 434 bp, Bos taurus
  Clone ID: 52-LIB188-014-Q1-E1-E12
cggatactttgtattttttcagtctgagaagctgttccagataacccaggtaacgctcagagggcacatcttccttttgaatgtgcttctgctcaacactattgggaacaatttcctcacttgacgaaatgctttcagcttccatttgcttaatatcttccatggcttgatcctcagttgattcactcccaatatccttgctcagttcattgaccttctcctttccaaacacttctggaaaaggtgccacaaaaaacctgagtaaattttcattgaggacttcttgagggagtccttggtgcttgataggatgtttaggcctggcaagagcaacagccacaagacaggtaaggatgagaagtttcatggttgtcaagatcttgaacccaagactgggaagaagcagcaagctgggacctgcccgggcggccgct

SEQ ID NO: 12098 - DNA, 369 bp, Bos taurus
  Clone ID: 52-LIB188-015-Q1-E1-E8
acattttactttcttcctttcagtatcctaataaaaaaaacccatgtttctgcttacttaaaaaaaaaaaaaaaaaacaacaaacagaaaacatcacttttgtgatgggaaaggaggcaacaggattcaacataagcaaagaaaactacacctggagcaaagaaagagatcgaagaggaaccgactcgggtggaggccagaccacctgcactgcacagactgcttttgtcggagccagtggtgacggctcccacctgtttacagacctttttttttctccttcagactttaaaaataaaaaattttaaaaaggaatttaaagaaaaaaagaaaaaaaaaaaaagacttctgtcgtaaagaaacctattt

SEQ ID NO: 12099 - DNA, 367 bp, Bos taurus
  Clone ID: 52-LIB188-016-Q1-E1-E12
gccatggtggcgggataccactgttgaggcagccctatgacctggctggcctcttcggatcatctgagggacaatctttccatctcgggaagtgctaccatcatcccgtgcaggataatttccacgtgaacaagtgacttggcaaattgtaccaaattgagaatatccccatgagtgttgataatggaacttgcaaccaagccaactactcactaaaggaatctggaaacgtcaaagtgatacacaaggagctgacagttgatgtaactgtgaatcaccattgaacgtgaagccaccccggacaacatcacagagcctgccaagctggcagtatactttttctggttcacgccatcagctccgtatc

SEQ ID NO: 12100 - DNA, 423 bp, Bos taurus
  unsure (134): unsure at all n locations; Clone ID: 52-LIB188-016-Q1-E1-E8
accgtgccttgtttttgacactctcctggtcgtcatacgccacccactggttgcccttggtggcataggggacctgctggtcacggaatctgtgggtggtggctccgtggaggaagtcacagatctcataatangcaaggatccctttctccttggtgaactggcctggaattcctggccctgagatgggggctcccacatctgtcttggaagaggccagagtgtagctcctcccaaaagtggggatacccatcaccagcttattggctggagcccccagcctcagcatgtagctcacagcgtagtcagcgttactgaatctgtcagaacttgcatcttcctggcctcgaaacagggggctgtggtgtccgactgtctggcgccaggctccgtgaaagtcataggtcaaaaggctgatgaaat

SEQ ID NO: 12101 - DNA, 407 bp, Bos taurus
  Clone ID: 52-LIB188-017-Q1-E1-E8
ccatggcggcgggatacgtgattaaagacctagggtttccagcagggctccacatggtcaggcatggcttctacagcaggtctaacgaagcaccggggacttcacaggacaaggaaagggcaggtacctacaagaggcccctgtgggcatcagcaggggcctcacactgctcggtgacatcagatgcatgtctaaggatccacccagtgactgcaggggctctcccacccacaacttacttggcaaacgggtttctgaagctcctgccggcaaacttggccttgctgcccagttcctcttcaattcttacgaagcagacagatatatgggaagagaaagacagatgtcaaacttcaatgcaataaattttcccacccagagaggtagtcaaggacacacttcttgct

SEQ ID NO: 12102 - DNA, 346 bp, Bos taurus
  Clone ID: 52-LIB188-018-Q1-E1-E12
acttatgataggccagcccaccgggcactttgacaagcttgttgttgttcaaatgaagttccctcaaatgaggagtgttggccaaagagccattgtcaaccgcagagatgctgttgaaactcagtcccaacttagccaaattattcagtcctttcaggctagctgcatcaactttggtgattttgttgccatcgagatgtaattcactaatggaatgacgaagaccttgagggatggtagttatctttgtgtcaacaatgctgatgtacgagagcttcgtcattccctgaaacgctccactttcaatgcatgagctcttcatcgggttggtgccatgttctacgac

SEQ ID NO: 12103 - DNA, 338 bp, Bos taurus
  Clone ID: 52-LIB188-018-Q1-E1-E8
gcgatggcggcgggatacactgaatccagaacatctgggtcaagggggagtgcagcgagaggaagtcccagctgcagatcttagtgatcaagtcccagacaccgagtcagagaccaagatcctcctgcaggggactccggtggcccaaatggcggaggacgccatcgacggagagcggctgaagcaccttatccaaaccccctccggctgtggggagcagaacatgattggtatgacgcccacggtcatcgccgtgcactacctggacagcaccgaccagtgggagaagttcggcttggagaagcggcaggagtccctggagctcatcagaaaggggt

SEQ ID NO: 12104 - DNA, 404 bp, Bos taurus
  Clone ID: 52-LIB188-019-Q1-E1-E8
acttgagctggacagagtcactcgagcccctccaggtagctgtggctaaattcttctctgccagctgtgttccctgcattgatagacaagcataccccaacctgtgtcaactgtgcaagggggagggggagaaccagtgtgcctgctcctcccgggaaccatacttcggttattctggtgccttcaagtgtctgcaggacggggctggagacgtggcttttgttaaagagacgacagtgtttgagaacttgccagagaaggctgacagggaccagtatgagcttctctgcctgaacaacagtcgggcgccagtggatgcgttcaaggagtgccacctggcccaggtcccttctcatgctgtcgtggcccgaagtgtggatggcaaggaagacttgatctggaag

SEQ ID NO: 12105 - DNA, 412 bp, Bos taurus
  Clone ID: 52-LIB188-020-Q1-E1-E12
acatggatatagctatttatttctatctactagaaaataaagtcatattttttcttaatttaatattggtcattgctaatcagaacacactattgccaggaacacagtagttattgttaaaatcagctgcactagatacaatttgaaaatatccagcaccaggttaattccaataacgaacccaatagattagttaatgctatgagaagactaaagagaaagagaaaagagacgcagacccaggcctggctccacatgctactaactaccagctctcagatgtgtcactgggaacaatacacactccatgcgttttgctacatctccagaagaggtaaggacttgagtccacacggggatgctcgcttgcaagtccttgaggcccacagcctggtgtgtttcacgcacagat

SEQ ID NO: 12106 - DNA, 382 bp, Bos taurus
  Clone ID: 52-LIB188-020-Q1-E1-E8
ggatacaagcttatttttttttttttttttattttttttttttctttatctcttttattttttattttttttttattatatatagctctgatcgattaatcctcttctctggccccggattgaaatcttctcctccgggggccaagaatcccggtgtcaacacgtgattcaacaacctttcaggattacggtgatggaggcctcatagaaggactatggaagtttaccttcctcagcaacattctggaagaagtggcctacgataggtgttagctcttctcaaaatttctggtaaaagtcaactgtgaagccgtctggacctgcgcttttgtgggctggaagattttcgattacaggttcaaattcggtgcatgtgaagggt

SEQ ID NO: 12107 - DNA, 269 bp, Bos taurus
  unsure (82): unsure at all n locations; Clone ID: 52-LIB188-021-Q1-E1-E8
ccatggcggcgggatacagggtaataatgtgtcagagctgcctattccaggatttctctagaggctggcaagagtccttganacagttgtcatttctgtcttggccggtctaaacggggttggaaaggtcaaacccgtaggacctgctttcctttcttactgaagatttcccaccagagcactgttctggttacttgccttgagttggaaacagtttgcattcacacctgtaaatttattcatccttttaatttatgtaaggtttttgt

SEQ ID NO: 12108 - DNA, 405 bp, Bos taurus
  Clone ID: 52-LIB188-022-Q1-E1-E8
acagaaagaagtggagtggcgtccgtgtcccctcatcccttgcctactactgctctgtcccaagaggttgataacaatgaagatcctagcatagaggaggaggatcttctcacactgaacagttctccgtccactgccaaagacactctggacaacggggattatggagaaccagactatgactggaccaccagcccccgggatgatgagtccagtgaagccttggaagaaaacaggggctacgtggaaattgagcagtcagagagaccttttaaaaccccaccctcaagtatagaagaggaagatagccatttctttttccaccttattatttttgctttttgtattgctattgtttatattacatatcacaacaaaaggaagattttccttctggttcaaagc

SEQ ID NO: 12109 - DNA, 218 bp, Bos taurus
  Clone ID: 52-LIB188-025-Q1-E1-E8
acactgtaacccatcctcatccaccccgggtggcgtcaaggtgcagaggcagaccttcggggaggccatcaatcaccccggtgtggtcgtcagcgctgccaactacgacggaattctgagcatgaccgagccccatatctacgtcaatcatgtgcagcctgtcttctacaatctgatgcagcacaatttggtgcacaataatctcctcccgctcttcc

SEQ ID NO: 12110 - DNA, 376 bp, Bos taurus
  Clone ID: 52-LIB188-026-Q1-E1-E8
accttaacgccccgctcataggcagcccgccgcagcccgtcgtcaatggcaggccagaaccggcgtgggtgggagaactccatgatgggcaggtagttcatgactgcgatgtagatgaaactccgggcgttgtccaccacgttgagcagggccttcaagtctggggtgcggccactcggacacagcggtgggggtgcactcgccaggtaggccagagcaggggttccgttgaggcagatttccattggagtctcttgattgtagcgggtgtcgtaaggccggggccatgttgatgggatggagctgcccgcctggcccaggaaccagtaggcctcgaagatcttggtcaggtctcgagctaagcagctgcagttgt

SEQ ID NO: 12111 - DNA, 396 bp, Bos taurus
  unsure (353): unsure at all n locations; Clone ID: 52-LIB188-027-Q1-E1-E12
actggcgatcccagcttcaacagcttccccttgttcatgatcatgtaggtgtagtagcggatcttggcttgctcgccggggtccgtgcgcaggtggaagttgacgttgagagtcaccccaggcttgagctccacgcggggcacatagaggtgcaggtagttattggagttcccctgggtgttgtagggtatggcctgcatggtcctggtggcctgtcgactctcctgtccagccgctcctgcacacgcactcgccacagtcacagtcgccatgatctctcgcagagcagtcccttgtgtctcacgcacgagaagttgtcacactggcagtaaggcccgtaaatgtttccgtanggggacaagtggcagacacactgcccgcagtagcagtcgcctc

SEQ ID NO: 12112 - DNA, 359 bp, Bos taurus
  Clone ID: 52-LIB188-027-Q1-E1-E8
gccactgggggcgggatacaaacacaatcaggtgcaactgtttaacaaggggtccactaatctgacttcccataacgggatgtagcaggagacaatccccagaaggcaacctgtctcaagctttaggaattagtcagacacacatcattcccgcgttcactctcaccacttactacctatgtgtacgtctgtcttttttcagctcagcgcttctgccaccacattctaactccaacgagcacatctactactaggacaagcacacaaacagttctacacatagggaggaatgaaggctgatgaggttcccatctcaggttgagggcgctctcaaagcccttctttctgaagatggcaca

SEQ ID NO: 12113 - DNA, 358 bp, Bos taurus
  Clone ID: 52-LIB188-028-Q1-E1-E8
acgtggaggggtccaccggcactttgtcggaaccttcaattctccagatctgcttctgccctctgccgtcatcatccatgccgtgctgggcagccatggcagtggaggtgtgcacggtggccgcgtcgaagggcacgcgctccacgttggcaatgtggctggagagatagctcacgcccgggccgtccgtctggtctgggtcccgccagttcctgaataactgtttgaccagcggggtctcgccgccctcgggaaggacacagacctgggtctgcctggggtagtccatcttggagatgaagtcgaacgctgttttgagggcggccttcctctcctcgatgttggcctgcctgccttt

SEQ ID NO: 12114 - DNA, 414 bp, Bos taurus
  Clone ID: 52-LIB2809-001-Q1-E1-E8
actcctgaatcttcagtaacagagtcagctcagactgaccttgagttgtaaaggcagcaagtagagggctgtattgcttcaagtgcttgatggcttgctctgctacaagctcctcttttttgttccattccacagtgctcattacgctggaccacactattccaatgacaacgggttctgggatgttgttttttttcatttcttccttgacatacaaaattatatccttaaatggatcaccacgggacatctgttcttgaagttctttctggagttccttacgagctcctatggtttgctgattccgaacatattctgaaagctctttcaagcctgcctcagtaaaatactttgtgaagtgttcaacgctttgtttattggcaggaaaaagttccatcagtctgttatccatgc

SEQ ID NO: 12115 - DNA, 474 bp, Bos taurus
  Clone ID: 52-LIB2809-003-Q1-E1-E8
acagtattctttaaaattttctttttaaattgaaagccaacaactctgcctttatgatgctaagctcatgttcttatttcttctcctatcttctttctcttctgttcccattatccttccctttgttttgtccctgtcaccttcctttctccttctcctcattgccccccaggcaagcaggtggtcagtcattggtgggtttccagcttccaaagcctagacaaccctgctgtagtctcaaactagtggtcttcgccccggctgaccctttccttgagctgtctgagctttaaggtggatggctcaagctagagatatgacagaatcttctgggaagggccttgatgatcttcagcccagacttttgctaaatgaaatggaaaaataactttattttggcaccaaactgacaaaacaggtcaattgtcaggggagagagtcagcatgcatggtgtgattgataaatacgatgag

SEQ ID NO: 12116 - DNA, 467 bp, Bos taurus
  Clone ID: 52-LIB2809-004-Q1-E1-E12
acctggtgagattgtggaaagcctttcaagcagtgaggaatctattacacgcatcaataagaaaattgagaagtttcagagtgaggaacagcagcaaacagaggatgaactccaggataaaatccacccctttgcccagacacagtctctagtctatcccttccctgggcccatccctaacagcctcccacaaaacatccctcctcttactcaaacccctgtggtggtgccgcctttccttcagcctgaagtaatgggagtctccaaagtgaaggaggctatggctcctaagcacaaagaaatgcccttccctaaatatccagttgagccctttactgaaagccagagcctgactctcactgatgttgaaaatctgcaccttcctctgcctctgctccagtcttggatgcaccagcctcaccagcctcttcctccaactgtcatgtttcctcctcagtccgtgctgt

SEQ ID NO: 12117 - DNA, 413 bp, Bos taurus
  Clone ID: 52-LIB2809-004-Q1-E1-E8
acagtattctataaaattttctttttaaattgaaagccaacaactctgcctttatgatgctaagctcatgttcttatttcttctcctatcttctttctcttctgttcccattatccttccctttgttttgtccctgtcaccttcctttctccttctcctcattgccccccaggcaagcaggtggtcagtcattggtgggtttccagcttccaaagcctagacaaccctgctgtagtctcaaactagtggtctttgccccggctgaccctttccttgagctgtctgagctttaaggtggatggctcaagctagagatatgacagaatcttctgggaagggccttgatgatcttcagcccagacttttgctaaatgaaatggaaaaataactttattttggcaccaaactgaaaa

SEQ ID NO: 12118 - DNA, 412 bp, Bos taurus
  Clone ID: 52-LIB2809-006-Q1-E1-E12
cggatacatcatcatcggcgacacaggtgttggtaaatcatgcttattgctacagtttacagacaagaggtttcagccagtgcatgaccttactattggtgttgagtttggtgctcgaatgataactattgatggaaaacagataaaacttcagatatgggatacggcagggcaagagtccttccgttccatcacacggtcatattacagaggagcagcaggggctttgctagtgtatgatattacaaggagagacacattcaaccacttgacaacctggttagaagatgcccgccagcattccaattccaacatggtcattatgcttattggaaataaaagtgatttagaatctagaagagaagtaaaaaaagaagaaggtgaagcttttgcacgagaacacggacttatc

SEQ ID NO: 12119 - DNA, 429 bp, Bos taurus
  unsure (423): unsure at all n locations; Clone ID: 52-LIB2809-009-Q1-E1-E12
cgcgacggccgcgggatacagcagaaaggcctgaatgggcatatctctctggggatagggcactgctttctggggaacaggcaggactttggactgagaaagggacagcacggactgaggaggaaacatggcagttggaggaagaggctggtgaggctggtgcatccaagactggagcagaggcagaggaaggtgcagattttcaacatcagtgagagtcaggctctggctttcagtaaagggctcaactggatatttagggaagggcatttctttgtgcttaggagccatagcctccttcactttggagactcccattacttcaggctgaaggaaaggcggcaccaccacaggggtttgagtaagaggagggatgttttgtgggaggctgttagggatgggcccaaggaagggatagactanagactg

SEQ ID NO: 12120 - DNA, 411 bp, Bos taurus
  Clone ID: 52-LIB2809-009-Q1-E1-E8
acaatgccacagtggaaggaatacaggccttcaatattaagacctaaatttgcaaaaaacttggagcttggttttttgttgtcgggaaccccttccagacaaagcaggggagtcgaccctcctgtccagatcaggaggggagaaagggctcagaggagggggtgccggaaaacctcggtgttcctctcgagggagaccgggatttcggggaactttgtgggtcgcatcaagggtgccaagtgccctttcgacctccaattcctaacgtgggacttctcctgaggcgctgtagcgggaaagggcttcatcttgcggatgacggggagccacgtggttgtgctcgagttacggcgggagtctcgagttacgagggggaattcaggctgccccttgtgttggcccaggcaagtc

SEQ ID NO: 12121 - DNA, 370 bp, Bos taurus
  Clone ID: 52-LIB2809-010-Q1-E1-E12
ccaacagcggggtggtttgagtgtggtaggcttccaggcggattttcaaggccttcttattatcatctgatcggcggattaacggttccccagtgataccatctttcatgggttcctttgggggattgaactcctcgtggtatgagcggccactctgggggtgaatcagtcttcctgtgattctccggatgagcacagagtctgggatgctgaattcaatcacagaatcaatcctctctttcctcttctccatgaggtcatcaagcatttctgcctgcctcacggtccgagggaagccatccagaagaaaaccatttttgcatggaggggtctccaaattcttttcaatgagctccaagaccatttcatc

SEQ ID NO: 12122 - DNA, 140 bp, Bos taurus
  unsure (9): unsure at all n locations; Clone ID: 52-LIB2809-011-Q1-E1-E8
cgcatgacngcatgacgcatgggcgcgggatactattgaacctatggtttcaaagtaactggccaaagaagttgacaaactgggagcagttttcatggatgcccccgtttctggtggtgtgggagcctctcggtcggaga

SEQ ID NO: 12123 - DNA, 434 bp, Bos taurus
  Clone ID: 52-LIB2809-012-Q1-E1-E8
acaagcttatttttttttttttttttttttttttttatgccgaaggattaatttattgaaatgactggttaggaaatagattcttaaagaaataatactcacaattccagaaattatttttatacatattttgatatgttcatgagatttccaacttaaaattgaacttttatgctaatgttgaattaaaattttgaaatatatagtttaggactcaaagtcaaagttaagatgaaaaagcataaaataaataaaggaataaggtttcattttttgttccatgtatactcatttgagagttatcttagtaacatgatgcaaggattgaaaagttgccatatttccagtcggagtcaattcagaagtgaggagggggcattcactttgaaatcctcttagacaataatagggaagggtccccggacaggaccgag

SEQ ID NO: 12124 - DNA, 433 bp, Bos taurus
  Clone ID: 52-LIB2809-014-Q1-E1-E8
acagtattcattaaaattttctttttaaattgaaagccaacaactctgcctttatgatgctaagctcatgttcttatttcttctcctatcttctttctcttctgttcccattatccttccctttgttttgtccctgtcaccttcctttctccttctcctcattgccccccaggcaagcaggtggtcagtcattggtgggtttccagcttccaaagcctagacaaccctgctgtagtctcaaactagtggtctttgccccggctgaccctttccttgagctgtctgagctttaaggtggatggctcaagctagagatatgacagaatcttctgggaagggccttgatgatcttcagcccagacttttgctaaatgaaatggaaaaataactttattttggcaccaaactgaaaaaacaggtcaattgtcagggg

SEQ ID NO: 12125 - DNA, 434 bp, Bos taurus
  unsure (7): unsure at all n locations; Clone ID: 52-LIB2809-015-Q1-E1-E8
gccatgngcccgggatacagtattatttaaaattttctttttaaattgaaagccaacaactctgcctttatgatgctaagctcatgttcttatttcttctcctatcttctttctcttctgttcccattatccttccctttgttttgtccctgtcaccttcctttctccttctcctcattgccccccaggcaagcaggtggtcagtcattggtgggtttccagcttccaaagcctagacaaccctgctgtagtctcaaactagtggtctttgccccggctgaccctttccttgagctgtctgagctttaaggtggatggctcaagctagagatatgacagaatctctgggaagggccttgatgatcttcagcccagacttttgctaaatgaaatggaaaaataactttattttggcaccaaactgaaaaaacaag

SEQ ID NO: 12126 - DNA, 158 bp, Bos taurus
  Clone ID: 52-LIB2809-016-Q1-E1-E8
ggatcaatggacaactccaggggagactagtttccatccatatcagagtccaggaagcctgatcaacacggtttgttctactgtgagagcttcagtgatcaccacggatacctgtggggccactgtgtcccgctgcatccacacgggggggtcttctg

SEQ ID NO: 12127 - DNA, 386 bp, Bos taurus
  unsure (83): unsure at all n locations; Clone ID: 52-LIB2809-017-Q1-E1-E8
gccatgggcccgggatacagcagaaaggcctgaatgggcatatctctctggggatagggcactgctttctggggaacaggcangactttggactgagaaagggacagcacggactgaggagaaacattacagtttgaagaagaagcttgtgaagctggtgccaccaaaaactgaaccaaagcaaaagaaagttcaaattttcaacaaccattaaaatcaagctccggctttcaattaagggctcaactggatatttaaggaaaggcatttccttgtgcttaagaaccatagcctccttcactttggagactcccattacttcaagctgaaggaaaagcggcaccaccacacgggtttgagtaagaagaaggatgttttgttggaag

SEQ ID NO: 12128 - DNA, 381 bp, Bos taurus
  Clone ID: 52-LIB2809-018-Q1-E1-E12
acctctattacaagctctgcccctgctccttcccctcactgacatagcccctcttccctgaagctatgaacatgtgagatacttgtagacacgcaagcacctggcaagtttgctttcaagagcctgctaatgaatgaggaaagtcagtccaggccaggtgtcagagcccccaccatgagaaaaagaagaatacaaaggactgagagtattaaacaaggcaaagctcttctttttctccaaaactagtcaggcctggagactacgtgatttgtttgaagacagaaccagcagagctgcagggtgactggaagccatcgccagagggaagaacacaagcttcaaggccagatgcccagctgagctctcagaacagcccagcca

SEQ ID NO: 12129 - DNA, 407 bp, Bos taurus
  Clone ID: 52-LIB2809-018-Q1-E1-E8
atgctccccagcgccatgggcccggaatacctggtaagattgtggaaagcctttcaagcagtgaggaatctattacacgcatcaataagaagattgagaagtttcagagtgaggaacagcagcaaacagaggatgaactccaggataaaatcgaccccgttgcccagacacagtctctagtctatcccttccctgggcccatccctaacagcctcccacataacatccctcctcgtactcaaacccctgtggtggtgccgcctttccttcagcctgaagtaatgcggagtctccaaagtgaatgaggctatggctcctaagcacatagaaatgcccctcgctaaatatccagttgagccctttactgagtgccagagcctgactcgcactgatgttgaaaatctgca

SEQ ID NO: 12130 - DNA, 351 bp, Bos taurus
  Clone ID: 52-LIB2809-019-Q1-E1-E8
ggatacagcaaaaaggcctgaatgggcatatctctctggggatagggcactgctttctggggaacaggctggactttggactgataaagggacagcacggactgggaggaaacatcacagttggaggaacaggctggtgaggctggtgcatccaagactggagcacaggcacaggaaggtgcagattttctacatcagtgagagtcaggctctggctttcagtaaagggctcaactggatatttacggaagggcatttctttgtgcttacgggccatagccctccttcacctttggagactcccattacttcacgctgaatgatacgcggcacccccacaggggtctgcgt

SEQ ID NO: 12131 - DNA, 328 bp, Bos taurus
  Clone ID: 52-LIB2809-020-Q1-E1-E8
cgccatggtcgcgggatacatcaaaaaggcctgaatgggcatatctctctggggatagggcactgctttctggggaacaggcatgactttggactgagaaagggacagcactgactgatgaggaaacatgacagttggacgaacaggctggtgaggctggtgcatccaagactggagcagaggcagagtaaggttcagattttcagcatcagtgagatccatcctctggctttcattaaagggctcaactggatatttaggcaagggcttttctttgtgcttaggatccatacgctccttcactttggagactcccattacttcaggc

SEQ ID NO: 12132 - DNA, 317 bp, Bos taurus
  Clone ID: 52-LIB2809-021-Q1-E1-E12
cgtatgtgtatgatacataaggttatgtattaattgtacccgcgttctaacgacaatatgtacaagcctaattgtgtagcatctggcttactgaagcagaccctatcatctctctcgtaaactgccgtcagagtcggtttggttggacgaaccttctgagtttctggtaacgccgtcccgcacccggaaatggtcagcgaaccaatcagcagggtcatcgctagccagatcctctacgccggacgcatcgtggccggcatcaccggcgccacaggtgcggttgctggcgcctatatcgccgacatcaccgatgggga

SEQ ID NO: 12133 - DNA, 185 bp, Bos taurus
  Clone ID: 52-LIB2809-022-Q1-E1-E8
cacattatctgcttctgaaaaccccttcttgaggtctcctttctcaatcttcagctcagatccataaaaggaattattttttatagcatcctcaattgtgagaatggcaggaagatcctcataggtgactttcacgacatgggcagctctccctgcatgttccggggtgtcagcgcacacaggac

SEQ ID NO: 12134 - DNA, 455 bp, Bos taurus
  Clone ID: 52-LIB2809-023-Q1-E1-E12
gcgcgggataccaggtgagattgtggaaagcctttcaagcagtgaggaatctattacacgcatcaataagaaaattgagaagtttcagagtgaggaacagcagcaaacagaggatgaactccaggataaaatccacccctttgcccagacacagtctctagtctatcccttccctgggcccatccataacagcctcccacaaaacatccctcctcttactcaaacccctgtggtggtgccgcctttccttcagcctgaagtaatgggagtctccaaagtgaaggaggctatggctcctaagcacaaagaaatgcccttccctaaatatccagttgagccctttactgaaagccagagcctgactctcactgatgttgaaaatctgcaccttcctctgcctctgctccagtcttggatgcaccagcctcaccagcctcttcctccaactgtcatgt

SEQ ID NO: 12135 - DNA, 372 bp, Bos taurus
  Clone ID: 52-LIB2809-023-Q1-E1-E8
gccggccgggatacaacataatcaggaacagctgcccatatcaacgtgattccaccatctccgtggaagagaatggggtgtcagcagaaagccggttctcagttcagatgttcaagtttgctggaaattatgacctagttttcctgcattgtgaggtttctctctgtgatttcattaaagaagagtgccaaccgtcttgctcaagaagtcaactccgcagtgaaggggtggctattgatccagcccgagttctagatctgggacccatcactcgcaaaggtgcccagtctcttggtgtcatgagtggaacacccaacactgcacggttcctgttggtctgacccctggttctcctgcatgtcctcctggctg

SEQ ID NO: 12136 - DNA, 379 bp, Bos taurus
  Clone ID: 52-LIB2809-024-Q1-E1-E8
gttaagaaacacaggaccatactaaaagccaatgacagcatacaatatgtactcttccatataaataatataatttggtgtaaacacgatcataaccctcactcatgcaacatctgtaacatctccatgtgacaagttcctgtatgatgatcttacagatgactttatgtgtgtcagtgaagattctggtatacttacgaattaactattggttgcgccatagagcactctgtactgagaagctggattagtggcaccgtgataagttgtgaacacctgctgtctttacagcttctgtcctcattctgttcctgcaactcttctgcctcatggctacctcgttttgcttctttgtacccccttgaagctaactcatctc

SEQ ID NO: 12137 - DNA, 312 bp, Bos taurus
  Clone ID: 52-LIB2809-026-Q1-E1-E12
gggaaacagcaaaaaggcctgaatcgccatatctctctggggatagggcactgctttctggggaacaggcatgactttggactgaaaatgggacactacggactgatgatgacacttgacagttgaaggtggtggcgcttgaggctcgtgcatccaagcctgggccaaaggcagtggaaagtttaaatattcatcatcagtcaagctctagcttctagttttcaggttcaagctctcatctttactagataaggcatttgcgatttccttatgctccatgagcctccattcaccttgaatatgcccaactcc

SEQ ID NO: 12138 - DNA, 381 bp, Bos taurus
  Clone ID: 52-LIB2809-027-Q1-E1-E8
ggataaatcaaagtcaggaacagctgcccaaatcaacgtgattccaccatctccgtggaagagaatggggtgtcagcagaatgccggttctcagttcagatgttcaagtttgctggaaattatgacctagttttcctgcattgtgaggtgtctctctgtgatttcattcaggaacagtgccaaccgtcttgctcaagaagtcgactccgcagtgaaagggtggcgattgatccagcctgagttctagatctgggacccatgactcgcaaaggtgcccagtcgcctggtgtcatgagtggaacaccgaccactgcatggttcctggtggcctggcccctgattctggtgcccgtccccctgtctgggatgttctgagagctc

SEQ ID NO: 12139 - DNA, 436 bp, Bos taurus
  Clone ID: 52-LIB2809-028-Q1-E1-E12
ccatgggcccgggatacaagctattttttttttttttttttttttttttaaaagaaagaaacccagagtaagtttttaatagaaaaaattttgcacgtgcaggatcaatcagtgatatcagaacactgacaccaatccatttatttctgagcattgatgagtttgacagacactctggatccaggcatctctttgtaacaagaaacttttgaaaccttttctgctttttttacaaatacagtgataccagctcttcttttgaaatagtgggggctctgaaaagagcctttgggtttgaaagcacttccggaaactcaggtctcagtccaattacttgcccttggccttatggtgactctcggttttctttggcagcagcaccgcctggatgttaggcagcacaccaccctgagcgatggtcacacgacccagcagc

SEQ ID NO: 12140 - DNA, 405 bp, Bos taurus
  Clone ID: 52-LIB2809-028-Q1-E1-E8
gggataaaactacctttggagttgatattaatagaaattattccaaaattattcttaggtcacaaataactactatcccacataaaaagggaaaaatcccacccaattaaggaaaaggtatcctgtgtatgtttccatggcaatgagtttatgcattctcagattttgtccggctagttatccaccctttatctgatgcatttattccatctctcagagagaaccatatagattcctgacggcatccaggacacgtggctcgtggtggacacacttcatggtggatactgctactataaaaatactcagaacttaagagaattccaagatgctttataaaaagcattagtcatgcctcaaaactgccctttgaggtaggtcagtattattatcccattttaacag

SEQ ID NO: 12141 - DNA, 393 bp, Bos taurus
  Clone ID: 52-LIB2809-029-Q1-E1-E12
acagcaaaaaggcctgaatgggcatatctctctggggatagggcactgctttctggggaacaggcaggactttggactgagaaagggacagcacggactgaggaggaaacatgacagttggaggaagaggctggtgaggctggtgcatccaagactggagcagaggcagaggaaggtgcagattttcaacatcagtgagagtcaggctctggctttcagtaaagggctcaactggatatttagggaagggcatttctttgtgcttaggagccatagcctccttcactttggagactcccattacttcaggctgaaggaaaggcggcaccaccacaggggtttgagtaagaggagggatgttttgtgggaggctgttacggatgggcccaggga

SEQ ID NO: 12142 - DNA, 435 bp, Bos taurus
  Clone ID: 52-LIB2809-029-Q1-E1-E8
acctcacaagaccagagtggctgctccactagcagagaaccccttttgaggtgttgcgatgcacggagggacttggagcttgctattggtggagttctccgggctgagcagcaaattaaagacaacttgcgagaggtcaaagcccagattcacagctgcataagtcgccacctggaatgccttcgaagccgtgaggtgtggctgtatgaacaggtagatctcatctatcagcttaaagaggagacgcttcagcagcaggtccaacagctctactggttactgggccagttcaattgtcttattcatcagctggagtgcacccaaaacaaagacctagccaatcaagtctcagcttgcctggagagattgggcagtctgaccctcaaacctgaagattcaactgcgttactctttgaagccgacataactggcctg

SEQ ID NO: 12143 - DNA, 389 bp, Bos taurus
  Clone ID: 52-LIB2809-030-Q1-E1-E8
acccaaacactgaggctcagaaagaccgagtgctgactctggaagaatggcaagaaaagtgggtgaaccacaaaactggatttcatcaagaacaaggacatcagctattaaagaagtatttggatacctttcttaaaggcgagaaagcactgcgggtattttttcccctttgtggaaaagcagttgagatgaaatggtttgcagaccgaggacacagtgtagtaggcgtggaaatcagcgaacttgggatacgggacttttttacggagtagaatctttcttactcagaagaaccaattatggaaattcctggagccaaaatattcaagagttcttcagggaacatttcattgtattgctgcaacctttttgatcttcccagagcaaat

SEQ ID NO: 12144 - DNA, 339 bp, Bos taurus
  Clone ID: 52-LIB2809-031-Q1-E1-E12
accctcatggggactggaggataatgttgtctgcagccagcccgctcgaaacctaagccgccctgatggtttagaagaccctgaggatagtaaagaagatgagaaggtgcccactgctcctgatcctccaagtcagcatttacgtgggcatggaacaggcttttgctttgatcccagctttgatgttcagaagaaatgtccactctgtgaattaatgttccctcccaactatgatcagagcaaattcgaagaacatgttgaaagtcactggaaggtgtgcccaatgtgcagcgagcagttccctcctgactatgaccagcaggtgtttgaaaggcatgt

SEQ ID NO: 12145 - DNA, 410 bp, Bos taurus
  unsure (385): unsure at all n locations; Clone ID: 52-LIB2809-031-Q1-E1-E8
acccatttccatagagctccacagcccagaacccattctcgggagtcatggggtcaaatcctttcttcatcacattctccctacacaccccaattgcccagtccgtcctgtctcccacctccacctcccagtaatgcctccccgaggtgaaggcctcacgacccatcacacagggccaggagtcaaatctctctggtttctcaggaagtttctgacgtgaatcttccagtcggacagattttgaatcttcgtacagaaagaggtgggggtgggcagtatctggatccagagtcacatccactgcatgcaatgtagcccttttccatttgagctcttccaggagtttctctttagagctgaattcattcctcctctgtctggatcnttccttgtatagtctccaggtaaaa

SEQ ID NO: 12146 - DNA, 404 bp, Bos taurus
  Clone ID: 52-LIB2809-032-Q1-E1-E8
gccatggacccgggatacagcataaaggcctgaatgggcatatctctctggggatagggcactgctttctggggaacaggcacgactttggactgagaaatggacagcacggactgaagatgaaacatgacagttggaggaacatgctggtgatgctggtgcatccaatactggagcagaggcagatgaatgtgcagattttcaacatcagtgagagtcaggctctggctttcagtaaagggctcaactggatatttagggaagggcatttctttgtgcttaggagccatagcctccttcactttggagactcccattacttcatgctgaatggaatgctgcaccaccacaggggtttgagtaagacgaaggatgttttgtgggaagctgttatggcatggccc

SEQ ID NO: 12147 - DNA, 334 bp, Bos taurus
  Clone ID: 52-LIB3057-001-Q1-K1-E8
tcgcgccactgaagatcctggtgtctctttgggccgccgtcccgcccggtgttaccggtattgtaagaacaagccgtacccaaagtctcgcttctgtcgaggtgtccctgatgctaagattcgcatctttgacttggggcgtaagaaggccaaagtggatgagttcccactctgtggccacatggtgtcagatgagtatgagcagctctcctctgaagccctgtaggctgcccgtatttgtgccaacaagtacatggtgaaaagcttgggcaaagatggttttcacatccgagtgcggctccacccctttcatgtcatccgcatcaacaagatg

SEQ ID NO: 12148 - DNA, 453 bp, Bos taurus
  Clone ID: 52-LIB3057-002-Q1-K1-E8
cccggtcgaccccgcgtccgcggacgcgtggggttctagatcgcgagctgccgcccttttttttttttttttttttcggtaagcttgaaaggttttatttcttaactacatacagctttaagagtcgtgatacctggctccatcactgcctttgtatttctttttctttctatttatcttctttctgtcataatccttacttttgttttttcttttttttttcttctcttttttctttttttcctactttttttttattttctctcttattattttttttttttttttttattttatctattatttttttttattcttttattttttcttttttctttttctttttttattttcttttttatatttttattttttttttttattttatttttttttttttttatttttttttataaatttttttttatttctattattatattattttttttt

SEQ ID NO: 12149 - DNA, 390 bp, Bos taurus
  Clone ID: 52-LIB3057-003-Q1-K1-E12
atcacgagcggccgtcctcgtactgtcaggaagctccgtagccacctacgggacgcgcaagtgtcatgatatgcagtacaagaaagcccatctggacacagatctgaacgccaaccctttcgatgaccttctcaccctaaggaaattgtactggataaagtagcagttgaagccaaacagccaaattctgccatcaggaagtgtctcaggcttcagctcatcaagactggcaaaaagatcactgcttttggtccaaatgatggtcgcttgaattctattgaggaacctgatcaaattctgattgctgcatatggtcgcacaggtcatgctgttggtcacattcctgtagtccactttaaggttgtcaaagtaaccgatctctcttttttt

SEQ ID NO: 12150 - DNA, 423 bp, Bos taurus
  Clone ID: 52-LIB3057-004-Q1-K1-E8
atttccccgaataaataatataagcttctgactcctccctccctcattcctacgactgctcgcatcctctatagttgaagctggggcaggaacaggctgaaccgtgtaccctcccttagcaggcaacctagcccatgcaggagcttcagtagatctaaccattttctctttacacttagcaggagtttcctcaattttaggagccatcaacttcattacaacaattatcaacataaagccccccgcaatgtcacaataccaaacccctctgttcgtatgatccgtaataattaccgccgtactactactactctcgctccctgtattagcagccggcatcacaatgctattaacagaccggaacctaaatacaaccttcttcgacccggcaggaggaggagaccctattctatatcaacactt

SEQ ID NO: 12151 - DNA, 380 bp, Bos taurus
  Clone ID: 52-LIB3057-005-Q1-K1-E12
accacaaataagatcttttatttgtcaccattaagaggctgcattttaaaccgattcttggactggtggctcgtatccatcagctcgttcaactttagcacctgtctcatccccagtagcttttccagaactactaccttcaccatgtagctccatgagttttcccaattcaaatttgggcttcttcagcatttttacttttctaacgaagacatcatggagtggataaatagattggcaagccttttctatgtcttttccaatgctatctggaatcaatttattgaccacctctttcaagtcatttgtctgcacctctcgggtcatgatttccatcatcttcttgcggatctggcgcacctgctggtgctgggcgtaag

SEQ ID NO: 12152 - DNA, 409 bp, Bos taurus
  Clone ID: 52-LIB3057-005-Q1-K1-E8
gttggattcctgtgtcgtcttcaatgtaactatacgcgattgaatctgccgcatcttacgtgggggtaacaattcaaggtgcacatctacttgaaatccctgacctgcaagaccattaccctagacgtagatcccagtgacaccatccagaacgtcaaggccaagatccatgataaagaaggtattctccctgaccagcagaggctcatatttgccggcaagcagatggaagattgccgcactctctctgattacatcatacataaagattcgatcttgctctttactcttcgtataatgagtcgtatacacattttcactaaaacattttataagtagactcataactctgaaatatgcatccagtgacaccatcgagaacgtgatagccaagatccatgataatgag

SEQ ID NO: 12153 - DNA, 404 bp, Bos taurus
  Clone ID: 52-LIB3057-007-Q1-K1-E12
tagattcagccccagttggaaaaaaaaaaaaggttgttcgagatggcacgtacgaagcagactgctcgtaagtccacaggaggaaaggcacctaggaagcagctcgcaaccaaggctgcacgtaagtctgcaccaactactggtggtgtgaagaagccacatcgttatcgtcctggtaccgttgctcttcgtgagattaggaaataccagaagagtaccgagcttttgatcaggaagctccccttccagaggctggttcgtgaaattgctcaggacttcaagactgatctgcgtttccagagccatgctgtgcttgcattgcaagaagctgctgaggcataccttgttggactctttgaggatactaatctgtgtgccattcacgctaagcgtgtaactattat

SEQ ID NO: 12154 - DNA, 407 bp, Bos taurus
  Clone ID: 52-LIB3057-008-Q1-K1-E12
ctgaagttctatttaaactattccctgaacactattaatatagttccataaatacagagagccttatcagtattaaatttatcaaaaatcccaataactcaacacagaatttgcaccctaaccaaatattacaaacaccactagctaacataacacgcccatacacagaccacagaatgaattacctacgcaaggggtaatgtacataacattaatgtaataaagacataatatgtatatagtacattaaattatataccccatgcatataagcaagtacatgacctctataacagtacataatacatataattattgactgtacatagtacattatgtcaaattcattcttgatagtatatctattatatattccttaccattagatcacgagcttaattaccatg

SEQ ID NO: 12155 - DNA, 412 bp, Bos taurus
  Clone ID: 52-LIB3057-008-Q1-K1-E8
gccgggttgagaggagcgtggccttctcctctccccgccatggcgtgtgctcgtccactgatatcagtgtactccgaaaagggggagtcctctggcaaaaatgtcactttgcctgctgtgttcaaggctcccattcgacccgatattgttaactttgttcacaccaacttgcgcaaaaacaacagacagccctatgctgtcagtgaattagcaggtcatcaaaccagtgctgagtcttggggtaccggcagagctgtggctcgaattcccagggttcgaggtggcgggactcaccgttccggtcagggcgcttttggaaacatgtgtcgtgggggccgcatgtttgcgccaactaagacctggcgacgttggcaccgcagagtgaatacgacgcagaagcgatacgccatct

SEQ ID NO: 12156 - DNA, 396 bp, Bos taurus
  Clone ID: 52-LIB3057-009-Q1-K1-E12
gtttagcaccaggcgccccacgaacgtgcggtgcgtgacgggcgagggggcggccgcctttccggccgcgccccgtgtcccgggacgaagggctctccgcaccggaccccggtcccgacgcgcggcgggggcgcgccgcgccgcgccccgggggacgcgggcgacggcccgccggcggtgacggcgggggaccggctatccgaggccaaccgaggcttccgcggcgctgccgtatcgttccgcctgggcgggattctgacttagaggcgttcagtcataatcccacagatggtagcttcgccccattggctcctcagccaagcacatacaccaaatgtctgaacctgcggttcctctcgtactgagcaggattaccatgggctcaacacatcatca

SEQ ID NO: 12157 - DNA, 215 bp, Bos taurus
  Clone ID: 52-LIB3057-011-Q1-K1-E12
cggacgcgtggggttctagatcgcgagtttccgcccttttttttttttttgtgtttttgtttaattttttgctttttgaaaccatgtgtttaatattttcattaaactgtgtcaatataatttcaagcaaatgccaacttttataccatgcctataatttattttaatctttgtcagtattcttacttagatgcattcaatcataatcctacata

SEQ ID NO: 12158 - DNA, 417 bp, Bos taurus
  Clone ID: 52-LIB3057-012-Q1-K1-E8
atcatcagtagggtacaactaacctgtctcacgacggtctaaacccagctcactttcgctattattgggtgaacaatccaacgcttggtgaattctgcttcacaatgataggaagagcctacatcgaaggatcaaaaagcgacgtcactatgaacgcttggccgccacatgccagctatccctgtggtaacttttctgacaccttctgcttaaaaccccaaaggtcagaaggatcgtgaggccccgctttcacggtctgtattcgtactgaaaatcaagatcaagcgagctgttgcccttctgctccactgcaggtttctgtcctccctgatctcgccttatgacacctgcgttaccgtttgacaggtgtaccgacccagtcaaacttcacacctggcactgtcctcagagcgtgtc

SEQ ID NO: 12159 - DNA, 433 bp, Bos taurus
  Clone ID: 52-LIB3057-013-Q1-K1-E12
cggacgcgtggatcgtgagcggccggactgtctatggggctttcgtcatggggtgtcgggcgtttaataacgtgtggacattatgcatgaaccatacattctaacgtggctgcagccagcttccacgcgccgcgccccgggggacgcgggctacggcccgccggcggggacggcggcggaccggctatccgaggccaaccgaggctcccgcggcgctgccgtatcgttccgcctgggcgggattctgacttagaggcgttcagtcataatcccacagatggtagcttcgccccattggctcctcagccaagcacatacaccaaatgtctgaacctgcggttcctctcgtactgagcaggattaccatggcaacaacacatcatcagtagggtaaaactaacctgtctcacgacggtctaatcccagctcacgt

SEQ ID NO: 12160 - DNA, 387 bp, Bos taurus
  Clone ID: 52-LIB3057-013-Q1-K1-E8
gttctagatcgcgagcggccgcccttttttttttttttttttttttttttttttggtgggaaaggtttaaacaatttattttgtcccaaaaatggagaccggagaaaaagccacgcgcgttcccgcgccattacccggcgcgcgcccggaggcgggaagggctgcgccgccgtggcgtcctcgcgcgcagggccggggcgggcaggcgcaacccggccattggcgccccggagccggtaaccaaggctacagcccaggccaagcgcgagagccaataagggcgtcgccagggccgtttcaaaaatctaaagcaaacaataatcggggaaaaaaaaaaaaaaatactcccacgttgggggatgggcaggccggcacggcccgggccca

SEQ ID NO: 12161 - DNA, 284 bp, Bos taurus
  Clone ID: 52-LIB3057-014-Q1-K1-E8
agaagatataagctcccattgttaggcagacctggagagaactagctaaggtcaccatgctagattgttgaagtggaggaagtttatatacatttctgaagggtcagtttagtttgagcaatgaggtacttgtattagatactggaaaatggagagttggttggaataaatcatgtgagttggcacagtgaacttcaggcaggcagaataagagggcacaccttcacagtgcagtcagggtttctggttaagtttgcaggtaccttgtggactcctgaattgat

SEQ ID NO: 12162 - DNA, 423 bp, Bos taurus
  Clone ID: 52-LIB3057-016-Q1-K1-E12
ggcaaggttgtaaattggcatggaaatttaaagcaggttcttgttggtgcacagcacgaattagttatatatggggatggtagttttttcatcttcagttgtctctgatgcagcttatacgaataattgttgttctgttaactgaataccactctgtaattgcaaaaaaaaagaaaaagaaaaaaagttgcagctgttttgttgacattctgaatgcttctaagtaaatacaattttttttattagtattgttgtccttttcataggtctggaaatttttcttaaggggaagctagtcttttgcttttgcccattttggatcacacggaattatcacactgtttatctttcatatagttagctgataaaaagcttttgtctgcacaccctgcatacccatgatgagggtaataaaagttgaat

SEQ ID NO: 12163 - DNA, 437 bp, Bos taurus
  Clone ID: 52-LIB3057-016-Q1-K1-E8
ctcacatctttttgtcacttcatcatttgactggacagtaaaactttggacagctaaggataacaagcctttgtactcatttgaagataattcagactatgtttatgatgttatgtggtcacccactcacccagccctgtttgcctgtgtggatggcatgggtaggctggatttgtggaatctcaataatgatacagaggtgccaactgcaagcatttctgtggaaggtaatcctgctcttaatcgtgtaagatggacccattctggaagagagattgccgtgggtgattctgaaggacagattgttatatatgatgtgggagaacagattgctgtcccccgaaatgatgaatgggcacggtttggccgaacacttgcagaaattaacgcataccgagcggatgcagaggaggaagcagctacccgaatacctgctt

SEQ ID NO: 12164 - DNA, 445 bp, Bos taurus
  Clone ID: 52-LIB3057-017-Q1-K1-E8
cggacgcgtgggctgaactataccttctaccaggtgatttcagcctcctcccaggcccgtccagcacttcgctccctacaaaaccgttgtcttgtccccggctactattccactcacttacaacgctggctgacttacttcccctctggacagttgctgattgtggatgggcaagagctgcgtaccaacccagctgcctcaatggagagcatccagaagttcctgggtatcacaccctttctgaactacacacggaccctcaggttcgatgaagataagggattcttgtgccagggacttgaaggtggcaagactcgttggctaggaaagagcttaggtcgtaagttcccagatatggacgctgagtcccgcctttgccttacggattttttccggaaccacaatttggagctgtcaaagctgctgagccggcttggacagccag

SEQ ID NO: 12165 - DNA, 448 bp, Bos taurus
  Clone ID: 52-LIB3057-018-Q1-K1-E8
tctctaatcgcgagcggcctccctttttttttttttttttctctttcttctcttgctgcaagattcatagcttttttaggtaccacattccttaaaacttaattttaacttctataacattttcccctttcttaataataatcctattactcaactttctcttttataaccttatatctaatctaatatcactcctaattcttaactcttacttctacctactattatttcattatttattactctatttcttttatatttatttattattattttttcttttttttttttattattttcttattttatttattgtatgttttttattttttttttttttatattctttatatattattttttcttcttttttttatttttcattttatttttatattctcttattatttttttttatatattattattttattatctttattttttt

SEQ ID NO: 12166 - DNA, 371 bp, Bos taurus
  unsure (308),(328): unsure at all n locations; Clone ID: 52-LIB3057-019-Q1-K1-E12
ccgacggcagcatgtctcacaggaagttctctgctcccaggcatgggtccctgggcttcctgcctcggaagcgcagcagccggcaccgcgggaaggtgaagagcttccccaaggatgactcttccaagcctgtgcacctcactgcctttcttggctacaaggctggcatgacccacattgtgagggaggtcgataggccagggtccaaggtgaacaagaaggaagtggtggaggctgtgaccatcgtggagactccgcccatggtgattgtgggcatcgtgggctacgtggaaacaccccgaggcctncggacctttaagaccatctntgctgagcatatcagcgacgagtgccaaaagcgcttctacaag

SEQ ID NO: 12167 - DNA, 419 bp, Bos taurus
  Clone ID: 52-LIB3057-020-Q1-K1-E12
agcgcccggcccagatccacaagcctgccaggagccagccgagagccagccggccggcgcgctcctaccccagcagtctctgtccttcggcctgagccccgcgtccttcccgggacctctgcccctcgggcagtgctgccaccctgccggccatggagaccccgtcccagcggcgcgccacccgcagcggggcgcaggccagctccaccccgctgtcacccacccgcatcacccggctgcaggagaaggaagacctacaggagctcaatgaccgcttggctgtctacatcgaccgtgtgcggtcgctggaaacggagaatgcaggtctgcgccttcgcatcactgagtctgaggaggtggtcagccgcgaggtgtctggcataaaggccgcctacgaggccgagctgggggatgcccgc

SEQ ID NO: 12168 - DNA, 430 bp, Bos taurus
  Clone ID: 52-LIB3057-020-Q1-K1-E8
ggaatcttgttgcttgtcggcctgtgcgcgcgtgcgcggacatggcctcaagcgactgtacccaacaagcaacccaaagctacggggcctacccaactcagcctgggcagggctactcccagcagagcaatcaaccctacgggcaacagagttacggtggctacggccagtctacggacacttcgggctatggccagagcagctacagtggttcttatggacagacccagaacagctacagcacacagtcagctccccagggatatagctcagctggtggctatggcagtagccagagttctcagtcatcttatgggcaacagtcctcgtaccctggctatggccagcagccagctcctagcggcacctcaggaagttacggtagcagttctcaaagcagcggctatgggcagccccagggtggaggcta

SEQ ID NO: 12169 - DNA, 250 bp, Bos taurus
  Clone ID: 52-LIB3057-022-Q1-K1-E8
tcgctgtcccacaccccaccactttcacagttttccctgcgagtcgccaaggctgacctgggagcactttccacgttcttctcctcatgctcgtcatctccatatactattgtcccaaagtctgcgtctccacccccttctttcccaatggtcctggcaactgccaagtatcccttttagacctgtttgaccgttcagtcattgtgttccactacatccatgacctctcctttgaaatgttcaacgaatt

SEQ ID NO: 12170 - DNA, 296 bp, Bos taurus
  Clone ID: 52-LIB3057-023-Q1-K1-E12
ttggtttttgggcggacgcgtgggtgaaaccatcccggcccccacgggcaagaatgatgcccagcagggatcagacttggagctgcttcgcatctcactgctcctcatccagtcgtggcttgggcccctgcagttcctcagcagagtcttcaccaacagcttggtgtttggcacctcggaccgtgtctatgagaagctgaaggacctggaggaaggcatcctggccctgatgcgggagctggaagatggcaccccccgggctgggcagatcctcaagcagacctatgacaaatttg

SEQ ID NO: 12171 - DNA, 374 bp, Bos taurus
  Clone ID: 52-LIB3057-025-Q1-K1-E8
gcgggggaccggctatccgaggccaaccgaggctcccgcggcgctgccgtatcgttcggcctgggcgggattctgacttagaggcgttcagtcataatcccacagatggtagcttcgccccattggctcctcagccaagcacatacaccaaatgtctgaacctgcggttcctctcgtactgagcaggattaccatggcaacaacacatcatcagtagggtaaaactaacctgtctcacgacggtctaatcccagctcacgttccctattagtgggtgaacaatccaacgcttggtgaattctgcttcacaatgataggaagagccgacatcgaaagatcaaaaagcgacgtcgctatgaacgcttggccggcac

SEQ ID NO: 12172 - DNA, 405 bp, Bos taurus
  Clone ID: 52-LIB3058-001-Q1-K1-E8
ctttcacagcacaataacaaagttactttggaaattagactactgccaccaaggatgttatagagaacatgtcattctgacaagagccacaatcaaagagtgattttctgtaggaaacaactatactaaaaaaaaaatgagaatagaagtaatgtaaatattcaaggcatagtcaatgcacaactgtaactacaaattgtcatttagtatgctaagtattataggatataaaagctactgccctacctatggatatttaacactcaagactaccaaaacctgccatacttaacatgttgctcttttctggttgtaccaaaaccaaaaaccaccaccaatggcaaccagcaaatgagttaacctcttaaaagtgaagcacttacacttaaaaaaaaaaaaaagaaa

SEQ ID NO: 12173 - DNA, 426 bp, Bos taurus
  unsure (305),(314),(375): unsure at all n locations; Clone ID: 52-LIB3058-003-Q1-K1-E12
ccggcctgccaagtgccacaaccgtagcctgtagcttcatccgttgcgctgctcccggttccatcgcgcggtgcggaatttaacatggccgtgccggaggtggtggtcgacggcgtcgtcttcccgccggtggcccgcccgccgggctccgccggctcgcacttcctcggcggcgcaggcgtgcgaggcctcgagatcggaggcaacttcatcaagttcacggccatcggcgtgtacctggaggacgcggccgtgcccgcgctggccaagaagtggggcggcaagacggccgacgagctcgcctncgacgccgncttcttccgcgacgtcgtcacgggcgacttcgagaagttcacgagggtgacgatgatcctnccgctgacgggcgagcagtacgcggagaaagtgacggaaaactgcgtggcg

SEQ ID NO: 12174 - DNA, 406 bp, Bos taurus
  Clone ID: 52-LIB3058-003-Q1-K1-E8
cggacgcgtgggccggaatttctgagccaaccttatgcctcttctttagccagttttagtttcaacataattgatttttctaatgtgaaccttttcaccctgggatagaaggggaactatggggacgcggatacctgtgcagagaactgggcgattcccgaggttaccaaccattagataaacacaggcaggtacttctgccttcttctacaccacacgtacgtacacacgtctcacttgcatatattccaccctgccctcctgcccgccaccagtgaggcacccagagcccctggaaaacccacatggcctctctgtgaggccccttcccccacaggtgatggccgcgggggccggtgagccctgtccagagagagacagccctctgaggctgagatccggccct

SEQ ID NO: 12175 - DNA, 312 bp, Bos taurus
  Clone ID: 52-LIB3058-005-Q1-K1-E12
gttctagatcgcgagcggccgcccttttttttttttttttttttattttatgttgcatgagtttttttgctataatcttaataaggttataaagactagtttttattttctcttatttaaataaaaaccaacaattttattaaagatagagtaatgcgtatagataaaactttttctcataaatatattagtatgattaattggtatcttgcaaggtttaaaatgaccagtatgagtcccttactaataatttatatctgtaagggaaccaatagatttcatcgacactaggtaaacatttattaaatatat

SEQ ID NO: 12176 - DNA, 292 bp, Bos taurus
  Clone ID: 52-LIB3058-006-Q1-K1-E8
ccaaaaaatgagaagttcaagaaataattaagccaatcagaaagaaatggaagacttaagggtgacagcttttcatcaaatctagggcataagagtccaatctggagctggtggaaggaggcctccaaaagacaggtgtctaggaagagaatgtatataagcagaatgaattcacagatttgatatcatctttaagaagttgaacataaagttgtaaaaaaaaaaaaaaaaaaaaaaaaaaaaaaaaaaaaaaaaaaaaagaaaaaaaaaaaaaaaaaaaaaaagataaaaa

SEQ ID NO: 12177 - DNA, 403 bp, Bos taurus
  Clone ID: 52-LIB3058-007-Q1-K1-E8
atttatttctgccctaatttttatgatttctttccttctactaaccttggggttcttcatttcttcctttgctcattgctttaggtgtagagttaggttatttatttgacttttctcttgtttcttgaggtaagcttgtattgctatgaaccttccccttagcactgcttttactgagtcccataggtttcgggttgtgttttcattttcattcatttttatgtatattttgatttctttttttatttcttctgtgatttgttggttatttggaagcatgttgtacagcctccatatgttggaatttttaatagatttttttttttttctgtagttgacatctaatcttactgcattctaatcagaaaagatacttggaatgagttcaatttttttgaattta

SEQ ID NO: 12178 - DNA, 404 bp, Bos taurus
  unsure (342): unsure at all n locations; Clone ID: 52-LIB3058-008-Q1-K1-E12
cattgaccttcactacatggtctacatgttccagtatgattccacccacggcaagttcaacggcacagtcaaggcagagaacgggaagctcgtcatcaatggaaaggccatcaccatcttccaggagcgagatcctgccaacatcaagtggggtgatgctggtgctgagtatgtggtggagtccactggggtcttcactaccatggagaaggctggggctcacttgaagggtggcgccaagagggtcatcatctctgcaccttctgccgatgcccccatgtttgtgatgggcgtgaaccacgagaagtataacaacaccctcaagattgtcagcaatgcctnctgcaccaccaactgcttggcccccctggccaaggtcatccatgaccactttggcatcgtgg

SEQ ID NO: 12179 - DNA, 224 bp, Bos taurus
  Clone ID: 52-LIB3058-009-Q1-K1-E8
taaagcaccgccaagtcctttgagttttaagctgttgctagtacagtctatataccgccatcttcagcaaaccctaaaaaggaaaaaaagtaagcgtaattatgatacataaaaacgttaggtcaaggtgtaacctatgaaatgggaagaaatgggctacattctctacaccaagagaatcaagcacgaaagttattatgaaaccaataaccaaaggaggattt

SEQ ID NO: 12180 - DNA, 429 bp, Bos taurus
  Clone ID: 52-LIB3058-010-Q1-K1-E8
cggacgcgtgggttacagtgcctaaggaacatttctttgctggtcagaagctatgttaaaagagtttcatattaaggaggaacacataaatcattttaagttcttaagaattatctgaagcatccaagatacagaaagaattcttcacacctattttgtctcacgtgcttacatactcacttgtgcccaactctttgtgactccatggactgtaacctatcaagttcctttgtccatggaatttttcaggcaagaatactggagtgggttgtgatttcctactccaggggatcttcccagtgcagggatcaaacccgtgtctcctgcttggcagatggattcttaaccacttgtgccaccggggaagccccattttgtctcaaggatggcttaaattattagcagtaccccttttaaaaaacacagtac

SEQ ID NO: 12181 - DNA, 426 bp, Bos taurus
  Clone ID: 52-LIB3058-012-Q1-K1-E8
cggacgcgtggggtcaaaagaaacaaagagaatgatttgaaaaatttttttgaaaaacagaaattaacaaagatacaaaaggaaagacagtcttgtttacgcattgaaagaatattgtgaaaatgtccatactacccaaagccagttacatactcactacaacccctataaaatttgtaatgacttttttttatggaaatagaaaaaaaaatcctaaaaattttacagaaacacaagacacttaatagccacagaagtcttgagaaagaagaagaaagagtcatcataatgcctgatctcaaaccattttacaaaagtataattatcaaagcagtatgttactggcataaaaggagacatgtaagacaatgaaacagaattaagagccctaaaatatatcaaggatcacactgtaaaatttaatat

SEQ ID NO: 12182 - DNA, 431 bp, Bos taurus
  Clone ID: 52-LIB3058-013-Q1-K1-E8
cccggatcagggccaagacaggtctcgggcctctgactccccagttctcaacagggggccatagtagggccggttccctcttgcgttctaggcctgcatacctgctcagttctgggacctgacttgaggtcccacagcccagcactcccaggtcccagctagggatggaatgggtacttcctttcaggctgttgtgtcaggtcactgggaggtggataaagacaaaaggcgggtatttattgaatgtcagtgttttgatgtgatggatggagatctttgctttccttgttttgctggaagcaagcactgcttccctctcatgcacagcagtggattcttacctatttacaagggagccacgcacttcccccaccttattctacaagtcttctctagactgttcccaccctgccagcccctagagggcacag

SEQ ID NO: 12183 - DNA, 236 bp, Bos taurus
  Clone ID: 52-LIB3058-016-Q1-K1-E12
gttctagatcgcgagcggccgcccttttttttttttttttttttttttttttttttttttttttttttttttttttttttttttttttttttttttttttttttttttttttttttttttttttttttggaatattaaataaataattaaattaaaaaaaaataaaaatgttagtgtgaaaatgacaaaaatgtactggaaaatataccggaaaaaaattattttgggaaaaatat

SEQ ID NO: 12184 - DNA, 409 bp, Bos taurus
  Clone ID: 52-LIB3058-018-Q1-K1-E8
ggggcacgacgcccagggcacgctttccaaaatcttcaagctgggaggacgagacagccgttccgggtccccgatggcaagacgctgaagcccagctcccctcccagaaccccgtccccagcttcttaatacaaccgcctcgacgctaaccattgtctaaattcccaagtgcagcaggcattcccccaccctgcccacatgcgcgttctgcaggctcctggccagcggctcaatggagaagacggtgcagctgtcagctcacccttgaagatcagcgaggtccctgagggtccagggtgggcgaccctacacgcccaccttctgccctgggacggccttggacgcggccctggggaccctgccgacgggcccccatgcagagtgtggagaccggcctgtggctctgagc

SEQ ID NO: 12185 - DNA, 467 bp, Bos taurus
  Clone ID: 52-LIB3058-019-Q1-K1-E8
ccgaagtctatattttaatcttacctgggtttggaataatctctcatatcgtgacctactactcaggaaaaaaagaaccattcggatatatgggaatagtttgggctataatgtcaatcggatttctaggtttcatcgtatgagcccaccatatattcactgtcggaatagacgtcgacacacgagcctacttcacatcagccactataattattgctattccaaccggggtaaaagtcttcagctgattggcaacacttcatggaggtaatatcaaatggtctcctgctataatgtgagccctaggctttattttcttatttacagtagggggtttaactggaattgtcttagccaactcttccctcgatattgttcttcacgacacatactacgttgtcgcacatttccactatgttttatcaataggagctgtatttgctattatagggggatttgttcattga

SEQ ID NO: 12186 - DNA, 387 bp, Bos taurus
  Clone ID: 52-LIB3058-020-Q1-K1-E12
gcgggacagactgccaccctcatgctcccacacccctgcaggggtcagcaaagtgactcccatcccaagacccacagatggcatatacgtgtactttggcatgcctggagacatcagctgagcatcgaacgctatactgagggcgcaagatggacctggaggagcgcaggatgcgcctgattaatgaggttatgcataagtgggccatggctgacaaccagtccaagaacctgcctaaagtcgtcagacaggccctgtatgagcacttccagtccatcctgcacaccctgaacgagcaggtatccggtgagctacagcgcctggtcgtgacccatgccaccctagtcattgccctgatcaatgaccagcgctcggccgacgttggag

SEQ ID NO: 12187 - DNA, 461 bp, Bos taurus
  unsure (410): unsure at all n locations; Clone ID: 52-LIB3058-022-Q1-K1-E8
agcccagtacacacaccggagccctgaggtactccctccatctttggaacacgctagtaattcattgataacaggaagttatgagggaccctgtgagtagccagtacagctcctttcttttctggaggatgcccattccagaattggatctgtcggagctggaaggcctgggtctgtcagatacatccacctacaagatccaggacagcagcgctgccaaaatgactgggaaagcaccgtgagcagagcaggagaaaaacccagaaggcgatgcccttctcgagtacagcaccttcaacttttggagagctcccattgccagcatccactccttcgaactggacttgctttaagcccaagacctctctctttcaccactttgccctcattgcctgacgtttcaaaccccnttccttccacccttttcccctatcaatcttgctgtcttccctttactgtgt

SEQ ID NO: 12188 - DNA, 416 bp, Bos taurus
  Clone ID: 52-LIB3058-023-Q1-K1-E8
cagatgcccagtgacaagaccatcggtggaggggacgactccttcaccaccttcttgtgtgaaaccggtgccggaaagcatgtgccccgggcagtttttgtggatttggagcctaccgtaattgatgagatccgaaacggcccataccggcaactcttccaccccgagcagctcatcactgggaaagaagatgccgcgaacaactatgctcgtggtcactacaccattggcaaggaaatcattgacccagtcctggaccggatccgcaagctgtctgatcagtgcacaagacttcagggcttcctggtgttccacagctttggagggggcactggctctggcttcacctcactgctgatggagcggctcttctgtttgaaacctttttatggcaagaaatccaaactggagttctt

SEQ ID NO: 12189 - DNA, 248 bp, Bos taurus
  Clone ID: 52-LIB3058-024-Q1-K1-E12
tggtacgcgtggggcgagcggtcgctcttggtcacagtctggagagcgacctgctggggttgagggtcattcacagcaccgaggtggacacgtatgtgttattcctacatcacctgggccttccatacaagctctccctgcggaatctgatggccgactacctaagacagatcatacagtacactgtggacgggcacagattcagcgaggatgccagtgcctgcatgcacctggtgatctggaagatc

SEQ ID NO: 12190 - DNA, 377 bp, Bos taurus
  Clone ID: 52-LIB3058-024-Q1-K1-E8
ttgacgcgcggcctcactcggactacgtgaccgacgcccgcagcctgaagctctatggacctttacctaatacagctcgaccttcgagccgtctactcgattctaagctacgtggccggcttatacatcttactcgtctataccgaggtctacatacagaactactccagagtcatgggggggctggcaggtgtgctgacactgtgagtgcacggtagacacacgtgatgtacatccatgattacgggaagacgtacatcaaggggctgctcggctaattctgcgaggtcgttctaaacttgtacgtctctgtcgacacgttatgaaacttgatgctactgaccatcactggacaccagatcctcacagaccataac

SEQ ID NO: 12191 - DNA, 380 bp, Bos taurus
  Clone ID: 52-LIB3058-025-Q1-K1-E8
tgtgagtccacaagccgctttctctgctgtctgacccgctcggctccgcgatgccaggggaccttagcaagttgtccgggcctctgagcctgcatgaagaagatgaacagatcccaacacccgctgcaggtcaaatacggcgcttcggaggtccacgaactgggcaaagtgctgacactgacccacgctaacaaccggtgaaccagcattacatgacatggccttgatccagctaaattgtacacctaggtcttgacagatccggatgctcacagcacgaaggaccccaaatacatggaatggcaccatttcctggtggtcaacatgaatggcagcagcgtcagcagtggcacggctctctccgattatatatgctctgg

SEQ ID NO: 12192 - DNA, 423 bp, Bos taurus
  Clone ID: 52-LIB3058-026-Q1-K1-E12
cgccaaagcggctctgatgccggcggtctccgcggaagagggaagatggcgcttgacggaccagagcagatggagctggaagaggggaaagcaggcagtggactccgccaatattatctgtccaagattgaagaactccagctgattgtgaatgataagagccaaaatctccggaggctacaggcacagaggaatgagcttaatgcaaaagttcgcctgctgcgggaggagctacagctgctgcaggaacagggctcctacgtgggggaagtagtccgggccatggataagaaaaaagtgctagtcaaggtacatccggagggcaagtttgtcgtcgacgtggacaagaacatcgacatcaatgatgtgacacccaattgccgggtggccctcagaaatgatagctacactctgcacaagatc

SEQ ID NO: 12193 - DNA, 343 bp, Bos taurus
  Clone ID: 52-LIB3058-028-Q1-K1-E12
gattcccgctcgacccactcgtccgtttcttttttttttttgtctgtttgtctttctgtctattttgtatctgcttgggtatgtttaatattatgctcggcaggatccctgctacctttttcatccctttctgacatccatacagcacatcttctcatctcctgcagagctatcttttaatatatcaatttcattcttactctcctatttactcctattaattttattttttctatatttccttttttccttatctaaattctctttcttcaattatcattattttcttcaattctttctactttttctttttatatctattatttttaatttttcttttttt

SEQ ID NO: 12194 - DNA, 360 bp, Bos taurus
  Clone ID: 52-LIB3058-036-Q1-K1-E8
gggtaccataacggtccgtttttgatagtgcttgacaaccaactgtttacacatgtgaagtgcttcaagaaccatgctgggcccttcctaagtgttcattattgtggctgtcgttattatctgtcctcaccctcggtatcagcttcctgtggctgctgtaacaaatgaccactaatgtgatgacttaaagcaacataaatttttaatcttacaggttgggaagaaaagctattataaacctagacagtgcattaaaaagcagagagatcactttgctgacaaagatccgtatagtcaaagctttggtttttcagtagtaatgtatggatatgaaagttggaccttaaagaattggggctt

SEQ ID NO: 12195 - DNA, 419 bp, Bos taurus
  Clone ID: 52-LIB3058-038-Q1-K1-E8
gtcatatcttcacaatggtgctcttttcatggggtattagccattcagtcatagcaggtgatttgaagatcttgatttgtttcagaatgatgcacattttgtattttccagcttgtctatcacttgtttggggttgtaccagaaaggtctggagaatgattctttgattatgattctctaacaaatgaaaattggacattaaacaacacaaatgatatgtaaaattggctagttcttgcatctgttgggatttttgaccaatgattccgttctttgcagaaacagatttggtgaattcgaatctcagtttgagtaacatatctgattgttctttctaggtggtgggagataatttgatttagtaatgttaccttggtgtggttaagagttaggtttaacatacaagttattctctcctg

SEQ ID NO: 12196 - DNA, 432 bp, Bos taurus
  Clone ID: 52-LIB3058-039-Q1-K1-E12
cgcggcggctgtgacctcttgcggcgtgtctgggcgcgcagctatggcgtggaagccgggtcttctcctgccgttgctgctgttgctgctcggcccagccccggcgcgcagcttcggccagctgcccttggtcctcaacacttggcctttcaggaatgcaaccgtggcagcgtggaagacgttggcggccggaggttccgccctggacgcggttgagagtggctgcgcgacctgcgagcagcagcagtgtgacggcagcgtgggcttcgggggcagcccggacgagtcgggggagaccacgctggacgccatgatcatggacggcactaccatgaacgtgggagcagtcggagaccttagacgaattaaaaatgccattggcgtggcgcgcaaagtcctggaacacacgacacacacgctgttggcaggaga

SEQ ID NO: 12197 - DNA, 413 bp, Bos taurus
  Clone ID: 52-LIB3058-039-Q1-K1-E8
agattttgcaccattgtgagtggtagattatttatgtgatgtgagttgctgatgtctagtatgccttctacacacaaactgaggccaggagaatgatggactgctgtaaaataaactcctgtttaacagtatactattcagctcaaaagatgcttttctatttgccgccatctaattgaaatatataggttattaaaaatctttcaacttgaaaatcaagcagtatcactgttaacttagaaactctcagttgtgtcattagtgtcttaaatcttaaaatctacatttgcttcttttaagatatttattaatgtaagcaaaatataacaattcctcaccttctattgtgttggtattgtattccatgatctcaaatggctgttttatccttaaataaatgaattcagagaaaa

SEQ ID NO: 12198 - DNA, 442 bp, Bos taurus
  Clone ID: 52-LIB3058-042-Q1-K1-E12
cggctcgacccactcgtccggtgatttccttctctacgcaatcttagtgattcgaaatcctccatgttggcaggcagattctttatcactgagccacctgggaagccctgaaggaaatgttactcaaccacaaaacagaatgaaataatgcaacatggatggacctagagattatcatactaggtgaagtaagtcaggcagagaaaatcaaacatatgataccactgcagccgtgaagagataccccacacccaaagtaagagaaatccaagtaagaccgtaagtgttgccagagggcatcagagggcagacacactgaaaccaaactcacagaaaactagtcaatctaatcacactaggaccacagccttgtctaactcaatgaaactaagccatgcccgtggggcaacccaagatgggtgggtcatggtggagagatttg

SEQ ID NO: 12199 - DNA, 373 bp, Bos taurus
  Clone ID: 52-LIB3058-044-Q1-K1-E8
tcggggcacgacgcccagggtttgctgacttaaatcttcaagctgggaggacgagacaggggttccgggtccccgatggcaagacgctgaagcccagctcccctaccagaaccccgtccccagcttcttaatacaaccgactcgacgctaaccattgtctaaattcccaagtgcagcaggcatccacgcaccctgcccacatgcgcgtactgcaggctcctggccagcggctcaatggagaacacggtgcagctgtcagctcacccttgaagatcagcgaggtccctgagggtccagggtgggcgacccttcacgcccaccttgtgccctgggacgggcttggacgcgggcctggggaccctgacgacgggcc

SEQ ID NO: 12200 - DNA, 445 bp, Bos taurus
  Clone ID: 52-LIB3058-045-Q1-K1-E8
caaggctccgtggccaacccgtccctgtcgccccgacccaggcgccacgcccgcccacgaccgctaccatggctgaggacgcggacatgcgcaatgagctggaggagatgcagcggagagctgaccagctggccgatgagtctctggaaagcacccgtcgtatgcttcaactggttgaagagagtaaagatgctggtatcaggactttggttatgttggatgaacaaggagaacaactggaacgcattgaggaagggatggaccaaatcaataaggacatgaaagaagcagaaaagaatttgacggatctaggaaaattctgcgggctttgtgtgtgtccctgtaacaagcttaaatcaagtgatgcttacaaaaaagcctggggcaataatcaggatggagttgtggccagccagcctgctcgcgtggttgacgaacgggagca

SEQ ID NO: 12201 - DNA, 428 bp, Bos taurus
  Clone ID: 52-LIB3058-046-Q1-K1-E12
ctcagctggtaaagaatccacctgccattccagagaccccggtttgactcctgggttgggaagatctgctgaagaagggataggctacccactccagtattcttgggtccctggtggctcagttggtaaagaattctcctgcaatgtgggagaccttggttcaacccctgggttgggaagatcccctggagaagggaaagactacccactccagtattctggcctggagaatttcatggatgtaaaagacatttagggcttccctgatagctcagtaaagaatccacctgcaatgcaggagatgcaggttcgattcctgggctgggaagattccctgaagaaggaaatggcaacccacaccagtattcttgcctgggaaatcccatggacagaggatcctggtgggctacagtccattgggtttcaaa

SEQ ID NO: 12202 - DNA, 278 bp, Bos taurus
  Clone ID: 52-LIB3058-049-Q1-K1-E8
gaggagtactagccctagtttgttttatattgatcgtaagattgattctgctactaggcactatcaatcaactaagatttccattcctaccactcatccaatgcctattctgaaccctagtagcagacctactgacactcacatgaattggacgacaaccagtcgaacacccatatatcaccatcggacaactagcatctgtcctatactttctcctcatcctagtgctaataccaacggccggcacaatcgaaaacaaattactaaaatgaagacag

SEQ ID NO: 12203 - DNA, 440 bp, Bos taurus
  Clone ID: 52-LIB3058-050-Q1-K1-E12
cgggcaggtcatcaccatcggcaatgagcggttccgctgccctgaggctctcttccagccttccttcctgggcatggaatcctgcggcattcacgaaactaccttcaattccatcatgaagtgtgacgtcgacatccgcaaggacctctacgccaacacggtgctgtccggcgggaccaccatgtaccccggcatcgcggacaggatgcagaaagagatcactgccctggcacccagcacaatgaagatcaagatcatcgcgccccctgagcgcaagtactccgtgtggattggcggctccatcctggcctcgctgtccaccttccagcagatgtggatcagcaagcaggagtacgatgagtccggcccctccatcgtccaccgcaaatgcttctaggcggactgttagctgcgttacaccctttttcttgacaaaacct

SEQ ID NO: 12204 - DNA, 452 bp, Bos taurus
  unsure (373),(444): unsure at all n locations; Clone ID: 52-LIB3058-051-Q1-K1-E8
tttgtgagccccctccagccccctgcctggagcatctggcagccccagacctgcccacgggggttgcaggctgcccccttcctgccagaccggaggggctggggggaatcccagcagggggagggcagtcccttcaccccagttgccaaacagcccccccgaccccctggaccttcctcctccctccacccctgacggttctggccttcccaaaccgcttttgatcttgattcctcttgggttgaaacagaccaagttccccccccaggaacccctgtttggggggggcctgtattttttttaacgacaccccagttccctgcctgttcctcccctttcccatgctgccaacttctaactgcagtagtgactntgtgcttgtctgtttagttctgtgtataaatggaatgctgttgagaggaccctccctgcgccgactgcctnccctcccc

SEQ ID NO: 12205 - DNA, 358 bp, Bos taurus
  Clone ID: 52-LIB3058-052-Q1-K1-E8
gtcccaacccccctggcattccctgctccctgcccttgccggggcccccgggaagacttggtggagggcgcggagcccctgggttctccgagccacccaccacctcggccaagagcccagcgggcggtggccgcctcctcagggatcacaaacccccctggggctgggcaggtcagcctcccaccccaccccaccctcctcagccccaaggcagcccccaagaggggtacccatgccaaagacccggcctcgaggctctcgccccctcgccaagtgcctcctggctctgggccccggagcccagccggccctcgaggggctccagccaccgagcagcatgatgacggtgacagtttgg

SEQ ID NO: 12206 - DNA, 353 bp, Bos taurus
  Clone ID: 52-LIB3058-054-Q1-K1-E12
cggaaggaggcggccacctctctaagggcttctgcgtccagaccctgttttgcatatctggtgagcctcaggcaaaagcagtgagcgaaggaagggaccaaggcagggcaggcacttccggggcatgcacatgtgtgcccatgtgcattcggcccttggcccacctccactacagcgggcgggctgcctgcctagcaaggctggcccggccccaggctggtgtgctgaccaccctcccctcttacactctcccctccccccggggcccgagtccctgttttctgagcccggggctttctgggctgttggcactcacagccctggagcccctgggtgggtggtggggagggacg

SEQ ID NO: 12207 - DNA, 424 bp, Bos taurus
  Clone ID: 52-LIB3058-054-Q1-K1-E8
catgtcaaactgctttattacatcttaaataacagtacagttgaatataggatctatcttgcatccagcttccttgcagtacattgactttaaaattaaatacaaaaggtgagggacagggtgcagagagctctacagaggtgccgacgggggcgggggctcatcccactctctgcgggtccagggcacagggcgcacaggatggtgcaaacacaggtggagaagccactgctgccgctacgggggcgctggtacggggaggaggcccgcattgtcccagcaccgctgcccaacactggacgcgcacggaaccagggacatctgcgtgttagaaaagtggtctgcctcagcacaaaggctggttcccgggaaaggtgggccgtgaggaatccataagggaggccagggactccgttccctgtac

SEQ ID NO: 12208 - DNA, 444 bp, Bos taurus
  Clone ID: 52-LIB3058-056-Q1-K1-E12
gagggtttggagaaaagggaatagttgtttactgttgctgggaatgcaatttagtgaagtaactatgaaaaatagtatagaatttccacacaaaaaaataaaaatagaactatcatatgatccaacaagtttactcctaggtatttatccaaagaaaacaaagactctaactggaaaagatacatgcatccctatattaatttcagcattatttactatagtcaagatatggaaaaacctaaatatatatatatatatatatatatatatatacacacacacacacacaaaatgaaatattactagacataaaaaataaaatcttgatatttgtgacaatggacctcaagggcattatgctaagataaatacatcagacagagaatctttcttataagtgtaatctaaaaaaaaaaatcaaaacaaacaaaaaacaagaaccag

SEQ ID NO: 12209 - DNA, 422 bp, Bos taurus
  Clone ID: 52-LIB3058-058-Q1-K1-E12
cggacgcgtgggctaatttctgcaggaaatatggatttgatccccagagtcccctctgtgctcacataatactatcaggaactgttatcaaggtgagtgaaacagaaatggatgttgcaaagaattcgttattcattcgacaccctgagatgaaaacctggccatccagccataattggttcttcgctaagttgaatataaccaatatctgggtcctggactactttggtggaccgaaaatagtgacacctgcagaatattataacgccacatctcagtgaagcagcatatggcgaatttaacctcatgtgtgaaatttctgaggaagtttcacgtagatctgaagcacttattgtttttctatggaaagtttgccagaagattagccaagtttctttctttgcttgcttgctaccagggtt

SEQ ID NO: 12210 - DNA, 413 bp, Bos taurus
  Clone ID: 52-LIB34-002-Q1-E1-E8
ggagtatatagaatttaaaccttctctcagaagtgtattggtgaagttaaagaagaagacagccaaccaaaggtcatctgaaattgtgactggctgataatcccaggacaaaattagagaccactactcaagcataaggcctccacgaagatgtttgatttaaaggcttgggctgagtatgttgtggaatgggctgcaaaggacccatatggcttccttacaacagttattttggctctgactccattgtttctagcaagtgctgtgctgtcttggaaattggccaagatgattgaggccagggaaaaggagcaaaagaagaaacaaaaacgtcaagaaaatattgcaaaagctaaacgactaaaaaaggattgaaggaatgaacaggctgtgcgtccagaggaaaattgttc

SEQ ID NO: 12211 - DNA, 381 bp, Bos taurus
  Clone ID: 52-LIB34-003-Q1-E1-E8
attggacgtggccacggaattgcggtcatcatcgagaacacagcctgagaagagcaggcagcctgccctggtccatgctcacatgacttgactaggccacagtgaaccaggtgaccttcagagcagatgcaaagccagccatgctctgcactgagagtgactgggtttgggcaaggcatggtaaagcagagacccatttatcataaataagagcccatgccagaataaattctctcgaatttgtaccaaatatgcagcatttctgaactgaaatccaactaatgtatgctttaaagggaattgtattcgtgccaaataaccatcacttacaccttagataatatgattgcagggaaattgaataaatagtggcttaacttc

SEQ ID NO: 12212 - DNA, 412 bp, Bos taurus
  Clone ID: 52-LIB34-004-Q1-E1-E12
cttcgtcatatcccttagtctggaatcagtcttcaagccagacaattgagcagggtgaaaacaagtgaaagtgttagttgctcagtcatatctgactctgcgaccccatggactatagcccaccaggctcctctgtccatgaattctctaggcaaaatattggagtgggtagccattcccttctccaagggatctttccagcccggggactgaactggggttccctgcactgcagggagattctttaccgtctgagccactaaggaagcccctgagcaaggtaagaagttttaaataatcaggtcagctcttcagattgtttagaggcccagaaagggcttcatgcccttcaggggtacttggatagcacttggcatcctttgttcttggcagctctgctcgatgggcactc

SEQ ID NO: 12213 - DNA, 323 bp, Bos taurus
  Clone ID: 52-LIB34-004-Q1-E1-E8
catgatcaaaacagtactagtgaaagaatgttattctgtcttcacaaaccggagggtttttggtccaatgggagttatgacaaatgctgtttctgtggctgaggatgaacaatggaagagaatacggacattgctgtctccaaccttcaccagtgggaagctcaaggagatgttccctatcattgggaagtatggagatgtgttggtgaggaacctgaggaaggaagcagagaaaggcacgtccgtcgacatgaaagacgtctttggggcctacagcatggatgtgattactaccacatcatttggagtgaatattgattccc

SEQ ID NO: 12214 - DNA, 376 bp, Bos taurus
  Clone ID: 52-LIB34-005-Q1-E1-E12
ggcacccagctggcggctcaggcagagaagcagcaccatgaccggcaagaaagtctgcattgtaggctctggcaactggggctcagccatcgccaagattgtgggtggcaatgcagcccagctggcacactttgacccacgggtgaccatgtgggtgtttgaggaagacatcgggggcagaaagctgacagagatcatcaacacacagcacgagaatgtcaaatacctgccagggcacaagctgccccccaatgtggtggctgtccctgatgtggtccaagctgcagcggatgccgacatcctgatctttgtggtgccccatcagttcatcggcaagatctgtgatcagctcaagggccacctgaaggccgacacc

SEQ ID NO: 12215 - DNA, 407 bp, Bos taurus
  Clone ID: 52-LIB34-005-Q1-E1-E8
ctcattcctactactcctcgcatcctctatagttgaagctggggcaggaacaggctgaaccgtgtaccctcccttagcaggcaacctagcccatgcaggagcttcagtagatctaaccattttctctttacacttagcaggagtttcctcaattttaggagccatcaacttcattacaacaattatcaacataaagccccccgcaatgtcacaataccaaacccctctgttcgtatgatccgtaataattaccgccgtactactactactctcgctccctgtattagcagccggcatcacaatgctattaacagaccggaacctaaatacaaccttcttcgacccggcaggaggaggagaccctattctatatcaacacttaatctgattcttttggacacccgaag

SEQ ID NO: 12216 - DNA, 401 bp, Bos taurus
  Clone ID: 52-LIB34-006-Q1-E1-E8
aaaactgctaagtgtggggaaggaaaaaagcaaagttgttttgctttgctacaagaaggggaagactgaaaagttaactgaaacctggatatcagtctcttgaaagattgttagggacttgcatcagcagattaacatctttcactcctttgcaagcttcttaagtggtttatctgaaggtgtgcaatgttcagggactagtttcagaaaagactttcagtaccctaattgtgggcttttaaagtattttgagatttggtacaggcttagatgccctcttctgggtttgtaacatttttgttcacttgatattttgcagttgaaagtttgagcaaagtgaaaacacaatggtttttaaaggagttttatatgttacttcctgccttataaacatcttatcc

SEQ ID NO: 12217 - DNA, 372 bp, Bos taurus
  Clone ID: 52-LIB34-007-Q1-E1-E12
ccgggtcgacccacacagtccggttttccgttctctttcctctcctccccatcttcttccctgcccctctgacgggctctgccgtctcttataggatgcccgaaaagcatgtggggattcaacactgacccagatcacagctgggctggacccagtggggagaatccagatgaggacacggaggaccctccgtgggcacctggccaaaatctatgccatgcactgggggacacactcaaggctgctggtcagcgcctcccaggacggcaagctcatcatttgggacagctacaccaccaacaggggaacttcttggccgtgcggggactggacaatatatgcggcatctacaagctcaagacccgtgacggc

SEQ ID NO: 12218 - DNA, 402 bp, Bos taurus
  Clone ID: 52-LIB34-007-Q1-E1-E8
atgaaatttcggttccctcctgggaatctgcctaatcctacaaatcctcacaggcctattcctagcaatacactacacatccgacacaacaacagcattctcctctgttacccatatctgccgagacgtgaactacggctgaatcatccgatacatacacgcaaacggagcttcaatgttttttatctgcttatatatgcacgtaggacgaggcttatattacgggtcttacacttttctagaaacatgaaatattggagtaatccttctgctcacagtaatagccacagcatttataggatacgtcctaccatgaggacaaatatcattctgaggagcaacagtcatcaccaacctcttaacagcaatcccatacatccgcaacaatttagtccaatgaat

SEQ ID NO: 12219 - DNA, 426 bp, Bos taurus
  Clone ID: 52-LIB34-008-Q1-E1-E8
gcacagtaccagaagttatagtcgcaagacactgtggacttcgagtctttggcttctcactcatcacaaacaaggtcatcatggattatgaaagccaggggaaggccaatcatgaggaagtactagaggctgggaagcaagctgcacagaaattagagcagtttgtctcccttcttatggctagcattccagtgtcagggcacaccggttaaccagccccggagtgggttggcctctccattatgggatctggggagctgctgcctatttcagcccttgctggagtcacgtgcctctgccttaggtggcggcagaaaggacggtcaccttccctgcttcttccaccagaccttactggtgctgagccctcttctggtcattttgtcatctcaaaatgatttccactcctattcctcttcaagaacg

SEQ ID NO: 12220 - DNA, 409 bp, Bos taurus
  Clone ID: 52-LIB34-009-Q1-E1-E8
ggaagtcggtccggatggctagctgcgggatggcgcgccggaacccgctggataataaagtggccctagtaacggcctccactgatgggatcggttttgccatcgcccggcgtctggcccaggacggggcccacgtggtggtcagcagccggaagcagcagaatgtagaccgggcagtggcaacgctgaaagcggaggggctgagcgtcacgggcaccgtgtgccacgtagggaaggctgaggaccgggagcggctggtggccacggctgtgaagcttcatggcggcgtggacatcctgatctccaatgctgccgtcagccctttctttggaagcttgatggatgtccccgaggaggtgtgggacaagattctggaccttaacgtgaaggccacggccctgctgacaaa

SEQ ID NO: 12221 - DNA, 409 bp, Bos taurus
  Clone ID: 52-LIB34-010-Q1-E1-E12
agcctgaaatacatacaatttaagacaattgtatccagtgtaaataagcgtcccgatttccaaaccactggccaatgggatgttatcactgaaaaggatggtaaaaaggaatcagctgtctttgatgccgtaatgatttgttctggacatcatgtgtaccccaacatacctaaagagtcctttccaggaataaaactttttaaaggcaaatgcttccacagccgggactataaagaaccaggaatcttcaaggggaagcgagtcctggtgattggtctggggaactcaggctgtgacatcgcctcagaactcagccacatagctgaaaaaatcatcatcagctcccgaagtggctcctgagtgatgaaccgggtctgggatgaaagctatccatgggacatgctgttta

SEQ ID NO: 12222 - DNA, 412 bp, Bos taurus
  unsure (343): unsure at all n locations; Clone ID: 52-LIB34-010-Q1-E2-E8
gattttctacttttctgttcaaaactaatattcaccaagtcagactttgtgttaattttatatcagggtattggctgccagggggtcatccctaagtggcctgaagatggacaaagggaagtaacaggcacgtgatgttggcaaggatgcttctagggctagaggatcagtggtgggagagacctgcagaatccaccagccagaactgcagataacgaatcttatggtcaggggctgtgactgacagaaggaaactgatgctgtgttctgaaagtacataaactctcacatatacccagttcttcaccatctcgcctcctcactttgcagtgccatttctttntgcattaggcaatttgctcagactttctagagccatggcccatccgttctctggaaatccccacacctc

SEQ ID NO: 12223 - DNA, 428 bp, Bos taurus
  Clone ID: 52-LIB34-011-Q1-E1-E8
acgacgtgtcaaaacatgttcaaaatccaatataaggattgagaatggatttttgtctgaatctacctttacgtatcccctaaataaacaaacagaatataagtgtaaaccaggatatgtaacagcagatggtaagacttcaggattaattacatgtctgcaaaatggatggtcaactcaacctgtatgcattaaatcctgtgccaggccagtatttgagaatgccagagccaaaagtgatggcacatggttcaggctgaacgacaggctggactacgaatgtctccatgggtatgagaaccaagatggacacaccacaggctccatagtatgtggtcaagacggctggtctgataaagctgcatgctatggacaatgcatcttcaatgatttggaaaatggatataccccacatcgtgaagaaaaat

SEQ ID NO: 12224 - DNA, 427 bp, Bos taurus
  Clone ID: 52-LIB34-012-Q1-E1-E12
agctagtgacagatctcacaaaagtccacaaggaatgctgccatggtgacctacttgaatgcgcagatgacagggcagatcttgccaagtacatatgtgataatcaagatacaatctccagtaaactgaaggaatgctgtgataagcctttgttggaaaaatcccactgcattgctgaggtagaaaaagatgccatacctgaaaacctgcccccattaactgctgactttgctgaagataaggatgtttgcaaaaactatcaggaagcaaaagatgccttcctgggctcgtttttgtatgaatattcaagaaggcatcctgaatatgctgtctcagtgctattgagacttgccaaggaatatgaagccacactggaggaatgctgtgccaaagatgatccacatgcatgctattccacagtgtttga

SEQ ID NO: 12225 - DNA, 397 bp, Bos taurus
  Clone ID: 52-LIB34-012-Q1-E1-E8
agttggtatgaggcattaccacttaaagaggaaccagagtttctgcccgactgtcaaccttgataaattgtggaccttggttagtgagcagacacgagtaaatgctgccaagaacaagacaggagctgctcctatcattgatgtggtgcgatcagtaagtgactacttttgccttttatgtgcctttcaaaataatggataatacacgcccggctacctactagacagttcattcagtagaacttccacgggtaggtcactgaacagaactgaactcttgttcagttgtgatcatgtaaaacctttgaagagtgatactttactcccattcatttacttcatttttcacttgaatttttaactgatcagatatctcattcctactgtcaataccctg

SEQ ID NO: 12226 - DNA, 418 bp, Bos taurus
  unsure (375): unsure at all n locations; Clone ID: 52-LIB34-013-Q1-E1-E8
agtcagcaatgcctcctgcaccaccaactgcttggcccccctggccaaggtcatccatgaccactttggcatcgtggagggacttatgaccactgtccacgccatcactgccacccagaagactgtggatggcccctccgggaagctgtggcgtgacggccgacgggctgcccagaatatcatccctgcttctactggcgctgccaaggccgtgggcaaggtcatccctgagctcaacgggaagctcactggcatggccttccgcgtccccactcccaacgtgtctgttgtggatctgacctgccgcctggagaaacctgccaagtatgatgagatcaagaacgtggtgaagcaggcgtcagagggccctctcangggcattctaggctacactgacgaccaagttgtctcctgcgac

SEQ ID NO: 12227 - DNA, 315 bp, Bos taurus
  Clone ID: 52-LIB34-014-Q1-E1-E8
aaaaatttgttcacttataattttactgaaggcctcaaattgttccttatcaactgaccattaagaacaaagagtttccctggcaaatagacctttcagaactcaactacatgaaatgccaaaaggcgcaaaagatattcaacagacaggagaataatgcttgctggattcagatgtatctgtaggaaatctttgaccaacaacatccagtttgctgaataaccagttctctctgtttcctgtgaaactaacagctgccccatgcagatgaattgtttgcttattgttattttaataaaacttttctgttctctc

SEQ ID NO: 12228 - DNA, 396 bp, Bos taurus
  Clone ID: 52-LIB34-015-Q1-E1-E8
accaaagattgaaactatgagagaaaaagtactgacttcatctgccagacagagactcaggtgtgccagtattcaaaaatttggagaaagagctttaaaagcatggtcagtagctcgcctgagccagaaatttcccaaggctgagtttgtagaagttaccaagctagtgacagatctcacaaaagtccacaaggaatgctgccatggtgacctacttgaatgcgcagatgacagggcagatcttgccaagtacatatgtgataatcaagatacaatctccagtaaactgaaggaatgctgtgataagcctttgttggaaaaatcccactgcattgctgaggtagaaaaagatgccatacctgaaaacctgcccccattaactgctgactttgctga

SEQ ID NO: 12229 - DNA, 423 bp, Bos taurus
  Clone ID: 52-LIB34-016-Q1-E1-E8
caggagtctaataaatgactatgtgaagaataaaacccaggggaaaattgaagagctgttcaagtacctttccccgagaacagagttggtgctagtgaattacatctactttaaagcccaatggaagaccccctttgaccccaaacacactgagcaggcagagttccacgtgagcgacaacaagacggtggaggtgcccatgatgacccttgacctggaaaccccttacttccgggacgaggagctgggctgcgcgctggtggagctcacgtacaccagcaacgacagcgccctcttcatcctccccgacgagggcaaaatgcgggacctggaagccaagctgaccccggagacgctgacgaggtggcgaaactccctgcagcccagacgaatacatgaactctagctgccaaaattttccag

SEQ ID NO: 12230 - DNA, 404 bp, Bos taurus
  Clone ID: 52-LIB34-017-Q1-E1-E12
gtagttattgcccaactacctgtggaattgcagatttcctgaataattaccaaaccagtgtagacaaagatctacgaactttggaaggcatcttatatcaggttgagaacaaaacatcagaagccagagagctggtcaaagcaatccaaatcagctataaccctgatcaaccatcaaagccaaataacatagagagtgctaccaagaattccaagagtatgatggaagaaattatgaaatatgaaacactgatatcaacacatgaatcaacaattcgatttttgcaagaaatatataactcaaatagtcaaaaaatcgttaacctaagagataaagtggtccagcttgaagcaaactgtcaagagccttgtcaagatacagtgaaaatacatgatgtaactggg

SEQ ID NO: 12231 - DNA, 389 bp, Bos taurus
  Clone ID: 52-LIB34-017-Q1-E1-E8
catgcagtagagctttagaacataaggtagatctggaggactataaaaatcagcagaagcaacttgaacaggttattgccataaacctacttccctctagagacattcaatacttaccattgataaaaatgagtacaattacaggccctgttcccagagagttcaagagccagctccaagaggcccctctagaatggaaggcactgctggaaatgcagcagacgaaaatggtgttggaaactttcggtggcgatggacatgccagaggagactctgtatctcaaggaacaggattagcaccaggaagtcccagaaagcctggaaccagtagtattggaaatgtgaaccctgggagctatggacctggaagtagtggcacttggaacccc

SEQ ID NO: 12232 - DNA, 416 bp, Bos taurus
  Clone ID: 52-LIB34-018-Q1-E1-E8
aggcaaggcggctggggttgtttccggtcgtgttggtggtctgtcttgagttggggcagcagtgactgcggcggcgggggagaaggaagagggaagatggaaaccattctggagcagcagcggcgctatcatgaggagaaggaacggcttatggatgtcatggccaaagagatgctcactaagaagtccacgctccgggaccagatcaattctgaccaccgcacacgggccatgcaagataggtacatggaagtcagtgggaatctgagggatttgtatgacgacaaggatgggttacgaaaagaggagctcaatgccatttcaggacccaatgagtttgctgaattctataatagactcaaacaaataaaggaattccaccggaagcacccaaatgagatctgtgttccaatgtc

SEQ ID NO: 12233 - DNA, 408 bp, Bos taurus
  Clone ID: 52-LIB34-019-Q1-E1-E12
agggcagtggtcgttgctccggaggtgaatatgcacatcaaggcagaggactttttcaccatgaaaacctacgatattccctacacacaggacaaatttgattccctcatgaagactcatgtacatatgctttttgaaagagtacattgggtaacgatgtttttgaaaactatggcatctttgaaaaaagcgtctttactctttgaaaggtcttgtgaggggctgctgtataataaggatctaatcaggcacctgaatgccagttcctttgatgtggttttaacggaccctgttcacccctgtggagcagtgctggctaagtacctgtccattcctgctgtgtttttcttgcgttcagttccctgtgacttagatgttgagggcacagcatgcccaaaccctttctct

SEQ ID NO: 12234 - DNA, 359 bp, Bos taurus
  Clone ID: 52-LIB34-019-Q1-E1-E8
ggaaaccagcctgatcaagagatggtgtctgcctctgaatggtacctgaagaacttgcagttccaccgtttctggtccgtggatgacacgcaggtgcacacggagtacagctctctgcggtccgtcgtggtggccaattatgaggaatccatcaagatgcccattaatgagccagcaccgggcaagaagaagtcccagatccaggaatatgtggactataacgggggcgctggggtccagcacattgctctcaagaccaaagacatcatcacagcaattcgccacttgagagagagaggcgtggagtttttggctgttccatccacatactacaaacaactgcgggagaagctcaagat

SEQ ID NO: 12235 - DNA, 316 bp, Bos taurus
  Clone ID: 52-LIB34-020-Q1-E2-E8
cagccttctgccctggaacacaggatccacttctctggggatgtacagcgcttcaacagtgtcaacgatgacaatgtcactcaggtgcggactttctatttgaaagtgctgaatgacgaccataggaaacacctgatgtagaatattgcgggccatctgaaagacgctcagctttttaaccagaagaaagcggttaacaacttcagcgatgtccatcctgaatatggctcccgcatccaggctcttttggacaaatacactgaggatacagctaagaacgcagttcacacctatgtgcagcatgggtctcacttgt

SEQ ID NO: 12236 - DNA, 416 bp, Bos taurus
  Clone ID: 52-LIB34-021-Q1-E1-E8
gtgatcgcatgacattcatggagaggatcaaaaatatgttttatacactttattttgagcttttcttcccaacgtacaaagagaagaagtggaatcagttttacagtgaagtactaggaagacctactaccttatcagagacaatggggaaagctgatgtgtggctcattcgaagctactgggatttgtcatttcctcgtccacaactaccaaatgttgaatttgttggagggctccactgcaaacctgccaagcccctgcctaaggaaatggaagagtttgtgcagagctctggagaaaatggtattgtggtgttttctttggggtcaatggtcagtaacatgtcagaagacagagccaaggtgattgcaacagccttcgctcaaattcccacaaaagtgctatggagatatgat

SEQ ID NO: 12237 - DNA, 439 bp, Bos taurus
  Clone ID: 52-LIB34-022-Q1-E1-E12
ccaggctcggagccccgggcccgccgacaccatgagttggtcctcgcaccctccgagtgtaatcttctacattctttcattgctttcttcagcatgcctggcatatgttgctacccgagacaactgctgcatcttagatgaaagatttggtagttattgcccaactacctgtggaattgcagatttcctgaataattaccaaaccagtgtagacaaagatctacgaactttggaaggcatcttatatcaggttgagaacaaaacatcagaagccagagagctggtcaaagcaatccaaatcagctataaccctgatcaaccatcaaagccagataacatagagagtgctaccaagaattccaagagtatgatggaagagattatgaaatatgaaacactgataacaacacatgaatcaacaattcgatttttgcaagaa

SEQ ID NO: 12238 - DNA, 297 bp, Bos taurus
  Clone ID: 52-LIB34-023-Q1-E1-E8
ccccgagtcatggcgacgaaggccgtctgcgtgctgaagggcgacggcccggtgcaaggcaccatccacttcgaggcaaagggagatacagtcgtggtaactggatccattgcaggattgactgaaggtgatcatggattccacgtccatcagtttggagaccatacacaaggctgtagcagtgcacgtcctcactttaatcctctgtccagaaagcacggtgggccagaagatgaagagaggcatgttggagacctgggcaatgtgacagctgacacccacggtgttgccatcgtg

SEQ ID NO: 12239 - DNA, 451 bp, Bos taurus
  Clone ID: 52-LIB34-024-Q1-E1-E8
tcgcgggtcgacacaagcctctaaattcattcatattagacaaatttaaaaccatgaaacatctattactgctacttttctgtgcttttatagttcaggcccaatttcctactgactatgacgagggacaagatgacagacctaaggtaggtttgggtgcccgcggtcatcggccctatgacaagaagaaggaagaggcccccagcctgagacctgtgccccctcccatcagcggaggtggctatcgggctcgtcccgccacagcaactgtgggccagaagaaagtggagagaaagccccctgacgctgatggctgcctgcacgcggacccggatctgggtgtgttgtgtcctacaggatgtaagttgcaagatactttggtaagacaggagagaccatcccgaaagagtatagaagatttacgtaatactgggggacccggtttcccgga

SEQ ID NO: 12240 - DNA, 417 bp, Bos taurus
  Clone ID: 52-LIB34-026-Q1-E1-E8
agggggtgaacacctacgaggcgcgtatccagtactactgccatgagcccttctacaagatgcacaccaaaggtggcacaagcgagtctgagcgagggctgtacacctgcacggctcagggcatttggaagaacgagctggtaggagagaagatgcctcggtgtttgccagtgtgcgggaagccactccaccctgtcgagcagaggcagcgcatcattggaggcctgaaggccaagctgggcaacttcccctggcaggcctacaccaacatccacgggcccgggggtggcgcgctgctgggggaccgctggatcctcacggccgcgcacaccatcaaccccaaggaccacgaggcgcagggcagccccaacatagacgtgttcctgggccacatcaatgtggaagatatcaccaagc

SEQ ID NO: 12241 - DNA, 384 bp, Bos taurus
  unsure (262): unsure at all n locations; Clone ID: 52-LIB34-027-Q1-E1-E8
acaaaactttggcacaatgaagtgggtgacttttatttctcttctccttctcttcagctctgcttattccaggggtgtgtttcgtcgagatacacacaagagtgagattgctcatcggtttaaagatttgggagaagaacattttaaaggcctggtactgattgccttttctcagtatctccagcagtgtccatttgatgagcatgtaaaattagtgaacgaactaactgagtttgcaaaaacatgtgttgctgatgagtcncatgccggctgtgaaaagtcacttcacactctctttggagatgaattgtgtaaagttgcatcccttcgtgaaacctatggtgacatggctgactgctgtgagaaacaagagcctgaaagaaa

SEQ ID NO: 12242 - DNA, 407 bp, Bos taurus
  Clone ID: 52-LIB34-028-Q1-E1-E12
gttgcgcagtttccccctgaacctcagagctctatctgcttggtaaatggtcatgtttggcgaaccaggaagagctatgggagtgggatggataacagccctcccatgctggggccacacagggcctccagggagagccgggtgtgggtgggcacattggccactaggtcgcgctaacaggatgcagcaggtggtcagctcggcggagccagccaggcccagtcgtccacgagtagagccaggcctcagggatgctgccctgcgacgcccaggtgaagagctgggtgcctgtcctttgttctggcaggtactacgtaggggacaccacggacgtcctgtttgagaagtggttctactgcgaggacctcggcacgcagttggcccccatcatccaggagtgaggcccc

SEQ ID NO: 12243 - DNA, 415 bp, Bos taurus
  Clone ID: 52-LIB34-028-Q1-E1-E8
aaagaatacactgatgtgtaccctgaaatcattgaacgagcaggctattccttggagaaggtttttgggatccaattaaaggagattgataagaatgatcacttgtacattcttctcagcaccttagagcccactgatgcaggcatactgggaacgaccaaggactcaccaaagctcggtctcctcatggtgcttcttagcatcatcttcatgaatggaaatcgatccagtgaggctgtcatctgggaggtgctacgcaagttggggctgcgccctgggatacatcattcgctttttggagatgtgaagaagctcattaccgatgagtttgtgaagcagaagtacctggactatgtcagagtccctaatagcaatccccctgaatatgagttcttccgggggctgcgctcttagt

SEQ ID NO: 12244 - DNA, 420 bp, Bos taurus
  Clone ID: 52-LIB34-029-Q1-E1-E8
ctggcacctgacgcctccatatacattaaagaggaagcattttacaccttgaagaggtaccctgtgccattccgaagggaggacttggaagagacttttatcagcctcgggcgtactgtttttgaggatgatcctttcctgaagcgcgtgatcaaaacctaccagaaaatcaaaaaggactcggctctgctcttatccgcctgctcccatttactgcacaacaaggagctgatggcctccctgacggcaagtagcttcgatgccgtgttgacagaccctttccttccctgcggccccatcgtggcccagtacctgtctgtgcctgccgtgttcttcttgaatggactgccatgcagcctggactttcagggtacccagagccccagtccaccatcctacgtgcccaggtatctgtccttt

SEQ ID NO: 12245 - DNA, 410 bp, Bos taurus
  unsure (275)...(276): unsure at all n locations; Clone ID: 52-LIB34-030-Q1-E1-E8
gtccctggagctcatcagaaaggggtacacccagcagctggccttcagacaaaaaagctcagcctacgccgccttccaatatcggccccccagcacctggctgacagcctacgtggtcaaggtctttgcactggccgccaacctcatcgccatagactccaaggacctctgtgagaccgtcaaatggctgatcctggagaagcagaagcctgatggaatcttccaggaggatgggcctgtgatacaccaagaaatgattggtggcttcagggacnnacaggagaaagatgtgtcccttacagcctttgttctcatcgcgctgcacgaggctaaagacatttgcgaggcacaggtcaacagcctgggccgcagcatcgctaaggcaggagacttcctcgagaaacactaca

SEQ ID NO: 12246 - DNA, 425 bp, Bos taurus
  Clone ID: 52-LIB34-031-Q1-E1-E8
ctggactcgcagaactctatttcaagatgaagtctttgggaaggcaagtacgaattctccatgggtcatgcgcttcactccctttactgctccctgctgccaatgagtgttttattttaacctactatagaataatttcttggcaactaaaattagaaaaaaatagctgtagtcaggcctgaccacagcatctgctgccatgtggctttgtctactccatgaagccattaactgagctacagatcttccagttcaacctcttaattctattatacaaagccaagaaacgggaaagtggagaaagggccacagtaaggctttcatggggcttcccagctagtgctagtggtaaagaacccacctgccaatgcaagagttactaagagactcgagtttgattcctgggttgggaagatccctgaagg

SEQ ID NO: 12247 - DNA, 417 bp, Bos taurus
  Clone ID: 52-LIB34-032-Q1-E1-E12
cggacgcgtgggtgggacgacaggtttcatcaaccagaaaggaatcgactattataacaagatcattgacgatttgttagcaaatggggtcagacccatcgtgaccctctaccactttgacttgcctcaggccttggaagaccaatgaggttggctctcagaggcaatcatcgaatccttcgacaaatatgcccggttttgcttcagtacgtttggggatcgagtcaagcagtggatcaccatacatgagcctaatatttttgctgtgatggcatatgagtttggtgtatttcctcctggtgtatctaacgttggcactaaggcttatcaggcagctcataatttgattaaagctcatgccagattctggcacagctattattccttattccgaagagagcagaaaggcatggtatc

SEQ ID NO: 12248 - DNA, 339 bp, Bos taurus
  Clone ID: 52-LIB34-032-Q1-E1-E8
gctctttgcggggacagagaccaccagcatcacactgcgatacgggctcctgattcgcatgaaatacccggaggttgaagagaaacttcatgaagaaattgacatggtgattgggccaagccgaatccctgccgtcaaggacaggctggacatgccctacctggatgctgtggtacatgacattcaacgattcatcgacctccttccctccaatctgctccacgaagcaacccaggacacattgttcagatgatatgtcatccccaaaggcacagtcgtaattccgacgctggactctgtcttacacgatacgcaagagtttcctgaaccatagaagtt

SEQ ID NO: 12249 - DNA, 429 bp, Bos taurus
  Clone ID: 52-LIB34-033-Q1-E1-E8
ggaagcttttgtggggacgaccagaatggtcccactgtaacagtgcagtttgggtccggtttttcctgcattgtggattttacagctgaagcagcatctccagctacctatttaggctataccatcacattttcctatgtcactaatgactgcatgagatttcctgatgcggaggaactagaagtttttacagtgaagatccgtttggcacccatgattcaatgaatgacactctttagatgcaatactttgtgaaccttataagatcgtgacgttgtccagcactaatgggacgttcaagtccaagcgtttgtccatactggcacattccgcacatcatagtttttgtgtgacaaagatttgactgtaaccattgacgttgccatcgttcccatcaggctggcatctccatggaaaacagtggtccga

SEQ ID NO: 12250 - DNA, 393 bp, Bos taurus
  unsure (381): unsure at all n locations; Clone ID: 52-LIB34-038-Q1-E1-E12
gggtcgacgcacgcgtctaaaaagattcatactatgagagaaaaagtactgacttcatctgccagacagagactcaggtgtgccagtattcaaaaatttggagaaagagctttaaaagcatggtcagtagctcgcctgagccagaaatttcccaaggctgagtttgtagaagttaccaagctagtgacagatctcacaaaagtccacaaggaatgctgccatggtgacctacttgaatgcgcagatgacagggcagatcttgccaagtacatatgtgataatcaagatacaatctccagtaaactgaaggaatgctgtgataagcctttgttggaaaaatcccactgcattgctgaggtacaaaaagatgccatacctganaacctgccccca

SEQ ID NO: 12251 - DNA, 439 bp, Bos taurus
  Clone ID: 52-LIB34-039-Q1-E1-E8
aacaaagtgtacatctgtggatggccactcattagcctccagcaacactgacttcgccttcagcctctacaagcagttggctttgaaggaccccaataagaacgtcatcttctcccctctgagcatctccatagccttggccttcttgtccctgggggctcatggccccactgtgacagagatcctggaaggtctcaagttcaacctcacagagacccccgagacagaaatccaccagggcttccagcacctcctgcagacgttcaatcagcccagcaaccagctgcagctgagcgtgggcaacgccatatttgtgccagaggagctgaagctgctggacaaattcaggaaagatgccgaggctttttacgcctctgaagttttatccatcaacttcaaggattctgaagctgccgtaaagcttatcaatgaatatgtg

SEQ ID NO: 12252 - DNA, 415 bp, Bos taurus
  Clone ID: 52-LIB34-040-Q1-E1-E8
gaggatccatccccacctcccgctctcacaggcagggcccccggccaagctaactgtcaggtacgtctattcggcattggagacacaggcttctcagaggcagaggccaccctccaaccagaacagacatgagggcagagagactgtcccccctcctggctctggggctcctggtggctgggatccgcagtgtccactgcctcccagagaatgtggtggtgaaggaccggcacagaagggtggatggccacacgttagcctccagcaacaccgacttcgccttcagcctctacaagcagttggctttgaagaaccccaataagaatgtcatgttctccccgctgagtgtctccatggccttggccttcctgtctctgggggcccgtggccccaccctgacagagatcctggaaag

SEQ ID NO: 12253 - DNA, 390 bp, Bos taurus
  Clone ID: 52-LIB34-041-Q1-E1-E8
atcgagcagggagctggtggctcttccatccccagaccagccaagcctgtgagtgacaccccagacagaggaaccagagccatgcggagtctcagcggactgctgttgttactgactgcctgcctggcagtaaacgccagctccgtgcccacattgcccgatgacattcaagtgcaggagaacttcgacctgtcgaggatctatgggaagtggttcaatgtggccgtgggctccatctgcccatggctgaagaggttcaaggagaagatgaccatgatcacagtggtgttgaaagcggggccgacgagcatggagatcagcgtcaccaacactcacaggcggaaaagtgtctgtgaatcgatctctggtacttatgagaaatcatgcact

SEQ ID NO: 12254 - DNA, 418 bp, Bos taurus
  Clone ID: 52-LIB34-042-Q1-E1-E8
atagaagtagaagagcttcttaaatcagagagaaactttgagagaaacttccaaggcaaatttcccaaagaaaatgggcaccaagggaaaaattattaaatgcaaagcagctatcgcctgggaagcaaacaagcccctcagcattgaagaggttgaggtagctccccccaaggatcatgaagttcgaatccagataattgccactgctctgtgccattctgatgcccatattctccatcctcaatttgaggggggggttttcccagtgattcttggccatgaggctgcaggaattgtggaaagtattgggccaggagtgaccaacttcaaaccaggtgacaaagtaattccactccacgcacctcaatgtggaaaatgcaagttctgtctaagtccacgcacaaattttgtggaaaac

SEQ ID NO: 12255 - DNA, 414 bp, Bos taurus
  Clone ID: 52-LIB34-043-Q1-E1-E8
aaccagggagctggtggctcttccatccccagaccagccaatcctgtgagtgacaccccagacagaggaaccagagccatgcggagtctcagcggactgctgttgttactgactgcctgcctggcggtaaacgccagctccgtgcccacattgcccgatgacattcaagtgcacgagaacttcgacctgtctaggatctatgggaagtggttcaatgtggccgtgggctccacctgcccatggctgatgacgttcaaggagaatatgaccatgagcacagtggtgttgaaagcggggccgacgagcaaggagatcagcgtcaccaacactcacaggcggaaaagtgtctgtgaatcgatctctggtacttatgagaaagaagcactgatgggaagtttctctatcacaaagcca

SEQ ID NO: 12256 - DNA, 222 bp, Bos taurus
  Clone ID: 52-LIB34-044-Q1-E1-E8
aaccaaaactttggcacaatgaagtgggtgacttttatttctcttctccttctcttcagctctgcttattccaggggtgtgtttcgtcgagatacacacaagagtcagagtgctcatcggtttaaagatttgggagaagaagattttaaacgcctggtactgattgccttttcgcagtatctccagcagtgtccatttgatgagcatgttacattactgaag

SEQ ID NO: 12257 - DNA, 328 bp, Bos taurus
  Clone ID: 52-LIB34-046-Q1-E1-E12
gatttcttgcaacttcgaaaaatttaaaaccatgaaacatctattactgctacttttctgtgcttttatagttcaggcccaatttcctactgactatgacgagggacaagatgacagacctaaggtaggtttgggtgcccgcggtcatcggccctatgacaagaagaaggaagaggcccccagcctgagacctgtgccccctcccatcagcggaggtggctatcgggctcgtcccgccacagcaactgtgggccacaagaaagtggagagaaagccccctgacgctgatggctgcctgcacgcggacccggatctgggtgtgttgtgt

SEQ ID NO: 12258 - DNA, 440 bp, Bos taurus
  Clone ID: 52-LIB34-047-Q1-E1-E8
ggagtgcagcgagaggaagtcccagctgcagatcttagtgatcaagtcccagacaccgagtcagagaccaagatcctcctgcaggggactccggtggcccaaatgacggaggacgccatcgacggagagcggctgaagcaccttatccaaaccccctccggctgtggggagcagaacatgattggtatgacgcccacggtcatcgccgtgcactacctggacagcaccgaccagtgggagaagttcggcttggagaagcggcaggagtccctggagctcatcagaaaggggtacacccagcagctggccttcagacaaaaaagctcagcctacgccgccttccaatatcggccccccagcacctggctgacagcctacgtggtcaaggtctttgcactggcccccaacctcatcgccatagactccaaggacctctgtga

SEQ ID NO: 12259 - DNA, 228 bp, Bos taurus
  Clone ID: 52-LIB34-048-Q1-E1-E12
agagcggccgcccttttttttttttttttttttttttttttatattttatttttttttttttttatttttttgtatatttttttttttttgtgtattttcttattggggggaaagaaataaaaacccttcattaaccccacataacacgaggacgggtcaacgacccccaaggaaacttttaaaaattgggcggaaaaaaggatccaaatgggattttagttccttgg

SEQ ID NO: 12260 - DNA, 409 bp, Bos taurus
  Clone ID: 52-LIB34-049-Q1-E1-E12
aaatggcaagccactccagtattcttgcctggagaatcccatggacagaggagcccggtgggctacagtccatggggtcacaaagactcggacacgactgagcgacttcactcacttcactacattgtattaggtattgtaagtattctagagatgatttaaagtacagagttggatgtgcagatccatgtgcaaatgctacactattttgtgtaagggacttgagcatccatagattagtgtctgtgggggtcctgggaccaatccctcgtggataccaaggggtactccctcttaatagaacaggctgagttcaggggaaagtaagtcccaaagccacgctgctagtgggtgatgataaagctggcaatggagatctttaaatctctccactcccaatatggggaca

SEQ ID NO: 12261 - DNA, 250 bp, Bos taurus
  Clone ID: 52-LIB34-049-Q1-E1-E8
accatacgttgcagacatgcaacgatcagacgtctccttgctgacttccctatcaatgacccaccattcttaccatggtgtgttcatcgactgggaaaatctactcaacgtaaagtcagcaatatagttttgactgtcatcgtactgaggaaaagtttttgaaaagtggttcatgcacaggttgatggcactttactgtttcaatggcatctgggaaacatgactcagaatgaattgttactgtaaaact

SEQ ID NO: 12262 - DNA, 415 bp, Bos taurus
  Clone ID: 52-LIB34-050-Q1-E1-E8
cccacgcgtccgcacttggccagtccgcatcccagcttcctcattcctgacaccggcacctccacctcctcagttcctagctctgaacattgaagtcatcgttgtctccttttcgtctcttgctctttgattcaggccttacagagctggccagcctccgccctcgtccgagcagccatggaggccctgggtcccggaggtggccgcacctccccggcctcgtccactcgcagcctggacttgcggcggttgtccgcgcccaccgactcggcctacagctctctctccgctgcctcaggcggtcctgagcctcctgagccgcgcacgccgtcgcctttggcggggacccagcaacttccctacctggactgggactacgtgcgcgtggtgtggggcggcccggcccccgccgcca

SEQ ID NO: 12263 - DNA, 236 bp, Bos taurus
  Clone ID: 52-LIB34-052-Q1-E1-E1
acggattcaagtaccttttcccacacagcggtcagagagcatcaggccggcgttgaacagtcctgtggaaaggccaaacggcgagcaggaggacggagaagcctctgttcagaccgagcgggtgccgctggacctcagtcctcggctggaggaggtgttggacttcggcgagctggaagcggagcccagtgagggggaggattttgaggcccggggcagccgcttctccaagtccg

SEQ ID NO: 12264 - DNA, 234 bp, Bos taurus
  Clone ID: 52-LIB34-054-Q1-E1-E8
cggacgcgtgggctggtttcagctgtacgatgagaagaagtggaatcagttttacagtgaagtagtaggaaggcccactacaatggcagagttgatggggaaagccgaaatgtggcttattcgaaactattgggatttttcatttcctcgcccacggctaccaaatgttgaatttgtaggaggcctccactgcaaacctgccaagcccctgcctaaggaaatggaagaatttgt

SEQ ID NO: 12265 - DNA, 350 bp, Bos taurus
  Clone ID: 52-LIB34-055-Q1-E1-E8
ctggatcgatgggtggtgtctatgagtatatcctggtgcttaacagagaaaaaatggaaacagctggtgttaccagcgctgaaatccagaaatgctttggagtctctttgggcattgagtatgagtattcagaggcgatacaaattaaaggaagttcatcattaggaccctgtaaaaaatctggagatggcaaactaactgaaaacgagaaggccatgggagtggaagacttcatttctcgggtgcgcggcggcagctctggctggggaggcagcttgacccaggacagcagcatcgttacgtaccgctcctgggggaggtcattaaagtataatcctgctgttattgat

SEQ ID NO: 12266 - DNA, 345 bp, Bos taurus
  Clone ID: 52-LIB34-056-Q1-E1-E12
gaaaaagctctggccatgggttataagccgaaggcatatctgagggatttcatgtacgtgtcccaggatccaaaagatcagcttttacttggaccaacgtatgctactccaaaagttctggaaaaggcaggattaacaatgaatgatattgatgtttttgaatttcatgaagctttctcaggtcagattttggctaatttgaaggccatggattctgattggtttgcacaaaactacatgggtagaaaagccaacgttggattgcctcctttggagaagtttaacaactggggtggatcactgtctctggggcacccatttggagccactggctgtcggttggtc

SEQ ID NO: 12267 - DNA, 372 bp, Bos taurus
  unsure (233): unsure at all n locations; Clone ID: 52-LIB34-056-Q1-E1-E8
tgaaagttgaactagctagattgagttaccagagagcagcttgggaagttgattctggtcgccgaaatacctattatgcctctattgcaaaggcatatgctggagatatcgcaaatcagttagcttctgatgctgttcagatttttggaggcaatggatttaatactgaatatcctgtagaaaaattaatgagagatgccaagatctatcagatttatgaaggtacagcacanattcacaggcttattatagcccgtgaacacattggcaggtataagaagtaaccagatcaccgtgttaataatcgttgagtaattagaatatgatctactatttaaactccaggaaagaataagggctttaaggtttttt

SEQ ID NO: 12268 - DNA, 220 bp, Bos taurus
  Clone ID: 52-LIB34-057-Q1-E1-E8
ggcattgttgggttcctgtgtcgtcttggaggtgactcggcgtgattgaatttgcggcatcttcgcattcactcacaggtcaaaatgcagatcttcgtgaaaaccctgaccggcaagaccatcaccctggaggtggagcccagtgacaccatcgagaacgtgaaggccaagatccaggataaggaaggcattccccctgaccagcagaggctcatctttg

SEQ ID NO: 12269 - DNA, 216 bp, Bos taurus
  Clone ID: 52-LIB34-058-Q1-E1-E12
aagacttgtgggagaacgactgtcgtaatgctaatggggagaaggtttcatggtgttatacaaccaggagagatgtgaggtgggaatactgaataatcgcgtcgtgcgagtcctctctgttatcaacgggaagcatggatgtcacagtaacaggctaacatagtcctgtgcgtcaaaattgctaccatggtaaccgggagtgttatcgaagcacgt

SEQ ID NO: 12270 - DNA, 178 bp, Bos taurus
  Clone ID: 52-LIB34-058-Q1-E1-E8
accgggcccgccgacaccatgagttggtcctcgcaccctcggagtgtaatcttcgacattctttcactgccttcgtcagcatgcctggcatatgttgctaaccgagacagcggctgcatcttagatgaaagatttggtagttattgcgcagctacctgtggaagtgcatgatttcctg

SEQ ID NO: 12271 - DNA, 205 bp, Bos taurus
  Clone ID: 52-LIB34-059-Q1-E1-E12
ggaagtcaatgtgccacacaaacttgcagttgtagatgagtagcgaaaagaaatgggcctgtgcgggaaagaagtagcatatcttggaaatgaagtgtcggatgaggagtgcttgataaaagtgggcctcagcggagtgccagctgacgcctgtgccgctgcacaaaatgctgttggatagatttgcaaaagcagtggcagccaa

SEQ ID NO: 12272 - DNA, 201 bp, Bos taurus
  Clone ID: 52-LIB34-059-Q1-E1-E8
gaacatgtgtacacccgtggcggattcatgttgatgtatggcaaaatcaatacaatattgtaacgtaattagcctctaattaaaataaataaatttaaaaaatacagtattttttaccttactaacttctacagttgtgactttcttattctttgattagctgtaggatctatagtgatgcttattcctgatgctgataat

SEQ ID NO: 12273 - DNA, 235 bp, Bos taurus
  Clone ID: 52-LIB34-060-Q1-E1-E8
gccgaggacccgaacgctgccgctcgcctgcccgccgccatggccctgctccgaggtgtgttcatcgtcgctgctaagcggaccccctttggagctcatggaggtcttctgaaagacttcacacctactgacatggctgagtttgctgccagggctgccttgtctgctggcagagtctcaccggaaactgtcgacagtgtcgtcgtaggcaatgtcatgcagagttcttcagatg

SEQ ID NO: 12274 - DNA, 188 bp, Bos taurus
  unsure (50): unsure at all n locations; Clone ID: 52-LIB34-062-Q1-E1-E8
gcctcgagcagggagctggtggctcttccatccccagaccagccaagccntgtagttacaccccagacagaggaaccagagccatgcggagtctcagcggactgctgttgttactgactgcctgcctggcagtaaacgccagctccgtgcccacattgcccgatgacattcaagtgcaggagaacttc

SEQ ID NO: 12275 - DNA, 404 bp, Bos taurus
  Clone ID: 52-LIB34-064-Q1-E1-E8
actttactcttactaactatactcattataatcaataagctttaacacctataaaacttccaactacccactctacctaaaaacacctatctcataaaccttcagtgccagcataattcccacaataatatttagccactcatgccaataactaattatttcaaactgacactgactaatcatccaaactcttaaattattcctcagctttaaaatagactatttctcaataatatttatcccaataacactattcgtcatatgatctattagcagaattctcaatatgatatatatactcataaccccaatattaacaaattcttcaaatatcgattcttaatcctcattactatgctcatccttgttaaccccaacaacctcttctagctattcattggctt

SEQ ID NO: 12276 - DNA, 198 bp, Bos taurus
  Clone ID: 52-LIB34-065-Q1-E1-E12
cttcttaatcattctgctcatgttgaatcatgtcacctttcagactaaggaatggtatttcttttgacttcttgtactttttgtgtctttgccacccttagtcttttagccgtagtcattgagaaggaccttattatacttcccctcaacatacatgtgatggtgtattgtactcaaaattgtctacctgtatgtcca

SEQ ID NO: 12277 - DNA, 211 bp, Bos taurus
  Clone ID: 52-LIB34-068-Q1-E1-E8
ggattccactgagccaccctatagccagaagagatacgaagaaattgttaaggaagtcagcacctatattaagaaaattggctacaaccccgacacagtagcatttgtgccaatttctggctggaatggtgacaacatgctagaaccaagtgctaatatgccatggttcaagggatggaaagtcacccgtaaggacggcaatgccagtggc

SEQ ID NO: 12278 - DNA, 245 bp, Bos taurus
  unsure (223),(228)...(229): unsure at all n locations; Clone ID: 52-LIB34-069-Q1-E1-E12
acacggtcaaaatgcaaaaagagagggagagagtaaaatatggaacccaaggggttaagagactcatttatagaaagaaggtcccatattattgatggcaccaaactacctcttagccaatttggtaggtcaaaggaatattaaccctttgaacttctcaatgagagcagattacctgttctcatcattcatattcctttaaactgattcctaagcttttaangtcanntcaacagactaatttt

SEQ ID NO: 12279 - DNA, 191 bp, Bos taurus
  unsure (94): unsure at all n locations; Clone ID: 52-LIB34-070-Q1-E1-E8
ttcctgaataattaccaaaccagtgtagacaaagatctacgaactttggaaggcatcttatatcaggttgagaacaaaacatcagaaccagagnctggcaaagcatcaaacagctataacctgataacatcaagcaaataacataaagtgcacaagattccaaatatgatgagaattagaatataacacga

SEQ ID NO: 12280 - DNA, 363 bp, Bos taurus
  Clone ID: 52-LIB34-071-Q1-E1-E8
agagaaacaaactgcacttgttgagctgttgaaacacaagcccaaggcaacagaggaacaactgaaaaccgtcatggagaattttgtggcttttgtagacaagtgctgtgcagctgatgacaaagaagcctgctttgctgtggagggtccaaaacttgttgtttcaactcaaacagccttagcctaaacacgacacaaccacaggcatctcagcctaccctgagagtaagaggaaaaaagagaaatgaaaactcagagcttattcatctgttttccttttctgttggtgttaaaccaacactctcactaaagaacgtaaatttctttaaatattttgcttcttttgtttgtgctacaattaat

SEQ ID NO: 12281 - DNA, 420 bp, Bos taurus
  Clone ID: 52-LIB34-073-Q1-E1-E8
aggacctgggcaaggccgtgcagatgggtatgagctctgtcttcttcaacaaaggtgagaactgcatcgccgccggccggctctttgtggaggactccatccacgaccagtttgtgcggagagtggtagaggaggtggggaagatgaagattggcaatcccctggatcgggacaccaaccacgggccgcagaatcacctggcccacctgcagaagctgctggagtactgccagcgcggcgtggaggagggggccacgctggtgtgcggcgggaagcaggttcctcggccaggcttcttcttcgagccgacggtcttcacagacgtgcaggaccacatgttcatagcccgggaggagtcctttgggcccatcatgatcatctctcggtttgctgatggcgacgtggacgcagtgctgactc

SEQ ID NO: 12282 - DNA, 422 bp, Bos taurus
  Clone ID: 52-LIB34-074-Q1-E1-E8
catatgttctattgagtgaaaagaaaatttctagtgtccaatccattgttcctgctcttgaaattgccaatgctcaccggaagcccttggtcataattgctgaagatgtggatggagaagctctaagtacccttgttttgaataggttgaaagttggtcttcaagttgtggcagtcaaagctccaggttttggtgacaatagaaagaaccagcttaaagacatggctattgctactgggggtgcagtatttggagaagaaggactaaatctaaatcttgaagatgttcagcctcatgacttaggaaaagttggagaggtcattgtgaccaaagatgatgccatgctcttgaaaggaaaaggtgacaaggctcaaattgagaagcgtatccaagagatcattgagcagttagatatcacaact

SEQ ID NO: 12283 - DNA, 404 bp, Bos taurus
  Clone ID: 52-LIB34-075-Q1-E1-E8
cgggtccatacacgactctaagatgagtcatagcaattaaaatgtcagttctcccaaaacactaatagaatgtaatctcaagtgaaatcccagcagactttttgaagcagaaattagcaaactgatcagatgggatatggaaatgtgaaggaacgagaatatcgtgagtacttttgaaaaagaagaactcaagttgaagggcatacggtttctgatttggaggttgttaagctgtggtagccaggacagtgtagacgtagcataaagacagagatgtaggttggtagtatggaatacggaatctagaaatagacctaaaaaatgtggccagccgaatgaaggcgggtacctgttgttccacatccttccttgtcagtgtttggtgtttgccagtgttttgcacg

SEQ ID NO: 12284 - DNA, 395 bp, Bos taurus
  Clone ID: 52-LIB34-076-Q1-E1-E12
agctgcccttggcgatggtgggacccagacagaccttcatgctacaggcctcccagcctgctccaacgcactcgagcctcgacatcaagaagttgccagaccaagtgactggcgtggatactgacccgcacttcctcatccacgtgccccagaaagaggacacgctgtgcttcaacatcaacgaggagcctggtgtggtcctgagcctggtgcaggatcctgacacaggcttctcagtgaacgggcagctcatcggcaacgaggctgggagccctgggaagcatgagggcacgtacttcgggcgtctggggatcgcaaaccccgcaactgacttccagctggaagtgactcctcagaacattacgctgaaccctgggtctggcgggcccgtgttc

SEQ ID NO: 12285 - DNA, 465 bp, Bos taurus
  unsure (8),(414),(429),(439): unsure at all n locations; Clone ID: 52-LIB34-076-Q1-E1-E8
ccgggtgncccacgaatccgcccacggctgcctggctgcctggccctggctgccctgttcagcctcgtgcacagccagcatgtgttcctggcccatcagcaagcatcctcgctgctccagagggcccgccgtgccaacaggggcttcctggaggaggtgcggaagggcaacctggagcgagagtgcctggaggagccatgcagccgcgaggaggccttcgaggccctggagtctctcagtgccacggatgcgttctgggccaagtacacagcttgtgagtcagcgagaaatcctcgagaaaagctcaatgaatgtctggaaggaaactgcgctgaaggtgtggggatgaactaccgagggaacgtgagcgtcacccggtcaggcatcgagtgccagctgtggagaagtcgctanccacataagccaganatcaactctnacacccacccggggggctgacctgcg

SEQ ID NO: 12286 - DNA, 423 bp, Bos taurus
  Clone ID: 52-LIB34-078-Q1-E1-E12
gccggtcgacccaagcgactacataaaaccccggtaggccaagccagactacagaaggtggtcggccgaggtcacctccagtacgtatagcgatgaggacagggcccccaaagtcccaacgagagaacccttgtcccggggcaactcgcgcaacccaagccccaaaagcctcccatcttaactcaacggggtcaagccccccaagcaaagctttgcccccgaccccaagttcgtgagcagcaaaaccctgcaaagacagcacaacgagggggctgccggcaagggaacctgcatcctgcccatcattgaaaatgggaagaaagtgagctccacacactactacctgctccctgagaggccacctacctggacagattcgaaaaattctttagggaagcagaagaaacacacgggaaacaccct

SEQ ID NO: 12287 - DNA, 391 bp, Bos taurus
  Clone ID: 52-LIB34-079-Q1-E1-E8
ccagctgcaactgaccactggcaatggtctgttcatcaatgagagtgcaaagctagtggatacgtttttggaggatgtcaagaacctgtatcactccgaagccttctccatcaacttcagggatgctgaggaggccaagaagaagatcaacgattatgtagagaagggaagccatggaaaaattgtggagttggtaaaggttcttgacccaaacacagtttttgctctggtgaattacatttcctttaaaggaaaatgggagaagcccttcgagatgaagcacaccacagagagggacttccatgtggacgagcaaaccactgtgaaggtgcccatgatgaaccgcctgggcatgtttgacctccactactgcgacaagctcgccagctgg

SEQ ID NO: 12288 - DNA, 408 bp, Bos taurus
  Clone ID: 52-LIB34-082-Q1-E1-E12
agcgtcggcccagggaacttacaagaaggggaaagtgaaggagacagccagaaaggaggtattctcgatggtgagtccattcaaggcaacgaggactctcccaccttgccgataactaacctgaccgtcgtgccagccactgtcaccaagcccttcagccagcctgccactgaaccggtccaatcaactatccagcccactgctgagcccttctgcctggcgcccgtcacctcctgctctgactcggagatccgctcagcagaggcggtgctgggggaggctttgacagacttctccctgaggctctaccaggacttctcagtgttgaagaagagggagaccaacttcatcttttcccccttcagcattgccagcctcctcacccaaatcctgcttggggctggagga

SEQ ID NO: 12289 - DNA, 432 bp, Bos taurus
  Clone ID: 52-LIB34-082-Q1-E1-E8
cggacgcgtggggaaatttagtactttctaagtttaaataatgagtgtttcctagctaattccaaattttagaatgggtgagagagagattgagaaataacttgaggactgaatatttcttttgttattggttttttacttgtgatgagtacctttatggcttattctcctagcaactttcaaaaatgcattacaatattatcagctatattctctatgctatatactacatccttgggatatttagatggtaacaataacccggtgtacaagacagcaaaagagacactgatgtatagaacagtcttatggactctgtgggagagggagagggtgggaagatttgggagaatggcattgaaacatgtaaaatatcatgtaagaaacgagttgccagtccaggttcaatgcacgatactggatgcttggggc

SEQ ID NO: 12290 - DNA, 402 bp, Bos taurus
  Clone ID: 52-LIB34-083-Q1-E1-E8
atttagctgatgacaatactcctgagatctttgttctcaccaaaccctttttgtcctggggccacagtttttaattagtccccatgtgatctggacttataaatccattcagataaatggcactgctttgccgggggtgggaaatgtttttggtatccagcttgacctaaaatcagaggacctgcatagcattccagattgagcacttcactatcaaaaataccaatatcacatggcttgaagaaccaccatcagagctgaaccacctgattaaaaacaaaaactattggttttagattagtaaaaatacactttttataatattcatcacaacatggtaaggtcacaaattcaaaacttatcaaccaagctctattcatttttgggaattctgggcttgtg

SEQ ID NO: 12291 - DNA, 410 bp, Bos taurus
  Clone ID: 52-LIB34-085-Q1-E1-E8
agcggacgcgtgggaaactttggcacaatgaagtgggtgacttttatttctcttctccttctcttcagctctgcttattccaggggtgtgtttcgtcgagatacacacaagagtgagattgctcatcggtttaaagatttgggagaagaacattttaaaggcctggtactgattgccttttctcagtatctccagcagtgtccatttgatgagcatgtaaaattagtgaacgaactaactgagtttgcaaaaacatgtgttgctgatgagtcccatgccggctgtgaaaagtcacttcacactctctttggagatgaattgtgtaaagttgcatcacttcgtgaaacctatggtgacatggctgactgctgtgagaaacaagagcctgaaagaaatgaatgcttcctgag

SEQ ID NO: 12292 - DNA, 484 bp, Bos taurus
  Clone ID: 52-LIB34-086-Q1-E1-E8
cgggtggcccacacgtccgcggacgcgtgggaaatcccctcctgtcattgcccatggacaacataaagtagtctctaaattctttacatttgatcaccaagctgtatatgaatgtgataaagggtacatcctggttggagcaaaagaactctcctgcacatcttcaggctggtcacctgcggtccctcagtgtaaagcattgtgtctgaaaccagagatagaatatggaaggttatctgtggagaaggttagatatgttgaacctgaaataattactatccagtgtgagtctggctatagtgtggttggttctgaaaatatcacttgctcagaggacagaacctggtacccggaggtgcccaagtgtgagtgggagtatcctgaaggctgtgaacaagtagtcacaggaaggaaactcttgcagtgcctctcaaggccagaggatgtgaaattggccctggaagtgtacaagctgtccctggag

SEQ ID NO: 12293 - DNA, 381 bp, Bos taurus
  unsure (370): unsure at all n locations; Clone ID: 53-BOVMS1-001-Q1-E1-F10
atgcgacgtcatagctcttctatagtgtcacctaaattcaattcactggccgtcgttttacaacgtcgtgactgggaaaaccctggcgttacccaacttaatcgccttgcagcacatccccctttcgccagctggcgtaatagcgaagaggcccgcaccgatcgcccttcccaacagttgcgcagcctgaatggcgaatgggacgcgccctgtaacggcgcattaagcgcggcgggtgtggtggttacgcgcagcgtgaccgctacacttgccagcgccctatcgcccgctcctttcgctttcttcgcttcctttctcgccacgttcgccggctttccccgtcaagctctaaatcgggggctccctttanggttccgattt

SEQ ID NO: 12294 - DNA, 412 bp, Bos taurus
  Clone ID: 53-BOVMS1-003-Q1-E1-F10
aaccatatgctcaggggccgggaatgggttaagttaacggctgaacaacaagcaaaggttggtaattggaattggaaattccccaaacactggtggtaggaatccggaacggcttggaaaactggccgttttttgcagttaataatggtcacgccggatcccgagtagcaaattactgctcaacacacttattagaacacatcacgaacaacgaagacttcaaggcagctggaaagtcaggatctgctcttgagccttcagtggaaaatgtcaagaatggtatcagaactggctttttgaagattgatgaatacatgcgtaacttttcagacctcagaaatggcatggacaggagcggttcaactgcagtgggagttatgatttcacctaagcacatctacttcatcaactg

SEQ ID NO: 12295 - DNA, 277 bp, Bos taurus
  Clone ID: 53-BOVMS1-003-Q1-E1-F2
atgcgacgtcatagctcttctaaagtgtcacgtaaattcagttcactggccgtcgttttacaacgtcctgactgggaaaaccctggcgttacccaacttaatcgccttgcagcagatcaccctttcgccaactggagtaatatcgaaaacgcccgcagcgatcgcccttcccaacagttgcgcagcctgaatggcaaatgggactcgccctgtatcagcacattaacctcagcggctgtagtagttacatgcagcgtcaccgcgacactgtccatcg

SEQ ID NO: 12296 - DNA, 218 bp, Bos taurus
  Clone ID: 53-BOVMS1-004-Q1-E1-F2
aatgcaacgtcaaagctcttcaaaagtgtcaccaaaattcaattcactggccgtcgtttaaaaacgtcgtgactgggaaaaccctggcgttacccaacttaatcgccttgcagaaaatccccctttcgcaaactggcgtaataccaaaaaggcccgcaccgatcgcccttccaaaaagttgcgcagcctgaatggcaaatgggacgcgccctgtaacg

SEQ ID NO: 12297 - DNA, 323 bp, Bos taurus
  Clone ID: 53-BOVMS1-005-Q1-E1-F10
gttgcaagatagcatagcggccgcccgttatttttttttattttgaggtcacggaccgaatctttactgcgtgctttgagccagtcggtatcattttacacacagagcttcgatagtcatgataccctgggttcagtagagagaccatttacgtgaagttctgtctaatataaacttctcagcagtcacaatttgacggtgtcgctagatgcttgcagcttatgtatttctgaaagcgctttcatttgaccattacaccgtcatacatagttgcatcattgaacggacgatttcaagcgctgcaggctgagattaaagagctg

SEQ ID NO: 12298 - DNA, 448 bp, Bos taurus
  unsure (352): unsure at all n locations; Clone ID: 53-BOVMS1-005-Q1-E1-F2
gggtcgaccacgcgtccggaacagcgcatcaaccggatcatgggctttcacaggccggggagcggcgcggaagaagaaagtcaaacaaaatcaaaacagcaggacattgataaactgaactccctcaccattccttcggtttcaaagcgagtagtgctgggtgattcagtcagtacaggaccgtctgaccagactggagtggccgaggtaaaggggactcagctgggagacaaactggactccttcattaaaccttctgagtgcagtaatgatataagccttgagctccggcagcggaacagaggggacctgacagccgactctgtccagaggggttctcgccacggcctgnaacagtacctctccagatttgaagaagcaatgaagctaaggaaacagctgattagtgaaaagcccagtcaagaagatgggaatacaacagaagaat

SEQ ID NO: 12299 - DNA, 392 bp, Bos taurus
  unsure (301): unsure at all n locations; Clone ID: 53-BOVMS1-006-Q1-E1-F2
gtcggcaacacgggtcgaccgcccgtccgctggaactaacgtgaggatggtgtaaccccatatatgattttctttaaggatggtttagagatggaaaaatgttaacaaagttggcagttactttggatcaatcacctgtcgtcataactggctggctactgcttttcatccacacaacaccaggacttagacagatgggactgatgtcatctcgagctcttcatttgttttgaacgttgatttatttggagcggaggcattgtttttgagaaaacgtgtcatgtaggttgtctaaaaatanaacgcatttaaactcatttggaaaaaaagacaaaataaaaaaattaaaattgaaaacaccaaaattaaatgcaaataaaaggtaaaactat

SEQ ID NO: 12300 - DNA, 429 bp, Bos taurus
  unsure (9): unsure at all n locations; Clone ID: 53-BOVMS1-007-Q1-E1-F2
gggtcgacnacgcgtccgcataaaagtcccccagggaacaccaggagggacataaatgtgctcctaccacagggcccttctttagctttggtgcagggagaaagtgaatatgaagcacaggcagagtaacatctgcagggagtgcctggagatttttcaggagttgcaagcaagcattctgttatttttggaaagttcaaatacacagggacaaggaggttgctgactgtacagaaagcctctaggcagattttcttaaaaaaaaaacaacaataaaaaactattaaattatcaaggactggtctcaaggaaagggaataaagttccctagagttttttccccaaaaatatcatttaaaagattttacacatacacacacacaagtgtggccattaaaaagcatatgatcatcaaaaagaaaagcgaaa

SEQ ID NO: 12301 - DNA, 477 bp, Bos taurus
  unsure (8): unsure at all n locations; Clone ID: 53-BOVMS1-009-Q1-E1-F10
ccgggtcngtccacgcgtccggcaataattctttttaatatctccgaagtactattctttaccggatttttctgagctttctaccactcaagcctcgcccccacccctgaactaggcggctgctgacccccaacaggcattcacccactaaaccccctagaagtcccactgctcaacacctctgtcctattggcttccggagtttctattacctgagcccatcatagtttaatagaaggggaccgaaagcatatattacaagccctatttatcaccatcacattaggagtctacttcacactactacaagcctcagaatactatgaagcaccttttactatctccgacggagtttacggctcaactttttttgtagccacaggcttccacggcctccacgtcatcattgggtccaccttcttaattgtctgcttcttccgccaattaaaatttcattttacttctaaccacctaaat

SEQ ID NO: 12302 - DNA, 341 bp, Bos taurus
  Clone ID: 53-BOVMS1-009-Q1-E1-F2
ggggtggttgtgtttttttcttttttttttttttttttgttttttctttctttgttgtttttattgtttttttttttttttttttgttttttttttttttttgttttcttttttttttttttttttttttgttttttttttttttttttttttttttgttttttttttttcttttttttgtcttcttttttttttttttttttttttttttttttcttttttttttcttttttttgtttttttttcttttttgtttttttcttttttttttttcttttttttttcttgtgttttgtttttttttttgtttgtttttttctttttttgttgttttttctttt

SEQ ID NO: 12303 - DNA, 485 bp, Bos taurus
  unsure (310),(471): unsure at all n locations; Clone ID: 53-BOVMS1-010-Q1-E1-F2
cgggtcggcccagcgtccgtttcaaattaaagtttcaaaacaaaacttttaacaaaatccaaaactggcaacaacaaaaataataaaaccaaacaacccctgggaaaccaaatggaccaaaaattaattaacccctttaataaccccggtaatttaaggtctccctctcgtaacccttatcgtactattccaaagccaactattcccaacatcaaaccgactagtaagcaatcgctttgtaaccctccaacaatgaatacttcaacttgtatcaaaacaaataatgagtatccacaattctaaaggacanacatgaacattaatattaatatctctgatcctatttattggatcaacaaacctactaggcctattaacccattcattcacaccaacaacacaactatcaataaacctaagcatagccatccccctgtgagcaagagccgtaattacaggattccgcaatanaactaaagcatcac

SEQ ID NO: 12304 - DNA, 203 bp, Bos taurus
  Clone ID: 53-BOVMS1-013-Q1-E1-F10
atgcgacgtcagagctcttcgatagtgtcacctaaattcaattcactggccgtcgttttacaacgtcgtgactgggacaaccctggcgttacccaacttaatcggcttgcagcacatccccctttcgccagctggcgtaatatcgaagatgcccgcaccgatggcgcttctctacagttgcgcagcctgaatggtgaatggga

SEQ ID NO: 12305 - DNA, 439 bp, Bos taurus
  Clone ID: 53-BOVMS1-013-Q1-E1-F2
ctgacgcgtgggagagactcaagggaagaacgaatcattacatgtcctgacctattgcacactatgatttcaactacaggtggagaaacatgaataaactctgaagaaattgttgcaagaagaggtcaccatggtcaccaaattcattgaaggtggtgatggtcatttaattgaatatgaagaaattaacacactgcttcagggacacacacctgtgataaagatacaagccatcacttcagttcaagcctctagaagacgatccatcgaagatcgtcctcaatgaaaatccatacaccacacctcaaactttacacagtcctcaaccaacaatctgatcttacaggaccaatatgatagccactttgatgtgatgaatgactcaagacacaagagcaattgttgaacaattctgaatgcagtcatctgcagttttgtt

SEQ ID NO: 12306 - DNA, 191 bp, Bos taurus
  Clone ID: 53-BOVMS1-016-Q1-E1-F10
ccttcggattaccaatcatcctcaagctccaattgttcattgttacaaaggacactgctccaaaactgtcctcgggctcccaaggccctccggtctaaggattttgaccaaccgcaccaactcgcgagtaaattgattcccctggggaaaaaatctaatggcaatacatcacaatttcacaatttgggtat

SEQ ID NO: 12307 - DNA, 434 bp, Bos taurus
  unsure (422): unsure at all n locations; Clone ID: 53-BOVMS1-016-Q1-E1-F2
gttgcagtgagctgcttgtcttacgttgttcgcagaggttcgccgggtcatggtgccatcctgactgggaagatgacgctccggggagacgaatgaggaaccacctcctcctactgttcaagtacaggggcctggtccgcaaagggaagaaaagcactagacgaaaatggctaaattcgtgatccgcccggccaccgctgccgactgcagtgacatcctgcggctgatcaaggaattggctaaatacgaatacatggaagagcaagtaatgttaactgaaaaagatctgctggaagacggtttcggagagcaccccttctaccactgcttagttgcagaagtgcccaaggagcacctgactccggaaggacacagcattgttggttttgccatgtactattttacctatgattcatggatcngcaaactgttgt

SEQ ID NO: 12308 - DNA, 385 bp, Bos taurus
  Clone ID: 53-BOVMS1-018-Q1-E1-F2
tccatgcagagcacgttggatgctgaaatcaagagcaagaatgatgccatcaggctcaagaagaagatggaaggagacctcaatgaaatggagatccagttgaaccatgccaaccgcatggctgctgaggccctgaagaactacaggagcactcaagccatcctcaaggatacccagatccacctggatgatgctctgcggggccaggaggacttgaaggagcagctggccatggtggagcgcagagccaacctgctgcaggctgagatcgaggagctgagggccaccctggagcagacagagaggagcaggaagatcgcagagcaagagctcctggataccagtgagcgtgtccagctcctgcacacccagaacaccagcctga

SEQ ID NO: 12309 - DNA, 379 bp, Bos taurus
  Clone ID: 53-BOVMS1-019-Q1-E1-F10
ggaatctgacagccctgcttctgatagtctccctgcccaggaaagtcaatctcaaagtgaatctctgctttcaaaatacatcaactctaaagtaccttacttccttttgtttctgatatttcttgtaaccatctatcagtatgacttaatgattggcttggcattctaccttttttcagtgtactggctatcctgggaagggggatgacaaaaagagtctgttacacagaaataacctcagcactattattactctctcttaaaacagatgctacttagccccatacgtttggactggtgaaagatgactattcattgttcatagatcctttctcgtgaaggatcatttagtaagaatgcgtatgaagtttgcgccttc

SEQ ID NO: 12310 - DNA, 276 bp, Bos taurus
  Clone ID: 53-BOVMS1-019-Q1-E1-F2
cttaaatgacatagaaaattggggatacaataatttcacttagatactatgagcctgtccatatgattcagactgactacgaactttggcttatgtatttatcaacaagctggtactgtaatttgatgtcacatgtcgacttttcaaacagaccttacagcagttaccacaacgcatttaattatagcatcattttgtttaaaactatgtgttaaccgatatggaattctatgtttcacaatacgaatgtgcatatctaaaattgcgcagcctaaa

SEQ ID NO: 12311 - DNA, 132 bp, Bos taurus
  Clone ID: 53-BOVMS1-020-Q1-E1-F2
ttcctggagtccgctttaaggttgtcaaagtagccaatgtctctcttttggctttatacaaaggcaagaaggaaagaccaagatcataaattttgatgatgaaagcacgatagtaataaattttcctatacc

SEQ ID NO: 12312 - DNA, 441 bp, Bos taurus
  Clone ID: 53-BOVMS1-021-Q1-E1-F10
gtcggagatatgtgtaacacaccgacttactgtgacctaggaaaggctgccaaagatgtcttcaacaaaggatatggatttggcatggtcaaaatagatctgagaaccaagtcatgtagtggagtgatggaattttctacttctggtcatgcttacactgatacagggaaagcatcaggcaacctagagaccaaatacaagatctgtaactatggactgaccttcacgcagaagtggaacacagacaatactcttgggacagaaatctcttgggagaataagttggctgaagggttgaaactgactcttgataccatatttgtaccgaacacaggaaagaagagtgggaaattgaaggcctcatataaacgggattgtttcagtcttggcagtaatgttgatatagatttttcaaggacaaccatctatggctgggctgtg

SEQ ID NO: 12313 - DNA, 446 bp, Bos taurus
  Clone ID: 53-BOVMS1-021-Q1-E1-F2
ggcaacatctacaggctactggggtatctttaggtggtgttgatctcacagtccgggtgctcacaacaggatactggcccactcagtcagccacaccaaagtgcaacatcccaccagcaccaagacatgcttttgagatattcagaaggttttacttagccaaacacagtggtcgacagctcacactccagcatcacatgggttctgcagatctcaatgccaccttctatggaccagttaaaaaggaagatggatctgaagttggcgttggaggcgcacaagtaactggctctaatacacggaagcatatattgcaagtctccactttccagatgaccatattaatgcttttcaataatagagaaaaatacacatttgaggaaattcaacaggagacagatatccctgaacgagaacttgttagagccctgcaatccctcgcctgt

SEQ ID NO: 12314 - DNA, 436 bp, Bos taurus
  Clone ID: 53-BOVMS1-022-Q1-E1-F2
ctgccgctacggtccggaaattcccggtccaaccaacccttccgaaaaaaaaaacaaactaaaaagataaaaacataaataaaaataaaaaaaaaaatcaaaacacaacaaaaaatatcaaataaaatcaaatcacagaaaaatcaatttacaaactcaaaaagtgaaaaaaaacctaaaataaaacgggcttcccccccaagggtttcaaccttctttcccccttaaaggtaatttcaaccccttccaaacgttctcccaaattcaattccatggccctctttttaaaacattttgactggaaaaaccccgggttatcccaatttaacccccttgaaaaaaaacccccttttcccacttgagttaaaacccaaatagcccccactcttttccctttcaaaaattttccccacccaaatgcccaatggaaaccccc

SEQ ID NO: 12315 - DNA, 383 bp, Bos taurus
  unsure (294): unsure at all n locations; Clone ID: 53-BOVMS1-023-Q1-E1-F2
ccacgcgtccgcgaaagtcacacccactaataaaaattgtaaacaatgcattcatcgaccttccagccccatcaaacatttcatcatgatgaaatttcggttccctcctgggaatctgcctaatcctacaaatcctcacaggcctattcctagcaatacactacacatccgacacaacaacagcattctcctctgttacccatatctgccgagacgtgaactacggctgaatcatccgatacatacacgcaaacggagcttcaatgttttttatctgcttatatatgcacgtangacgaggcttatattacgggtcttacacttttctaaaaacatgaaatattggagtaatccctctgctcacagtaatagccacagcattt

SEQ ID NO: 12316 - DNA, 286 bp, Bos taurus
  Clone ID: 53-LIB188-003-Q1-E1-F10
tatgcaaccaaaagccccagcaaatactttatgagctttgcagcttcagccgagcagctatgcaaatgcgtttttcattaagagcatggggccagacgtgaagataaggaattgtttctcccagagaagatccataattttgggagcttccaagcccccagtttctaagctcaactcaacctcccggatgtggcaagcacctccaactctgggcctccagactcccaggagaatcgggggtggtgcagcagagaagggagagttgattcacttttagtaaccaaaa

SEQ ID NO: 12317 - DNA, 169 bp, Bos taurus
  Clone ID: 53-LIB188-004-Q1-E1-F2
ctccggaaggaaaaccggtcctggaaaaactcctccaatgatgctggacccccgggtgaaactggcctccaagaagttcaacaacttggtccggtcccgggtaatcctcaaccaggaatccaatccggccacctttgttcaatagttaaaaggggaacctctggttaag

SEQ ID NO: 12318 - DNA, 405 bp, Bos taurus
  Clone ID: 53-LIB188-005-Q1-E1-F10
ccagcaggaaattgttcccaatagtgctgaggaacgacttcacagtatgaaagagggaatccatgcccaacagaaagaacctatgataggagtgaatcaggaactggcctacttctaccctgagcttttcagacaattctaccagctggatgcctatccatctggtgcctggtattacgttccactaggcacacaatacactgatgccccatcattctctgacatccctaatcccattggctctgagaacagtgaaaagactactatgccactgtggtgaagagtcaagtgaattctgagggactccacagttatggtctttgatggttctgaaaattccatgctctacatgtcttttcatctatcatgtcaaaccattctatccaaaggcttcaactgctgttt

SEQ ID NO: 12319 - DNA, 433 bp, Bos taurus
  Clone ID: 53-LIB188-008-Q1-E1-F2
gcggcgggatacttgctggacaggtaaagggaaatctcagtcttggagagttgatttagtgtgtttaccttgtcagggtcattagggtcaacagctccttccccaacgaaaagattccacattaggcacctcctccagcagctccagcagttcattcagtaagtcgtttttttcaggtgcaatcgcatcttggtgctccagcaagagtgaatgtgtgttgatgatttcttcaattgaaatataaatgactggcttgctgactgtcaccacatctgtgtatttatccatattaaacttttcttctggttcagggacattacatgcttctttgaaatatttcctgaactcctgatacgtctctgataaataactgttcatagaggagaggtgctcgttttctccttcgaagagcttgttggaggctgcatgctgc

SEQ ID NO: 12320 - DNA, 335 bp, Bos taurus
  Clone ID: 53-LIB188-009-Q1-E1-F10
atagtcatctacccgtcttcaaactggactggttccaatgcatcaggtaccgtgagacgctcccacatgtccagagattctaagatagacactttactaacaaactcctcatacatgttccgctttcgcagcgtgcgtcccaggacgatccttctgtagcagtcccggtcaatggcccatagtttcacgattgtcttggacttgacactggacgctcgaggagtcacgtaaatcagagtatgctcactgaagctccctgcttgtccaacacagggtgcacattcaatggtgacagatacatccattgcgccttggacaatgtcgtctaaattacc

SEQ ID NO: 12321 - DNA, 409 bp, Bos taurus
  Clone ID: 53-LIB188-009-Q1-E1-F2
acatcactcagctgcggcagcagcacagccgcgacggcgccctggagctggccaggagtgacctggatgatgacataatcccagaggaggacatcatttcccgaagccaattccccgagagctggttgtggaccgtcattgaggaccttaaacaagcagacaaaaatggaatctccacgaagctcatgaacgtgtttttgaaagactccatcaccacttgggagattctggccgtgagcttgtcagacaagaaagggatctgtgtggctgacccctatgaggtcactgtgatgcaggatttctttatcgacctgcgtctcccctactcggtggtgcgcaacgaagcaagtggagattcgagcgattctctacaactacgggaaggcggaaatctcaaggtgagggtgga

SEQ ID NO: 12322 - DNA, 443 bp, Bos taurus
  Clone ID: 53-LIB188-010-Q1-E1-F2
acggctacgacggcagagattacatcgccctgaacgaggacctgcgctcctggaccgcggcggacacggcggctcagatcaccaagcgcaagtgggaggcggcagattatgctgagtctttgaggaactacctggagggcacgtgcgtggagtggctccgcagatacctggagaacgggaaggacacgctgctgcgcgcagaccctccaaaggcacatgtgacccatcaccccagctctgagcgtgaggtcaccctgaggtgctgggccctgggcttctaccctgaggagatctcactgacctggcagcgcagtggagaggaccagacccaggacatggagcttgtggagaccaggccttcaggggacggaaacttccagaagtgggcggccctggtggtgccttctggagaggagcagagatacacgtgccatgtgcagcac

SEQ ID NO: 12323 - DNA, 375 bp, Bos taurus
  unsure (352): unsure at all n locations; Clone ID: 53-LIB188-011-Q1-E1-F10
ccatggaggcgggatactggatatacaccaggaagttgcacaggtcccagcggggcagctgctcgggaatgtggagcgccttccgcacgtgagggtcgttgaggtaattggaggcggccgtggtgttggtgcaaggggggtccaggtgcaccttctccccagaacgcagcagcgtctgatgccacacccgcttgagtggcaggcgggtgaagatgttgcccagatcctggaccacgacagtgtccttctcatgccttacgtggctgggcacccccccagcacatggagcatagaggttgtacatgttgaggccggagctggccacgatgtgggacacttcctgaagattggncacgcattctggctctttgttgt

SEQ ID NO: 12324 - DNA, 442 bp, Bos taurus
  unsure (335),(354): unsure at all n locations; Clone ID: 53-LIB188-011-Q1-E1-F2
gcgggataccaaaacattccctatggccccaccaacataagcccccagggctgggtctgtgcccacaaagggttggcctgttttgactgaactaacctgtggatttagtccaacaaatgcatttgcctgatttcagggctgaatttctgcttgacccaagtgtcaggcagagctgggtggcctcagctgactggcggtggacaggctgcaggatgggccgaaagtgcattactagagatgaccgcggttgaggacacctatttcccaggacccatggctatgtgaccacactggccgtgagtgactggttgttgaggatgactactctttagcanacctattgtgtgtctgtanaggctgtttgatgattaaaacaatggctaacttcctggttttggcaaatacttgactgcattttcatttgaatgaacaattatcagga

SEQ ID NO: 12325 - DNA, 308 bp, Bos taurus
  unsure (254): unsure at all n locations; Clone ID: 53-LIB188-012-Q1-E1-F2
gccataggcgcgggatacccagtttgaatataatgttgaaggagtaaccaccaaggaaatggctacccaacttgccttcatgcgtctgctggccaaccatgcctctcagaacatcacctaccattgcaagaacagcattgcatacatggatgaggaaactggcaacctgaaaaaggctgtcattctgcaaggatccaatgatgtcgaacttgttgccgagggcaacagcagattcacttacactgttcttgtanatggctgctctaaaaagacaaatgaatggcaaaagacaatcattgaatataaaa

SEQ ID NO: 12326 - DNA, 251 bp, Bos taurus
  Clone ID: 53-LIB188-013-Q1-E1-F10
cggatactactcccccttcagctcgttcccgagggggtcactcttcttcaatcccaagtcccgctttgcccggaacgggatgctggggtcggagttgtgggaattcaccgtgaagacctgcaggtagtgctggtcgtcgctctgcgtgaggttggccagctgggacacccaggtgaactgctcgttcagctgcttgagcagggccgacgtgttgagcatcttctgctggtaggactggagcagctggtcgt

SEQ ID NO: 12327 - DNA, 235 bp, Bos taurus
  Clone ID: 53-LIB188-013-Q1-E1-F2
acgtgctgaccctgcactgtgcgctgtgctggccccacagccccaccccggcctgcccctcaaccagagctgagctcagactgcagagccgtggccctcacatgggcccaaggaagggaggctgaggctcagcggggccccagcagggcaggagatcaggcttctggtcagtcagagccaattgtgaaaggcgtctctgccccactgtgaccccaagggcagaaggttacacctc

SEQ ID NO: 12328 - DNA, 395 bp, Bos taurus
  Clone ID: 53-LIB188-014-Q1-E1-F2
gccgcgggatacaagcttattttttattttttttttttttttttttttttttttttttttttttttttttttttttttttttttttttttttttttttttttttttttttttgaccacaggtttatccctttattgctgaaggaggagcggccccaatcaggaggccccaaaaggggcctgaaggggcctgggtcccaaaaggggtgaaagtggtcccggttccccctggtcccctaatggggcaggcggggataaaatcttctgtccccaaaggggccaaggctcccgggctcccaaaggccccggaaggggctcacctaaatgtggcactgcccccccaactgggttgggttaaaggacacccggatttccatgggcagggcctttagggctt

SEQ ID NO: 12329 - DNA, 354 bp, Bos taurus
  unsure (277): unsure at all n locations; Clone ID: 53-LIB188-015-Q1-E1-F2
accagaagcaggggcccgggcccgcccgcgactacagccactacttcaagcacatagaagacctgccggaacagattccccgtgccaccattgggaactccaaaaatatcctgcaaattgaaaatgcccgttcgggtgcaaattaatttcgcaacaagttttgagacggacaagcttttgccatgagtgttgaaggtgacatcaatggcctgcgccgggtgctggatgagctgaccctggccaagactgatctggagatgcaaaattgaaggcctgnaagaggagctggcctacctgaagaagaaccacgacgaggaaatgagtgtgctgaagggccaagtgggtggccaggtc

SEQ ID NO: 12330 - DNA, 416 bp, Bos taurus
  Clone ID: 53-LIB188-017-Q1-E1-F10
cggatagttctcctacgactcaggctgcccatttctctgcaactcaacttcaatcccttctgggtaaaaaccgttaataaggcaggtaaggctaaccttgcttttgctgagctcttcccgggttggggcaagaacataaacctgcggctcccgggcctgccctttggtcctggagatggtcctcacaatgggggccgggaggcctttgttgttgaccttgcacttgaactcctttccctgcagccagtcctggtgctggatgcgcagggcgctgaccacgcggtaagtgctgttgaactgctcctctctcggcttcgtcctggccgtgtgcacctccacgtcgtccacgaaccaggagaactgcacctcggggtcatcctggcccacgttcaccaccacacacgtgacctcgggcg

SEQ ID NO: 12331 - DNA, 333 bp, Bos taurus
  unsure (287): unsure at all n locations; Clone ID: 53-LIB188-017-Q1-E1-F2
aagacacagaagggtcttccattcaattctcctgaagaacctcctggggcttttgctttttcttctttttgggtctttcacttgtctcctcacactcctccggggcactgctattttctgaagaagccagggcaatcgcagccagccttttcttttccttcttcaagcgtttcttctcctgtttctcgagcttcctagtaatctcagcagccgcttcctctgcccgaaccattgcctccttcatgacatccagattctttcggggaatctctccagtctcatagaangacagccgctcctcaacttgttctcgaagctttctcccaaaaacac

SEQ ID NO: 12332 - DNA, 431 bp, Bos taurus
  Clone ID: 53-LIB188-019-Q1-E1-F10
gacacctgaagaaagaaaagtgagaaacaaaagtagtgcacataacatttgccatcatcatacatgtgaatattcagatttgctacatttttcagatcacttacaccatgataaactgcagaactgaaactccagcaaggacaattaaacaatatttggaatgaaatcatttggcctaattttcataaccacagatttcaaggaataccaccatccatgccatgtgtgccagacaatcccattgtccgttttagcggtgtacggacccttgtggtaaaagccattcaagtttgcacagtgacacctgttaaaccaccagccagactgatcctctttcgcacagttcccttcgtagatgtcgttgactctgtcccacgtgctgaatttcagtctttggtgactggcccaccattgcacttcaagatgaaaat

SEQ ID NO: 12333 - DNA, 407 bp, Bos taurus
  Clone ID: 53-LIB188-019-Q1-E1-F2
actgggggtctcccttgaggtcgtaagtggccccatccagacccatgatcagatattctttcccaggttccaactgaaggcggcaagaggctcggaccaggaagtttctggtctgatcagcggtggccctggcatccttggtgaaatgcaggacttgggtgatacgggtctcaaagaggcggaaagcagccctgctgtcttctcggagaaccttaacctggaagccgtagtccactcggggagagtagcaggcgaatttcatccggtaaccctccaagtcctgctgcccacgctccagggcccggcgctgtcgagggcacttcccctcagcacactggcagacatccgcagagcacaacgtggacaagagtttgctcttacgtggtgccccataaaacacagaacac

SEQ ID NO: 12334 - DNA, 398 bp, Bos taurus
  unsure (315): unsure at all n locations; Clone ID: 53-LIB188-020-Q1-E1-F2
caactcaacaagcagcatatctcaaccttgaactgtacctgccaaaaataccaggcgggcctcttcaaccagggcacctactcctctgacaggaggtcgtgacccaggcaggctgggcaggtgcgctggctcttcagccactgcttgaagcaccccttgtgaagcctgtgcccacactgcagctcacgcacgtgtttggacttgaatacttctcggcacatttcacaggaatttgcgcaggacacagggacgtcctcggtcctcggccccctggtttcgggcgatgctccgacaggcatggagggcgggtcctgngcggccctgggcacagcaacagcagagctgggtgcagacagcctccagccctttcctggacttggctttttctttctttcttc

SEQ ID NO: 12335 - DNA, 339 bp, Bos taurus
  Clone ID: 53-LIB188-021-Q1-E1-F10
acctctcctggagctccgggtcccttaaaaattggccaatgaagtcctcacggccaaccacctcctccggcgggggcacagcatgcatggagaactggtgctgcacggggctgggctgggccttctggaaggaggcctggcagataaagatgggcctgccatgttgcacggccttcacgaagcgcacagagaagcttgcccctgtccgcgtccgctccacctggtaccaaatcaagtatgaggagctgcagacactggctgggaagcacggggatgaccttcgtcgcacgaagacggagatttctgagatgaaccggaacatcaaccgtctccaggctg

SEQ ID NO: 12336 - DNA, 397 bp, Bos taurus
  Clone ID: 53-LIB188-023-Q1-E1-F2
catggaagccggatacgtccgctggacagagtcactcgagcccctccagggagctgtggctaaattcttctctgccagctgtgttccctgcattgatagacaagcataccccaacctgtgtcaactgtgcaagggggagggggagaaccagtgtgcctgctcctcccgggaaccatacttcggttattctggtgccttcaagtgtctgcaggacggggctggagacgtggcttttgttaaagagacgacagtgtttgagaacttgccagagaaggctgacagggaccagtatgagcttctctgcctgaacaacagtcgggcgccagtggatgcgttcaaggagtgccacctggcccaggtcccttctcatgctgtcgtggcccgaagtgtggatggc

SEQ ID NO: 12337 - DNA, 275 bp, Bos taurus
  unsure (246): unsure at all n locations; Clone ID: 53-LIB188-024-Q1-E1-F10
gcgggagacctggcacctccacgacggaagggcagccagatcacccagcagtctaccaaccagagccggaatcccgccaccaccaaccagacggagtttgagcgcgtcttctgagggccggctgctgttgcttctcgttagggccgtgtttgtttttttttcttctgctctgtgacttgcagcgtggagattatggggcatgtgagtttttcctctagcgcatatcttatttaatccacaccctgngcatcaggcaccaaccgagcagactggag

SEQ ID NO: 12338 - DNA, 395 bp, Bos taurus
  Clone ID: 53-LIB188-025-Q1-E1-F10
cgcagtgggcccgggacacttttcatagtcaagaatcagtagtttaagaacaaatgcgtctttacagaagcatttttctcatctgcctgttcacatgggaacgggtggaaaccgtgcaggaagttctgatggaacatgtggcggccggggcttgtctgtgttgccagatctggaggacattccaccagcccgtggattcagatattctccataagaatgagacgtattcaaacgcctggggctgatctgggctgaacaccctgagcattgacaacggagttaagcatattcacagtaacttgatagtcagtggtctggggtgtattgtgactattggccccagtggagcttttatccaatttcatgtgaggaactcgagttttacagctaggctg

SEQ ID NO: 12339 - DNA, 377 bp, Bos taurus
  unsure (41): unsure at all n locations; Clone ID: 53-LIB188-025-Q1-E1-F2
gggcccgggacacctggctaattcagtgcacgaggctgcangcacatttgtagtgtgtgcaatcgcagccctgccaggcctggggctccatcctggagcccgagggtgagtgtccatgtggtccaagcatgactgactgcaaaggtcccatccacacggcatgtgtgcatgtgtgacccctctgagtgtgtctgtgctaacgatcagaaggtgtatacgtcggggtcagcatgggtgaatctgccagtgggaggctggtttcagaacatcaagtcaacccgggggacagcatacgacctaccagtcaaaacacacccaaacggctggtttggggcctccctgtgacctccctgtcccagctccaagccaagtctctg

SEQ ID NO: 12340 - DNA, 208 bp, Bos taurus
  Clone ID: 53-LIB188-026-Q1-E1-F2
atggccgcggcatactcctattacaacctggatgaaacttgtatccgcttctatcacccggataaaaaggacggaatgctgaccaaactctgccacaaagatacctgccgctgtgcaaaggagaactgcttcatgcaccacacagagaacgaggtcactctggaggaccggctggacaaggcttgcgagccgggcgtggactatgtgt

SEQ ID NO: 12341 - DNA, 288 bp, Bos taurus
  Clone ID: 53-LIB188-027-Q1-E1-F2
tcgaaggactggatggggagaccccttggcagccgtggttgttgaagttctgggcgcagtccaccagctgctgctcagccaggaaaggcaacttccctgttgctatggcgacagcagactccagggccccggtggtggagaaggtccagcaactgccgcagctgccctgttgggctttgaactgtcccgggattctcagatggttaaaagccaccttggggtcttgggggaagggactgacttcatcctacccctctgctgaagtggaggctcgttttggcttctggg

SEQ ID NO: 12342 - DNA, 414 bp, Bos taurus
  Clone ID: 53-LIB188-028-Q1-E1-F10
cgccataggcccgggagaccacgcagagtctaaattcgaggggatcctcaagacaccaagagcagagtctttggacagcaggtccctctggccgggtggtgagccaaagagctggaggcaccgaaacttgttttgtccaaaattctcctgcgccttgcagagaagcttcgagatcaagtcttccatgccatccacacttcgggccaatagagcatgagaagggacctgggacaggtgggactccttgaacgcatccaatggcgcccgactgttgttcacgcagagaagctcaaaatggtcgcggtgagacttctgtggcaagttcgcaaacactgtcgtctccttaataaaagccacgtctcaagctgcgtcctggatacacttgaccgtaccacattaaccgaagtatggttc

SEQ ID NO: 12343 - DNA, 448 bp, Bos taurus
  Clone ID: 53-LIB2809-002-Q1-E1-F10
ctccctaccgtaatggccgcgggctacaaagaagcaaaacgaggtagccacggggcagaggagttccaggaacagaaaggggacagaagcagcaaagacagcaggtgttcacaacttctcacagagccactgatccagcttctcagaacagagtgctttatgggccaaccagtagttaattcctactttatccagaatcttcttgacacacataatgtcatcagtaagatcatcatccaggaacttgtcacaggagatgttacagatgttgcttgagtgagggttctggtcgtctttgcaccaaattttattatttatctggaagagtccatattctgtgctgtcattgttttgtacaagctttttttttttttttttttttttttttttttttaaaatgtaatttattgaaaagaagaaagacaaaatctcagttaatgcacacaag

SEQ ID NO: 12344 - DNA, 412 bp, Bos taurus
  Clone ID: 53-LIB2809-003-Q1-E1-F10
catggccaggggatacaggacaaaggactgaatgggcatatctctctggggatagggcactgctttctggggaacaggcaggactttggactgagaaagggacagcacggactgaggaggaaacatgacagttggaggaagaggctggtgaggctggtgcatccaagactggagcagaggcagaggaaggtgcagattttcaacatcagtgagagtcaggctctggctttcagtaaagggctcaactggatatttagggaagggcatttctttgtgcttaggagccatagcctccttcactttggagactcccattacttcaagctgaaggaaaggcggcaccaccacaagggtttgagtaagaagaaggatgttttgtgggaagctgttaaggaacggcccatggaaagga

SEQ ID NO: 12345 - DNA, 491 bp, Bos taurus
  Clone ID: 53-LIB2809-003-Q1-E1-F2
cgatgcccatgccccggcagccatgaccgcggcatacctgtaggctcaccactagcaatggtattgatggtagggatttctgttttatcctgatttttccttggtggaatggccataaatgataaatgtgggtgtgggtgacgtgccatggtagttggctgggcttggcacgacttggcaggcacagtatttgacaaaacttgccattgaagaatttgggcacgtgacctaactgcagctggctttgcataatatgggtatggcaaaaattgattattaattaatgcaactggtttctgttggtactaattgagtccataactaggatacctactcagcacatactgaattgggatatatttggctattttgtcactgaagaatcgttcaaccttctcacagcgcaaaaatggcacggttaatgccaggatactcacatctaggaaaaaactcttcatcattgcacctttccatgtgaccctcagctcttg

SEQ ID NO: 12346 - DNA, 426 bp, Bos taurus
  unsure (105): unsure at all n locations; Clone ID: 53-LIB2809-004-Q1-E1-F2
cataaccgccggatacaccagaaaagcctgaatgggcatatctctctggggatagggcactgctttctggggaacacgcaggactttgggctgagaaacggacancacagactgaggaggaaacatgacagttggaggaagaggctggtgaggctggtgcatccaagactggagcagaggcacaggaaggtgcagattttcaacatcagtgagagtcaggctctggctttcagtaaagggctcaactggatatttagggaagggcatttctttgtgcttaggagccatagcctccttcactttggagactcccattacttcaggctgaaggaaaggcagcaccaccacaggggtttgagtaagaggagggatgttttgtgggaggctgttagggatgggcccagggaagggatagactagagactg

SEQ ID NO: 12347 - DNA, 464 bp, Bos taurus
  unsure (423): unsure at all n locations; Clone ID: 53-LIB2809-005-Q1-E1-F10
catggccaccggattgggcccggccaaggtctttcacagtccaaagtcctgcctgttccccagaaagggacagcacggactgaggaggaaacatgacagttggaggaagaggctggtgaggctggtgcatccaagactggagcagaggcagaggaaggtgcagattttcaacatcagtgagagtcaggctctggctttcagtaaagggctcaactggatatttagggaagggcatttctttgtgcttaggagccatagcctccttcactttggagactcccattacttcaggctgaaggaaaggcggcaccaccacaggggtttgagtaagaggagggatgttttgtgggaggctgttagggatgggcccagggaagggatagactagagactgtgtctgggcaaagagctcagaagcgtgancccagctgcagccatgaagtgcctcctgcttgccctggccc

SEQ ID NO: 12348 - DNA, 369 bp, Bos taurus
  Clone ID: 53-LIB2809-007-Q1-E1-F10
tacaagctttttttttttttttttatgcttttattttgttttacaagggcctcataatgtaatttattgaaaagaagaacgacacaatcgcagttaatgcacacaattatttgatatgagggcacatacaggacaagtgattcaaaggcatttacgagatttaccatacataaatttaatgaatcctttaattccctttgactcaatggcctttagaccagcatgatactactggaatttacgtaacagactgttacgacaattgcacttacggatgttacactacctaagataccttacagaactcaagaagattgagtgccatcaggttcaaattgccctattctaaaccagcagttgaagccattg

SEQ ID NO: 12349 - DNA, 163 bp, Bos taurus
  Clone ID: 53-LIB2809-007-Q1-E1-F2
actattgcaagcacctgcaggtcgactatcatcggatatgctcatagcccgaatcgaacacagcatttaataacctttggatacaatggtttcacatgatccatgacacgacatttccaccatgggggtttcacaaccatcacctaccataactgtggggtcc

SEQ ID NO: 12350 - DNA, 430 bp, Bos taurus
  Clone ID: 53-LIB2809-010-Q1-E1-F2
gggatactgtcccagtgggtcgtgtggagactggtgttctcaaacctggcatggtggtcacctttgctccagtcaatgtaacaactgaagtgaagtctgtagaaatgcaccatgaagcattgagtgaagcccttcctggggacaatgtgggctttaatgtcaaaaacgtgtctgtcaaagatgtccgtcgtggcaatgtggctggtgacagcaaaaatgatccacccatggaagctgctggcttcacagctcaggtgattattttgaaccatccaggccaaatcagtgctggatatgcacctgtgctggattgtcacacagctcacattgcttgcaagtttgctgagctgaaggagaagattgatcgtcgttctgggaaaaagctggaagatggccccaaattcttgaaatctggtgacgctgccatcgt

SEQ ID NO: 12351 - DNA, 198 bp, Bos taurus
  Clone ID: 53-LIB2809-011-Q1-E1-F10
ggatatggcactgctttctggggaacaggcacgacttttgactgacaaagggacagcacggactgatgaggaaacaccacagttggacgaatacgctggtgaagctggtgcccccacaaatgtaccacaagcatacgaacgtgcagcttttcatcatcagtcagagtcacgcactggctttcagtacccggctcaact

SEQ ID NO: 12352 - DNA, 145 bp, Bos taurus
  Clone ID: 53-LIB2809-012-Q1-E1-F2
actgttgcaataaaagcgccatcagggacatcgagcaagggtcaaaattccagagcgccattcatgcacccctggagattagtccttacatgtccattgtcactacacggcccacggctcagagatgacttagcttcaacggggt

SEQ ID NO: 12353 - DNA, 413 bp, Bos taurus
  Clone ID: 53-LIB2809-016-Q1-E1-F10
gccatgagcccgggatgccgctcaaagagtggaaaccacaacgctgagcaagatacaggacaagatccctgctcagacaaagtcacctgaagaaattgataaggaaaaagttcacctccctgactcagaaaggaaaacggacccagctgaagaggacacaaacgtatatactgagaagcactcagacaatctgtttaaacgaacagaagtcctggcagctgtcattgctggcggagttattggctttctctttgcaattttcctcatcctgctgttggtgtatcgcatgagaaagaaggatgaaggaagttatgaccttggagaacgcaaaccatccagtgctgcttatcagaaggcacctactaaggagttttatgcgtgaaaactcccatttagtgtctctatttatgaga

SEQ ID NO: 12354 - DNA, 319 bp, Bos taurus
  Clone ID: 53-LIB2809-016-Q1-E1-F2
ggcatacctggtaagatatgtggaaagcctttcaagcagtgaggaatctattacacgcatcaataagaaaattgagaagtttcagagtgaggaacagcagcaaacagaggatgaactccaggataaaatccacccctttgcccagacacagtctctagtctatcccttccctgggcccatccctaacagcctcccacaaaacatccctcctcttactcaaacccctgtggtggtgccgcctttccttcagcctgaagtaatgggagtctccacagtgaaggaggctatggctcctaagcacaacgaaatgctcttcttt

SEQ ID NO: 12355 - DNA, 357 bp, Bos taurus
  Clone ID: 53-LIB2809-017-Q1-E1-F10
cactcaagcaacatcggtaacatctcctgtgacaagttcctgaatgatgatcttactgatgacattatgtgtgtcaagaagattctggataaagtacgaattaactactggttggcccataaagcactctgttctgagaagctggatcagtggctctgtgagaagttgtgaacacctgctgtctttgctgcttctgtcctctttctgttcctggaactcctctgccccgtggctacctcgttttgcttctttgtacccccttgaagctaactcgtctctgagccatgggccctgtactgacaatggacatgtaaggactaatctccaggggtgcatgaatggcgctctggacttttg

SEQ ID NO: 12356 - DNA, 441 bp, Bos taurus
  Clone ID: 53-LIB2809-019-Q1-E1-F2
gggcccgggctactcaaaaaggcatttaacagatactaatcgggcttcccaggtggtgctagtggtaaagaacctgcctgccaatgcaggagacgtaagagatgcaggtcaattcctaggccctggaggagatgacaacccactcctgtattcttgcttggagaatcccatagacagaggaacccggcaggctacagtccatagggtcatacagagttggaaagggctgaagcaactttgcatgcatacatgtctctcaatcatcctgttctctccttaggacaacaaatgatctctaatattttcatctggttctaaaagaataatagtcattgaaaatatataataataaccacgcatgaacttgttaatcattcctaatttcctggttaaggttaaggcttctaatgaattataagaaatacataccctcctataagg

SEQ ID NO: 12357 - DNA, 129 bp, Bos taurus
  Clone ID: 53-LIB2809-020-Q1-E1-F2
ctcatctctgagccctgggccctgtagtgacaatggacatgtaaggactaatctccatgggtgcatgaatggcgctctggacttttgacccttgctcgatgtccctgatggcgcttttaatgcaacagt

SEQ ID NO: 12358 - DNA, 406 bp, Bos taurus
  Clone ID: 53-LIB2809-022-Q1-E1-F2
gcctagggcccgggatcctcggtcatgtccagggacccttccctattattgtctaagaggatttcaaagtgaatgccccctcctcacttttgaattgactgcaactggaaatatggcaacttttcaaaccttgcatcatgttactaagataatttttaaatgagtatacatggaacaaaaaatgaaactttattcctttatttattttatgctctttcatcttaatttgaatttgagtcataaactatatatttcaaaattttaattcaacattagcataaaagttcaattttaacttggaaatatcatgaacatatcaaaatatgtataaaaataatttctggaattgtgattattatttctttaagaatctatttcctaaccagtcatttcaataaattaatcc

SEQ ID NO: 12359 - DNA, 359 bp, Bos taurus
  unsure (44): unsure at all n locations; Clone ID: 53-LIB2809-023-Q1-E1-F2
ggatacaactgactgtgccctaagatcgcatgccacatcctgtngtccactggcgtccattccattgtgaacatgttgaatttttaacagtgctggattttcgttcgaaatgtggtagtgaatgacgtcttaataatccttatgaaagaggtttgaacctgtaaattagttgactagcctagcaaccatcttgctcacgaattcacactccgcaattaacgcgtggctattgatccagcccgagttctagatctgggacacatcactcgcaaatgtgcccaatctcttgatgtcatgagtggaacacccaacactgcacggttcctgttggtctagaccctggttctcctgcctgtcca

SEQ ID NO: 12360 - DNA, 369 bp, Bos taurus
  Clone ID: 53-LIB2809-024-Q1-E1-F10
gggaaacagcaaaaaggcctgaatgggcatatctctctggggatagggcactgctttctggggaacaggcaggactttggactgagaaagggacagcacggactgaggaggaaacatgacagttggaggaagaggctggtgaggctggtgcatccaagactggagcagaggcagaggaaggtgcagattttcaacatcagtgagagtcaggctctggctttcagtacagggctcaactggatatttagggaagggcatttctttgtgcttaggagccatagcctccttcactttggagactcccattacttcaggctgaaggaaaggcggcaccaccacaggggtttggctaacaggagggatgttttg

SEQ ID NO: 12361 - DNA, 336 bp, Bos taurus
  unsure (290): unsure at all n locations; Clone ID: 53-LIB2809-025-Q1-E1-F10
ccccccgggggaaagggcactgctttctggggaacaggcaggactttggactgagaaagggacagcacggactgaggaggaaacatgacagttggaggaagaggctggtgaggctggtgcatccaagactggagcataggcagaggaaggtgcagattttcaacatcagtgagagtcaggctctggctttcagtaaagggctcaactggatatttagggaagggcatttctttgtgcttaggagccatagcctccttcactttggagactcccattacttcaggctgaangaaaggcggcaccaccacaggggtttgagtaagaggaaggatgttt

SEQ ID NO: 12362 - DNA, 244 bp, Bos taurus
  unsure (57): unsure at all n locations; Clone ID: 53-LIB2809-025-Q1-E1-F2
ataccaatgtgtcatctagaaaagatatgctggattcagtttgccacatctcactangccgactttgtaaccttgtttgtcacctgtctacactgcttaagcatttgatattgaatgaataatgtaaagttgatgaaaactttaaaattaaacatgttttcagtcacatgttatttctttgaaactgaggactctgaattttcaacttattgaatctctaataaacactgtaactccaatattt

SEQ ID NO: 12363 - DNA, 372 bp, Bos taurus
  Clone ID: 53-LIB2809-030-Q1-E1-F10
cgtatgtgtatgatacataaggttatgtattaattgtagccgcgttctaacgacaatatgtacaagcctaattgtgtagcatctggcttactgaagcagaccctatcatctctctcgtaaactgccgtcagagtcggtttggttggacgaaccttctgagtttctggtaacgccgtcccgcacccggaaatggtcagcgaaccaatcagcagggtcatcgctagccagatcctctacgccggacgcatcgtggccggcatcaccggcgccacaggtgcggttgctggcgcctatatcgccgacatcaccgatggggaagatcgggctcgccacttcgggctcatgagcgcttgtttcggcgtgggtatggtg

SEQ ID NO: 12364 - DNA, 403 bp, Bos taurus
  Clone ID: 53-LIB2809-031-Q1-E1-F2
cgccatgggcccgggatacagcaaaaaggcctgaatgggcatatctctctggggatagggcactgctttctggggaacaggcaggactttggactgagaaagggacagcacggactgaggaggaaacatgacagttggaggaagaggctggtgaggctggtgcatccaagactggagcagaggcagaggaaggtgcagattttcaacatcagtgagagtcaggctctggctttcagtaaagggctcaactggatatttagggaagggcatttctttgtgcttaggagccatagcctccttcactttggagactcccattacttcaggctgaaggaaaggcggcaccaccacaggggtttgagtaagacgagggatgttttgtgggacgctgttacggatgggc

SEQ ID NO: 12365 - DNA, 453 bp, Bos taurus
  unsure (375): unsure at all n locations; Clone ID: 53-LIB2809-032-Q1-E1-F10
gccatgagcgcgggatgcccctatcaccaagatagaacttgtgccgtctcattccactgcgacactgattgaggagcccaccgaagtggaagacccctgggacctgcccgagcttaaggacacggggctcaagtggtcagagagagacaccaaagggaagattctctgcgtcttccaagggattgggaaatttattttacttctggtgtttctctacttcttcgtgtgctccttggatgtcctgagcagtgccttccagctggttggaggaaaggtagctgggaaattcttcaacaacaactccatcatgtctaattccgtggcggggatggtgattggggtgctggtgacggtcctggtgcagagttccagcanctccacgtccatcgtcctcagcatggttgcctcctcaatgctgccggtgcatgctgccatccccattatcatgggagc

SEQ ID NO: 12366 - DNA, 315 bp, Bos taurus
  Clone ID: 53-LIB2809-032-Q1-E1-F2
acaagcttatttttttttttttttttttttttgccttaaaatgtaatttattgaaaagaagaaagacaaaatctcagttaatgcacacaattatttgatatgatggcacttacaggagaagtgattcaaaggcttttaaaacattttccatacagaaatttaatgaagactttaattccctttgactcagtggcctttataccagcatgatactactggaatttacgtaacaagctgttaggacaatttcacttaatgatgttacactatctaaaatacagtagagaactcaagaagaaagagtgccttcaattt

SEQ ID NO: 12367 - DNA, 237 bp, Bos taurus
  Clone ID: 53-LIB3057-001-Q1-K1-F2
tcgtccagcctgcagacaggtggtctctggtggttccaggatctcacactatctgaccccatctacgtattacctctggtggtcacagctacaatgtggggtgtccttgagttaggtgctgaaactggcatgcaaagttctgaccttcagtggatgagaaattttatcagactaatgcccctggcagtcttgcccataactatccatttccccacggcagtgttcatgtactggctc

SEQ ID NO: 12368 - DNA, 369 bp, Bos taurus
  Clone ID: 53-LIB3057-002-Q1-K1-F10
cagacggctgccgctactgccgcaggaggcgcgaggagataaagacattcagatggcagatgacagtttttcagatggggttccttcagattccttggaagctgctaaaaatgcaagtaatacagaaaagctcacagatcaggtaatgcagaatcctcaagttttggcagctttgcaggaacgacttgacaacgtctcccacactccttcaagctacatcgagactttacctaaagcagtaaaaagaagaatcaatgcattgaagcagctccaggtgaaatgtgcgcatatagaagccaagttctatgaagaagttcatgacctggagaggaagtacgcaaccttataccagcctctcttttacaagag

SEQ ID NO: 12369 - DNA, 355 bp, Bos taurus
  unsure (306): unsure at all n locations; Clone ID: 53-LIB3057-003-Q1-K1-F2
ctggtgaagtgtgtttcttgaaatcatcaccaccatggacagcaaaggttcgtcgcagaaagggtcccgcctgctcctgctgctggtggtgtcaaatctactcttgtgccagggtgtggtctccacccccgtctgtcccaatgggcctggcaactgccaggtatcccttcgagacctgtttgaccgggcagtcatggtgtcccactacatccatgacctctcctcggaaatgttcaacgaatttgataaacgggatgcccagggcaaagggttcattaccatggccctcaacagctgccatacctnctcccttcctacccctgaagataaagaacaagcccaaacagacccacca

SEQ ID NO: 12370 - DNA, 389 bp, Bos taurus
  Clone ID: 53-LIB3057-004-Q1-K1-F2
gcgagcggccgccctttttttttttttttttttttttttttttttttttttttttttggtttatttcttggaacagaaatttattctcagaataatgcacaaaagcataggttgaggctgccgttgggaggcctccctcccttcctttgccggcaccttccctcctttttgaatgccagggagaacacagttgaaggaaacatgcaatcacaaacaatgatcaactttaaagacaaaaggtttggtccaaaagaactcaacataattaatccaattaccgtgaagagcttcactgagtaggattaagatattgcagatgtagtgtttccacagggcggctcttcagtgcaccaggggggcctgcttgagggagatgaggacagaacgca

SEQ ID NO: 12371 - DNA, 419 bp, Bos taurus
  Clone ID: 53-LIB3057-006-Q1-K1-F10
ggagccgagcgggagcgtctgggggacctcgtccgatcgagtagccgaggcaccgcccgcgtcccgccgccgcgtcccggcgactcctgcgccgcccaggagagcgagctccgagcatcttgtagtgcggccactcttcggggccaggagcggggaaaccgagtgcaagaaacccccggacccgaactcagcctcttcccgccgcgcgaatcatcatgacccacttcaacaagggcccttcctatgggctctcggccgaggtcaagaacaagattgcttccaagtatgatcatcaggcagaagaagatctccgcaattggatagaagaggtgacaggcatgagcattggcgccaacttccagctgggcttgaaagatggcattatcctctgcgaactcataaacaagctacagccaggc

SEQ ID NO: 12372 - DNA, 398 bp, Bos taurus
  Clone ID: 53-LIB3057-007-Q1-K1-F2
atcaaacacgcaaggccgtcagactacctattgtagatattgcaccctatgatatcggtggtcctgatcaagaatttggtgcggacattggccctgtttgctttttataaaccaaactctatccaaagtcccagaaaaagcttcacactccatatgttccttttgttctaatcttgtcagccagtacaagtgaccaagttccagttatttatttccaaaattcttgggaaaaaagtgtaatttgaccaaaaaaggatatttgtttttgctattacaccaaatacagttcaaatgcttattgttctatttttttaccaatttcaatttcaaaatgtctcaatggtgctataataaataaacttcaacactcttccaataacactgcgttacattctttg

SEQ ID NO: 12373 - DNA, 440 bp, Bos taurus
  Clone ID: 53-LIB3057-009-Q1-K1-F2
gaaaaagaagctcctgaagctattgtttacaatttctggtagtccgtttaacacattcaacccatacaatcacttttacagtatccttatttattatactcatagattttttgtgaatgtaggtaaagttctctccatccttaaaattgtggaattccaaaattgatttcatgtgattttgtagagtttaggactagtgctgagtatatgtggaggatttctattcctgtgtgatatattattattaatgcatgtggtatcatgcttgtctttgaatatctatagttgctaaattgtgaagtcatatggagcttttgaattatttttgacctcttactgctactttgtatgctatattcaaacccagaaaaaaacccctatattcccaagccataaaattaccaaaagattcacatcctaaaacgttgctcagcaaaagt

SEQ ID NO: 12374 - DNA, 288 bp, Bos taurus
  Clone ID: 53-LIB3057-010-Q1-K1-F2
gccagtctattgctgcccccagcaagacctctgcaagtataggcactctctgtgctgaggccagaatgtatggtgttctcccatggaatgctttccctggcaaggtgtgtggctccaaccttctgtccatctgcaaaacagctgagttccaaatgaccttccatctgtttattgctgcgtttgtgggggctgcagccacactggtgttcctgctcaccttcatgattgctgccacttacaactttgccctcctgaaactcattggccgaggcaccaagttttgatctt

SEQ ID NO: 12375 - DNA, 410 bp, Bos taurus
  Clone ID: 53-LIB3057-011-Q1-K1-F2
gcaaattctattaaaaaggaaattgaagaagaaataacagaagacaaattaagagagaatgatacagaaaataaggatgtagatgatgacagtgaaactgcagagaagaaggaaaacgaactactactggggaggaaaaatacaccaaagcaaaaggagaagaaaattagaaagcaggaggattctgacaaagactcagaggaagaggaagagaaaagccaagagagggaagaaactgaaagcaaatgtgactctgaaggggaggaagatgaggaagacacagaaccctgcctaacaggcaccaaagtgaaagtaaaatatggacgggggaaaacgcataagatctacgaagccagtattaaaagcactggaattgatgatggagaagtttatacttggtacattactat

SEQ ID NO: 12376 - DNA, 434 bp, Bos taurus
  Clone ID: 53-LIB3057-012-Q1-K1-F2
cgagcgagctgagtggttgtgtgattgcgtcccggagaccggtagcgcttgcatcatggcttaccaactgactgaaaaacagattgccagaattcaaagaagctttttcactatttgacaaggatggtgatggaactataacaacaaaggaattgggaactgtaatgagatctcttgggcagaatcccacagaagcagagttacaggacatgattaatgaagtggatgctgatggtaatggcacaattgacttcccggaatttctgacaatgatggcaagaaaaatgaaagatacagacagtgaagaagaaattagagaagcattccgtgtgtttgataaagatggtaatggctatattagtgcagcagagcttcgccatgtgatgacaaaccttggagagaagttaacagatgaagaagttgatgaaatgatc

SEQ ID NO: 12377 - DNA, 322 bp, Bos taurus
  unsure (243): unsure at all n locations; Clone ID: 53-LIB3057-013-Q1-K1-F2
cactggggtgatcctgctggccgttggagtctggggcaaacttactctgggcacctacattctcccttatcgccgagaactccacaaatgctccctatgtgctcatcggcactggcaccaccatcgtcgtgtttggcctgtttggatgctttgccacatgccgtggtagcccatggatgctgaaactgtacgccatgtttctgtccttggtgtttctggctgagctcgtggctggcatttcanggttcgtgtttcgtcatgagatcaaggacaccttcctgaggacttacacagacgccatgcagaattacaatggcaacga

SEQ ID NO: 12378 - DNA, 375 bp, Bos taurus
  Clone ID: 53-LIB3057-014-Q1-K1-F10
tcgtctaaaacgccaaccggccgcctttttttttttttttggaacctggaaaggtttaattgctaacgtacaaacagttttaaaagtcggaatacctggcgccatcactgcctgggcgaatcctcacccaggctgcgaggcggtaggagggcagaagagaggccttcagggtcaactttccgcggagagaggcccctgcccgctgcgccctcactggcccttcttgtgggcgttcttgatgatggcgtttttgaacagcgtgacaaggggcgtttggctcttctcggaggtcatgaacccgccgtagcgcttgtccttgggcgggctgccccaacggaagtgttccatcttatagggcccccgagtccttcttct

SEQ ID NO: 12379 - DNA, 322 bp, Bos taurus
  Clone ID: 53-LIB3057-014-Q1-K1-F2
cggaacgcccgcggccaagcttgatagccatggccctcaacagctgccataggtgggcccttcctacccctgaagataaagaacaagcccaacagacccaccatgaagtccttatgagcttgattcttgggttgctgcgctcctggaatgaccctctctatcacctagtcaccgaggtgcggcgtatgaaaggagccccagatgctatcctatcgagggccatagagattgaggaagaaaacaaacgacttctggaaagcatggagatgatatttggcccagttattcctggagccagagagactgagcccttaacctgtgt

SEQ ID NO: 12380 - DNA, 406 bp, Bos taurus
  Clone ID: 53-LIB3057-017-Q1-K1-F10
gagactaccaaatctacaacgtagttgtaaccgcacacccttttgtaataatcttcttaagaggattaccaaatattagtgggagattccggaaactgacttgttcccctaataattggtcctcccaatagcttttccccgaataaataatataagcttctgactcctccctccttaattcctactactcctggattccttaatagttaaacctgggccaggaccagcctaaaccgtgtaccctcccttagcaggcaacctagcccatgcaggaccttcagtagatctaaccattttctctttacactaagcaggagtttcctaaattttagaacccttcaactcatttccaacaattatcaacataaagccccccgcattgtcacaatcccaaacccttttgttc

SEQ ID NO: 12381 - DNA, 437 bp, Bos taurus
  Clone ID: 53-LIB3057-018-Q1-K1-F10
acggatgacatgcttaagagaggcatactttaagcatctggattcagcataccatggtgtccctcgggcattcgtggctccgaagcccagtacacatctcagcagtacagtgaggagcttacacaaggatgactcttccaagcctgtgcacctgactgtctatcttggctacaaggctggcatgacccacattgtgacgaatgtcaataggccagggtccaaggtgaacaagaaggaagtggtggaggctgtgaccatcgtggagactccgcccatggtgattgtgggcatcgtgggctacgtggaaacaccccgaggcctccggacctttaagaccatctttgctgagcatatcatcgacgagtgcaaaaagcgcttctacaagaactggcataagtccaagaagaaagccttcaccaaatactgcaagaagtggc

SEQ ID NO: 12382 - DNA, 439 bp, Bos taurus
  Clone ID: 53-LIB3057-018-Q1-K1-F2
ggctgcccggctccccgaggcagtgggtcctgctgctgctggggctgctgctcccccccggcgcgcctttctggctctgcaatgtgctgttccccccgcacaccacgcccaaggccgagctcagtaaccacacacggcccgtcatcctcgtgcccggctgcctggggaatcagctggaagccaagctggataaaccgagtgtggtgaactggatgtgctaccgcaagactgatgactttttcaccatctggctagatctcaacatgttcctgcccctttgggtagacttctgtatcgacaacaccagggttgtgtacaatcttattttttgttcttttttcttttccttttttttttttatctattttttattttattttctttatttctttttttttattttttttattttttttatttttttttatatttatttttt

SEQ ID NO: 12383 - DNA, 362 bp, Bos taurus
  Clone ID: 53-LIB3057-019-Q1-K1-F2
aacgacttctggaaggcatggagatgatatttggccaggtaattcctggagccaaagagactgagccctaccctgtgtggtcaggactcccgtccctgcaaactaaggatgaagatgcacgttattccgctttttataacctgctccactgcctgcgcagggattcaagcaagattgacacttaccttaagctcctgaattgcagaatcatctacaacaacaactgctaagcccacattcatcctttccatttctgagatggttcttaatgatccattccctggcaaacttctctgagctttatagctttgtaatgcatgcttggctctaatgggtttcatctttaaattaaaacagaactc

SEQ ID NO: 12384 - DNA, 326 bp, Bos taurus
  Clone ID: 53-LIB3057-021-Q1-K1-F10
attgcatagctatcagtggatacttatgcttaagctctttagaaagaacattttaaaggtctatgtaaactgttgagtatttaaaatagcccacttcattttaagggtcttgtctaccttcattagtcttcaaagaacagacatttgctaccaaagtaaatccgtattttgaatgtgcttctcttgatttttgttattagccagttcctgtaatcattttcaccagatcttgaggctaatcataaggaagctgtttcttttaaaataacaaaccaccaccaaatatttaaatgtacataatagttaaatgtctggctgatcttatt

SEQ ID NO: 12385 - DNA, 347 bp, Bos taurus
  Clone ID: 53-LIB3057-021-Q1-K1-F2
ggaggagtaccatcgcccctgcgacgaggttggcttcaatgctgatgaagcccacaatattgttaaagagtgtatagatggggtcttgggaggtgaagattataatcagaacaatatcaaccaatggactgcaagcatagtggaacaatccctagcacatctggttaagttgggaaaagcttataagtatattgtgacctgtgcagtggtccagaggagtccatatggctttcacacagccagctcatgtttttgggacaccacatctgatggaacctgcactgtaagatgggagaaccgaaccatgaactgtatcgtcaatgtttttgccattgctattgtcctgt

SEQ ID NO: 12386 - DNA, 358 bp, Bos taurus
  Clone ID: 53-LIB3057-022-Q1-K1-F2
ctccgcgtcctgccccgtctgtccccttgggtcgccacccgccgtcgccgcgccatgagcaccctgcaaatagtcctgcagggcccgggaccctggggcttccgcctcgtggggggcaaggacttcgagcagcctctcgccatttcccgggtcactcccggaagcaaggctgctataggtaatttatgtgttggagatgtaatcacagccatcgatggggaaaataccagcaatatgacacacttggaagctcagaacaaaatcaaaggctgcacggacaacatgactctcacagtagccagatctgaacagaaaatctgggctcctctggtgacagacgaagggaaacgtcacccat

SEQ ID NO: 12387 - DNA, 189 bp, Bos taurus
  Clone ID: 53-LIB3057-023-Q1-K1-F2
ggtaccgcatctgccatgatgtcagaactcggaagtccttagtcttgatcatccaatgcgtgaagcggcctgactttctttgccggaaactcttttccaggggattgtaatactgcccatctttcctgaagtcccgcctctttgatctctttcatcctttcataagtttttcttttacctgtgctggtc

SEQ ID NO: 12388 - DNA, 234 bp, Bos taurus
  Clone ID: 53-LIB3057-024-Q1-K1-F2
cagggtgtggtctccaccaccgactatatcaattttcctggcaacttccagctatcccggctagacctgatttaccacacagtcatggtatcccactacatacataacctctgctagcaaatgttcaacgaatattatataccgtatacccaatccataactatcattaccatcgccctcaacatcttccataccttcttccttactaccactaaatataaagaacatgcccaa

SEQ ID NO: 12389 - DNA, 422 bp, Bos taurus
  unsure (45),(306)...(307): unsure at all n locations; Clone ID: 53-LIB3057-025-Q1-K1-F2
ctggtgaagtgtgtttcttgaaatcatcaccaccatggacagcanaggttcgtcgcagaaagggtcccgcctgctcctgctgctggtggtgtcaaatctactcttgtgccagggtgtggtctccacccccgtctgtcccaatgggcctggcaactgccaggtatcccttcgagacctgtttgaccgggcagtcatggtgtcccactacatccatgacctctcctcggaaatgttcaacgaatttgataaacggtatgcccagggcaaagggttcattaccatggccctcaacagctgccatacctnnctccttcctacccctgaagattaagaacaagcccaacagacccaccatgaagtccttatgagcttgattcttgggttgctgcgctcctggaatgaccctctctatcacctagtca

SEQ ID NO: 12390 - DNA, 285 bp, Bos taurus
  Clone ID: 53-LIB3058-001-Q1-K1-F2
tcgtggtcattgctgatgctctgaagctgtttacgaagcagaagcgcaagctgggtcgctatatctccaatacttttaaccctgctaagcccgatgcctaggattctgacggcagcattgcctcctgggagctgctggtggaggggaagctcctggatgaccccagctggcatatgcggaagttctcgtccttcatcaagagctcggtcattgatctggacatagacctttatggccctgacaaccacctggtggagtggcacctgacacccaccactcacgaga

SEQ ID NO: 12391 - DNA, 353 bp, Bos taurus
  Clone ID: 53-LIB3058-002-Q1-K1-F10
cgtacatacattttatattaacggaagaccaatatcaatacattagaacttcagaaatagtgcggatctggatcaaggtagaagcacattgggctgcaaataagatatactgatatctaactgctttcgcccacataaaaagcttgtatttacaggaaacctggctacctctataattatggttgaaagtatcgattataatgccacaagatgataatgtgtagacagtagtgtgtatctgacgaagtctttctcaaaagtgatgcacttactatgttaaagagacatagcatattcacagcatcaggggtgttaaatactggccaatcacgattctaggtgatcagcacata

SEQ ID NO: 12392 - DNA, 424 bp, Bos taurus
  Clone ID: 53-LIB3058-002-Q1-K1-F2
ctccgctgccccgccgcctcgtggtcctcgtcctcctcgccgccgccgtcgcggccacggcgtccgccgcgtccctcagcggcgcggcgaacgacctgctgcccaagtacggcctcccgaaggggctcatcccggactccgtcacctcctacagcttcgacgaggccacgggcgccttcgagatccacctcgccagcacctgctacgtccacttcggctcccacctcgtctactacgagaggaccataaccggcaagctctccaggggcgccatctcggacctctccggcgtccaggccaagaagctcttcctctgggtctacgtcacggggatggtcgcgcaccccgaccagggcaccatcgagttccaggccggcttcgtctcggagtcgctatcagcctccatgtttgacgaggtgcgcac

SEQ ID NO: 12393 - DNA, 300 bp, Bos taurus
  Clone ID: 53-LIB3058-003-Q1-K1-F2
ggaaaacacatgttttaaatgatacatctgatgagatggatctcattgatatcttcaggacattctatccaaatgcagaagaatccttcttctcaagtgcacatggaacattctccagaacagaccacatcttgggtcacaaatcaaacctcagtaaatttaggaaaattgaaaccatatcaagcatcttctctgaccacaatattgtgaaactagatatcaattaaaagaaaaaactgtaagaaacacaaacgtggagattaagcaacacgtttctaaataaccaacaggttactgaag

SEQ ID NO: 12394 - DNA, 371 bp, Bos taurus
  Clone ID: 53-LIB3058-006-Q1-K1-F10
ggccttgccccttcacgagctgccacaaagcaggcaggtggatttcttggccctccacctccttctgggaagttctcttgaaatcaagaagaaccctatatttctgtcattcttttcagatattcaaaccagacccagcaactattttacagcaagagccataggcagccttagcacttgggctcatttctagatttgagttatttttaggctttttggggggtataatttgaataagaatggtacctaacaaacgggatagtgcttttggttacagattaatttttttttaacaagtgtgttgattaattaagcccaagtgatggttatgtaatgggaaacaaattcgtattttgcttacatgaatatat

SEQ ID NO: 12395 - DNA, 418 bp, Bos taurus
  Clone ID: 53-LIB3058-009-Q1-K1-F2
ctggcccagatgtcaaagcagttggacatgttcaagaccaacctggaagaatttgccagcagacacaagcaggagatccggaagaatcctgagttccgggtgcagtttcaagacatgtgtgccaccattggcgtggatcctctggcctctggaaaaggattctgtgtctagatgctaggctttggagacttttattacgagctgcgtgtttcgattattggatttttctctttttatgttgtgttttttcttttttttatttcctttgttatttcttttttttatttctttattttatttttttttttatttttatctattttttattttttgtttcgtttttatttatctgtctttattttttatatttattttttttctttatttttttgtttattttttattttatttttatttc

SEQ ID NO: 12396 - DNA, 420 bp, Bos taurus
  Clone ID: 53-LIB3058-010-Q1-K1-F10
cattattgctcctcgccattttcaagaaagcattaccagctcttccagtctctatcacctttgggcttattttctactttgccacagattatcttgttcagccctttatggaccagttagcattccatcagttttatatctagcatatttacagttagaatctcatggatttttctcctttgactataataaaatctggggcggacaaaggtgattttccggtgtccacatctaacaaagtcaagattcccagctggactttttgcagcttccttccaagtcttcctgaccacctgcactattgggcgttggaaggaggcttctacagaaaacggttttgaacacgtcattgtggtgaactgagtccctcaatgcagaaactaccagatctgagggacaaggacaaggcaaagccatggg

SEQ ID NO: 12397 - DNA, 436 bp, Bos taurus
  Clone ID: 53-LIB3058-011-Q1-K1-F2
tcgcggacgcgtgggcggacgcgtgggcgcgagcggccgtccttttttttttttttacagtagggggtttaactggaattgtcttagccaactcttccctcgatattgttcttcacgacacatactacgttgtcgcacatttccactatgttttatcaataggagctgtatttgctattatagggggatttgttcattgattcccactattctcaggttatactctcaacgatacatgagccaaaatccacttcgcaattatatttgtaggcgtcaatataaccttcttcccacaacactttctaggactatctggcatgcctcgacgatactccgactacccagatgcatacacaatatgaaatactatctcatcaataggctcattcatttccctaacagcagttatactaatagttttcatcatctgagaagc

SEQ ID NO: 12398 - DNA, 272 bp, Bos taurus
  Clone ID: 53-LIB3058-013-Q1-K1-F10
tcacgaaaagagaaactgcctgttctcagaaaccttgaacagaaaagctagccttagtgggtaataaggtgcaaagaaaaaaaatagcttctacctgtcgagtcctcagtctccccttttcttccagttctgttgtgtccaagctgagtttcctcttccagggtgaggctagaactatgcctttttcaacttccatcccctccatctgtgatgtcaatcagctccactaggaaaagtctcgctggaaatgtttcttaaactttcacctaatt

SEQ ID NO: 12399 - DNA, 413 bp, Bos taurus
  Clone ID: 53-LIB3058-013-Q1-K1-F2
caggcccttgccagcatcttctgtccacacaccaagccttgggtcagtctggctaaagctcttggggcgctgatgcaggcctgggctgggtctcccaaaggggccatccaggtggtgacacagggatcatccctgaagaactccgggagctgcctggcccctgccgtcatcatcggcctcctgaaggacgcgtcccagcagtcgaatgtgaacctggtgaacgccatgctgctggtgaaagaggccggcctcgatgtgaccaccttccacaaccctgccacaccagggaagcaggactttggggaatgcctgctgaccgtggccctggcaggtgccccctaccaggctgtgggcttggtccagggcaccaagcctgtgctgcatgcactcaacggaactgtcttcagacccag

SEQ ID NO: 12400 - DNA, 395 bp, Bos taurus
  Clone ID: 53-LIB3058-015-Q1-K1-F2
cggacgcgtgggcatctctatgccagcttgccaccctaggctccagcagcattaagcctgtcagacagcacccaccctacacccagcaacactaacagggcactcaccccaaagggtggcctggaggggcatggccagcagcttgggctagaattgggagggaggagagaaagcagggagggcagagagacctcataaatcaccctgccctccatatcccgaacctctgttgtcatggcaactgttgccagagctggaggtgtctggggcctccagaatggggccttcgagtttccttgagctgctagaggaaaactgagagtctgagacaagcagaggaagtccccaaggcaaggtggccttggccagaagcttattcttctagactgactctg

SEQ ID NO: 12401 - DNA, 399 bp, Bos taurus
  Clone ID: 53-LIB3058-018-Q1-K1-F2
gcagtttctcagacagtaaagaatccgcctgcagtccatgagacctgggtttgatccctgggtcaagaagatcccctggagaagggagtggttacccactccagtattcttgcctggagaattccatggacagagaagcctgtgggctacagtccatgggatcgcatagagttggattcgactgagcgacgaacactttcacttttttttgtcctggccctgcctctggcatttcactaaatctgtgtttttgccacagctgacctttctctgtgcactgtctgatcagtattgaactgattctctttcactgcagtgtcagatcatgataaactgtaccttggaaagtattcgtatttacatatctggatcttcctactacacatataaacacctgtt

SEQ ID NO: 12402 - DNA, 356 bp, Bos taurus
  Clone ID: 53-LIB3058-019-Q1-K1-F10
cgactgcagtactcactggactatgatttccagactggtcagctgctggtgggcatcgtgcaagctgagggactggcagccttggacataggtggctcctctgatccctacgtgcgggtctacctgctgccagacaaacggaggcggcacgagaccagggtgcatcggcagacgctgaaccctcactttggggagacttttgccttcaaggtcccctacgtggagctggggggccggatcctggtcatggcggtgtacgacttcgaccgcttctcccgcaacgacgccatcggggaggtgcgagtccccatgagctccgtggacttggggcggccagtgctggcctggcgcgagct

SEQ ID NO: 12403 - DNA, 467 bp, Bos taurus
  Clone ID: 53-LIB3058-019-Q1-K1-F2
ctcaattttaggagccatcaacttcattacaacaattatcaacataaagccccccgcaatgtcacaataccaaacccctctgttcgtatgatccgtaataattaccgccgtactactactactctcgctccctgtattagcagccggcatcacaatgctattaacagaccggaacctaaatacaaccttcttcgacccggcaggaggaggagaccctattctatatcaacacttattctgattctttggacaccccgaagtctatattttaatcttacctgggtttggaataatctctcatatcgtgacctactactcaggaaaaaaagaaccattcggatatatgggaatagtttgggctataatgtcaatcggatttctaggtttcatcgtatgagcccaccatatattcactgtcggaatagacgtcgacacacgagcctacttcacatcagccactataatta

SEQ ID NO: 12404 - DNA, 323 bp, Bos taurus
  Clone ID: 53-LIB3058-020-Q1-K1-F2
aatttatttacctcttttattacccctgtaattttaggtctccctctcgtaacccttatcgtactattcccaagcctactattcccaacatcaaaccgactagtaagcaatcgctttgtaaccctccaacaatgaatacttcaacttgtatcaaaacaaataatgagtatccacaattctaaaggacaaacatgaacattaatattaatatctctgatcctatttattggatcaacaaacctactaggcctattaccccattcattcacaccaacaacacaactatcaataaacctaggcatagccatccccctgtgagcagg

SEQ ID NO: 12405 - DNA, 389 bp, Bos taurus
  Clone ID: 53-LIB3058-023-Q1-K1-F10
cggacgcgtgggttggagcctcagcagcgatgcgtgtcttgactgtcacgttgctgttcctggcactcagtgcctccgacctggccaagccggggaaattcaaggactgcggtacttgggacggacatatataggaagtgaatgtgagcccatgtcccacccagacttgcaaactgcacagaggacagtcttacagtgtcaatgtcacgttcaccagtaatactcagtctgaaagcatcaaggctgtggtacatggcatagtgatgggcattccagttccatgtcccattcctgagtctgatggtcataagtctggaatcagatgccccatcgaagaagataagacctataactacgtgaacaaactacccgtgatgaatgaatacccc

SEQ ID NO: 12406 - DNA, 425 bp, Bos taurus
  unsure (370): unsure at all n locations; Clone ID: 53-LIB3058-023-Q1-K1-F2
ctagaatcaagcattttgaaagtctgtccttgaaggactaatagaaaagtatgttctaatcttgacatgaggactctacactctttaactcccattaccatgtaatggcagttatatttgcagttcccacgttaaagacccgagaatgtatccccaaaagcgtgagcttaaaatacaagactgccatattgtttttttgtcgatgattgtcccagcaaaggctctgggaaaaagtgctggctgtaaatgtcttctcctgcttatccaagtagagattgtttaggaaacttgagacccttggttaaaggtatttttaattaattgggctgactttaaaagttatataccacattttaaatcaggtatatcnttcctgtatttaatggggggttgttgcccctttataaatcgaatagacaagggag

SEQ ID NO: 12407 - DNA, 375 bp, Bos taurus
  Clone ID: 53-LIB3058-026-Q1-K1-F2
agtaactatgactctcttaagtagccaaatgcctcgtcatctaattagtgacgcgcgtgaatggatgaacgagattcccactgtccctacctactatccagcgaaaccacagccaagggaacgggcttggcggaatcagcggggaaagaagaccctgttgagcttgactctagtctggcacggtgaagagacatgagaggtgtagaataagtgggaggcccccggcgcccccccgtttcccgcgagggggcggtgcggggtccgccggccttgcgggccgtcggtgaaataccactactctgatcgttttttcactgacccggtgaggctgtggggcgagccccgaggggctctcgcttctggcgccaagcgccc

SEQ ID NO: 12408 - DNA, 322 bp, Bos taurus
  Clone ID: 53-LIB3058-027-Q1-K1-F2
gtgggggaggagccccctgtctcgttggggaatctgtgccggcgcggcctgtgggctaggtgggcgagcgagcggcagagcgagctagcaagtcgggcggcggcgtgcggcgccgttaaaggcgctgccccgcgcgctcccaggccgtcccgggtcccaggctcttaggagaattcctgggccctaaaagccggtgcggacggaggcgttgtcgtcgctcaagctcgttgcggcgtgtggaaccttagattggcgcctggggtcgggtactgaagttaaaggcgctgcctgttggagcggagatcccggtttgtcttgggcc

SEQ ID NO: 12409 - DNA, 285 bp, Bos taurus
  Clone ID: 53-LIB3058-028-Q1-K1-F2
gatcgcgagcggccgccctttttttttttgttaccagctttacttttgtgataaaaggttggtgttatattttagacgcttaagtcttaccagagtcaaaattatcctaatgtacattatagttttggccttttaggagaaaagtaaaacaaaagcctgatatttatttccaaatgcattgaagaaattaaacaatgttgtgccatatgacaaaaaagtctttcctaaatagtccatctgtttagtactgtattgtgaaatatttgagttctgtttccatacttt

SEQ ID NO: 12410 - DNA, 199 bp, Bos taurus
  Clone ID: 53-LIB3058-030-Q1-K1-F2
gcggcggttttcattgagattgtcttaccctgaccaaaattattgtagcatgactaaagaggtacaagcattccaacaataaggccatgaccactggggcaatcgctgcgatgctgtcctcaagactgtactccaagtgcttattcccctactatgtgtacatcatctgtcgggggctttatgaataaggaaagggagc

SEQ ID NO: 12411 - DNA, 219 bp, Bos taurus
  Clone ID: 53-LIB3058-031-Q1-K1-F2
ctggcgctcactgtggctcagatcatgagctccttactgcaaactttagacttaaaacgaagacagtacggttatcctgtaagcctttcacgtattacctaaatcaaattccttatgactatacattagaaggggacgaatagagtcaaggtattaaacctggtagactctaacgccatttttcagaacatggacagatttttttttgtaacaattttt

SEQ ID NO: 12412 - DNA, 314 bp, Bos taurus
  Clone ID: 53-LIB3058-032-Q1-K1-F2
ccctcatgagagcctgggctgtttcttgtttttttttttttttttttatatttttctatcttttttattttttttttatttttttttttttttttctatttttcttattttattttttattatattttttttatattttttttaatttttttttttattatattttttatattttttttttttatttttttttttattttgtatttttattttttttatttttttttatatttttttttttattttatttattttatattttatatgtttttttttttttattttatatttttttttcttattatatttttttt

SEQ ID NO: 12413 - DNA, 388 bp, Bos taurus
  Clone ID: 53-LIB3058-033-Q1-K1-F10
tcgcgggcaggtcatcaccatcggctatgagttgttccgctgccctgaggctctctggcaggggtccttcctgggcatggaaggctgcggcattcacgaaactaccttcaattccatcatgaagtgtgacgtcgacatccgcaaggacctctacgccaacacggtgctgtccggcgggaccaccatgtaccccggcatcgcggacaggatgcagaaagagatcactgccctggcacccagcacaatgaagatcaagatcatcgcgccccctgagcgcaagtactccgtgtggattggcggctccatcctggcctcgctgtccacctttcagcagatgtggatcagcaagcaagagtaccatgagttcggccccttcattgtccaccgc

SEQ ID NO: 12414 - DNA, 429 bp, Bos taurus
  Clone ID: 53-LIB3058-034-Q1-K1-F10
tttacttgtcagtattctttcagcaaacattctttccattatgtaaatttaaattttcagaggaaattaaatcagagaaaattttcagagtcctttaccttctttgtctttaatctctgtgtcctttggaaaagaagctccgtggccttggtgcctccatagaaagcttaagttgatatcatagctcattaacctcagaggccatgggtaataacgaagcacccccattacaggatggcacgccagtgtgtttttgtaaaatgtgttggtaatcctcattccagtttctaaacaggagcctattccaggaggagtgtgcattgattcattctggtttgaactgtctcctatctgatatgtagatcttttgacttaagagtattgccccctgctggcatttgtgtgggacagtccatcctgctactgact

SEQ ID NO: 12415 - DNA, 436 bp, Bos taurus
  unsure (407): unsure at all n locations; Clone ID: 53-LIB3058-034-Q1-K1-F2
ctcgcgccgcggccgcggagacgtgaatgccttctcgccgcgcccccccaccccgcgcgagccccccgggtccgcgctcgacctcgctgtccgctccctcggcccccatggagaagacggagctgatccagaaggccaagctggccgagcaggccgagcgctacgacgacatggccacctgcatgaaggccgtgacggagcagggcgccgagctgtccaacgaagagcgcaacctgctgtcggtggcctacaagaacgtggtcgggggccgccggtccgcctggagggtcatctccagcatcgagcagaagaccgacacctcggacaagaagttgcagctgatcaaggactaccgggagaaagtggagtccgagctgaggtccatctgcaccacggtcctggaattngtggataagtatttaatagccaatgcaac

SEQ ID NO: 12416 - DNA, 425 bp, Bos taurus
  Clone ID: 53-LIB3058-036-Q1-K1-F10
ctggcttctgtgtgcgggcagctgtgttgctcgttcggccatgcggtggctgtggccgctgggcgtctcccttgccgaggcgctggcagccgggcccgagagggcccctcggggggtctggctgcaacagggtgggcaccagcctgtggcccatgagcagccggaccggtccaggcgaggagctgagcgggaggacgccaagggattgcagcagtacgtgcccgaggggtgggctgagtacccccgggccatccgccctgccggcctgcagcccacccaaccttgggtggacgccagcccctccccggaccgggccagagcgactgggggcagcgggcaagagccccagggcaacgtgacggggccgacacgacagcgcccgcaggtgcagaaccccctgtacccagtgaccgagcgctactatg

SEQ ID NO: 12417 - DNA, 429 bp, Bos taurus
  Clone ID: 53-LIB3058-037-Q1-K1-F2
tcggactagccagccggctaccgttggattagattcccaaagacatgggcttattagagtgctgtgcaagatgtctcgtaggggccccctttgcttccctggtggccactggattgtgtttctttggggtggcactattctgtggctgtggacatgaagcactcactggtacagaaaagctaattgagacatatttctccaaaaactaccaggactatgagtatcttatcaatgtgatccatgctttccagtatgtcatctatggaactgcctctttcttcttcctttatggggccctcctgctggccgagggcttctacaccaccggcgcagtcaggcagatctttggcgactacaagaccaccatctgcggcaagggcctgagtgcaacgtttgtgggcatcacctatgccctgaccgttgtgtggc

SEQ ID NO: 12418 - DNA, 433 bp, Bos taurus
  Clone ID: 53-LIB3058-038-Q1-K1-F2
gctcgtggccaccctggcgctggcctttttctcactgtgtggcaagttcaagaagtgggggcagaatggagtctgcatcttggtcacggccttcctctccgtgctcatctgggtggcttggatgaccatgtacctctttggcaacgctgagctacgacagggagatgcctggggcgaccccaccttggccatcacgctggtggccagtggctgggtcttcgtcatcttccatgccatcccggagatccactgcaccattctgccagccccgcaggaaaacacgcccaactacttcgacacgtcacagccaaggatgcgggagacggcgtttgaggaagacgtgcagctgccacggacctacatggagaacaaagccttctcaatggatgaacacaatgcagctctccgaactgcaagatttcgcaatggcagc

SEQ ID NO: 12419 - DNA, 413 bp, Bos taurus
  Clone ID: 53-LIB3058-042-Q1-K1-F2
tgctgcatcgacaatgaaacgctgtatgaccattggtttcggaaccctgaaactgagcatccacatatacggagacctaaaccacctggtgtcggacaccatgagcggtgtcaccatgtgcctgcgcttcccggaccagctcaatgccgacctgcacatgctggccgtgaacatggtccccttacgacgcctgtacttcttgatgcgcggcttcgcactaatgaccagccgcagcaagcagtacatgcaggtgactgaccgtgcatggactgaccaaatgttcgatgccgccaacatgatggtgcgtgcgaccgacgcaacggacgctatctgaccgtagccgccgtcttccgtggccgcatgtccattaatggagggggatgagcagatgctgagcgtgcagagcaagaaca

SEQ ID NO: 12420 - DNA, 406 bp, Bos taurus
  Clone ID: 53-LIB3058-043-Q1-K1-F10
ctgcaaggctgatcaacatggaaaaccttacttcgtctgccaagatccagcatcttgtcctcctacaaaactccttgaccaagtttgtggcactgacaatcagacctatgccagctcctgtcatctctttgctactaagtgcagaatggagaggacgaaaaaggggcaccagctgcacctggattactttggagcctgcaaaactattcctgcttgtacggacttcgaagtgacccagtttcctctaaggatgagagactggctcaagaatatccttgtgcagctttatgaacctaaccctgagcactctggatatctgaacgagaagcagagaaataaagtcaagaaaatttacctggatgaaaagagactcttggctggagaccattccatcgaccttctctta

SEQ ID NO: 12421 - DNA, 329 bp, Bos taurus
  Clone ID: 53-LIB3058-043-Q1-K1-F2
gacccacgcgttcgcaagtgagcaatcttctcattctggccttcattgaggagtgttctcattgaatgatggtggaggtcctggaaatgaagtctgactagaattttactgcagaggccaagtacatttagtatggcattgagttgtgatatagttttactttgatgtgcattttgaatttcagctacatctagatagacgtaaaatgataattaaaatgctgtaaccaacttatctaataaaatcggcacccagccaaaaaaaaaaaaaaaaaaaaaaaaaaaaaaaaaaaaaaaaaaaaaaaaaaaaaaaaacaatttaaataatca

SEQ ID NO: 12422 - DNA, 411 bp, Bos taurus
  unsure (341): unsure at all n locations; Clone ID: 53-LIB3058-045-Q1-K1-F10
cgccgcgcggcgccgagccctggaaactgcagctcaccgttgacggagactcgttcctgcacttagccatgatccatgaagagaaggcgctgaccatggaagtggtccgccaagtgaagggagacctggccttcctcaacttccagaacaacctgcagcagacgccactccacttggctgtgatcactaaccagccagaaatcgctgaggcacttctggaagctggctgtgatcctgagctgcgagactttcgaggaaatacccccctacaccttgcctgtgagcagggctgcctggccagtgtgggagtcctgactcagccccgggggacccagcacctncactccatcctgcaggccaccaactacaatggccacacgtgtctgcacttggcctctattcatggctacc

SEQ ID NO: 12423 - DNA, 309 bp, Bos taurus
  Clone ID: 53-LIB3058-045-Q1-K1-F2
agggcttcacgcactaaactgacatgataccccgacccaagctctaacctcgctcacgccgctaccatggctacagacgctcacattcccaaagatctggaggaaatacagcggacagctgaccagctgtcctatgagtctgtggaaagcacccatcgtatgcttaaactggatgaatgagagtaaagatgctgtatcagggactctggcatgatagatgaacaaggagaacaactgaaacgcattgatgaacggatggaccaaatcaataatgacatgtatgaagcataaaagaatccgacgtgatct

SEQ ID NO: 12424 - DNA, 434 bp, Bos taurus
  Clone ID: 53-LIB3058-046-Q1-K1-F2
gcaacggtgcccaccctccggctctctttctgcttttctgcgcctccgctccgctctccgcccgccgccatgacggaacaggccatctccttcgccaaggatttcctggccgggggcatcgccgccgccatctccaagactgccgttgccccgatcgagcgcgtcaagctcctgctgcaggtgcagcacgcaagcaagcagatcgcggccgacaagcagtacaagggcatcgtggactgcatcgtgcgtatccccaaggagcagggcgtgctgtccttctggcggggcaacctggccaacgtcatccgctatttccccacgcaagcgctcaacttcgctttcaaagacaagtacaagcagatcttcctgaggggcgtggacaagcgcacgcagttctggaggtactttgcgggccacctggccttcggcggggc

SEQ ID NO: 12425 - DNA, 399 bp, Bos taurus
  Clone ID: 53-LIB3058-047-Q1-K1-F2
tcgcggactcgtgggcggactcgtgggttttagatcgcgagcggtcgcccttttttttttgtttggttttttttacaaaaataaagtttatttaaattctatatatacacatacacacacacagagtaccatacatttacttattacataccaattctgcttctcaactacaaaattatatatacagtgtaaatagtggtaagaattcttaaagtcccctgtacttctttcatcctaagtctcatacttgttttccacatacaagtggactgggacttaaaatccacatggacagggaggcctggcgtgctgcatttcatggggtcgcaaagagttggacacgactgaatgactgaactgaactgatgaagtataagcagaataaaaaccttttactta

SEQ ID NO: 12426 - DNA, 437 bp, Bos taurus
  unsure (333),(380),(394): unsure at all n locations; Clone ID: 53-LIB3058-049-Q1-K1-F2
agccagtcaggcctcatgtctgcaggttctgtagctgggtcaaccaacagcccatccaaagtgtttttaaaaaaggaaaaattcagaaagttccaaaaggcaaagtttgaatttgccgtgtgctgacaacaatttacacagcatttccattgtattaggtatcataagtaacgtagagataattcatggtacacaggaggatatgcggaggttacatgcaaatacagatggccctggaactcaggggtaggaggggagggggttaggcacatggacacgagcacagtcggaaatctacatatactcaagcacctgcagactctggtatcctgnggggtcccagagccaactccccatggataccaagggatgactaactntaattccaaatcanaactatcagaattgtatgcctgtcgggtatgcaactgctgcag

SEQ ID NO: 12427 - DNA, 203 bp, Bos taurus
  Clone ID: 53-LIB3058-051-Q1-K1-F10
gtcaaggttatctcctggtactacaactagtggggctactcgcagagggtcgtcgacctcgctgacatctgcgccaaccagtggaagtgaagcgttgcattgtaatagcactttgtaactcctcacccttcacagggctttgggattcaccccgaaatgactcactttcggtgaaattcacccgttatcggctaggtcgtttt

SEQ ID NO: 12428 - DNA, 382 bp, Bos taurus
  Clone ID: 53-LIB3058-052-Q1-K1-F10
gactagttctaaatcgcgagcggccgccctttttttttttttttttttttttttttttttttttttttctattcacagaacggtttattgacctacctcacctggctggccacacggcccttgggccaggggaagtatcagtctagttgcaattcggctgggccacagcctttgccctgcaaagagggccccagaggcaggagagaacgctggccagtgcagccctgagcacaagagagccccagcagaggtccagactcaactccacttgatgttcttgtcctcctcggtcatggccggcgtgtcagtgacaaggccggtgccgatggtccggttgccatcccgcagggtgaaacgctggcctttctctaagatcattggc

SEQ ID NO: 12429 - DNA, 417 bp, Bos taurus
  Clone ID: 53-LIB3058-053-Q1-K1-F10
cggttgcatgtttgcttttgatgtatccctttgtggagttagcactttggggccaatgaagaaatgcagcattcactctccctgtcttccccttccctcagcagaaatgtgtttgtcagcaagtcgtgaattccaactgctgccttttttaaaacccacaaaatgctgattcagttcaagattaatgcaaatgtctcaaaactgggtttctgatatttgtaaatgttttttccttattagataagaatgtatgaccattaaagttgttaggattattttgcttttgaaaagagaaggtggacagaactacaatccagcatcttttattgcattggaaagactggcaaaatcttttggaagggttgggagatgcagctggaatagtactttggaaaatatacaatcaagatatctcat

SEQ ID NO: 12430 - DNA, 292 bp, Bos taurus
  Clone ID: 53-LIB3058-053-Q1-K1-F2
gattcgcgagcgctcttcggggcggcattccgtgcggcgctggaggcctggcccgccttgcagatcgctgtggagaacggcttcggaggtgtgtatagccaagagaaggctgagtggctcgggggtgcagtggaggagtatttcttccgcaatgctgacttggagctagatgaggtggaggacttactcggggagctaatgatgaacgagtttgatacagttgtggaggatgggagtctgtcccaggtgagccagcagcatctgaccatgttccaccactttcagaagggtg

SEQ ID NO: 12431 - DNA, 389 bp, Bos taurus
  Clone ID: 53-LIB3058-056-Q1-K1-F2
tcgcggacgcgtgggcggacgcgtgggtcgttacgtggtgcacggcggcaccatggggtccagcaacttgtagctgatttttgacagcgtggggcacttcggcagataccaaatattcctctattttatatgtgccttccagaatatctcttgtggtatccactacttggcttctgtgttcttgtcagtgtccccccagcatacctgtaggcccccaggcaatgtgagtcaggttcttttccaagacctctctacttggcagttggaggacatctggacccagttctccgtaagccgtgaggatcgcattctcgtgcagctgcaggatggggagatcttggtagcttaccatgtgtcagatagttccgtagggatgaccagtcgagcct

SEQ ID NO: 12432 - DNA, 365 bp, Bos taurus
  Clone ID: 53-LIB3058-058-Q1-K1-F2
cggacgcgtgggccagcatgctcctcatggtttgtgtttgatgggccagtgactcccatgggcgtcagccctgccccagcagtggtccgggacgtgggctccagtgtgtgggcagccggctaccccagcacctttgcttcagaggagaaaggctgggccaagtttgccgacttccagactttctgttgctctgagtcagggccgaggtgcagctccccagtggacactggccacggtgacacccaggctggcctgaaccagggcccacagagagcccttggtgcctggagcacgtgtgtccccaggaaggcacccctggcggctgccagcagactctaggatgagcataacgcggttgctgcctt

SEQ ID NO: 12433 - DNA, 405 bp, Bos taurus
  Clone ID: 53-LIB34-001-Q1-E1-F10
aggaaatgggaaaaggagctgcatcatttacaggaacaaaatctttcaaatgcatttttagataaggaagaattttacataggctccaagtacaagaaagttgtgtatcggcaattcactgacagcacatttcaagttcctgtggagagaaaaggtgaagaagaacacctggggattctaggtccacaacttcatgcgaatgttggagacaaagttaatattatctttaaaaacatggccacaaggccctattcaatacatgcccatggggtgaaaacagaaagttctacagtgactcccactgcaccaggtgaaactcgcacttacatatggaaaatcccagaaagatctggagctggaagggatgattctccttgtattccatgggtttactattcaactgtg

SEQ ID NO: 12434 - DNA, 355 bp, Bos taurus
  unsure (339): unsure at all n locations; Clone ID: 53-LIB34-001-Q1-E1-F2
gttgggtgcgcccctggggcccaggctccccgaggctcctccggtcacttctccacccttggccggagtcggcaacgaggaggacttgagaactgaggaagtagaggagtcaaccacagcgtcttcattaggagctcagaccctccccagcttgggcacagttggcacgtgggatgagagtgtttggagccctgggagcagcgtgaaagagcgaggcctgaaggggcagaagggagagcctggcgctcagggcccccctggccccatcggcccccaaggtcctgcaggcccagccatagacagccatgaggcacagcctgtttcctggacacagggacnccctgggcccccggga

SEQ ID NO: 12435 - DNA, 417 bp, Bos taurus
  Clone ID: 53-LIB34-002-Q1-E1-F10
cggacgcgtgggccacttcaatcttaccacgggagtgttcacctgcaccatccctggcgtgtaccgctttggctttgacatagagctattccagcatgctgtgaagctagggctcatgaagaatgacactcaaatcctggagaaggagtccaaggccaaggacaattataggcatctttctggaaatgtcgtcttgcagctgacattgggagacagagtctggctggaatccaagctagacacaacagagactgagaaaggaccaattcaaagtatgttctttgggtatttgcgctatggaaattatcctggctaaggggtaatggcacccttgaattcctcaagtggtcctaaacctcacagcaaacttccctccctgccccagtacttttcagtgatcattgaatacattacgtt

SEQ ID NO: 12436 - DNA, 418 bp, Bos taurus
  Clone ID: 53-LIB34-002-Q1-E1-F2
agaacagagactccaacaagaacacactcatcatctacctggacaaggtctcacacacagtggaggactgtctgtccttcaaagttcaccagtactttaatgtcggacttatacagcctggggcagtcaaggtgtactcctattacaacctggatgaaacttgtatccgcttctatcacccggataaagaggacggaatgctgagcaaactctgccacaaagatacctgccgctgtgcagaggagaactgcttcatgcaccacacggagaaggaggtcactctggaggaccggctggacaaggcttgcgagccgggcgtggactatgtgtacaagaccagacttatccagaagaagctggaagatgactttgacgagtacatcatggtgatcgagaacatcatcaaatcgggctcgga

SEQ ID NO: 12437 - DNA, 372 bp, Bos taurus
  Clone ID: 53-LIB34-003-Q1-E1-F10
cggacgcgtgggccacaactccacgttgagccgcctcttcttcacggtcttcctcttcctcggggtgctggtgtgtgtcatcatgctgagtcctggcgtggagagccagctctacaagctgccctgggtgtgtaacgaggggaccggatcccacgtcgtcctgcagggccacatcgactgtggctccctgctcggccaccgcgccgtctaccgcatgtgctttgctatggcggccttcttcttccttttctctttgcttatggtctgcgtgcgcagcagtcgagaccccaaggctgccatccagaacgggttttggttctttaagttcctgattttcgtgggcatcactgtgggtgccttctacatccccga

SEQ ID NO: 12438 - DNA, 412 bp, Bos taurus
  Clone ID: 53-LIB34-003-Q1-E1-F2
agaatgctggcaacacgcacagcagaagggatggcctatgtatgcacagttactgattgatttattcaaatatttagcgcctttccttagaaatgtggaactcaccaaacctatgcaaatcctctacaagggcactttaagggtgctgctggttcttttgcatgattttcctgagttcctttgtgattaccattatggattttgtgacgtgatcccacctaattgtatccagctaagaaatctgatcctgagtgccttcccaagaaacatgaggctcccagacccattcactcctaatctgaaggtggatatgttgagtgaaattaacatcgctccccggattctcaccaattttactggagtgatgccacctcaattcaaaaaggatttggattcctatcttaaaactcga

SEQ ID NO: 12439 - DNA, 416 bp, Bos taurus
  Clone ID: 53-LIB34-004-Q1-E1-F2
agcagaacctgaagcagctgtcatcagtaacggggagcattaagatacttctgtgaggtggaggacttcagggggggttgggggagcgtatgggaacggttgggggaacgggacgtctggggtcaattttaaaagattacatgttgcttaaatttttacgtgactgacatggagcctggaaaactatcgtgtccttgagaaagtctctttgctcagtttgctaacatgcttcctgttgtgatctagccaatgcttactgtactcgaatgatggatgttaagggctctgtaagacttcatacctctctggccatgtgtatgcatgaagcttagtttttaaatgtagcctgaaatcgtgcacttctggtgaggaaagcagcggttacagtctccgattttaattttttttaaacatgt

SEQ ID NO: 12440 - DNA, 380 bp, Bos taurus
  Clone ID: 53-LIB34-005-Q1-E1-F2
cggacgcgtgggcggcgggggaccgccccccggccggcgaccgggcgccgccgggcgcatttccaccgcggcggtgcgccgcgacaggcttcctacccgctctgaaaaccttcagttctgctgagccctggcccagccctgcgtgtgcacaccggcctcatgggcggccctggtggcagcgttcactgtggtctgttttttctgctgccccgggcgcaaggccgtgggaaggggcttcttctctgtgcccctcaccagcctccccccatcctcagcccattccttccagctccttcctccaaagccagaattaacttctcagagggaggaacccaagtgttacggacacacttgaccctaaagacacaggagcctgaaaa

SEQ ID NO: 12441 - DNA, 383 bp, Bos taurus
  Clone ID: 53-LIB34-006-Q1-E1-F10
ggcggctctggatccactgcccacaccccgctctcgcaggcagacatgaggacagagagaatgtcccccctcctggctctggggatcctggtggctgggctctgctccagggtccactgcctcccagagaatgtgaccccagaagaacaacacaaagtgacatctgtggatggccactcattagcctccagcaacactgacttcgccttcagcctctacaagcagttggctttgaaggaccccaataagaacgtcatcttctcccctctgagcatctccatagccttggccttcttgtccctgggggctcatggccccactgtgacagagatcctggaaggtctcaagttcaacctcacagagacccccgagacagaaatcca

SEQ ID NO: 12442 - DNA, 347 bp, Bos taurus
  Clone ID: 53-LIB34-006-Q1-E1-F2
ctcgctagtcgacacacgcctctaaaatgagtaatatgtctatgaacaggctctcgcttctgctgctgctacagctgacttgctaccttagcggtgggatttgtggaaaggtgttggtattgccagtggcatttactccctggctgaatataaagacaattctggatgaactcatcaccatgggtcatgaggtgactgttctgatatattcagcttccactattccgaaatccacaaaaccatcgtctaggaactttgatactttccctgtatcttctacaccaagtcattatgagaattttatcgaacgtactctttatgaactgacatatctagcactatattcc

SEQ ID NO: 12443 - DNA, 326 bp, Bos taurus
  Clone ID: 53-LIB34-007-Q1-E1-F2
gggtcgggtcacgcgtccgtaacacccagaattccaaagaaacatgacaatcataaagctctctctgaccaagaactcatggcccagagtattatctttatttttggtggctatgagaccactagcacttctcatttcacttcaattatgatatgatattggacagtcaccctgatgtccagcagaagctgcaggaggagattgatgcgactttccccaataaggcgcctccgagctatgatgtcctggcacagatggagtatcttgacatggtggtgaatgagactctcagaatgtttcctattgctgttagacctgacaggttc

SEQ ID NO: 12444 - DNA, 408 bp, Bos taurus
  Clone ID: 53-LIB34-008-Q1-E1-F10
gggtgagaaccaccacctgcgggtgtccttctccaagtccaccatctaggccgccacccaggaccagcctgccgggcacccggcaacaacttccatcattccagataaaaagccactttaaaaagcagctgaagtgaccttaacagaccagagattttatttttttaaaagagaaatcagtttacctgtttttaaaagaaattaaatctaattcacttgctcaccttggggaggtggggtgccagcctcaagctcttggtgacggtggatggcaccacccgcccggcccctgcctgtgcctttgccgcctgcacggcgggcgctcctaaacccccacttggctttcttgtgccataaacccgctgccctggcacggcttgcggggtcagcctcccctgggattatgtg

SEQ ID NO: 12445 - DNA, 365 bp, Bos taurus
  Clone ID: 53-LIB34-008-Q1-E1-F2
gcttcatgaaaatgctcatctttcagagtctccagaaccagacacaccatatacccctgagaatccccctccttcaggtcttcatcaccaccaccacaggcacaagggtccccacagacagggtcactcagataattgtgatacaccagtaggaagtgaaagtttacaaccttctcttccacaaaagaagctctgactaaagagatgcatatatcaattactctgacagtttcccaaagattcataatctgctttgaatagctgctgttgccactgtctacatctggtattttaaacaacagggtctgcaatcacctgacagtgtacagactagctcccctcattgtgtatctgacagggccttt

SEQ ID NO: 12446 - DNA, 404 bp, Bos taurus
  Clone ID: 53-LIB34-009-Q1-E1-F10
attgaaatatggtgtagtgctgaactttaaaactcaaaggctgcagggatgagaggatgagagtagtgatgtttctgtgtagcttggttttcactattgtcttctgccgagccaagaatccttagacatctgttgttgccataatgacaaccacaagcagcgtgtgttgggtgcctgctatgagccaagctctgtgctgagccctttgtatgagcatcacaagctgggcttacatcaacagaaatatatcgtctcacagttctgcaacctaaaccccaaatcaaggtcagccagatcatgccccctctgaaaccactggggaatccttccttgcctcttcttagtttcagtggcttgcaatagtctttggagttgcttagcttgcagctgtataatttgcaaat

SEQ ID NO: 12447 - DNA, 197 bp, Bos taurus
  Clone ID: 53-LIB34-009-Q1-E1-F2
gtccgaatacttaacggagcaacaggcagaggcaggagatctgccagaactacaagtccctctatggcaaggacctcattgcagacttgaagtatgagttgacagggaagtttgaacgcctgattgtgggtcttatgaggccacctgcctatgctgatgccaaagaaattaaagatgccatctcgggcattgggaac

SEQ ID NO: 12448 - DNA, 427 bp, Bos taurus
  Clone ID: 53-LIB34-010-Q1-E2-F10
atggatgatgatattgctgcgctcgtggtcgacaacggctccggcatgtgcaaggccggcttcgcgggcgacgatgctccccgggccgtcttcccgtccatcgtggggcgcccccggcaccagggcgtaatggtgggcatgggccagaaggactcgtacgtgggggatgaggctcagagcaagagaggcatcctgaccctcaagtaccccattgagcacggcatcgtcaccaactgggacgacatggagaagatctggcaccacaccttctacaacgagctccgtgtggcccctgaggagcaccccgtgctgctgaccgaggcccccctgaaccccaaggccaaccgtgagaagatgacccagatcatgttcgagaccttcaacacccctgccatgtacgtggccatccaggctgtgctgtccctgt

SEQ ID NO: 12449 - DNA, 417 bp, Bos taurus
  unsure (338),(367),(373): unsure at all n locations; Clone ID: 53-LIB34-010-Q1-E2-F2
catctcccggccgcatcccgcgggaccggagcgagcagcggggaccatgttccgacgcaagttgacggcccttgactaccacaatcctgccggcttcaactgcaaagatgaaacagaatttaggaacttcattgtttggcttgaagaccagaaaatcagacactataaaattgaagacagaggtaatttaagaaacatccacagcagtgactggcccaagttctttgaaaagtatctcagagatgttaactgtcctttcaagattcaagatcgacaggaagcaatcgactggcttcttggcttagctgttagacttgagtatggagataatgctgaanaatacaacaaggacttgggtactgataantacaanaatgctgacaatgcagcctaaaatgcagagccattgatcaattt

SEQ ID NO: 12450 - DNA, 391 bp, Bos taurus
  unsure (368): unsure at all n locations; Clone ID: 53-LIB34-011-Q1-E1-F2
attcctgcacgcacgctctgaccttgaagtagcgcattacaagctgaaaaccagaaacctcatgctgcatcacgaattccttcagcgagtcaagcagctgcccttggaatacagctatggggagtacagagatctcttccgtgattttggaacccactacatcacagaggctgtgcttgggggcatttatgaatacacactcatcatgaacaaagaggcgatggacagaggagattactctcttaagaacatccacgactgtgctaaacatgattttaaaatcggcgccgccataacatcggtctacttgaagctgggtgtgtcggaggccaagtgcagtgacattctcaatgagataaaagacaganacaagaaagacagcatggtgaaa

SEQ ID NO: 12451 - DNA, 394 bp, Bos taurus
  Clone ID: 53-LIB34-012-Q1-E1-F2
accaactacctgtggaattgcagatttcctgaataattaccaaaccagtgtagacaaagatctacgaactttggaaggcatcttatatcaggttgagaacaaaacatcagaagccagagagctggtcaaagcaatccaaatcagctataaccctgatcaaccatcaaagccaaataacatagagagtgctaccaagaattccaagagtatgatggaagaaattatgaaatatgaaacactgatatcaacacatgaatcaacaattcgatttttgcaagaaatatataactcaaatagtcaaaaaatcgttaacctaagagataaagtggtccagcttgaagcaaactgtcaagagccttgtcaagatacagtgaaaatacatgatgtaactggg

SEQ ID NO: 12452 - DNA, 326 bp, Bos taurus
  unsure (285): unsure at all n locations; Clone ID: 53-LIB34-013-Q1-E1-F10
gtcaacatgactgacaatgatcgtatcgatattcttgaccctttttatcatctttcaactaaaagtttcaaaacacaacttttatcacaatccagaactgacaccaacaaagatattaagacagaacaccccttgagaaacaaaatgaacgaaaatttacttacctcttttactacccctgtaattataagtcaccctctcgtaacccttaacgtactattcccaagcctactattcccaacatcaaaccgactagtacgcaatcgctttgtaacccgctaatantgagtacatcaacttgtttcaaaacaaataatgagtatcca

SEQ ID NO: 12453 - DNA, 383 bp, Bos taurus
  Clone ID: 53-LIB34-013-Q1-E1-F2
attcattaatttaggcagccaggggtatttctttaacatctcatcaacccctgtccccattgtccaaagatcctcatataatacaacataaatcatgaacattcagaagagcctatagagaaataaatggtaagactccccatgggaacaccgtcaatctctatggatgacataaaactgtgtgcataattctaactcctttctgaggtttcctcccaggttttcttaactagcacagaaaatggacagactaatatacttgtggcctacttcagttgcttttctgataatgaatgtgtaccctcagatgtacaatgtcaattttcatactaagattcctgacattttgaataaactgtaacatctggtccttatgtggcaat

SEQ ID NO: 12454 - DNA, 395 bp, Bos taurus
  Clone ID: 53-LIB34-015-Q1-E1-F10
gctccatcgccttctttgccttctccctcatcgagggctacatctccattgtcatggatgctgagacgcagaaaaagttccccagtgacctgctgctgaccagctcctcgggcgagctgtggaggatggtgcgcattggcggacagcccctgggcttcgacgagtgtgggatcgtggcccagatcgcgggccccctggctgcagccgacatctctgcctactacatcagcaccttcaacttcgaccatgccttggtgcccgaggacggcatcggcagcgtcatcgaggtcctccagcgccggcaggacggcctgggctcttgaggctccaggggcaggccacagcagcctccggggtctcccctggccctctggcttccagagacttctcaaagc

SEQ ID NO: 12455 - DNA, 321 bp, Bos taurus
  Clone ID: 53-LIB34-015-Q1-E1-F2
acatgaagatccatggacatagcatggcattggaacagacaccttaagactcacaacttgcggtgctttaagtggatgacacacaaatgatcttcttggacatccataatccaggtcctttcatccgcatggtaggagcaatgacatgtataaatgcaacttagactcaatccctatggtaggcacttcctcatgtatgcagatcaaccgtcataacagtgtgcatcagatggccaaaggagcatctatcatattgtgactctgcatattggcaccataggatgtgctcaatgcagtgcacgaactcaggatgagatcatt

SEQ ID NO: 12456 - DNA, 407 bp, Bos taurus
  Clone ID: 53-LIB34-017-Q1-E1-F2
gccgaggacccgaacgctgccgctcgcctgcccgccgccatggccctgctccgaggtgtgttcatcgtcgctgctaagcggaccccctttggagctcatggaggtcttctgaaagacttcacacctactgacatggctgagtttgctgccagggctgccttgtctgctggcagagtctcaccggaaactgtcgacagtgtcgtcgtaggcaatgtcatgcagagttcttcagatgctatatacttggcaagacatgttggtttgcgtgtgggaatcccaaaagagaccccagctatcactattaacaggctctgtggctccggtttccagtccattgtgagtggatgtcaggaaatttgttctagagactctgaagttgtcccgtgtggaggaactgaaagcatgag

SEQ ID NO: 12457 - DNA, 395 bp, Bos taurus
  Clone ID: 53-LIB34-018-Q1-E1-F10
aaatgttaccctgattttaaagaagagaaatctggtgtcagagttgaaattcctttgctgttggcttctctggtgactcagtggtcaagaattcgcctgccaatgcaggagacatgggttggatccctgggtcaggaagattccctggagaaggaaatggcaacccactccagtattcttgcctgggaaatcctatgggcagaggagcctggagggctatagtccatggacacaacttagtgactaaacaacgataacaaagcttagctctagggtgccccagaagagcagcagtccccaaacctccagccttcagtagtgtgggtaaactatggaaatctttctgttgtacttactgtcgcttagtgtaccaagtgttttgtgatgtcaaatct

SEQ ID NO: 12458 - DNA, 399 bp, Bos taurus
  Clone ID: 53-LIB34-018-Q1-E1-F2
aagcagggagatggtggctcttccatccccagaccagccaagcctgtgagtgacaccccagacagaggaaccagagccatgcggagtctcagcggactgctgttgttactgactgcctgcctggcagtaaacgccagctccgtgcccacattgcccgatgacattcaagtgcaggagaacttcgacctgtctaggatctatgggaagtggttcaatgtggccgtgggctccacctgcccatggctgaagaggttcaaggagaagatgaccatgagcacagtggtgttgaaagcggggccgacgagcaaggagatcagcgtcaccaacactcacaggcggaaaggtgtctgtgaatcgatctctggtacttatgagaaaacaagcactgatgggaagttt

SEQ ID NO: 12459 - DNA, 369 bp, Bos taurus
  Clone ID: 53-LIB34-019-Q1-E1-F2
ccgggtccagcacgcgtccggatgagtcccatgccggctgtgaaaagtcacttcacactctctttggagatgaattgtgtaaagttgcatcccttcgtgaaacctatggtgacatagctgactgctgttagaaacaagagcctgaaagaaatgaatgcttcctgagccacaaagatgataggccaaacctcccttaaatgaaaccataccccaatactttgtgtgatgagtttaaggcacattaaaagaagttttggggaaaaatactatacgaaattgctagaagacatcctaattttatgcaccagaactcctttactatgccaataaatataattgagtttttcaagaatgctgccaagctaaaga

SEQ ID NO: 12460 - DNA, 408 bp, Bos taurus
  Clone ID: 53-LIB34-020-Q1-E1-F10
ctcaacggggccttcaattacaccaccagagagggggtgaacacctacgaggcgcgtatccagtactactgccatgagcccttctacaagatgcacaccaaaggtggcacaagcgagtctgagcgagggctgtacacctgcacggctcaaggcatttggaagaacgagctggtaggagagaagatgcctcggtgtttgccagtgtgcgggaagccactccaccctgtcgagcagaggcagcgcatcattggaggcctgaaggccaagctgggcaacttcccctggcaggcctacaccaacatccacgggcccgggggtggcgcgctgctgggggaccgctggatcctcacggccgcgcacaccatcaaccccaaggaccacgaggcgcaaggcagccccaacatagac

SEQ ID NO: 12461 - DNA, 351 bp, Bos taurus
  Clone ID: 53-LIB34-020-Q1-E2-F10
tcgacccaggcctccgatggatgattatattgctgcgctcgtggtacgagaacagcaccggcatgtgcaaagccggcttctcgggcgaggatgcaccccgggccatcttcgcatccatcatggggcacccccggcaccagggtgtaatggtgggcatgggccagaaagactcatacgtgggggataacgctcagagcaagagatgcatcctaaccctcaaatagcccattgagcacggcatcgtcatcaactgggaggacatggagaagatctggcaccacaccttctacaacgagctccgtgtggcccctgaggatcaactcgtgctgctaaccgaggcccccctgaacc

SEQ ID NO: 12462 - DNA, 427 bp, Bos taurus
  Clone ID: 53-LIB34-020-Q1-E2-F2
gaaaagtatatatgtattgtttaattgctaagtcgtgtccaactctttgcagtcccacgaacttcagcacaccaggcttccctgtctttcaccatctcctggagtttgctcaaactcatatccatcgagtcagtgatgccatccagccatctcatcctctgtcgccccttgtcctgccctctatctttcccagcatcggggtcttttcccctgagtcagctcttcacatcatgtggccaaagtatcggagcttcagcttcaccactagtccttccagtgaatattcaggactgatttgttttaggaaatatatatatacagaaatacgtaatgtcacatggcaaggcggggtcatttatattcctgtctcctctgtcttcagatggatgaaagtataggaatatgtgttcctctgggctgagactgt

SEQ ID NO: 12463 - DNA, 396 bp, Bos taurus
  unsure (295): unsure at all n locations; Clone ID: 53-LIB34-021-Q1-E1-F2
gcgccggcgtgacccacccgccatgctccccccagcgctcgtcttgctgttggggtttctctgccacgttgctatcgcaggacgaacctgccccaagccagatgagctaccgttttccacggtggttccactgaaacggacctatgagcccggggagcagatagtcttctcctgccagccgggctacgtgtcccggggagggatccggcggtttacatgcccgctcacaggactctggcccatcaacacgctgaaatgcatgcccagagtatgtccttttgctgggatcttaganaacggaacggtacgctatacaacgtttgagtatcccaacgacatcagcttttcttgccacacggggttttatctgaaaggagctagttctgcaaaatgcac

SEQ ID NO: 12464 - DNA, 446 bp, Bos taurus
  Clone ID: 53-LIB34-022-Q1-E1-F2
accagaactcctttactatgctaataaatataatggagtttttcaagaatgctgccaagctgaagataaaggtgcctgcctgctaccaaagattgaaactatgagagaaaaagtactgacttcatctgccagacagagactcaggtgtgccagtattcaaaaatttggagaaagagctttaaaagcatggtcagtagctcgcctgagccagaaatttcccaaggctgagtttgtagaagttaccaagctagtgacagatctcacaaaagtccacaaggaatgctgccatggtgacctacttgaatgcgcagatgacagggcagatcttgccaagtacatatgtgataatcaagatacaatctccagtaaactgaaggaatgctgtgataagcctttgttggaaaaatccactgcattgctgaggtagaaaaagatgccatacctga

SEQ ID NO: 12465 - DNA, 401 bp, Bos taurus
  Clone ID: 53-LIB34-023-Q1-E1-F10
catgcatctagattggaggatctgctagtaaaactggagaaagaatgatattctaacatctcctatgttgttgttaatcatcatggaatctcttcgcgattataatatgtgtatcttacaaatcaggtttcagaacatattcctgtttaccagcaagaagataactatccacatgtctggactctcttaaatggaaactaacatgacttcctcatatatcacaaatatggccgccttgtatatcatcttggtttgccatattccttcctaactttcacatatgtaaacgattccatgaagactgtttactgtgaatatacatgtggaaactgctctctcatagcactggaagatgaatacgtctgtagaaatgtaattctgggctacaaggacaaaacagc

SEQ ID NO: 12466 - DNA, 369 bp, Bos taurus
  Clone ID: 53-LIB34-024-Q1-E1-F2
gaagcattaccgacaaagtaaagcactctttggaaataacactatatgaaaaacatcaaaaagaactagagtctttaaaaagcgagtacgagggcaggctcgctaccctggtgaaggagagtgaagagaacaagagcaagatcaccaagctgcggggggacctggtatgcctggaggaggtgctgcagaataaggataatgagtttgctctggtcaagcatgagaaggaagctgtcatctgcctgcagaaagagaaggaccagaagctgctcgagatggagtgcacagtgcacgcccagcactgtgagatggaagcactgcggcagtcgcgtgaggttgccctggaggactttaggaagctccacgtgg

SEQ ID NO: 12467 - DNA, 303 bp, Bos taurus
  Clone ID: 53-LIB34-025-Q1-E1-F10
agagactctagcaggaacacactcatcatctacctggacaaggtctcacacacagtggacgactgtctgtccttcaaagttcaccactactttaatgtcggacttatagagcctgtggcactcaacgtgtactcctaataaaaactgcatgaaacttgtacccgcctctatcacccggataaaggagactgtatgctgagcatactctgccacaaggatacctgccgctgtgcagatgagaactgcttcatgcaccacatccgagaatgatgtcactctggaggacccgctggtcaacgcttg

SEQ ID NO: 12468 - DNA, 395 bp, Bos taurus
  Clone ID: 53-LIB34-025-Q1-E1-F2
gtcgaccacgccgtccgggaaggtctcaagttcaacctcacagagacccccgagacagaaatccaccagggcttccagcacctcctgcagacgttcaatcagcccagcaaccagctgcagctgagcgtgggcaacgccatgtttgtgtcagaggagctgaagctgctggacaaattcaagaaagatgccgaggctttttacgcctctgagggtttatccacgaacttcaaggattctgaagctgccgtaaagcttatcaatgaatatgtggggaataaaactcatgggaagattgggaagctcctcaatgatcttgacgtgctcacaaatttaatcgtgttgaattatatcttctttaaagcccagtggaagacgccatttaatcctaaccatac

SEQ ID NO: 12469 - DNA, 408 bp, Bos taurus
  Clone ID: 53-LIB34-026-Q1-E1-F10
gcgactatgccggtcaccgggaagactttccgccggcgccgcgccgactcggagtcggaggaagacgagcaggactcagaggaggttcgattaaaactggaagagacccgagaggtgcagaacttgaggaagaggcccaacggggtgagtgctgttgccctgctggtgggagagaaagtacaagaagagaccactcttgtggatgatccctttcagatgaagacaggcgggatggtggacatgaagaaactaaaggaaaggggcaaagataagatcagcgaagaggaagacctccatctggggacatcattttccgcagaaaccaaccgaagggacgaggatgccgacatgatgaagtacattgagacagaactgaagaagcggaaagggatcgtgggacatgaggaa

SEQ ID NO: 12470 - DNA, 375 bp, Bos taurus
  Clone ID: 53-LIB34-027-Q1-E1-F10
atccaactctcgtggaggtttcaagaagcctaggacaagtgggtactaagtgttgtacaaagccggaatcagaaagaatgccctgtactgaagactatctgagcttgatgcggagccggttgtgcgtgctgcatgagaagacaccagtgagtgaaaaaatcaccaagtgctgcacagagtcattggtgaacaggcggccatgtttctctgctctgacacctgatgaaacatatgtatccaacgcctttgcatgagaaattgttcagcttccatgcagatatatgcacacttcccgatactgagaaacaaatcaagaaacaaactgcacttgttgagctgttgaaacacaagcccatggcagcataggaacaactg

SEQ ID NO: 12471 - DNA, 360 bp, Bos taurus
  Clone ID: 53-LIB34-027-Q1-E1-F2
caatggcagcagtgttcggaggtactcagtctttgcacacaaattcttttgatgaagccctgggtttgccaactgtgaaaagtgctcgaattgccaggaacacacaaatcattagtcaagaagaatctgggattcccaaagtggctgatccttggggaggttcatatatgatggaatctctcacaaatgatatttatgatgctgccttgaagctcattaatgaaattgaggagatgggtggaatggccaaagctgtatcagagggaatacctaagcttcgaattgaagaatgtgctgcccgaagacaagctagaatagattcgggttctgaagtaattgttggagtaaataagtaccagt

SEQ ID NO: 12472 - DNA, 393 bp, Bos taurus
  Clone ID: 53-LIB34-029-Q1-E1-F2
gctttgtgcacataaataagaaactgtattgatgttaccacaaacatcttcttttgattctctttgtgcctggtttctctgtagtgtggtctgtgttggcagtaagccacagtggaggtgctatgctggcatcttagaggtgtggagggaagaactctgacgtccaacatcaacatcttggtcaagtaaagtcttcagggtgttttgcgcacaaattatagtcagatagctatgcatgtttagagtaaatctccaatttgtaattttccttagaattttgcaaaatgttgtgacagatatttgtcagaattattgggaatatgttatggtggatggcattttttcatatagaattatatttagttctgttgagacatggctaagcctattttc

SEQ ID NO: 12473 - DNA, 415 bp, Bos taurus
  Clone ID: 53-LIB34-030-Q1-E1-F2
ggctcttccatccccagaccagccaagcctgtgagtgacaccccagacagaggaaccagagccatgcggagtctcagcggactgctgttgttactgactgcctgcctggcggtaaacgccagctccgtgcccacattgcccgatgacattcaagtgcaggagaacttcgacctgtctaggatctatgggaagtggttcaatgtggccgtgggctccacctgcccatggctgaagaggttcaaggagaagatgaccatgagcacagtggtgttgaaagcggggccgacgagcaaggagatcagcgtcaccaacactcacaggcggaaaggtgtctgtgaatcgatctctggtacttatgagaaaacaagcactgatgggaagtttctctatcacaaagccaagtgggatatcacca

SEQ ID NO: 12474 - DNA, 433 bp, Bos taurus
  unsure (345): unsure at all n locations; Clone ID: 53-LIB34-031-Q1-E1-F2
ggagcggccggagcaagatgggtcaaagtcagagtggtggccacggtcctggaggcggcaagaaggacgataaggacaagaaaaagaaatatgaacctcctgtaccaactcgagttgggaaaaagaagaagaagacaaagggaccagatgctgccagcaaactgcccctggtgacgcctcacactcagtgccggttaaaactgctgaagctagagagaattaaagactatctcctcatggaggaggagttcattagaaaccaggagcagatgaagccgttagaagaaaagcaagaggaggagaggtcaaaggtggatgacctccgggggacgccgatgtcagtanggaccctggaggagatcatcgatgacaaccacgccatcgtgtccacgtctgtgggctcggagcactacgtcagcatcctctcgttcgt

SEQ ID NO: 12475 - DNA, 358 bp, Bos taurus
  Clone ID: 53-LIB34-032-Q1-E1-F2
tgaaatcctagaggacgcaactgtgagtgtctctgtcctagcctctcaacttgctttcctgtgtccaataccactgcagactccagtactagcctgtccagagcagcaagtgagaggaaacaagccagcattgtaagaggacatgcgtctcctcgctctctccgtgctgctcctgctcacacagccctggagatccctgggaagcagaatgacaaccttttcccagaagatactgggcaatgcctgtaccctggttatgtgtaaccccctggagagtggcctgcctggtcatgatggacaagatgggagagaatgtccccatggagaaaaaggggattcaggttcaccaggacctgca

SEQ ID NO: 12476 - DNA, 376 bp, Bos taurus
  Clone ID: 53-LIB34-033-Q1-E1-F10
cagttataccgagagagacatggagctgatatacccctttaagaagatcttcttcagcttactgagggagagcggctacttgcacatccagagcaccaagccggacaccgtgggctgtgctctgaatgactctcccgtgggactggctgcctatattctagagaagttttctacctgcagcaattcggaattccgagacttggacgatggaagcctatacaggaagttctccctgtacgacctgctgacgggcatcatgctctactggacaacatgcaccatcacctcctcccagcgcttctacaaggagaacctggggcaagtcaataagcatgagatgttgaacgtgtatgtgcccacgggctttgctgccttc

SEQ ID NO: 12477 - DNA, 324 bp, Bos taurus
  Clone ID: 53-LIB34-036-Q1-E1-F2
attgacgttcgctcatgatttgcacgtcagatttgtacggagctgtctcacattcaaccacacacatagtctacattgataaatccacctaggtatcgatgggcttcatgtacagtacatgcaggtgagtaaggatctgcataagcacttagctttctcgctgtctatctgaattgatatataccagctggcatacatcaggagtgattaccaagtgttatataccccagatgatatgttcacaaacgtcactgcttatcaacctgacttagtactaaccactcctcatgtgcactgttcagctcgtggatctcttaacaatct

SEQ ID NO: 12478 - DNA, 434 bp, Bos taurus
  Clone ID: 53-LIB34-037-Q1-E1-F2
tacacaatgaaggcttcaagctctttgccacggaagccacatcagactggctcaatgccaacaatgtacctgctaccccagtggcatggccatctcaagaaggacagaatcccagcctctcacccatcagaaaattgattagagatggcagcattgacctggtgattaacctccccaataacaacactaaatttgtccacgataattatgtgattcggaggacagctgttgacagtggaattgctctcctcactaatttccaggtgaccaaactttttgctgaagctgtgaagaaagctcgcaatgtggactccaagagtctcttccactacaggcagtacagagctgggaaagaactatagagaaatagagacacgctgtctccattcttaaatcaacctaagccactctttatctaaaggaactgatttgca

SEQ ID NO: 12479 - DNA, 425 bp, Bos taurus
  Clone ID: 53-LIB34-038-Q1-E1-F2
tgtgcaccaggaactgtgctcggccccgacagacagacatgctttgatgaaaatgaatgtgagcaaaacaatggtggctgcagtgagatatgtgtaaacctcaaaaattcctatcgctgtgagtgtgggattggccgtgtgctaagaagtgatggcaagacatgtgaagacattgaatgatgtcacaataacaatggtggctgcagccattcttgccttacatctgagacaggctatcggtgtgaatgtcgccggggcttggtgctgtctgaggataaccacacttgccaagttcctgtagtctgcaagtcgaacaccatcgaagtgagcatccccaggggactggttggcggtccggagctcttcctgagcaacacctcctgccgaggcgtgtccaatggcaccaatgtaacatcgtcttctcc

SEQ ID NO: 12480 - DNA, 380 bp, Bos taurus
  unsure (364): unsure at all n locations; Clone ID: 53-LIB34-039-Q1-E1-F10
ctttggcacaatgaagtgggtgacttttatttctcttctccttctcttcagctctgcttattccaggggtgtgtttcgtcgagatacacacaagagtgagattgctcatcggtttaaagatttgggagaagaacattttaaaggcctggtactgattgccttttctcagtatctccagcagtgtccatttgatgagcatgtaaaattagtgaacgaactaactgagtttgcaaaaacatgtgttgctgatgagtcccatgccggctgtgaaaagtcacttcacactctctttggagatgaattgtgtaaagttgcatcccttcgtgaaacctatggtgacatggctgactgctgtgagaaacangagcctgaaagaaatg

SEQ ID NO: 12481 - DNA, 391 bp, Bos taurus
  Clone ID: 53-LIB34-040-Q1-E1-F2
caaatgattagaggtcttggggccgaaacgatctcaacctattctcaaactttaaatgggtaagaagcccggctcgctggcgtggagccgggcgtggaatgcgagtgcctagtgggccacttttggtaagcagaactggcgctgcgggatgaaccgaacgccgggttaaggcgcccgatgccgacgctcatcagacccagaaaaaggtgttggtgataataaacaccaggacgttggcaagggaatccggatccgctaaagaatttgttacaactcaactggcgaatcaactaaccctgaaaattggatggccctgaaccttcgggccaaaacccggcgttccccggaattcgggaagcgccaaaaggagaggaaccccgggcgccggggg

SEQ ID NO: 12482 - DNA, 369 bp, Bos taurus
  Clone ID: 53-LIB34-041-Q1-E1-F10
gggtcgaggcaagcctctagagtaattcgcattagacccaagcaacatgccgcccggcatcgagcccagccctgacaaaatgctccagggccgcctttttgcctatcctgacactcaccgccaccgcctgggacccaactatctccagatacctgtgaactgtccctaccgtgctcgagtggccaactaccagcgtgacggccccatgtgcatgatggacaatcacggtggggctccaaattactaccccaatagctttagtgctctcgagcatcagccttctgccctggaacacaggacccacttctctggggatgtacagcgcttcaacagtgccaacgatgaccatgtcactcatgtgcggacttt

SEQ ID NO: 12483 - DNA, 420 bp, Bos taurus
  Clone ID: 53-LIB34-041-Q1-E1-F2
ggaagacgccatttaatcctaaccatacttacgaatcagagttccacgtgagccagaacgagagggtgattgtacccatgatgaccctttacctggaaaccccttacttccgggacgaggagctgggctgcacgctggtggagctcacgtacaccagcaacgacagcgccctcttcatcctccccgatgagggcaaaatgcaggacctggaagccaagctgaccccggagacgctgacgcggtggcgaaactccctgcagcccagacttatacatcgactcaggctgccaaggttttccatctccagccactaccagctgaaagacatcctttcccagctgggtatcaagaaaatcttcaccagcgatgccgacttctcaggaatcacagatgaccacaagctggcaatttcccacgtga

SEQ ID NO: 12484 - DNA, 305 bp, Bos taurus
  Clone ID: 53-LIB34-042-Q1-E1-F2
acgcgtccgccgacgccgatgactcagcagcctcccccttgagcacccgcgcttcgcgacgctccgtggcccctgcccgacttctcgcgcagccgcggtccgcatgccgtttccaccgcagataacgaatcgtatcctatgtccgctaccgagatgctccacgtcgttgtacccctttgcagagacaagtaagggtgattatcggcttcttccttgcactgaggaatatcagccgtataagaactccatccacaatttgccggaggacttttaccagtgtcccatggatccctgactactacgat

SEQ ID NO: 12485 - DNA, 394 bp, Bos taurus
  Clone ID: 53-LIB34-043-Q1-E1-F2
acggagaagtcggtacaggccctgatcgcagatttccgggggaccccgaccttcacctacaaagccgcacacgtcttcttcaccgacacctgccctgagcccctgttcagtgagctgggtcgctcccgtctggcaaaggtggtgaagacgctgaaagagatccaccttgccttcctcccatacgaagctcaggtgttctccctggatgccccccacagcacctacaacctctactgccccttccgggcgggcgagagagcacggcagctggaggcactggcccagcagatcgccaccctgtgcgccactctgcaagagtacccggccatccgctaccgcaagggcccagaggacacagcacagctggcccatgccgtcctagccaagctgaacg

SEQ ID NO: 12486 - DNA, 418 bp, Bos taurus
  unsure (409): unsure at all n locations; Clone ID: 53-LIB34-044-Q1-E1-F2
acgcgtccactctgactcatttctgactttaggcaagttcttccaatgggaaaaatggcgaagatgtttagtttcatccttgtcaccactgctctggtaatgggcacgggaagctcggctctggagaactgcctccaggagcatgcgcggctcagagcccaagtgtacctgctggagacccgggtcaagcagcaacaagtcaagatctcgcagcttttgcatgagaaacaagtccagctccttgataaaggagaggagaatagtgtcattgaccttggaggaaagaggcaatacgcagattgttcagagattttcaatgacgggtacaagcagagtggattttataaaatcaaacctctccagagcccagcagaattctctgtttattgtgacatgtctgatggaggangatggactg

SEQ ID NO: 12487 - DNA, 250 bp, Bos taurus
  Clone ID: 53-LIB34-045-Q1-E1-F10
caggtcttgatctcgcgggtccacgcaagcgtctacaatcagtcgtgacaactacaaccctgagcacaagtgttctgtgttttatggggcaccacgtaagagcaaactcttgtccacgttgtgctctgcggatgtctgccagtgtgctgaggggaagttgcctcgacagcgccgggcgctggaacgtgtgcagcaggacttggagggttaccggatgagaattcgcgtgctactctggccgagtggacta

SEQ ID NO: 12488 - DNA, 340 bp, Bos taurus
  Clone ID: 53-LIB34-045-Q1-E1-F2
acatcacatacacatcaacttaagctttacgtgcgtttgagagctcagtaacctcggtgcgctccagtgtttgcggtctgtggctggttttcctgcaaagccctatacctgactgctgaccgactggccaacggcgctagaaatatgaagctgtccctgctagctgctgtgcatgcttgcagctgcttggaacggcacgcacggaagacgaggacaagaaggaagacctgggcacagtggtctgcatctacctgggtacgacctagtcctgcgtcggggtgttcaagaacaggctcgtggagatcatcgcaaacgatcagagcaaccgcatcacaccgtc

SEQ ID NO: 12489 - DNA, 437 bp, Bos taurus
  Clone ID: 53-LIB34-047-Q1-E1-F2
atgtgattgaaaaccacaggaaagattggaatcctgctgaagcaagagacttcattgatgcttacctccaggagatagagaagcacaaaggcaatgctacttcgagtttcgatgacgaaaacctcatctgcagcaccctggacctcttcttggctggaacagagacaacttcaaccaccctgcgctggggattgcttttcatggccctgaaccccgaaatccaagaaaaagtccaagctgagatcgacagggtgctcgggcaatcacagaaggtgagcactgcctctcgagagtccatgccctacaccaacgctgtcatccacgaggtgcagagaatggggaacatcgtcgccatgaacgtgcccagggaggtgacagttgaaacggtcctggctggataccacctggtcaaaggcaccatggtgctgacaaacctg

SEQ ID NO: 12490 - DNA, 432 bp, Bos taurus
  Clone ID: 53-LIB34-048-Q1-E1-F2
cggacgcgtgggctgagtttgcaaaaacatgtgttgctgatgagtcacatgccggctgtgaaaagtcacttcacactctctttggagatgaattgtgtaaagttgcatcccttcgtgaaacctatggtgacatggctgactgctgtgagaaacaagagcctgaaagaaatgaatgcttcctgagccacaaagatgatagcccagacctccctaaattgaaaccagaccccaatactttgtgtgatgagtttaaggcagatgaaaagaagttttggggaaaatacctatacgaaattgctagaagacatccctacttttatgcaccagaactcctttactatgctaataaatataatggagtttttcaggaatgctgccaagctgaagataaaggtgcctgcctgctaccagagattgaaactatgagagaaa

SEQ ID NO: 12491 - DNA, 414 bp, Bos taurus
  Clone ID: 53-LIB34-049-Q1-E1-F2
attttccaatcccctcatgggaaggacctgctgtttaaggactctgctgatgggtttttaaagattccttctaagatggattttgagctgtacttgggatatgaatatgtcactgctcttcagaatctaagagaaagtaaacccccggactcctcaaaggatgagtgcatggtgaagtggtgtgcaattggtcaccaggataggacaaagtgtgatcggtggagtgggttcagcggcggggcaatagagtgtgaaacagcagagaacactgaagagtgcatcgccaagatcatgaaaggagaagctgatgccatgagcttggacggaggctacctctacatagcaggcaaatgtgggctgggtgcctgtcctggcagagaactacaaaactgagggtgaaagttgcaagaacac

SEQ ID NO: 12492 - DNA, 345 bp, Bos taurus
  Clone ID: 53-LIB34-050-Q1-E1-F10
cccacggctccgcagacgcgtgaggctcgtttttgtatgaatattcaagaaggcatcctgaatatgctgtctcagtgctattgagacttgccaaggaatatgaagccacactggaggaatgctgtgccaaagatgatccacatgcatgctattccacagtgtttgacaaacttaagcatcttgtggatgagcctcagaatttaatcaaacaaaactgtgaccaattcgaaaaacttggagagtatggattccaaaatgcgctcatagttcgttacaccaggaaagtaccccaagtgtcaactccaactctcgtggaggtttcaagaagcctaggaaaaatgggta

SEQ ID NO: 12493 - DNA, 240 bp, Bos taurus
  Clone ID: 53-LIB34-052-Q1-E1-F2
ccagagtgccccactggtccagacattattccaattgtagcaggtgtggttgctggaattgttcttattggccttgcattgctgctgatttggaagcttttaatgatcattcatgacagaagggaatttgccaaatttgagaaggaaaaaatgaatgccaaatgggacacgggtgaaaatcctatttacaagagtgctgtgacaactgttgttaatccgaagtacgaggggaaatgagca

SEQ ID NO: 12494 - DNA, 241 bp, Bos taurus
  Clone ID: 53-LIB34-054-Q1-E1-F2
agaggtgaaacaggtaatggatcccaaaggccagagagtgaagcttaatgatggccacttcattcctgtcctgggatttggcactgctgaagctaaagaggttcctaagagtgaagctctggaagtcaccaaatttgctatagaggttgggttccgccatattgactgtgctcatgtgtaccaaaatgaagagcacgttggccaggccattcgaagcaagattgcagatggcactgtgaat

SEQ ID NO: 12495 - DNA, 351 bp, Bos taurus
  Clone ID: 53-LIB34-055-Q1-E1-F10
ctcctccatcctggagagcgacgagttcctggtcatcgacgtcatccacgaggtggcccacagctggtttgggaacgccgtcaccaacgccacttgggaggagatgtggctgagcgagggcctggccacctacgcgcagcggcgcatcaccaccgagacccacggtgcggcctttacctgtctggagacagccttccgcctggacgccctgcacaggcagatgaagctcctcggagaggacagcccagtcagcaagctgcaggtcaagctggagccaggcgtgaaccccagccacctgatgaacctgttcacctacgagaagggctactgcttcgtgtactacctgtccca

SEQ ID NO: 12496 - DNA, 376 bp, Bos taurus
  Clone ID: 53-LIB34-056-Q1-E1-F2
atctttgtcaatggtcctatacagcagaaaatttcccagtggcacctttgaacagatcagccatcttgtgaatgaagttgtttccttaacagtaacctgctgtgcggaaggggccgatcctgactgctatgacaacagtacttcagcattgtctgacaagtcctgtgaaagcaactctccattcccagtgcaccctggaactcctgagtgctgcacccatgagggccttgaaaagaagctctgtatggctgccctgaagcaccagccacaagaatttccaacttacgtagagccaacaaatgacgagatctgtgaggcattcaggaaagatcccaaggactttgctgatcgatttatgtatgaatattccattaat

SEQ ID NO: 12497 - DNA, 222 bp, Bos taurus
  Clone ID: 53-LIB34-057-Q1-E1-F10
gctgttggtgctcaccctcttgggactggggctggcattcttcagggattaccggtcttcttatctagcaagaatgaacgcttcccgagaagtaaaatcggtagaacttcctaactgtaaattaataaaaggaatagaaactggtgctgaagacctggagatacttcctaatggactcgctttcattagttccggattacgatatcctggagtaaaaagctt

SEQ ID NO: 12498 - DNA, 224 bp, Bos taurus
  Clone ID: 53-LIB34-057-Q1-E1-F2
acgcttcaatgatcttgacgtgctcacaaatttaatcttgttgaattatatcttctttaaagcccagtggaagacgccatttaatcctaaccatacttacgaatcagagttccacgtgagccagaacgagagggtgattgtacccatgatgaccctttacctggaaaccccttacttccgggacgaggagctgggctgcacgctggtggagctcacgtacacca

SEQ ID NO: 12499 - DNA, 208 bp, Bos taurus
  unsure (187): unsure at all n locations; Clone ID: 53-LIB34-059-Q1-E1-F2
gtctcagtgctattgagacttgccaaggaatatgaagccacactggaggaatgctgtgccaaagatgatccacatgcatgctattccacagtgtttgacaaacttaagcatcttgtggatgagcctcagaatttaatcaaacaaaactgtgaccaattcgaaaaacttggagagtatggattccaanaatgcgctcaaatagttcgtt

SEQ ID NO: 12500 - DNA, 314 bp, Bos taurus
  Clone ID: 53-LIB34-060-Q1-E1-F10
aatatgactaagtcattttgccctgagctgttcattctgttaacacacaaagtttcagaaactttcctgaaattttcttctcgttttctcttaccgtatttattaattttaagtctttctttaaggatatttagctctgaatggcaattaaaactcactttggactgtattcccaagttactaaacacagagttattataaatttgtctatttgatgagataatattttagcttatttcctaaatatataataaattcattgtgatattttgcatttttttcatattttgtattttaatgatcacacataattg

SEQ ID NO: 12501 - DNA, 402 bp, Bos taurus
  Clone ID: 53-LIB34-061-Q1-E1-F10
cgcgtccggtagtttgaaactagaaatccacaagaagaagatagtaagaaggtctgaaaccatgtgaaaactaaacacacttataaaaaaccattgagtcaaaaaaagaaaatggaaataaattatcttgagacaaatgaaagtggagatatagtatattagatattctgggaggcaacaaaagtatatctgagaggaaaggttatagtaatatgtacacataaattcagatatgcaggaaatacaccaccctagtggtagaaagtgaagaagtaaagaggaactaaagagcctaaaggaactaaagaactaaaggaactaaagagcctcttgatgaaggttaaagaggagagtgaaaaagctggcttaaaactcaacattcagaaactatgatcatagcat

SEQ ID NO: 12502 - DNA, 383 bp, Bos taurus
  Clone ID: 53-LIB34-061-Q1-E1-F2
aaatggaaaataaggcggtggtgttcctacttctcttatttctgaaatcaggtctcggagacctcctggatgactatgtaaacacccagggggcttccctgcttagtttgagtcggaagaacctggcgggaagaagcgtagaggactgtgcagccaagtgtgaggaggagacagacttcgtttgcagggcattccagtaccacagtaaagagcaacaatgcgtcgtaatggccgaaaacagcaagaacacccccgtctttaggatgagggatgtcattctatatgagaagagaatctaccttttggagtgcaagaccggaaatggggaaaactaacaaagggacaactgcccaaaccaaaaattggggtcacctgccaaaaat

SEQ ID NO: 12503 - DNA, 189 bp, Bos taurus
  Clone ID: 53-LIB34-062-Q1-E1-F2
ggagttgctccgcttgcaggaacaaacaaagaaaccaccgttcaagggcttgatggcctttctgaacgctgtgctcagtataagaaagatggtgctgactttgggaagtggcgtgctgtgctgaagattgacaaccagtgtccatcccatcttgctatccaggaaaacgccaacaccctcgcccgctat

SEQ ID NO: 12504 - DNA, 340 bp, Bos taurus
  Clone ID: 53-LIB34-063-Q1-E1-F2
gaaagagtatagaagatttacgtaatactgtggactctgtttcccggacctcttcttccacctttcaatatataactctgctaaaaaacatgtggaaaggaaggcagaatcaagtccagtataatgaacatggattacacgagtactcctcacatctggaaaagcaccagttatatatacatgagactgtgaagaagaatatcccaactaagcttcgtgtgctccgtgcaattctggagaatttgagaaccagaatactgttcttacaatcggatgtctcaacccatatggaacaccgctgcagctcatgtaatggtacatacgctattcctgtggtgtc

SEQ ID NO: 12505 - DNA, 363 bp, Bos taurus
  unsure (295): unsure at all n locations; Clone ID: 53-LIB34-064-Q1-E1-F2
cagcacaccttaccaacattggtacaattcccactatccattgcccctgggccccaaaaagggggccaacctgactcctgaggaggaagaaattttaaacaagaaacgatcaaagaaaattcagaagaaatacgatgagaggaaaaagaacgcgaaaatcagcagtcttctagaggagcagttccagcagggcaagcttcttgcatgcatcgcttcaagaccaggccagtgtggccgagcagacggctatgtgctagagggaaaagagctcgagttctatctgaggaagatcaangcccggaaaggcaaataaaccctcttctctcctgtcttagctcatctaataaaggcgtttactgttct

SEQ ID NO: 12506 - DNA, 216 bp, Bos taurus
  Clone ID: 53-LIB34-065-Q1-E1-F2
cggagactacacctgcacctgtgcggaagggtttgaaggcaaaaactgcgagttctccacgcgtgagatctgcagcctggacaatgggggctgcgaccagttctgcagggaggagcgcagcgaggtgcggtgctcctgcgcgcacggctacgtgctgggcgacgacagcaagtcctgcgtgtccacagagcgcttcccctgtgggaagttcacgca

SEQ ID NO: 12507 - DNA, 202 bp, Bos taurus
  Clone ID: 53-LIB34-066-Q1-E1-F10
agctagttctagatcgcgagcggccgcccttttttttttttttttttattttatttttttttttttttttttttttttttttttttttttttttttttatttttatttttttatttttttttatttttattgattttattacaaaacgccacattattaaaataaaaaaggccaataaacaaaagtgtaaaaaaatgccccc

SEQ ID NO: 12508 - DNA, 265 bp, Bos taurus
  Clone ID: 53-LIB34-066-Q1-E1-F2
cgagtatgaatttttcaccaatctggatcaacgcagcgtgcctgccctggcaaacatcatcaagatcttgagacatgacattggtgccactgtgcacgagctttcccgggataagaagaaagacacagtgccctggtttccaagaaccattcaggaactcgacaactttgccaaccaggttctcagctatggagctgaactggatgcagatcacccgggatttaaagatcctgtataccgagcaagacggaagcaattcgctgac

SEQ ID NO: 12509 - DNA, 212 bp, Bos taurus
  Clone ID: 53-LIB34-068-Q1-E1-F2
aagtgatgagagagcacgttacgaatgcattgggaattatgacctttttggggagatggaagtcgtatgtttacatggaacttggacagaaccacctcagtgtaaagactctcaaggaaaatgtgggcctcctccaccaatagacaacggatacattacctcactcctgaaatcagtatatcctacagggtcgattgttgagtaccggtgtc

SEQ ID NO: 12510 - DNA, 218 bp, Bos taurus
  Clone ID: 53-LIB34-069-Q1-E1-F2
agtgggcagcttctgacttaggctgggttgtcggacattcctatatctgttacggacctcttctacatggaaatactacagttttatatgaggggaagcctgtggggacaccagatgctggtgcctatttccgtgtgctcgcggagcatggagtggctgccttgtttacagcgccgactgcaattagagcgatccgtcaacaggaccctggggcagcc

SEQ ID NO: 12511 - DNA, 245 bp, Bos taurus
  unsure (206): unsure at all n locations; Clone ID: 53-LIB34-070-Q1-E1-F10
gtctttctcggtgccgaagatggaggccaagtactccgccatttcccacccgccgccgccaccgacactgctgccgacgcccacgaccccgcccgacctggtgccaaggtgtctgaatcattatctctgaagctgccaccaaatgtggtggaagaatctgcccgagcctccttctcagttttaggagacatattagggctctgccnatgagaaacacccagaaatctccctcccaaatggcccta

SEQ ID NO: 12512 - DNA, 200 bp, Bos taurus
  Clone ID: 53-LIB34-070-Q1-E1-F2
gccatctgtgatgatggagcgacgtactgccccaacccgggcatcccccttggcacgaggaaggtgggcagccagtacgccttgaagaccgtgtcacctacactgcaccggggccatctacgtggtctgacacaaatgctgaaggggtctgggtggacggacctctgcaagacccttatgtcacactctgagagtggcga

SEQ ID NO: 12513 - DNA, 406 bp, Bos taurus
  Clone ID: 53-LIB34-072-Q1-E1-F10
gggccgagccacgcgtccacggacgcgtgggcctgaaatcatcacacctgcagcagaaggaaaatgactgagttgaaggtaagaaactatctggccagtttgctgtggtttcttcagccacaattcatggaagcttctgaaaattccagagagtcagagttagcactaacttagagagaccctggtccaagctactgtgttcaaggctttgccgtaagcatggctggggctggcggatgacaaagaaaatggatgacagtctaattgtctatctcttgtcttgttcagttcatagattgtcttgggaatctgtagaccttataagggctctcctccactgtagacagacacttttctccctgtgactgtttgccagtccctactctacaccttcctgtcgctgcag

SEQ ID NO: 12514 - DNA, 411 bp, Bos taurus
  Clone ID: 53-LIB34-072-Q1-E1-F2
acaacattcaatgatattcctgtccgtatatatgtgccccaacagaagacaaaatcattaagaagaggcttgttttatattcatggtggtggctggtgttttggtagtaatgattattatagctatgaccttctgtcaagatggacagcagagagacttgatgcagttgtcatatcaaccaactacagactagccccaaagtaccattttccagttcaatttgaagatgtgtacactgcattaaaatggtttttagacccccaaaatcttgaaagctatggtgtagatcctggaagaatcggtatctctggagacagtgctggagggaatttagctgcagcagtggcacagcagctcttagaagatccagatgtcaagatcaagctcaaggttcaaacttttaatatatcc

SEQ ID NO: 12515 - DNA, 415 bp, Bos taurus
  Clone ID: 53-LIB34-074-Q1-E1-F2
agaggaaagccgctctggcagcgccggcgtgacccacccgccatgctccccccagcgctcgtcttgctgttggggtttctctgccacgttgctatcgcaggacgaacctgccccaagccagatgagctaccgttttccacggtggttccactgaaacggacctatgagcccggggagcagatagtcttctcctgccagccgggctacgtgtcccggggagggatccggcggtttacatgcccgctcacaggactctggcccatcaacacgctgaaatgcatgcccagagtatgtccttttgctgggatcttagaaaacggaacggtacgctatacaacgtttgagtatcccaacaccatcagcttttcttgccacacggggttttatctgaaaagagctagttctgcaaaatgca

SEQ ID NO: 12516 - DNA, 411 bp, Bos taurus
  Clone ID: 53-LIB34-075-Q1-E1-F10
ccacgcgtcaacggaagcgtgggagctcgcctgagccagaaatttcccaaggctgagtttgtagaagttaccaagctagtgacagatctcacaaaagtccacaaggaatgctgccatggtgacctacttgaatgcgcagatgacagggcagatcttgccaagtacatatgtgataatcaagatacaatctccagtaaactgaaggaatgctgtgataagcctttgttggaaaaatcccactgcattgctgaggtacaaaaagatgccatacctgaaaacctgcccccattaactgctgactttgctgaagataaggatgtttgcaaaaactatcaggaagcaaaagatgccttcctgggctcgtttttgtatgaatattcaagaaagcatcctgaatatgctgtctcagtg

SEQ ID NO: 12517 - DNA, 361 bp, Bos taurus
  Clone ID: 53-LIB34-075-Q1-E1-F2
gtgagacgtatgactggtactgattgccttttctcagtatctccagcagtgtccatttgatgagcatgtaaaattagtgaacgaactaactgagtttgcaaaaacatgtgttgctgatgagtcccatgccggctgtgaaaagtcacgtcacactctctttggagatgcactgtgtaaagttgcatcacttcgtgaaacctatggtgacatggctgactgctgtgagaaacaagagcctgaaaaaaatgaatgcgtcctgagccacagagatgatagcccagacgtccctaaattgacaccataccccagtactttgtgtgatgagtttaaggcagatgaacagaacgttttgggggaaaat

SEQ ID NO: 12518 - DNA, 307 bp, Bos taurus
  Clone ID: 53-LIB34-076-Q1-E1-F2
ccacgcgtccgtcaaaaatctgtcagtcaaagatgtccgtcgtggcaatgtggctggtgacagcaaaaatgatccacccatggaagctgctggcttcacagctcaggtgattattttgaaccatccaagccaaatcagtgctggatatgcacctgtgctggattgtcacacagctcacattgcttgcaagtttgctgagctgaaggagaagattgatcgtcgttctgggaaaaagctggaagatggccctaaattcctgaaatctggtgacgctgccatcgttgatatggttcctggcaagcccatg

SEQ ID NO: 12519 - DNA, 446 bp, Bos taurus
  Clone ID: 53-LIB34-077-Q1-E1-F10
ctatagtaagtcgtaatattggccgtagcattccttacgttagtggaacgaaaagttctaggctatatacaactccgaaaaggtccaaatgtcgtaggtccatatggcctacttcaacccatcgccgatgcaatcaaacttttcattaaagaaccactacgacccgctacatcttcagcctcaatatttatcctagcacctatcatagctttaggcctagccttaaccatgtgaattcccctaccaataccctatcctcttatcaacataaacctaggagtcctatttatactagccatatcaagcctagccgtatactccattctctgatcaggctgagcttccaactcaaaatacgcactaatcggagccctacgagcagtagcacaaacaatctcatatgaagtaacgctagcaattatcctgttatcagtactcctaataag

SEQ ID NO: 12520 - DNA, 361 bp, Bos taurus
  Clone ID: 53-LIB34-079-Q1-E1-F2
aggcagctgtgctgaacaagatggctctggttggaggatgaagacttgtcacgctggggacctgaatggagtttattatcatcgtgtgacttactcaaaatcatctactcgaaatggttatgatagtggaactaattgagccacatggaaatctcggtggtattccatgtggaaaattacatgaagatgatcccactatagagacgtgccatccaagaatgacagcatcatcaactggggggaaccagacaggtcggattataacatcacgttgaactaccagatgactaattcattttgccctgagctgttcactctgtattgatacacagtttcacaaacattcatgaaattttcttct

SEQ ID NO: 12521 - DNA, 377 bp, Bos taurus
  Clone ID: 53-LIB34-080-Q1-E1-F10
acccacgcgtcaggtgagctctacgcatgatttgcctaattatagtagggggtttaactggaattgtcatagctaactcgtccctcgatagagttctgcacgacacatattgacgtggtcgcacatttccactacgtatgatcaatatgagctgtaattgctattacagggggatttgtctactgatttcgctgactctcaggttatacgctcaacgatacagatgccaaaatagacttcgcaggcacatttgtatgcgtcaatacaaccttgttcccagaacactttctacgactatcaggcatacctcgacgagactccgacgacccagatgaagagtgctgatgaaatgctaattcatcaataggctcattcac

SEQ ID NO: 12522 - DNA, 448 bp, Bos taurus
  Clone ID: 53-LIB34-080-Q1-E1-F2
gggccgacccacgcgtccagtccattcaaagtaacaaaacttggcaggactgtgactacaaggactctgcacaagctgccacaggagagtgcacagcgaccgtggccaagagagggaatatgaagttctccgtggctatccagacctgcctgatcactccagccgagggccccgtggtgacagcccagtatgagtgccttggctgtgtgcatcccatatctaccaagagccccgacttggagcctgttctgagatatgccatccaatattttaacaacaacaccagtcattcccacctctttgatctgaaagaagtaaaaagagcccaaagacaggtggtgtctggatggaactatgaagttaattactcaattgcacaaactaattgttccaaggaggaattttcattcttaactccagactgcaagtccctttcaagtggtgatac

SEQ ID NO: 12523 - DNA, 421 bp, Bos taurus
  Clone ID: 53-LIB34-081-Q1-E1-F10
ctccaagaggcccctctagaatggaaggcactgctggaaatgcagcagacgaaaatggtgttggaaactttcggtggcgatggacatgccagaggagactctgtatctcaaggaacaggattagcaccaggaagtcccagaaagcctggaaccagtagtattggaaatgtgaaccctgggagctatggacctggaagtagtggcacttggaaccccggccgccctgagcccggaagtgctggcacctggaaccccggccgccccgagcccggaagtgctggcacctggaaccccggccgccccgagcccggaagtgctggcacctggaaccccggccgccccgagcccggaagtgctggcacctggaaacccggccgccccgagcccggaagtgctggcacttggaatactggaagctctg

SEQ ID NO: 12524 - DNA, 445 bp, Bos taurus
  Clone ID: 53-LIB34-082-Q1-E1-F2
gacactgtacagtttgcagaatatattcagaaaaacgtgcagctctataagatgcgaaatggttatgaactgtctcccacggcagcagctaatttcactcgccgaaacctggctgactatcttcggagtcggaccccgtatcatgtcaacctcctcctggccggctacgatgagcacgagggtccagcactctactacatggactacctggcagccttggcaaaagcccctttcgcagcccacggctatggtgccttcctgactctcagtatcctggaccgatattacacgccaactatctcgcgtgagaaggcagtggagcttcttaggaaatgtctggaggagctccagaaacgcttcatcctgaatctgccaaccttcagtgttcgaatcattgacagaaatggcatccatgacctggacaacatttccttccctaaacagg

SEQ ID NO: 12525 - DNA, 351 bp, Bos taurus
  unsure (16): unsure at all n locations; Clone ID: 53-LIB34-083-Q1-E1-F2
aggaatcaatgaacanatccccctataatagcaaatactaatagttttcatcatctgagaagcatttgcatctaaacgagaagtcttgactgtagacttaaccacgacaaatctagaatgattaaacggatgccctccaccatatcacacatttgaagaacccacctatgttaacctaaagtaagaatggaaggaatcgaaccccctactattggtttcaagccaacatcataacctctatgtctctctcaataaacataaaaccttttaacaccagagtgcggcaatcatgagggccttgaaaatgaatgtctgtaaagaatccctgataacacaagtcacaataatttc

SEQ ID NO: 12526 - DNA, 369 bp, Bos taurus
  Clone ID: 53-LIB34-084-Q1-E1-F2
agagaaccgccgtcagcattcttagtctgggaggacctgcttgttctatcacaatgaactggctggtgtgggcactcctgctgtgctcctctgcaatggcacatgtgcacagagaccccactctggatcatcactgggatctctggaagaaaacctatggaaaacaatacaaagaaaagaatgaggaagtagcacggcgtctcatctgggaaaagaatctaaaaactgttacacttcacaatctggagcattcaatgggaatgcattcatatgagctaggcatgaaccacctaggagacatgaccagtgaagaagtgatatctttaatgagttccttgagagttcccagccaatggccaagaaatgtca

SEQ ID NO: 12527 - DNA, 439 bp, Bos taurus
  Clone ID: 53-LIB34-085-Q1-E1-F2
attccaaggccgacccaggcgtccaaccccacaaaactttggcacaatgaagtgggtgacttttatttctcttctccttctcttcagctctgcttattccaggggtgtgtttcgtcgagatacacacaagagtgagattgctcatcggtttaaagatttgggagaagaacattttaaaggcctggtactgattgccttttctcagtatctccagcagtgtccatttgatgagcatgttaaattagtgaacgaaactaactgagtttgcaaaaacatgtgttgctgatgagtcccatgccggctgtgaaaagtcacttcacactctctttggagatgaattgtgtaaagttgcatcccttcgtgaaacctatggtgacatggctgactgctgtgagaaacaagagcctgaaagaaatgaatgcttcctgagccacaaaga

SEQ ID NO: 12528 - DNA, 348 bp, Bos taurus
  Clone ID: 53-LIB34-086-Q1-E1-F10
gcgtcaagcaacatggaaggtgtcctttcattaggaaacttcccattaaccttactcagcctccaactcttaggagtttagtttgcttcacctcccctccctgcccctcccgccccacccctcccctctgtaaacaaaaaaaaaaacccttcagtatacgtaaaaaacatacatggggatcagtgaatctgcttgtactcaaatgtatgtcttctctggagttttctaaggaatcatttgaggcttaggattccagactttgacttattaaaatatgtatagttacccgttaaaaaaaaaaaaaaaaaaaaaaaaaaaaaaaaaaaaaaaaaactcaaaaaaagccga

SEQ ID NO: 12529 - DNA, 325 bp, Bos taurus
  Clone ID: 53-LIB34-086-Q1-E1-F2
gtgatggctgcggatcctgaatagaccacagcactgtgtgacgagcccgtggatttggcgaactcgtgggtttctcacctggtctgacaggttgcccagggtctcaccatggacttccagcatctcgccgggggcaagaccgggagcgggggtgtggcctcctcttccgagagcaagcgggaccgccgggaacgtctgcgacagctggctctatacaccattgacatcaataacgacccctacttcatgaagaaccacctgggctcctatgactgcgaactgtgcctgatgctgcactgcattgacgggagttacctcgcgcaca

SEQ ID NO: 12530 - DNA, 416 bp, Bos taurus
  Clone ID: 54-BOVMS1-002-Q1-E1-F10
ggtcgacccacgcatccaatcaacattcgcaactctgagactgatacaatcgtatttatcataaaagcacagaggagccattctgggaaatacgatctgcaggtcaaagtggaaaaatttgtggaaactgcgtccatcgatatccgggttattgaccgtccaggtccaccccaacttgtgaagatcgaggatgtctggggagagaatgttgctctatcatggaccccaccaatggatgatggaaatactgccattacagggtacacgatccagaatgctgataagaagagcatggagtggttcactgttattgagcattatcatcgaaccagtgccaccattactgaactggtcattggaaacgagtattatttccgggtctttgctgaaaacatgtgtggcctcagtgaagatgc

SEQ ID NO: 12531 - DNA, 416 bp, Bos taurus
  unsure (344),(401): unsure at all n locations; Clone ID: 54-BOVMS1-002-Q1-E1-F6
agggctacagcatgttcgccgtgggcattggggccttgctgttcgggtactggagcatgatgaagtggaaccgcgaacgcaggcgtctacagatcgaggacttcgaggcccgcatcgcgctgatgcctctgttacaggcagagaaggaccggagggttctccagatgcttcgggagaacttggaggaggaggcaactgtcatgaaggatgtgccgggctggaaggtgggtgagtccgtgttccacaccacgcgctgggtgactcccatgatgggcgagctctacgggctgcgagcaagcgaggaggttctcagcgccacctatgggttcatatggtacacgtangggcctgcgccccagagactgctggacccgcgtcccctccccactaggagagaatanacgctttggagactg

SEQ ID NO: 12532 - DNA, 353 bp, Bos taurus
  Clone ID: 54-BOVMS1-003-Q1-E1-F6
cggtccgtatcgtccgggtcgcaccacgcgtccgcactaataaaaattgtaaacaatgcattcatcgaccttccagccccatcaaacatttcatcatgatgaaatttcggttccctcctgggaatctgcctaatcctacaaatcctcacaggcctattcctagcaatacactacacatccgacacaacaacagcattctcctctgttacccatatctgccgagacgtgaactacggctgaatcatccgatacatacacgcaaacggagcttcaatgttttttatctgcttatatatgcacgtaggacgaggcttatattacgggtcttacacttttctaaaaacattaaatat

SEQ ID NO: 12533 - DNA, 378 bp, Bos taurus
  Clone ID: 54-BOVMS1-004-Q1-E1-F10
atgcgacgtcatagctcttctatagtgtcacctaaattcaattcactggccgtcgttttacaacgtcgtgactgggaaaaccctggcgttacccaacttaatcgccttgcagcacatccccctttcgccagctggcgtaatagcgaagaggcccgcaccgatcgcccttcccaacagttgcgcagcctgaatggcgaatgggacgcgccctgtagcggcgcattaagcgcggcgggtgtggtggttacgcgcagcgtgaccgctacacttgccagcgccctagcgcccgctcctttcgctttcttcccttcctttctcgccacgttcgccggctttccccgtcaagctctaaatcgggggctccctttaaggttccga

SEQ ID NO: 12534 - DNA, 476 bp, Bos taurus
  Clone ID: 54-BOVMS1-006-Q1-E1-F10
cggtcaggccaccacgggtcgaccgacggtccggaaggaggccaagaaggacgagtccaagagcggcgaggaggcgctcatcattcctccggacgccgttgccgtggactgcaaggacccagatgaagtggttccggttggccaaagaagagcttggtgttggtgcatgtgctttggactggcgtttatgctcgcaggtgtcattctggggggagcatacctgtacaaatactttgcatttcaaccagatgacgtctactactgtggaataaagtacatcaaagatgatgtcgtcttaaatgagccttctgcagacgccccagcctctcgctaccagaccattgaggaaaatatcaagatctttgaggaagacgacgttgaattcatcaacgtgcctgtcccaaagtttgcagatagtgaccctgccaatatcgttcatgaactcaacaagaaacttaccgcctaattggatttta

SEQ ID NO: 12535 - DNA, 416 bp, Bos taurus
  Clone ID: 54-BOVMS1-008-Q1-E1-F10
gggccgacccacgcgtccagaaatcaataacccatctcttacagtaaaaaccataggacatcagtgatactgaagctatgagtatacagattatgaggacttaagcttcgactcctacataattccaacatcagaattaaagccaggggagctacgactattagaagtcgataatcgagttgtactaccaatagaaataacaatccgaatgttagtctcctctgaagacgtattacactcatgagctgtgccctctctaggactaaaaacagacgcaatcccaggccgtctaaaccaaacaacccttatatcgtcccgtccaggcttatattacggtcaatgctcagaaatttgcgggtcaaaccacagtttcatacccattgtccttgagttagtcccactaaagtactttgaaa

SEQ ID NO: 12536 - DNA, 243 bp, Bos taurus
  Clone ID: 54-BOVMS1-008-Q1-E1-F6
cgcgtccgagcagagatcgaggagctgagggccaccctggagcagacagagaggagcaggaagatcgcagagcaggagctcctggatgccagtgagcgtgtccagctcctgcacacccagaacaccagcctgatcaacaccaagaagaagctagagacagacatcactcaaatccagggagagatggaggacattatccaggaagctcgcaacgcagaagagaaagccaagaagggcatcact

SEQ ID NO: 12537 - DNA, 365 bp, Bos taurus
  Clone ID: 54-BOVMS1-009-Q1-E1-F6
atgcgacgtcatagctcttctatagtgtcacctacattcaattcactggccgtcgttttacaacgtcgtgactgggaggggcctggcgttacccaacttaatcgccttgcagcacatccccctttcgccagctggcgtaatagcgaagaggcccgcaccgatcgcccttcccaacagttgcgcagcctgaatggcgaatgggacgctccctgtagcggcgcattaagcgcggcgggtgtggtggttacgcgcaacgtgaccgctacacttgccagcgccctagcgcctgcccctttcgcggtcctcgcttcctttctcaccacgttccccggcttttcccgtcagctctaaatcgggggctccct

SEQ ID NO: 12538 - DNA, 408 bp, Bos taurus
  Clone ID: 54-BOVMS1-010-Q1-E1-F10
atgcgacgtcatagctcttctatagtgtcacctaaattcaattcactggccgtcgttttacaacgtcgtgactgggaaaaccctggcgttacccaacttaatcgccttgcagcacatccccctttcgccagctggcgtaatagcgaagaggcccgcaccgatcgcccttcccaacagttgcgcagcctgaatggcgaatgggacgcgccctgtagcggcgcattaagcgcggcgggtgtggtggttacgcgcagcgtgaccgctacacttgccagcgccctagcgcccgctcctttcgctttcttcccttcctttctcgccacgttcgccggctttccccgtcaagctctaaatcgggggctccctttagggttccgatttagtgctttacggcacctcgaccccaaa

SEQ ID NO: 12539 - DNA, 124 bp, Bos taurus
  Clone ID: 54-BOVMS1-010-Q1-E1-F6
cagactcttgcgaagtgaaatacgaaattaagataacacaccaggactatctacaaaaatttattgtctatttacagaagaaaagcatgcgtatcattaaaacaaataaggtgtgttttctcac

SEQ ID NO: 12540 - DNA, 324 bp, Bos taurus; identical to SEQ ID NO: 225
  Clone ID: 54-BOVMS1-012-Q1-E1-F8

SEQ ID NO: 12541 - DNA, 351 bp, Bos taurus
  Clone ID: 54-BOVMS1-013-Q1-E1-F6
ctaaaatgtcctgggttctttctagtgcagcggtatgtagacaagagtatacatttgtgatctgcattgctagtacgtataattccacattggatcacttaagctgtacacataactacagacccaatgcagttcatgcttttctgtatgttgttgcgggaatacagttttacatggtaagcacatggcctcacttacttcaatctgactatattgagatctgtattaaccctttaattcattaatatcttttttcctcatcctcttgaaaagtaagttccaacctcacaccttactgtatcttccatccataaaaggtttgtacctttttcattaccggcacttcagaca

SEQ ID NO: 12542 - DNA, 455 bp, Bos taurus
  Clone ID: 54-BOVMS1-014-Q1-E1-F10
gttgcttcagaatgaatcaaccaatgaacagttgcagatacattataaggtatgctatgcacgtgttcttgattatagaagaaagttcattgaagctgcacaaaggtacaatgaactctcttacaagacaatagtacacgaaagtgaaagactagaggccttaaaacatgctctgcactgcaccatcctagcatcagcaggacagcagcgttctcggatgctagctactctttttaaggacgaaaggtgctaacagcttgctgcttatggaatcctagagaaaatgtacctagacaggatcatcataggaaatcaacttcaagaatttgctgccatgctgatgcctcaccagatagcaactacagctgatggttctagcatcgtggacagagctgtgattgaacacaatttattgtctgcaagcaaattataggataatattacctttgaagaac

SEQ ID NO: 12543 - DNA, 408 bp, Bos taurus
  Clone ID: 54-BOVMS1-016-Q1-E1-F6
caaggatacccagatccacctggatgatgctctgcggggccaggaggacttgaaggagcagctggccatggtggagcgcagagccaacctgctgcaggctgagatcgaggagctgagggccaccctggagcagacagagaggagcaggaagatcgcagagcaggagctcctggatgccagtgagcgcgtccagctcctgcacacccagaacaccagcctgatcaacaccaagaagaagctagagacagacatcacgcaaatccagggagagatggaggacattctccaggaagctcgcaacgcagaagagaaagccaagaaggccatcactgatgcagccatgatggctgaggagctgaagaaggagcaggacaccagcgcccacctggagcggatgaagaagaacat

SEQ ID NO: 12544 - DNA, 446 bp, Bos taurus
  unsure (137),(384): unsure at all n locations; Clone ID: 54-BOVMS1-018-Q1-E1-F10
gttatttttcaggttgagggatatttcttccctgcctttgacacattggattagttcaggggcttaaatcagtttaaaatgaacttttgcttttctaggtcattaagatgttttgttttagtttctttagcctgtangggccgattttagtactggttttcaatattttatagtacaagacaagttgctttggtccatttcataagccagaattccttatatttagataattaaaggttcttaaagtgaagatttactgtttctttgttacttgctggtacagctaaagtttgttttacttgcacatttgtacatatacctaatgttttcaagtgccttaattgtttaaaatctctggcttcaaaggtttttgggaaaaggtangcttacctcacatttttgtgtttctctcaatagtgatattctaaggtactcacagaaatttt

SEQ ID NO: 12545 - DNA, 416 bp, Bos taurus
  unsure (409): unsure at all n locations; Clone ID: 54-BOVMS1-020-Q1-E1-F10
cagcaatcccatacatcggcacaaatttagtcgaatgaatctgaggcggattctcagtagacaaagcaacccttacccgattcttcgctttccattttatccttccatttatcatcatagcaattgccatagtccacctactattcctccacgaaacaggctccaacaacccaacaggaatttcctcagacgtagacaaaatcccattccacccctactataccattaaggacatcttaggggccctcttactaattctagctctaatactactagtactattcgcacccgacctcctcggagacccagataactacaccccagccaatccactcaacacaccccctcacatcaaacccgagtgatacttcttatttgcatacgcaatcttacgatcaatcgccaacanactagga

SEQ ID NO: 12546 - DNA, 152 bp, Bos taurus
  Clone ID: 54-BOVMS1-020-Q1-E1-F6
ggatttctcacacaaagaaacaaaatgaaacacagatttaaaaagtgtacatacattgatttaactcatttagataattattaacactaaaccctgtggaaagaaatggaaaacttgaagcattaacactcaaccgttctgttttgctgcgt

SEQ ID NO: 12547 - DNA, 441 bp, Bos taurus
  Clone ID: 54-BOVMS1-021-Q1-E1-F6
aaagaagacgcacaaaaaagatacaaacaaacatacacataaaataaaaacatcaaaacacaacaaaaaatgtcaaatcaattcaaatcacaaggacgtcgttttacaacgtcaatgactgggaaaaccctgacgattcaacaacttaatcgcggggggcccccccaagggtttcaccatctggtgtcctttcgaggaagttcgcaccccttcctcttcgtaccagtttctccgtcccggggccctccttttacacgttctgtagcgggacatcccgcgctttacctgtcttagcccccctcagcgtaaccccctttcctcccagcgggctatcgcccactcggttcgctttcttcccctctcctctcgtttcgtccgcctgatttccccatcgggccccccctcttccgcgccctttaccgctccggtttcttgctttac

SEQ ID NO: 12548 - DNA, 439 bp, Bos taurus
  Clone ID: 54-BOVMS1-022-Q1-E1-F6
gcctcatgcaagcattgggaaatcatagtaggggggagcaggactcttcactggacatgaaggactgccggcccctccggaaatggtcatctttatccaaactcaccgtcccagagaactgtagccagggtggcatggtgcacacagaagaatcaaggagaggtttggaaaagacagggagagacaaggcattaacagcacaactaaggaccattggacctagctgtttacatgacagtatggagatgcttaagctagaggataaggaaataaataaaaaacgaccatcaactctggacagcaaatataaatttgagagctgtagcaaagaggactttagagcttcttcctccactcttaagagacaggccttagacatgacatacagtgccttacctgaaagcaagcctattatgacaagctcagaggcttttgaatc

SEQ ID NO: 12549 - DNA, 448 bp, Bos taurus
  Clone ID: 54-BOVMS1-023-Q1-E1-F10
tcccggcgtcacccacgcgtccgcagaaaaaaaaaaaaaaaatataaaaaaaaaaaaaaaaataaaaaaaataataaaaaaaaaaaaaaaaaaataaaaaaagattaaaaatcaaaaatattaaaatacttaaataaatatgggtgaaaaataaaaaggtctcctcccttaaaggtttaattcttttttatgcttgcattcaacttcaaacctttcctagattttcccttaatttaattttcttgcccttcttttaacaacttcgtatttggaaaaccctggtttttcccaaatttatcccctttttagcatttccccttttttcaattgggttttttaccaaatagccccgcactttttgcccttactaaatttttccattctttattggcaattggtatcgcccttttacctttgcattaacctttggtgttttcatttttaatct

SEQ ID NO: 12550 - DNA, 431 bp, Bos taurus
  Clone ID: 54-BOVMS1-023-Q1-E1-F6
cacgcgaccggtaccagaaacccttaagaaaaagcggaagaatttcgcagagcttaagatcaagcgactgagaaagaagtttgcccaaaagatgcttcgaaaggcaaggaggaagcttatctatgaaaaagctaagcattaccacaaggaatacaggcagatgtacagaactgaaattcgaatggctaggatggcacgaaaagccggtaacttctatgtacccgcggaacccaaattggcgtttgtcatcaggatcagaggtatcaatggtgtgagcccaaaggttcaaaaggtgctgcaactccttcgcctcgggcaaatcttcaacggaacctttgtgaagctcaacaaagcgtcaattaacatgctgagaattgtggagccatacattgcatgggggtacccaaatctgaagtctgtaaatgaattga

SEQ ID NO: 12551 - DNA, 344 bp, Bos taurus
  Clone ID: 54-LIB188-001-Q1-E1-F10
actctccatggtttggaggcatagatagcctctccattgatgctcagccacttcccaacagcaagtagcctttcttggaagatgggaacgatcagtccgtctttggttggtccgacgttgagaagatagttgcctcccaaacttactgtctgaaccagttccgaaatgatcgtggattcgtttgtgatgtcagccatctccatgtctcgacggtagccccaggaccgctggtctatggaggtgcacatctcccacttgtgatctggcaaggtctctggctggaatttatctttacagttgtagtatcctccatgatgacaggagcagttctgaccccatcggtc

SEQ ID NO: 12552 - DNA, 454 bp, Bos taurus
  Clone ID: 54-LIB188-001-Q1-E1-F6
acttcattgggacactactgttcaaaggccctggccaaacaactcccaacaaaacacaccccaagttgcttccagccgactggggcggaagccgtgcacagagatgaggcctccaaacgaggacacaaagtcagggcgagttggggccattggcaatgctcagggctgccagccagactccgaagagggagcccaagcagttttttctgggacactctacttgaattatcgttcaattagtcaatgcaacagatcttcaaaagagaacaattaattaacatgataaggaggttactacattctttggactatatatcataattgtggttagtaaattcgacagccttaacaaaaatagcctccatcatttgcaggtatgaagataacttaattctctactgggctttttatttttgctggatggcagtaatcaattgacaagctataaatgata

SEQ ID NO: 12553 - DNA, 417 bp, Bos taurus
  unsure (401): unsure at all n locations; Clone ID: 54-LIB188-002-Q1-E1-F10
accacaatcatctggctttttcacatggatcatgtttggatcttgggaagaaacccttatttccctccagaaacagtgacctatctcaaagatatcctgacctctaataacattgaagttgagaaaatgacgatcacagatcaggtgaactgtcccgagtccatgtaaccaggctctaaagggagctgcattcactccatgttccttctcttgctttgcttttcccctataccgaccctcataaagacaaaccaaaccaccagagcaacctattacaaacctaccagaagggaaacgtggcagcagaagctaatggagaagaacccaaggcaagctggcccagacatttagccatgcaccattctgttaccttgcgagtctgataataaacttgctgctgnactgctgtgctcacag

SEQ ID NO: 12554 - DNA, 339 bp, Bos taurus
  Clone ID: 54-LIB188-002-Q1-E1-F6
acaattataccaacattcattgaggctgatatcacaggtataagggaataccatgactgtaaaacgtctcttcatactcgccaaagagttttagctataaggtcagttaccagcgccaaagttgttcttaacaagtagaatttttatgttcattcagtcgaagagtctcttacatctttctgggcctattcatttgcagataggagaagaaactgtaaccaggttcttcatgccatgcattcacacgtgacacccactcttcatatgctgtccaaactcttcatatgctgtccaatttctttaagataaaaggagtgactcgcaacagggccacataga

SEQ ID NO: 12555 - DNA, 445 bp, Bos taurus
  Clone ID: 54-LIB188-003-Q1-E1-F6
catgctaacgagcgccatgcgcggcgggatacttggtgaaaagggccggcggatccgggaattgactgctgtggttcagaagagatttggcttccctgaaggcagtgtagagctttatgctgaaaaggtagccacaagaggactgtgtgccattgcccaggcagagtctctgcgttacaaactcctaggaggccttgctgtgcggagggcctgctatggtgtgctgcggttcatcatggagagtggggccaaaggctgcgaggtcgtggtgtctgggaaacttcgaggacagagggctaaatccatgaagtttgtggatggcctcatgatccacagtggggaccctgttaactactatgtggacaccgccgtgcgccatgtgctgctcagacagggtgtgctgggcatcaaggtaaagatcatgctgccttgggaaccgactggt

SEQ ID NO: 12556 - DNA, 353 bp, Bos taurus
  Clone ID: 54-LIB188-004-Q1-E1-F6
gatacacaccccaacccatccaacaacgattttggaacaggacttgtttttttaaagaaagaaaacagtgacatctcgccaggcgagcgtgtagagccgctaactgcacggcctccaatgcgatgcgtgtgcacagaggggcgacgcgaagtggacagagcgcgacgtcacaacttcaaagaggttatttcttaaaagaaaaggaacatctaaggactgagtcctatatgcactgtgagcatttctacagcatgcggttctaagagcaaacccaccccatatggcaaacgatcaggttttttaaaatttaacttagaaagtttgagatcattattttcaaaacattgatttgt

SEQ ID NO: 12557 - DNA, 281 bp, Bos taurus
  Clone ID: 54-LIB188-006-Q1-E1-F6
acagaaataagaagaaggccatccattcaaagcctacctggatgtcgacatcactctgtcctcagaagctttccataattatgtgaacgctgccatggtgcacatcaacagggccctgaaactcatcattcgtctctttctggtggaggatctagttgactccttaaagcttgctgtcttcatgtggctgatgacctatgttggtgccgttttcaatgggatcacccttctgattcttgctgaactactcgttttcagcattccaattgtctatgagaagt

SEQ ID NO: 12558 - DNA, 431 bp, Bos taurus
  Clone ID: 54-LIB188-007-Q1-E1-F6
gggcccgggataacgcgtgatcagcgccctgcccatccagcaccaggactggactggaggaaaggagttcaagtgcaaggtcaacaacaaaggcctctcggcccccatcgtgaggatcatctccaggagcaaagggccggcccgggagccgcaggtgtatgtcctggacccacccaaggaagagctcagcaaaagcacgctcagcgtcacctgcatggtcaccggcttctacccagaagatgtagccgtggagtggcagagaaaccggcagactgagtcggaggacaagtacgatgagtccggcccctccatcgtccaccgcaaatgcttctaggcggactgttagctgcgttacaccctttttcttgacaaaacctaacttgcccaaaaaaccaagataaaattggcatggcttaatttgtttttttttt

SEQ ID NO: 12559 - DNA, 408 bp, Bos taurus
  Clone ID: 54-LIB188-008-Q1-E1-F6
acacctgccaggcagaacacaacaaggaaaccttccagaagaacgtgtcctcctcatgtgatgttgcaccaccatctcccatcggggtcttcaccatccccccatccttcgccgacatcttcctcacgaagtcagccaagctgtcctgtctggtcacaaacctggcctcctatgatggcctgaacatcagctggtcccgtcagaacggcaaggccctggagacccacacgtattttgagcgacacctcaacgacaccttcagcgcccggggtgaggcctcggtctgctcggaggactgggagtccggagaggagttcacgtgcacagtggcccactcggacctgcccttcccagaaaagaacgccgtctccaagcccaaagacgtcgccatgaaaccgccgtccgtgt

SEQ ID NO: 12560 - DNA, 430 bp, Bos taurus
  unsure (340): unsure at all n locations; Clone ID: 54-LIB188-009-Q1-E1-F6
ggccgcgggaacactgctagtcttccaactcaacaagcagcatatctccagcgtgaactgtagctgccgagaatagcaggcgggcctcctccagcagggcagctactcctctgacaggaggtcgtgacccaggcaggctgggcaggtgcgctggctcttcagccactgcttgaagcaccccttgtgaagcctgtgcccacactgcagctcacgcacgtgtttggacttgaatacttctcggcacatttcacaggaatttgcgcaggacacagggacgtcctcggtcctcggccccctggtttcgggcgatgctccgacaggcatggaggacgggtcctgngcggccctgtgcacagcaacagcagagctgggtgcagacagcctccagccctttcctggacttggctttttccttctttcttcatcaagg

SEQ ID NO: 12561 - DNA, 432 bp, Bos taurus
  Clone ID: 54-LIB188-010-Q1-E1-F6
acttatgatcggccagcccaccgggcactttgacaagcttgttgttgttcaaatgaagttccctcaaatgaggagtgttggccaaagagtcattgtcaaccgcagaggtgctgttgaaactcagtcccaacttagccaaattattcagtcctttcaggctagctgcatcaactttggtgattttgttgccatcgagatgtaattcagtaagggaaggaggaagaccttgagggatggtagttatatttgtgtcagcaatgcggatgtaggagagcttcttcattccctgaaaggctccattttcaatgcctgagctcttcagcgggttggtgccaagttctacgacgatcatctggttcaatccattgaacacagactttcgcactttggtgatctcgttctcatggacacgcagctcctgaagagttttgg

SEQ ID NO: 12562 - DNA, 286 bp, Bos taurus
  Clone ID: 54-LIB188-011-Q1-E1-F6
acatatgtacctcgaactttcggccaaggaaccaaggtagagatcaaaaggtctgatgctgagccatccgtcttcctcttcaaaccatctgatgagcagctgaagaccggaactgtctctgtcgtgtgcttggtgaatgatttctaccccaaagatatcaatgtcaagtggaaagtggatggggttactcagagcagcagcaacttccaaaacagtttcacagaccaggacagcaagaaaagcacctacagcctcagcagcatcctgacactgcccagctcagagt

SEQ ID NO: 12563 - DNA, 424 bp, Bos taurus
  Clone ID: 54-LIB188-012-Q1-E1-F10
aacaagatcaaactactacaatcttactttgctagtaatatatattttttaatttggggatacacagtttcaaagttttctatgcaaaagaatgaaggtaatagggcttaattacatactgcacactgagactggaactgttctgtggacgagacggcacctgttctgtttatgttttataaagtcctactttatggctaactttgttattagtcttcacagtacaaaatatagtttttctcatacaaaaagatatacaattaaaaaacaaaaaatgaaaccacctgcagtccacatactttttcagaaaagggtagagcgagctcagagctctgacacaggacagtgaacaaagtgctaaggcggagagtgactgaccaagtgctagaagctgcagtgagacaggaactgtcaacaaccctgt

SEQ ID NO: 12564 - DNA, 432 bp, Bos taurus
  Clone ID: 54-LIB188-014-Q1-E1-F10
acatgaacacgcaccccggccgcctgctgctctgcctcacgcttggcctctggctcaccaccgcctgggtgctgtcggtagccgagaggcaggccgtgaatgccactgggcacctttcagacacactgtggctgatccccatcacattcctgaccattggctatggtgatgtggtgccaggcaccatgtggggcaagattgtctgcctctgcactggcgtcatgggggtctgctgcacagccctgctggtggccgtggtggcccggaagctggagtttaataaggcagagaagcatgtgcacaacttcatgatggatattcagtatgccaaagagatgagggagtcagctgcccgagtgctgcaggagtcctggatgttgtacatggatatagctatttatttctatcgactagaagatacactcctatttt

SEQ ID NO: 12565 - DNA, 341 bp, Bos taurus
  Clone ID: 54-LIB188-014-Q1-E1-F6
cgccatgggggcgggatacgaagggattcaggagcccctcaccctgagatgggaacctcctcagacctccttcctcaccatgggcatcattgttggcctggttctcctcgtagtagctgtggtggctggagctgtgatctggaggaagaagcgctcaggtgaaaaaagacagacctacacccaggctgcaagtggtgacagtgaccagggctctgatgtgtctctcacggttcctaaagtttgagacagctgccttgtggggactgagtaatgctgcatcccgctatgtgacttcagatcactggacccctctttctgcagctgcatctgaatgtgtctgt

SEQ ID NO: 12566 - DNA, 418 bp, Bos taurus
  Clone ID: 54-LIB188-016-Q1-E1-F10
accctgtccagctgctcccatgcggtggtggctttgctctaccccttctcctgtcagcacaccttcattcctgtcctcccggcctccatgatcgacatcgtctgctgtcccacccctttcctggttggcctgctctccagctccctccccaaactgaaggagctgcctgtggaagaggcactgatggtgaatctggggtctgagcgattcatccgacagatggatgatgaggacacgttgttacctacgaagttacatgcggctctggagcacgctctggacaggaagaacgaactgatctcccatgactcagacagcgactccgatgatgaatgtcatatcctcaatgggctggtgtcagaggtgtttagccggttctttgtggagactgttgggcattactccctcttcctgacac

SEQ ID NO: 12567 - DNA, 455 bp, Bos taurus
  Clone ID: 54-LIB188-016-Q1-E1-F6
cccgaccgccatggcggccggatactttttatattgaaagatttgtcaaactcttcacaccgtggcaagagtttgcatgattaataagaagcagctttttcatgaaatgcttggaggtgaacgagttctcagcctgtgagatccgaccatcccattgattttgaaatttcttttgattaatagaaagaaaaagtggggaggggagaagaggaggaacatgctagcgactgaaagatctctggtgacagccatccagatgtgaaaaaagaaaacagaaaacccaaaagaaaaccaatttgccacctgccctttttctgttttaccacgttctgctcctcgctcttgattttggtctttctggttgaaacagcctccctgtcctgcatctcctaaaggtagtttggaggggagcagccctgcaggacatggtgattcacctctcacaggtgtggggg

SEQ ID NO: 12568 - DNA, 390 bp, Bos taurus
  Clone ID: 54-LIB188-018-Q1-E1-F10
actctaccaaccccagaggagcttctcctggatacagtagaactggcttctctcctctcctggggatttctaagaacccatgagcgagaccggggcaatcttaaagctttatccaaatgccctcaacagaggatgatgaattataccacgatgcacccacccatggaatactctgcagctgcttccaataaaaagaatgggctccttctctgtgggacacatgatttccaaagagcgcggtccagagcagtgtgtatggtgggctaccatttgtgtctgatgtgtgtgtgctcagttgtgcctgactccttgcgattccatggactgtagcctgctagacttctctgtccccgggattttccaggcaagaatattggattgggttgctac

SEQ ID NO: 12569 - DNA, 416 bp, Bos taurus
  Clone ID: 54-LIB188-019-Q1-E1-F6
acgtcgatacctggggccaaggactcctggtaaccgtctcctcagcctccaccacagccccgaaagtctaccctctgagttcttgctgcggggacaagtccagctccaccgtgaccctgggctgcctggtgtccagctacatgcccgagccggtgaccgtgacctggaactcgggtgccctgaagagcggcgtgcacaccttcccggctgtccttcagtcctccgggctctactctctcagcagcatggtgaccgtgcccggcagcagctcaggacagaccttcacctgcaacgtagcccacccggccagcagcaccaaggtggacaaggctgttgatcccagatgcaaaacaacctgtgactgttgcccaccgcctgagctccctggaggaccctctgtcttcatcttcccaccg

SEQ ID NO: 12570 - DNA, 414 bp, Bos taurus
  unsure (401): unsure at all n locations; Clone ID: 54-LIB188-020-Q1-E1-F6
acattcttacatataacaacactgttatacaattagtaacctttgttttttctgtcagaatagcttacaaatatatttttacttaaaaggagagacaggcctgctcaacagtccagctctgggcgtttattgtctttaaagtgaatttcaaaaagaacagaaaaaagattaagtatgaaaccatgaggctgcttataaaaaggcaggaacttgtttgcagacaagatgtaacaacaatctgcagggattcacagctttgtttcaacccatatgccagaaaatgagcacttgggtctacgggcctgaagtcaacgttaaagcaataaggactggaaacagggcctgggaaggtagcttgggatttggaaagttcaagaggcagaaccggcaggaatgggtanggagagtgtttgg

SEQ ID NO: 12571 - DNA, 428 bp, Bos taurus
  Clone ID: 54-LIB188-021-Q1-E1-F6
gccatgggcgcgggatactgggggactcccttgaggtcgtaagtggccccatccagacccatgatcagatattctttcccaggttccaactgaaggcggcaagaggctcggaccaggaagtttctggtctgatcagcggtggccctggcatccttggtgaaatgcaggacttgggtgatacgggtctcaaagaggcggaaagcagccctgctgtcttctcggagaaccttaacctggaagccgtagtccactcggggagagtagcaggcgaatttcatccggtaaccctccaagtcctgctgcccacgctccagggcccggcgctgtcgagggcacttcccctcagcacactggcagacatccgcagagcacaacgtggacaagagtttgctcttacgtggtgccccataaaacacagaacacttgtg

SEQ ID NO: 12572 - DNA, 419 bp, Bos taurus
  Clone ID: 54-LIB188-022-Q1-E1-F6
actcagaggagtgatgctcgccaggccccagccctggtgctgggaggggcggagctgcctcgcaatccgcttctttgctttggcccccgtggcctgagtgaaccacctggctgacttcaggaccatccgcttgtgtccccctcgctggactgcttttcctgtggggcctgcgagatgctcacaatgggtcaacccttttaggctgaatgattccttgggtctcgaaaattcagtccaacagcccttggcttcattcgataggctctgacactggtctacatgactggtctttctaatgtcagtgagtttggttatgtaactctcaacttgaccagttttactaaggggctgacaaatcagaaacacacttgtcagttcggtgaaaataatgtggtcaaacaacgaagtccattgcattg

SEQ ID NO: 12573 - DNA, 425 bp, Bos taurus
  Clone ID: 54-LIB188-023-Q1-E1-F10
ccatggcggcgggatacattgtttattctccacaaacaggatggtaattaatcatggttcctcttctccaatgtatcagatttaagttaattttatgacttacggagctcaagcctagctggtctgaatgaatcaagcactgaggggtttggggcaaagctcagtggagaagaggccctaggtctgggctccaggtcctacctgtgtcacctacctgctggctgactgaccccgatcctacaagtgtcaggtttccaaggctgcttttgtctgtacacgcgcggcaaccactgggctgtcggacacttaatgggaaaaaagagtgtggcagagtccccacaacttcatgaggaggagagcctgaaggagcagctgagggagtatgcccagtgggaagaagcgacaaggaacttgctaagcctcct

SEQ ID NO: 12574 - DNA, 282 bp, Bos taurus
  Clone ID: 54-LIB188-024-Q1-E1-F6
acctggaagtcggctacctggacgacacgcagttcgtgcggttcgacagcgacgcccggaatccgaggatggagccgcggacgcggtgggtgaagcaggaggggccggagtattgggatcggaacacgcgaaacgccaagggcaacgcacagagtttccgagtgggcctgaacaccctgcgcggctaatacaaccagagcgaggccgggtctcacaccctccagtggatgtctggctgctacgtggggccggacgggcgtctcctccgcgggttcatgcagt

SEQ ID NO: 12575 - DNA, 456 bp, Bos taurus
  Clone ID: 54-LIB188-025-Q1-E1-F6
cgcataatccaagccgccatgggcccgggatactcagtataaggctgacggtttacttgctgcaagccgtgtatcgtgcagttacattctcccagttgatcacattccaaatggccttcaggtaatcgggcctgacatttttatactgaaggtaataagcatgctcccacacgtcaatccccagcagggggataagacctgttgttccttgcaggggatcctggttagaacaagcagcaatctgtaagcgtccctgctccttattgaagccgagccaaccccaaccggagccttggacaccaacagatacagcagtcaacttttccttaaatttggcaaaggaaccaaagtcacgtttgatggcttccagcaattccccttggggttctccaccaccgttagggctcagatttgtccagaagatgctgtgattgatatggcccccaccgttgaact

SEQ ID NO: 12576 - DNA, 405 bp, Bos taurus
  Clone ID: 54-LIB188-026-Q1-E1-F10
acttgtactccgactcagtctgccggtctctctgccactccacgtctacatcttctgggtagaagccgatgaccatgcaggtgacgctgaccgtgcttttgctgagctcttccttgggtgggtccaggacatacacctgcgggtcccgggccggccctttgctcctggaaatgttcctcacaatggaggccgaaaggcctttgatgttgaccttgcacttgaactcctttcctccagtccagtcctggtgctggatgggcagggcgctgaccacgcggtactgagtgtcctggggcctccggaggaagaaccggtcctgaaagagctcgtccatgatgctggacgcccgggtgaagctgtcctccatgacgtccatcacgtggctctgctcccggtcattctcca

SEQ ID NO: 12577 - DNA, 409 bp, Bos taurus
  Clone ID: 54-LIB188-026-Q1-E1-F6
acttgagtttaagtcatagaattcaggggcatatatctagctatattttttatactcctaaataattaaaagtaaaaattccataaccaaagagactcccacatgaatgtgttagtaacactgttgaccaagttgaggtgcctgtcctcccagtggtggtagcagtaggtttgggagaggggatctaccagcatcttggttcagggaggggcttcccccagttctggccacttggctggtagtaaatgaccaaagacgacccggaggaagcatcccgggcgtcttaggaggccttggagaaaggaacattcctagacaggtctttagagggacagaccacacaaaactaattaaaacaatgtatcacaaagaaaatggattactctctttataacatgaaaggaggatt

SEQ ID NO: 12578 - DNA, 398 bp, Bos taurus
  Clone ID: 54-LIB188-027-Q1-E1-F10
actcggagtggatcggaggctccatcctggcctccctgtccaccttccagcagatgtggatcagcaagcaggagtatgacgagtctggcccctccattgtccaccgcaaatgcttctaaatggactgcgagcagatgcgtagcatttgctgcatgagttaattcagaagtataaatttgccgtggcaaatgtatacacctcatgctagcctcatgaaactggaataagcctttgaaaagaaatttgtccttgaagcttgtatctgatatcagcactggattgtagaacttgttgctgattttgaccttgtattcaagttaactcttaccttggtatatgtttaataccctgtgcatatctttgatttaaacccctagttatatgcggctctcacctcg

SEQ ID NO: 12579 - DNA, 356 bp, Bos taurus
  Clone ID: 54-LIB188-028-Q1-E1-F6
acatagtcagacacgactgaagtgacttagcatgcatgcatgcattggagaagggaatggcaacccactccagtattcttgcctggagaatcccagggatggtggagcctggtgggctgccatctatggggtcgcacagagtcggatacgactgaagcgacttaccagcagcagcagcatatatacacacattcatttcatttgtctccttttcctttttaccgagtgtccctgcttttgctattgtcttctttctctttccactaatttagcactagaattagtttgaggtccaggctatgcccattctgaagttcaccgtgtctccatcaaagctttttctgatgctgacatgt

SEQ ID NO: 12580 - DNA, 318 bp, Bos taurus
  Clone ID: 54-LIB2809-001-Q1-E1-F10
cgtggtcacggccgaggttgggagtctccaaagtgaaggaggctatggctcctaagcacaaagaaatgcccttccctaaatatccagttgagccctttactgaaagccagagcctgactctcactgatgttgaaaatctgcaccttcctctgcctctgctccagtcttggatgcaccagcctcaccagcctcttcctccaactgtcatgtttcctcctcagtccgtgctgtccctttctcagtccaaagtcctgcctgttccccagaaagcagtgccctatccccagagagatatgcccattcaggcctttctgctgt

SEQ ID NO: 12581 - DNA, 415 bp, Bos taurus
  Clone ID: 54-LIB2809-001-Q1-E1-F6
acataaaatcataaatatacctcagagaattatttaaagtgaacacccatgtaaccactgtccagatcaagacataggaccactcagccccacagaagttctgctgtatccttccttcacccctcagtaaccactgtccagatttgtaaggttatcactgccttggctttccttgtaggtttatctaagtagtgactttggcattgcccttctttgggactggaacgaaaaccgaccttttccagtcctgtggccactactgagttttccaaatttgctggcatttgagtgcagcactttcacagcatcatcttttaggatttgaagtagctcaactggaatttagtgacgcttcctaaggcccacttgacttagcattccagattgtctggctctaggtgagtgaacacaccat

SEQ ID NO: 12582 - DNA, 398 bp, Bos taurus
  Clone ID: 54-LIB2809-002-Q1-E1-F6
acctggtgagattgtggaaagcctttcaagcagtgaggaatctattacacgcatcaataagaaaattgagaagtttcagagtgaggaacagcagcaaacagaggatgaactccaggataaaatccacccctttgcccagacacagtctctagtctatcccttccctgggcccatccctaacagcctcccacaaaacatccctcctcttactcaaacccctgtggtggtgccgcctttccttcagcctgaagtaatgggagtctccaaagtgaaggaggctatggctcctaagcacaaagaaatgcccttccctaaatatccagttgagccctttactgaaagccagagcctgactctcactgatgttgaaaatctggaacttcctctgcctctgctcc

SEQ ID NO: 12583 - DNA, 482 bp, Bos taurus
  Clone ID: 54-LIB2809-003-Q1-E1-F6
accagtaaatgcatattttagaatattggagtttcgagtgagccagaggtctcctatgcacatactctacagagagtgtaaggtagacaagagacggtctcaatctgtaaaatgtctgtgggtaacaaagcagtgtcaagatcagatttaatggctgtttataaagcaggccccatcagtaaactgcagcagccgagaccagtcaagtggagaggcgctggcattctgccgctggtcagcgcgaccagcactgcctccgctgtctgaagacgggtccgtcatcgttagtgacggagatcaaaacgttgttctgcttttagtgattaaaatcaggacctgtatcagcaagttaaactgttgcatttctgtaatttttgtctattattctttgaagcaagtttggcagaagttctttgtagaattcttacaggtcagatcttgttacagggaatttcagaagtttgtgagtgggggagggagaa

SEQ ID NO: 12584 - DNA, 480 bp, Bos taurus
  unsure (420),(457): unsure at all n locations; Clone ID: 54-LIB2809-004-Q1-E1-F10
catggccgcgcgatacagcagaaaggcctgaatgggcatatctctctggggatagggcactgctttctggggaacaggcaggactttggactgagaaagggacagcacggactgaggaggaaacatgacagttggaggaagaggctggtgaggctggtgcatccaagactggagcagaggcagaggaaggtgcagattttcaacatcagtgagagtcaggctctggctttcagtaaagggctcaactggatatttagggaagggcatttctttgtgcttaggagccatagcctccttcactttggagactcccattacttcaggctgaaggaaaggcggcaccaccacaggggtttgagtaagaggagggatgttttgtgggaggctgttagggatgggcccatggaagggatagactanagactgtgtctgggcaaaggggtggattttatcctgnagttcatcctctgtttgctgctg

SEQ ID NO: 12585 - DNA, 450 bp, Bos taurus
  Clone ID: 54-LIB2809-005-Q1-E1-F6
acagcagaaaggcctgaatgggcatatctctctggggatagggcactgctttctggggaacaggcaggactttggactgagaaagggacagcacggactgaggaggaaacatgacagttggaggaagaggctggtgaggctggtgcatccaagactggagcagaggcagaggaaggtgcagattttcaacatcagtgagagtcaggctctggctttcagtaaagggctcaactggatatttagggaagggcatttctttgtgcttaggagccatagcctccttcactttggagactcccattacttcaggctgaaggaaaggcggcaccaccacaggggtttgagtaagaggagggatgttttgtgggaggctgttagggatgggcccagggaagggatagactagagactgtgtctgggcaaaggggtggattttatcctggagttcat

SEQ ID NO: 12586 - DNA, 374 bp, Bos taurus; identical to SEQ ID NO: 11155
  Clone ID: 54-LIB2809-006-Q1-E1-F6

SEQ ID NO: 12587 - DNA, 237 bp, Bos taurus
  Clone ID: 54-LIB2809-007-Q1-E1-F6
tacatgacaattagtggactgcacctatttcgctggcgagatgaaatcactcggtgtcagttttgctaccattcaggtgggcaatatgaccaaccctaccaccttcatcgaaatgtattttgagggagtcatcataattttcacacaccatcttgcggggcacacttatcatctccatgctgggattccccttcgactagaccactgcaactgacattaacgtcatatccagtttca

SEQ ID NO: 12588 - DNA, 427 bp, Bos taurus
  unsure (390): unsure at all n locations; Clone ID: 54-LIB2809-008-Q1-E1-F6
cgccatgcgggcgggatacaactagatttggagttgatatcaatagaaattattccaaaattattcttaggtcacaaataactactatcccacataaaaagggaaaaatcccacccaattaaggaaaaggtatcctgtgtatgtttccatggcaatgagtttatgcattctcagattttgtccggctagttatccaccctttatctgatgcatttattccatctctcagagagaaccatatagattcctgacggcatccaggacacgtggctcgtggtggacacacttcatggtggatactgctactataaaaatactcagaacttaagagaattccaagatgctttataaaaagcattagtcatgcctcaaaactgccctttgaggtangtcagtattattatcccattttaacagaatgaaaact

SEQ ID NO: 12589 - DNA, 400 bp, Bos taurus
  Clone ID: 54-LIB2809-009-Q1-E1-F10
cgcatgtagccagccgcgacggccgcgggatacagctcagagcccagtctggccagccgtctccggaacctcagcagcccgctgggcctcatggctgtcaaccaagaagcctgggaccacgggctggcctacctgccctttaacaacaagaagccgagcccctgtgagttcatcaacaccaccgcccgcgtgccctgtttcctggcgggagattttcgagcctcagagcagattctgctggccactgcccacaccctccttctccgggagcacaaccggctggccagagaactaaagaaactcaaccctcactggaatggagagaagctctaccaggaagcccggaaaatcctgggagccttcatacagatcatcacctttagggactacctacccattg

SEQ ID NO: 12590 - DNA, 330 bp, Bos taurus
  Clone ID: 54-LIB2809-009-Q1-E1-F6
gcatgaaccgagccgccatgggcccgggatacagcagaaaggcctgaatgggcatatctctctggggatagggcactgctttctggggaacaggcaggactttggactgagaaagggacagcacggactgaggaggaaacatgacagttggaggaagaggctggtgaggctggtgcatccaagactggagcagaggcagaggaaggtgcagattttcaacatcagtgagagtcaggctctggctttcagtaaagggctcaactggatatttagggaagggcatttctttgtgcttaggagccatagcctccttcactttggagactccca

SEQ ID NO: 12591 - DNA, 440 bp, Bos taurus
  Clone ID: 54-LIB2809-010-Q1-E1-F6
gcgatgggcgcgggatacctggtgagattgtggaaagcctttcaagcagtgaggaatctattacacgcatcaataagaaaattgagaagtttcagagtgaggaacagcagcaaacagaggatgaactccaggataaaatccacccctttgcccagacacagtctctagtctatcccttccctgggcccatccataacagcctcccacaaaacatccctcctcttactcaaacccctgtggtggtgccgcctttccttcagcctgaagtaatgggagtctccaaagtgaaggaggctatggctcctaagcacaaagaaatgcccttccctaaatatccagttgagccctttactgaaagccagagcctgactctcactgatgttgaaaatctgcaccttcctctgcctctgctccagtcttggatgcaccagcctcaccag

SEQ ID NO: 12592 - DNA, 286 bp, Bos taurus
  Clone ID: 54-LIB2809-011-Q1-E1-F6
acagcagaaaggcctaaatgggcatatctctctggggatagggcactgctttctggggaacaggcaggactttggactgagaaagggacagcacggactgaggaggaaacatgacagttggaggaagaggctggtgaggctggtgcatccaagactggagcagaggcagaggaaggtgcagattttcaacatcagtgagagtcaggctctggctttcagtaaagggctcaactggatatttagggaagggcatttctttgtgcttaggagccatagcctccttcac

SEQ ID NO: 12593 - DNA, 418 bp, Bos taurus
  Clone ID: 54-LIB2809-012-Q1-E1-F10
acaagagtagaaagggcaattcattaagtatatttagaatccaagctactactactgagaaattacagtatttattcagttcagttcagtttagtagctcagtcgggtccgactctttgcgaccccatgaatcgcagcacaccaggcctccctgtctatcaccaactcccggagtttacccaaactcatgtccatcgaatcggtgatgccatccagccatctcatcctctgtcgtccccttctcctccagcccccagtccctcccagcagcagggtctttcccaatgagtcgagtcttcgcatgaggtggccaaaatattggagttacagtgtttattagagattcaataagttgaaaattcagagtcctcagtttcaaagaaataacatgtgactgaaaacatgtttaattttaaag

SEQ ID NO: 12594 - DNA, 428 bp, Bos taurus
  Clone ID: 54-LIB2809-012-Q1-E1-F6
acagcagaaaggcctcaatgggcatatctctctggggatagggcactgctttctggggaacaggcaggactttggactgagaaagggacagcacggactgaggaggaaacatgacagttggaggaacaggctggtgaggctggtgcatccaagactggaccagaggcagaggaaggtgcagattttcaacatcagtgagagtcaggctctggctttcattagagggctcaactggatatttagggaagggcatttctttgtgcttaggagccatagcctccttcactttggagacgcccattacttcaggctgaaggagaggcggcaccaccacaggggtttgagtaacaggagggatgttttgtaggaccctgttagggatgggcccagggaagggatagactagagactgtctctgggcaaagggg

SEQ ID NO: 12595 - DNA, 363 bp, Bos taurus
  Clone ID: 54-LIB2809-014-Q1-E1-F10
acacagtccaggtcacaccatcatcaccataggccaccctgtaggcagccacatattgaatgtggccaaagtctcgggcaccctgggtgatgatgcccgtgactcgcttctgggagcccaggtcaatctgcagccactcagaggcactgttggtctgggcggtccaggcgttgaacttgccctgattatccagtcgtgcgtagtagggaaaccagctaaaggcactcaggccccaggttttgtagtagctggaggctgtgatctgcttgttggggatggtattatccttcaggcctaggggttcagtgcatccattcaactcacagccaaggagttcaaaccggagggtgcagccccggtggc

SEQ ID NO: 12596 - DNA, 308 bp, Bos taurus
  Clone ID: 54-LIB2809-015-Q1-E1-F6
agcacagaatatggactcttccagataaataatagaatttggtgcaaagacgaccagaaccctcactcaagcaacatctgtaacatctcctgtgacaagttcctggatgatgatcttactgatgacattatgtgtgtgaagaacattctggataaagtaggaattaactacgggttggcccatatatcactctgttctgagaagctggatcagtggctctgtgacaagttgtgaacacctgccgtctttgctgcttctgtcctcgttctgttcctggaactcctctgcctcgttgttacctcgttttg

SEQ ID NO: 12597 - DNA, 412 bp, Bos taurus
  Clone ID: 54-LIB2809-016-Q1-E1-F6
acatggtaagattgtggaaagcctttcaagcagtgaggaatctattacacgcatcaataagaaaattgagaagtttcagagtgaggaacagcagcaaacagaggatgaactccaggataaaatccacccctttgcccagacacagtctctagtctatcccttccctgggcccatccctaacagtctcccacaaaacatccctcctcttactcaaacccctgtggtggtgccgcctttccttcagcctgaagtaatgggagtctccaaagtgaaggaggctatggctcctaagcacaaagaaatgcccttccctaaatatccagttgagccctttactgaaagccagagcctgactctcactgatgttgaaaatctgcaccttcctctgcctctgctccagtcttggatgcac

SEQ ID NO: 12598 - DNA, 466 bp, Bos taurus
  Clone ID: 54-LIB2809-017-Q1-E1-F6
acctcacatagggaataacctttgtcttaggttgaatccatggcttcatagctttctgatgctgataaacagtcttgagatactggggcaaggcgaatttctggtaacgctggctgatttttttcagaaaatttaggcgattcttttcttcttcagtcagtttagttttcttagtgaatacttctgttgattccatgtcaacggtcttctttgaattttcctcactggtggagagctgctctctgttcagagtgggagtaatgggaacagcatttctcttaacctgatcccatgggttcaaaacaattggaccttgatacagatactggagatactgggggaacttctgataaaactgattgatttcattcagtgctttctggtagtgcttatcgtccacagtaatcttaacttcctctgtggcaacttcagcagattcctcactagatgagccgatagaatattc

SEQ ID NO: 12599 - DNA, 252 bp, Bos taurus
  Clone ID: 54-LIB2809-018-Q1-E1-F10
gtgtgtgtcgtggtaactggtgttctcgatcctggcatggtggtcacctttgctccattcgttgtatcgactgacgtgaagtctgtttgactgcagcatgttgcattgtgtgtcgcccttcctggggataatgtgggctttattgtcacaagcgtgtctgtcaaagatgtccgtcgtggcaatgtggttggtgatagcagagctgatccacccatgtgagtctgcgggtttcacagctcatgtgagtatttt

SEQ ID NO: 12600 - DNA, 418 bp, Bos taurus
  Clone ID: 54-LIB2809-019-Q1-E1-F10
acagatgcgacggttgggtaaccaatctgcaggcacacgctggcaacattgcggacgccctccaggaagcgggaatgcagagtttcctctgtgatgtcaagcacttcagggttgtagatgctgccattgtcaaacacctgctggatgaccagcccgaaggagaagggggagatgttcagcatgttcagcagcgtggcttcgctggcgcccactttgtctcctgtcttaatcagctgcacatcactcaggatttcaattgtgcccctggagatcttcgtggtgatgcctaaagcctggaagaaggaggtcttctcgggccccagaccagtgttctgtgctggcacagtgacttcacacggcgctatggcaccagcacgggcggcagctggcaccttgttggccagcagcatgtccctga

SEQ ID NO: 12601 - DNA, 352 bp, Bos taurus
  unsure (31),(326): unsure at all n locations; Clone ID: 54-LIB2809-021-Q1-E1-F10
ggcctaaatgggcatatctctctggggatanggcactgctttctggggaacaggcacgactttggactgcgaaagggacagcacggcctgacgaggaaacatgacagttggaggaagaggctggtgagactggtgcatccaagactggagcagaggcagaggaaggtgcagattttcaacatcagtgagagtcaggctctggctttcagtaaagggctcaactggatacttagggaagggcatttcgttgtgcttaggagccatagcctccttcactttggagactcccattacttcaggctgaaggaaaggcggcaccaccacangggtttgagtaagatgaaggatcttt

SEQ ID NO: 12602 - DNA, 423 bp, Bos taurus
  Clone ID: 54-LIB2809-022-Q1-E1-F6
ccatgggcctgggatacagtattctttaaaattttctttttaaattgaaagccaacaactctgcctttatgatgctaagctcatgttcttatttcttctcctatcttctttctcttctgttcccattatccttccctttgttttgtccctgtcaccttcctttctccttctcctcattgccccccaggcaagcaggtggtcagtcattggtgggtttccagcttccaaagcctagacaaccctgctgtagtctcaaactagtggtctttgccccggctgaccctttccttgagctgtctgagctttaaggtggatggctcaagctagagatatgacagaatcttctgggaagggccttgatgatcttcagcccagacttttgctaaatgaaatggaaaaataactttattttggcacccaaac

SEQ ID NO: 12603 - DNA, 440 bp, Bos taurus
  unsure (339): unsure at all n locations; Clone ID: 54-LIB2809-023-Q1-E1-F10
gatacaacagaaaggcctgaatgggcatatctctctggggatagggcactgctttctggggaacaggcaggactttggactgagaaagggacagcacggactgaggaggaaacatgacagttggaggaagaggctggtgaggctggtgcatccaagactggagcagaggcagaggaaggtgcagattttcaacatcagtgagagtcaggctctggctttcagtaaagggctcaactggatatttagggaagggcatttctttgtgcttaggagccatagcctccttcactttggagactcccattacttcaggctgaaggaaaggcggcaccaccacangggtttgagtaagacgagggatgttttgtgggacgctgttacggatgggcccacggaacggatacactacagactgtgtctgggcaaacgggtggatttta

SEQ ID NO: 12604 - DNA, 432 bp, Bos taurus
  Clone ID: 54-LIB2809-025-Q1-E1-F6
gccatgggcccgggatacatcagaaaggcctgaatgggcatatctctctggggatagggcactgcgttctggggaacaggcaggactttggactgagaaagggacagcacggactgaggaggaaacatgacagttggaggaagaggctggtgaggctggtgcatccaagactggagcagaggcagaggaaggtgcagattttcaacatcagtgagagtcaggctctggctttcagtaaagggctcaactggatatttacggaagggcatttctttgtgcttaggagccatagcctccttcactttggagactctcattacttcaggctgaaggaaatgcggcaccaccacatgggtttgagtaagaggacggatgttttgtgggacgctgttacggatgggcccagggaagggatagactacagactgtgtc

SEQ ID NO: 12605 - DNA, 283 bp, Bos taurus
  Clone ID: 54-LIB2809-026-Q1-E1-F10
accccagatggaaattgttcccaatagtgctgaggaacgacttcacagtatgaaagagggaatccatgcccaacagaaagaacctatgataggagtgaatcatgaactggcctacttctaccctgagcttttcagacaattctaccagctggatgcctatccatctggtgcctggtattacgttccactaggcacacaatacactgatgccccatcattctctgacatccctaaacccaatggctccgagaacagtggaaagactactatgccactgtggtga

SEQ ID NO: 12606 - DNA, 412 bp, Bos taurus
  Clone ID: 54-LIB2809-027-Q1-E1-F6
gggatacattgtgttttttcagtctgagaagctgttccagataacccaggtaacgctcagagggcacatcttccttttgaatgtgcttctgctcaacactattgggaacaatttcctcacttgacgaaatgctttcagcttccatttgcttaatatcttccatggcttgatcctcagttgattcactcccaatatccttgctcagttcattgaccttctcctttccaaacacttctggaaaaggtgccacaaaaaacctgagtaaattttcattgaggacttcttgagggagtccttggtgcttgataggatgtttaggcctggcaagagcaacagccacaagacaggtaaggatgagaagtttcatggttgtcaagatcttgaacccaagactgggaagaagcagcaagcc

SEQ ID NO: 12607 - DNA, 428 bp, Bos taurus
  Clone ID: 54-LIB2809-028-Q1-E1-F10
gccatgggcccgggataatattaacgacatgtgggaccgggactatgataaaaaggttacaagaacagcaagtcgcccaatagctgctggagacatttcaacttttcggtcctttgtttttcttgggggacagctgaccttggccctgggcgttctactgtgtctgaattactacagtatagctcttggagcagcatccctacttcttgtcaccacctacccgctaatgaaacgaattacatactggcctcagttagccttggggttgacatttaattggggagcgttgcttggatggtctgctgtcaagggctcctgtgatccatctgtttgccttcctctctatttttctggaattatgtggactctgatatacgatactatctatgcccatcaggataagaaggatgatgctttgattgggctta

SEQ ID NO: 12608 - DNA, 412 bp, Bos taurus
  Clone ID: 54-LIB2809-028-Q1-E1-F6
ggcctgaatgggcatatctctctggggatagggcactgctttctggggaacaggcaggactttggactgagaaagggacagcacggactgaggaggaaacatgacagttggaggaagaggctggtgaggctggtgcatccaagactggagcagaggcaggttaaggtgcagattttcaacatcagtgagagtcaggctctggctttcagtaaagggctcaactggatatttagggaagggcatttctttgtgcttaggagccatagcctccttcactttggagactcccattacttcaggctgaaggaaaggcggcaccaccacaggggtttgagtaagaggagggatgttttgtgggaggctgttagggatgggcccagggaacggatagactagagactgtgtctgggca

SEQ ID NO: 12609 - DNA, 414 bp, Bos taurus
  unsure (406): unsure at all n locations; Clone ID: 54-LIB2809-029-Q1-E1-F6
acagcagaaaggcctgaatgggcatatctctctggggatagggcactgctttctggggaacaggcaggactttggactgagaaagggacagcacggactgaggaggaaacatgacagttggaggaagaggctggtgaggctggtgcatccaagactggagcagaggcagaggaaggtgcagattttcaacatcagtgagagtcaggctctggctttcagtaaagggctcaactggatatttagggaagggcatttctttgtgcttaggagccatagcccccttcactttggagactcccattacttcaggctgaaggaaaggcggcaccaccacaggggtttgagtaagacgacggatgttttgtgggaggctgttacggatgggcccagggaagggatagaccanagactgtg

SEQ ID NO: 12610 - DNA, 435 bp, Bos taurus
  unsure (316),(378),(395),(406): unsure at all n locations; Clone ID: 54-LIB2809-030-Q1-E1-F6
acagcagaaaggcctgaatgggcatatctctctggggatagggcactgctttctggggaacaggcaggactttggactgagaaagggacagcacggactgaggaggaaacatgacagttggaggaagaggctggtgaggctggtgcatccaagactggagcagaggcagaggaaggtgcagattttcaacatcagtgagagtcaggctctggctttcagtaaagggctcaactggatatttagggaagggcatttctttgtgcttaggagccatagcctccttcactttggagactcccattacttcaggctgaangaaaggcggcaccaccacaggggtttgagtaagaggagggatgttttgtgggacgctgttanggatgggcccagggaanggatagactanagactttgtctgggcaaaggggtggattt

SEQ ID NO: 12611 - DNA, 408 bp, Bos taurus
  Clone ID: 54-LIB2809-031-Q1-E1-F6
accccaaatggaaattgttcccaatagtgctgaggaacgacttcacagtatgaaagagggaatccatgcccaacagaaagaacctatgattggagtgaatcaggaactggcctacttctaccctgagcttttcagacaattctaccagctggatgcctatccatctggtgcctggtattacgttccactaggcacacaatacactgatgccccatcattctctgacatccctaatcccattggctctgagaacagtgaaaagactactatgccactgtggtgaagagtcaagtgaattctgagggactccacagttatggtctttgatggttctgaaaattccatgctctacatgtcttttcatctatcatgtcaaaccattctatccaaaagcttcaactgctgttt

SEQ ID NO: 12612 - DNA, 248 bp, Bos taurus
  Clone ID: 54-LIB2809-032-Q1-E1-F6
atggacccaggcatatagctgaatccctccaatgggctggggcaaacttcagagtgaggcactttagaacctgccattgcttcgtgaatgcacaaaattatgtgatatgatggcacctacaggagaagtggttcagtcgcttttaaaccattttccatgcagagcttcatagacaactttaagtccctattgaccagtggcctttataccagcatgatactacaggaatttaagtaacacgctgttac

SEQ ID NO: 12613 - DNA, 397 bp, Bos taurus
  Clone ID: 54-LIB3057-001-Q1-K1-F10
cgagcggagccggagacgagaccagttgccgaactcgggatctgacaagatggccgggctgccccgcaggattatcaaggaaacccagcgtttgctggcagaaccagttcccggcattaaagcagaaccagatgagagcaacgcccgttattttcatgtggtcattgccggccctcaggattccccctttgagggagggacttttaaacttgaactattccttccagaagaatacccaatggcagcccctaaagtacgtttcatgaccaaaatttatcatcctaatgtagacaagttgggaagaatatgtttagatattttgaaagataagtggtccccagcactgcagatccgcacagttctgctatcgatccaggctttgttaagtgctcccaat

SEQ ID NO: 12614 - DNA, 376 bp, Bos taurus
  Clone ID: 54-LIB3057-002-Q1-K1-F6
ggtgaagtgtgtttcttgaaatcatcaccaccatggacagcaaaggttcgtcgcagaaggtgtgctgcctgctcctgctgctggtggtgtcaaatctactcttgtgccagggtgtggtctccacccccgtctgtcccaatgggcctggcaactgccaggtatcccttcgagacctgtttgaccgggcagtcatggtgtcccactacatccatgacctctcctcggaaatgttcaacgaatttgataaacggtatgcccagtgcaaagggttcattaccatggccctcaacagcttgccatactttcttcctttctacccctgaagatttataacatgccctacatactcaccatgttatccttatgatcttgattc

SEQ ID NO: 12615 - DNA, 374 bp, Bos taurus
  Clone ID: 54-LIB3057-003-Q1-K1-F10
ctatcctttcccttggcatagtggctgactgtgctgttgttgggaacgaagattgtgtgaaaggtcatatcccattagccctctgcgtgttgaaaaacgatataaatacaacataggaacacgttttagaagaaattgtgaaacacgttagacagaccattggccctgtggctgcttttcggaaagcggagtatgtcaaacagttactcaaaaccagatctggcaaaattccccgctcaacgctgtctgcccttgtcaatggcaagccatataaggtgtctgctacaattgaagatcctggaataatcgagcacatacaagccatgtcgaagcatgcattatgacttttcttcttatgttttgaatcacttttc

SEQ ID NO: 12616 - DNA, 356 bp, Bos taurus
  Clone ID: 54-LIB3057-003-Q1-K1-F6
gcgccagcgaaaagtagatactgcgcagcgggagcggcaggggtcttgaagcggttcggcgaaccctccagcgagaaccttctggaactctctcctgagggaatcgtgtcgaagatgtggaatagtggatttgaaagctatagcacctcctctttcggcggagccggcggctacacacagtcccctgggggctttggatctccgacagcttcccaggccgaaaagaaatccagagctcgagctcagcacattgtaccctgtaccatatctcagctgctttcggctactctggttgatgaagtattcagaattggaaatgttgagatttcacaggtcacctattgtgggggattatc

SEQ ID NO: 12617 - DNA, 312 bp, Bos taurus
  Clone ID: 54-LIB3057-004-Q1-K1-F6
gccggagcaagatgggtcaaagtcagagtggtggccacggtcctggaggcggcgagagtgactataaggacaagaaaaagaaatatgaacctcctgtaccaactcgagttgtgaaaaagaagaagaagacaaagtgactcagattctgccagcaaactgctccttttttcactctcacactcattactgttttaaatattcttaatctagaaaacattaatcaatttttaatacaaaatgttttgttcaaaaaaacttaacataattaattcaattaccattaataacttttcttttttgtatttaaatatt

SEQ ID NO: 12618 - DNA, 412 bp, Bos taurus
  Clone ID: 54-LIB3057-005-Q1-K1-F10
ccctggtgcctgctgccgtggccccagcaagctcccctggctcccaggcgctctgcagccggaaatgtgtgaatggcactgtcacgatgacccgcatggaaaggatgttggtgtccagttggccctccttttcccttgtccagtattaggttttgatttgccctttgccactgtttccaaagatcaaggaaggtcgctaacattttcaaggaccaatgagaacctcctgttaactaaacctcttcccgtgagagcacactctccccagaggggaaggtacctgggctctgctttgtccttttgcattaagaacggtgtggggatcaatgtgtgtctgtgattgcttattgggttggttggttttggtttcctttgtccttttaaaaaataacatccttctctcgtatatggt

SEQ ID NO: 12619 - DNA, 441 bp, Bos taurus
  unsure (376): unsure at all n locations; Clone ID: 54-LIB3057-005-Q1-K1-F6
gcgaccgagcgcggcgacgccgggtgagtgtggtgtaaaggaattcgttagccatggatgttttcatgaaaggactttcaaaggccaaggagggagtcgtggctgctgctgaaaaaaccaagcagggtgtggcagaagcagcaggaaggacaaaagagggtgttctctatgtaggatccaaaaccaaggaaggggtagttcatggtgtgacaacagtggctgagaagaccaaagagcaagtgacaaacgttggcgaggcagtggtgacaggggtgactgcagtagcacagaagacagtagaaggagcagggagcattgcagctgccactggctttggcaaaaaggatcatatgggcaagggtgaagaaggagcctnccaggaaggaattctggaagatatgcctgtggatcctgacaatgaggcttatgaaatgccttctg

SEQ ID NO: 12620 - DNA, 387 bp, Bos taurus
  Clone ID: 54-LIB3057-006-Q1-K1-F6
gtcctggtgctcgatggccgaggccatctcctgggccgcctggcggccattgtggccaagcaggtgcttctgggccgcaaggttgtggtcgtgcgctgtgagggcatcaacatttctggcaatttctacagaaataagttgaaatacctggcctttctccgcaagcggatgaacaccaacccctcccgtggcccctaccactttcgagcccccagccgcatcttctggcggacagtgcgaggcatgctgccccacaagaccaagcggggccaggctgctctggagcgcctcaaggtgtttgatgggatcccaccaccctatgacaagaaaaagcgaatggtggttcctgctgccctcaaggttgtgcgtctgaagcctactcgcaag

SEQ ID NO: 12621 - DNA, 416 bp, Bos taurus
  unsure (394),(406): unsure at all n locations; Clone ID: 54-LIB3057-007-Q1-K1-F10
cgtcaccaaacaaacattcattcattccacgcttccattctctctctaaatcgcatgaccttcttctatctccttagttcccggcgagttcgtgcatcggagcctctaaatcgcattaacatcatcgaatcaaaccttccttctctttctcaactccagaatctcgtccttgtgagagaaaaaaaaaaagttagttagggttacgcacagttaattaattatttaataatagaaaaatgagctttcaggacatcgaggccggccggtccttcgctgcccgacgcaacctcatcaacggcaaacaagaccccacgcaggcggtggcttccggcatctttcagatcaacaccgccgtctccacgttccagagactcgtcaacaccctaggaacccncaaggacacccncgagctccgt

SEQ ID NO: 12622 - DNA, 396 bp, Bos taurus
  Clone ID: 54-LIB3057-007-Q1-K1-F6
cacctaaccaccatggatatcgccatccaccacccctggatccgccgccccttcttccctttccactctcccagccgcctctttgaccagttttttggcgagcacctgttggagtctgatctcttcccagcttctacttccctgagccccttctaccttcggccgccctcatttctgcgggcacccagctggattgacactggcctctcagagatgcgtctggagaaggacagattctctgtcaacctggatgtgaagcacttctccccagaggaactcaaggtcaaggtgctgggagatgtgattgaggtgcatggcaaacatgaagagcgccaggatgaacatggttttatctcccgggagttccacaggaaataccggatcccagctgacgtg

SEQ ID NO: 12623 - DNA, 355 bp, Bos taurus
  Clone ID: 54-LIB3057-008-Q1-K1-F10
cttgaaatcatcaccaccatggacagcaaaggttcgtcgcagaaagcagggtcccggctgctcctgctgctggtggtgtcaaatctactcttgtgccagggtgtggtctccacccccgtctgtcccaatgggcctggcaactgccaggtatcccttcgagacctgtttgaccgggcagtcatggtgtcccactacatccatgacctctcctcggaaatgttcaacgaatttgataaacggtatgcccagggcaaagggttcattaccatggccctcaacagctgccatacctcctcccttcctacccctgaagataaagaacaagcccaacagacccaccatgaagtccttatga

SEQ ID NO: 12624 - DNA, 422 bp, Bos taurus
  Clone ID: 54-LIB3057-008-Q1-K1-F6
gcaggcgactcaaggtcctgtgcacagtttaccagctatgacggctgcaggcccacggacctacgtgctcctggctgacgccccgctatgactgccctggactcacgtggtgtgcgccttgacagacatgccctggtccggcctgtttgcccacgctgtgctacgggcgtcagcacctgcatcagctagctgctacacaccgttctaagagatgtgatcgcacctacgtcctacactgtcagacgatactccatccagatcacccaagttggctactgcttacctgaaaccatgccgcaccccacgggcaagaatgaggcccagcagaaatcagacttggagctgctacgcacatcactgctgctcatccagtcactggctagggcccctgcagatcctcagcagagtcttcaccaacagct

SEQ ID NO: 12625 - DNA, 381 bp, Bos taurus
  unsure (380): unsure at all n locations; Clone ID: 54-LIB3057-009-Q1-K1-F6
ttggtgtttggcacctcggaccgtgtctatgagaagctgaaggacctggaggaaggcatcctggccctgatgcgggagctggaagatggcaccccccgggctgggcagatcctcaagcagacctatgacaaatttgacacaaacatgcgcagtgacgacgcgctgctcaagaactacggtctgctctcctgcttccggaaggacctgcataagacggagacgtacctgagggtcatgaagtgccgccgcttcggggaggccagctgtgccttctagttgccagccatctgttgtttgcccctcccccgtgccttccttgaccctggaaggtgccactcccactgtcctttcctaataaaatgaggaaattgcatcgcaana

SEQ ID NO: 12626 - DNA, 334 bp, Bos taurus
  Clone ID: 54-LIB3057-011-Q1-K1-F6
atggcggctgggaccctgtacacatattctgaaaactggagggccttcaaggccctcattgccgctcagtacagcggggctcaagtccgcgtgctctccgcaccaccccacttccattttggccaaaccaaccgcacccccgaatttctgcgtaaatttcctgctggcaaggttccagcctctgagggtgacgatggattctgtgtgttcgagagcaatgccattgcctactatgtgagcaacgaggagttgcggagaagtactcccgaggcagcagcacatgtggtgcagtgcgtgagctttgctgatagcgacatagtgccaccggccagca

SEQ ID NO: 12627 - DNA, 348 bp, Bos taurus
  Clone ID: 54-LIB3057-012-Q1-K1-F10
ggaataacctggccaaagagactgagccctaccctgtgtggtcaggactcccgtgcgtgcaaactaaggatgaagatgcacgttattctgctttttataacctgctccactgcctgcgcagggattcaagcaagattgacacttaccttaagctcctgaattgcagaatcatctacaacaacaactgctaagcccacattcatcctatccatttctgagatggttcttaatgatccattccctggcaaacttctctgagctttatagctttgtaatgcatgcttggctctaatgggtttcatcttaaataaaaacagactctgtagcgatgaataatagaaataaaaa

SEQ ID NO: 12628 - DNA, 427 bp, Bos taurus
  Clone ID: 54-LIB3057-012-Q1-K1-F6
caggactgaaggaagctgcactgtacccacatctgccaccagaagctgacccccgggggattgagtccctctcccagatgctgtccatggggttctctgatgaatgtggctggctcaccaggcttctgcagaccaagaattacgacatcggggctgccctggacaccatccagtattcaaaacacccaccacctttgtgacgatgtttgctcacccattctgtgtcccctttcttgtctcatagtcgtgtcgagttagtgtagaaccccagtgcctctaagtcccaatttctcgtcattcttctttcagaatctggggggtggtgatgcacaaagccctttatggcagtagaacaagtgacacggggggagttccaagggtgtgagtgcggattctgagacacactgatcagcttcccatggatgct

SEQ ID NO: 12629 - DNA, 433 bp, Bos taurus
  Clone ID: 54-LIB3057-013-Q1-K1-F10
cttggttgtttaattattttggacttgttttgtttttgtttgtttgtttttgctgaaataatggcaaattctttaaattttttccccaaacattttaaaaagtgcaatgtgggaagatttttgaagacattcatcaactattaattttccattgcttatttacttatgtacctgtttgatcttactaagaaaatttatgcctcattacagtaaaaaggaatttagagatattttttaaaatatgcaaactgtccaatcgagtgatttaatcagtttgggcaactgttacagctgatagtgaatattttgcttcatacagaaattgccactgatttgagtttgtgcactctaattttaactaattgatcctctattgtgcagtagcatttcatttaactttaagataaggctcatttagtatacccaactagtt

SEQ ID NO: 12630 - DNA, 236 bp, Bos taurus
  Clone ID: 54-LIB3057-013-Q1-K1-F6
ggagctggtgcgggccgtgctggatctcaagaatgagctctgccagctgccttccgagggctacgtggtggtgggggaaaaatgtggccctgaccttgcggaagctaatcgcaagcttgattaacttctggccttcttggccgcgtcttcacggacagagatcgaagggacccaaaaactgctcaacaaggacctggcggagctcatcaataagatgcgactggcccagcagaacg

SEQ ID NO: 12631 - DNA, 445 bp, Bos taurus
  unsure (423): unsure at all n locations; Clone ID: 54-LIB3057-014-Q1-K1-F6
cggacgcgtggggaatttgactatgcagatctgtcaggtaacagggaggtggcccaaggtcaccaggtctcagcttcaggacgtcactcccacatagagtgttcagctctcacccagggccgggcagctaggcagcagcttttgagctcagacacctatgtgtgaacacatttttcagcacctgagtcccagttcatcccactgggagcagtccgggctcggctagagccccggaaaagagagaccctcaccagcaagactggaaggccggggcagccgggcctgggcggcgcgcttaagagacagcttctcgttagctgcccgcctcggcttcttccctgtcccaggtctcagcaattcacagaactctggctactgtccttgctttcacctgtcatctttgcttctgagataagaaccatntgtgtaacaccaatacttacct

SEQ ID NO: 12632 - DNA, 345 bp, Bos taurus
  Clone ID: 54-LIB3057-015-Q1-K1-F6
ggactccgagaggccagcggacttcgtataccggcagcactcgctctcaaccaggcacggaccagtctcggaaccatggcggcagtggcggcagcgtcggctgaattgctcatcatcggctggtacattttccgcgtgctgctgcaggtgttcctggaatgctgcatttactgggtaggattcgcttttcgaaatccttcagggacacagcccattgcgagaagtgaggtgttcaggtactccctgcagaagctggcatacacggtgtcgagaaccggacggcacgtgcttttagagcgccggcggcggtcccctaactgaggcccttagccttttacttgggct

SEQ ID NO: 12633 - DNA, 355 bp, Bos taurus
  Clone ID: 54-LIB3057-016-Q1-K1-F10
gtctctttctgacagctctagtagttttcatattttggtcatagtttgagcatgttaacatgtgaactctatagggtttcatgctggtttccagattttattgtttgactatgtacaatggaactttaagtcatatatacatatatatattattctaagggggaaatgttatatttttctgtttctataagagatgaatacagtggatactttttctattggtaatgattgagttcacctctttcagaagacattttctttctcttctgagtaattcagattaaatctggcccctgtgaaaccctggaaatcttacgtctgttgaaataccagggtaatctcatttcaagggatc

SEQ ID NO: 12634 - DNA, 241 bp, Bos taurus
  Clone ID: 54-LIB3057-017-Q1-K1-F6
aacaaggctggaccactgtgggggacatggagggctgcgggcgctaccgcgtggtgaaggacgaacgcatcaagtgcctagtcatcgccctgaagaactctgtggaggtgtatgcctgggccctcaaaccttaccacaaattcatggctttcaagtccttagctgaccttccgcaccgccctctgctggtggacctgaccgtagaggagggccagcggctcaaggtcatctatggctccag

SEQ ID NO: 12635 - DNA, 451 bp, Bos taurus
  Clone ID: 54-LIB3057-019-Q1-K1-F10
ggaattctcttcctcacaaattcttcagggattaagacactgcatggataatagatgtagaataaagcccagactcttaaagctttttaaaagaaagcacaggagactatcttaataatcttaaggcagacaaaaaacttttggagaaaagcactgattaaaataaaacagtaacttttatttagcctcatcaaaaatttatgctatcacaagataccattaaggactgaaatatataagccactaatttggaaaaaatatagcatctatatccaacaaagggcttgtatctggtatatgtaaagaacccctataatcataaattagattgaacagtccaactgaaaaatgggcaaaagccttgagcagatacttcaccaaacaagatacctgaatgggccataattacatgaaaaaggcctctaatgtcaataaatcaccaggaaatgcc

SEQ ID NO: 12636 - DNA, 409 bp, Bos taurus
  Clone ID: 54-LIB3057-020-Q1-K1-F10
ttggaccacaaggaaatacaatcaaaagactgcaagaagagactggtgcaaagatttctgtgttgggaaagggctcaatgagagacaaagccaaggaggaagagttgcgcaaaggtggagaccccaaatatgcccacttgaatatggatctgcatgtcttcattgaagtctttggacccccatgtgaagcttatgctcttatggcccatgctatggaggaagtcaagaagtttctagtaccagatatgatggatgatatctgccaggaacaatttttagagctttcctacttgaatggagtaccagagcccttccgtggacgtggtgtgccagtgcgaagccggtgagccgcaccgtctacttcacctgtttccaagggccgtggcgttgggccaacttggggggcttt

SEQ ID NO: 12637 - DNA, 436 bp, Bos taurus
  Clone ID: 54-LIB3057-020-Q1-K1-F6
gttgaagtgttccccgcctccactgccatcatgtctaaatcagagtctcccggagagcgcgaacagctgcggaagctcttcatcggaggattgagctttgaaacaaccgatgagagtctgaggagccattttgagcaatggggaacgctcacagactgtgtggtaatgagggatccaaacaccaagcgctccagaggcttcgggtttgtcacgtacgccacggtggaggaggtggatgcggccatgaatgcaaggccacacaaggtggacggaagagttgtggaaccaaagagggccgtctcaagagaagattctcaaagacctggtgcccacttaactgtgaaaaagatttttgttggtggcattaaagaagacactgaagaacatcacctgagagattattttgaacagtacgggaaaattgaagtaattgaaa

SEQ ID NO: 12638 - DNA, 341 bp, Bos taurus
  Clone ID: 54-LIB3057-021-Q1-K1-F6
tctagaaatcatcaccaccatggacagttgaggttcgtcgcaaaaagggtaccgcctgctcctgctgctcatggtgtcaaatctactcttgtgccagggtgtggtatccacacccgaatgtcccaaagggcctggcaactgccaggtatcccttcgagacctgtatgaccgagcagtcatcgtgtcccactacatccatgacctttcctcgcaaatgttcaacgaatttgataaacgatatgcccagggcaaaaggttcattaccatggccctcaacagctgccatacctactgccttcctacccctgaagataaagaacaagcccaacagacccaccatg

SEQ ID NO: 12639 - DNA, 334 bp, Bos taurus
  Clone ID: 54-LIB3057-022-Q1-K1-F6
cgcgaaggcccgcggcgggtgttgacgcgatgtgatttctgcccagtgctgggaatggcaaagtgaagaaattcaatgaagcgcgggtaaacggcgggagtaactatgactctcttaaggtagccaaatgcctcgtcatctaattagtgacgcgcatgaatggatgaacgagattcccactgtccctacctactatccagcgaaaccacagccaagggaacgggcttggcggaatcagcggggaaagaagaccctgttgagcttgactctagtctggcacggtgaagagacatgagaggtgtagaataagtgggaggcccccggcgcccccccg

SEQ ID NO: 12640 - DNA, 379 bp, Bos taurus
  Clone ID: 54-LIB3057-023-Q1-K1-F10
gatattgctaccctttatctactatttggtgcttggccctaactaatatggacagcatgtaaccttctaattctcactgtctcaaactgtctaacaccactgtatttatacgacgtaaaatataacttgcattccacgaatcaatcactcttggtcacagtgtataaattcgttaatatcctgctaaattatgtttgctagcatgttgctgaggatttgtacatcaatatttctaagggtctatatttttttcttgcagtggcattattcggctttggtatcagaataatgttgctctcgtagaatgagttagagaatgttccttcctttctagtgttttggaagagtttgaaagacttttgccgtaattcttttttgg

SEQ ID NO: 12641 - DNA, 393 bp, Bos taurus
  Clone ID: 54-LIB3057-025-Q1-K1-F10
ctggccttaaggagaggaaatacgcaagatgaggtacgcaaacgagtgttgggtgacgggatgagaaaactgaggtcagaaaggtcaactgagaaccctgttttgaaagagaagtgcatgtatgtgatatccagagagcctgtagcttcatcacaccatgtgtagcatttggtcgctctttgtcagcgatgactgcctttctgttcagtgtctgactgctatgaagattgcacacaggtgtccagatgcattccgttttgaaaatgataatgggtacaccaattgctgctttggatttcaccggttgacggtagtttacctgctgtttggaatgcatccaattcgagtgatgaaatatacttacttgttgctctgctacaacggtgaaatcta

SEQ ID NO: 12642 - DNA, 434 bp, Bos taurus
  unsure (425): unsure at all n locations; Clone ID: 54-LIB3057-025-Q1-K1-F6
cggacgcgtgggcggacgcgtgggcagcgccaacgccagccgcaggagtcaggagaagccgcgggagatcatggacgcggcggaagattatgcaaaagaaagatacggagtatcttcaatgatacaatcacaagaaaaaccagatcgagttttggttcgaattagtgatttgacagtgcaaaaagctggtgaagttgtttgggtgcgtgcaagggttcatacaagcagagctaaaggaaagcagtgtttcttagtcctacgacagcagcagtttaatgtccaggctcttgtggcggtaggagaccatgcaagcaagcagatggttaaatttgctgccaacatcaacaaagagagcatcgttgatgtggaaagtgttgtgagaaaagtgaatcagaaaattggaagctgtacacaacaagatgtanagttacatg

SEQ ID NO: 12643 - DNA, 376 bp, Bos taurus
  Clone ID: 54-LIB3058-001-Q1-K1-F6
attgtgatgcttctgcatttattctattgcctcaactgtacttgaagatggcatgctgtataatttaatttagcctgtggtatcagtgatagaaatgatacctttgtaaagaaggggtttatcataatatgctgcttattgagggcttgcacttgtagaattgcattcccttcttttgctgtgccatcttttattaatatagctattggtcctggttactttttttgccccccgcccccccacctttggaccacagtaagccttagagtagtgacttctggagcatggaaacttagaggttagagtgatgagacctttacatggagaagtaatttgcatgtatgagatatgaaggtgtttatgtaggtatgttata

SEQ ID NO: 12644 - DNA, 451 bp, Bos taurus
  Clone ID: 54-LIB3058-002-Q1-K1-F6
cctgaggtcaaggctctgttcaaggataagaagccagtcaagatcagcaagaagaactcgactgcagttaccaagttcctcgatgagctggctaagattgacttccctggagccaaggtggtgagcgaggcggtggccaagtccggcgcctcgcccctgtctccggcgatcaccttcatcttggacaaggtcgcaccgtacatccccaaggaggagcccaaggcggaggacgcggtggctgaggccacttcccgggaagtcgccgtggaggtggaggatgccgagccggctatagctgatgcagcggccgagacaccatcggaggcgaagaagggagaggaggtaaagccggctgccgaggaggcggcgccaccggcagcggctgctactgaggagaagtaatactccgatccacagccatgcctctccctacgtagctgcagcagagtga

SEQ ID NO: 12645 - DNA, 430 bp, Bos taurus
  Clone ID: 54-LIB3058-003-Q1-K1-F6
ctaactcgatacttgactttccctgaagaacttgctttttctgtccctgaatcaccttgtaacaattgggtctgttcctttgactaccactcttgagtccatatatgaaatcattaaagttggatgatcagatatttataaaaatatatatttttgtccaaaaaaaggcatacatatctgattatggctaaatcaaaggtaactggaatgtatatacttttgctaatgtaccaacaacactgttattatactatccaacatcttattgttacaaaacctgtttatgcaattggtgacagctatggcacttttgccattccgtatgctataattatcctgtgcagaactagaaaaaatatttatgtcgacactgctatatggattactttagcaaagattaataactccagtcttgttggttttagcaggg

SEQ ID NO: 12646 - DNA, 437 bp, Bos taurus
  Clone ID: 54-LIB3058-007-Q1-K1-F6
gtgacgacacaaatttgagttgctgtttggtctgatgaccttcgtattgaaaggtaagagtcaaagtcgctggtcataggtaagtcatattttcacaagcagtaggcaaggggaagcccaaacactcaaggatgtagatgaggagatcttgccccaagagaaggcagacaggttccctgggctgcagccaagctacttcctacagaccatgaaccacacaaagataaacttaaaagggaaacgatgctgagtctattctaacctccagattcctgggtattactcaattccatttaaactgatagtaaaaatctgcatttatgtggttgcccaaaatgaatgaactttgcaaggtgaaattttgagacctggactcaccacctgtaacataatcctcttgctccgagtgtcagcttttttttaatagtgattttaca

SEQ ID NO: 12647 - DNA, 382 bp, Bos taurus
  Clone ID: 54-LIB3058-008-Q1-K1-F6
gccaggattcggctatggaggcagagcgtctgactacaaatcggctcacaagggactcaaggggcacgacgcccagggcacgctttccaaaatcttcaagctgggaggacgagacagccgttccgggtccccgatggcaagacgctgaagcccagctcccctcccagaaccccgtccccagcttcttaatacaaccgcctcgacgctaaccattgtctaaattcccaagtgcagcaggcatccccccaccctgcccactgcgcgtcctgcaggctcctggccagcggctcaatggagaagacggtgcagctgtcagctcacccttgaagatcagcgaggtccctgagggtccagggtgggcgaccctccacgcccaccttct

SEQ ID NO: 12648 - DNA, 442 bp, Bos taurus
  Clone ID: 54-LIB3058-009-Q1-K1-F6
gttcgtttcgacgtccgcgaagatgcagctcaaaccaatggagattaaccccgagatgctgaacaaagtgctgacccggctgggggtcgccggccagtggcgcttcgaggatgttctgggactggaggaggagtctctgggctcggtgccagcgccggcctgcgcgctgctgctgctctttccgctcacggcgcagcatgagaacttcaggaaaaaacaaattgaagagctgaagggacaagaagtcagtcccaaggtgtacttcatgaagcagaccattggcaactcctgtggaaccatcggactcattcatgcagtggccaataatcaggacaaactggagttcgaggatgggtctagtctgaaacagtttctttctgaaacagagaagttgtccactgaagacagagcatagtgctttgaatagaatgaggccattcat

SEQ ID NO: 12649 - DNA, 417 bp, Bos taurus
  Clone ID: 54-LIB3058-010-Q1-K1-F6
gtcctacatcgcgagcggccgccctttttttttaatgaattatatatattaagcttgggtttttaccttaatgttttgtcagctaatgaaaatgttatgaaaaagccttgactatgcatgctgctttcattcatataaactgttcatttttaactatagctttattagtaattccaaaatgctgcaatttagctgatttcttcactcagacagctggctttgtgggtggctttttcatactactgttaactttttaaagagaagcaatgtaaagactgtaacaatttaatgcactaaactgaactttcttttacacgtttaaaaacttcttaaagcactctgtattataaagattaaattgctcccgtttttaaaccattaataaataaataaaaaagggcggaccctctaaaagaa

SEQ ID NO: 12650 - DNA, 418 bp, Bos taurus
  Clone ID: 54-LIB3058-011-Q1-K1-F10
gttttgatttgcttttctggaaaagcatttttgctaaaagccgtacagacttcctcctgcatacctagcagtactttatatagtatagctttgtgccatgcagcatttgaagactcagtttttaaaattgttaacctgttgctgacctttttatgttaattcctgtttcaacagctgtttcccttaattcagaatacaacttcttgtgtatgacagtttcccttcacacacaagaagttgtattctgaattggggagaattggggggaaaaacatagctttttaatttgtttaagagagactttttgcctgttacgttttgtgcttttaaccaattaaagaagccagtggcatttttagttttatgttgtctatggtttccactagtatattcctgttgatttggttgtgccctttat

SEQ ID NO: 12651 - DNA, 389 bp, Bos taurus
  Clone ID: 54-LIB3058-012-Q1-K1-F6
cggacgcgtgggtgcagcccttatcactctctggagaactttctctcccctgggcacaatggcaactcttaaggaaaaattgattgcaccagttgcagaagaagagacaaggatcccaaacaataagatcactgtagtgggtgttggacaagttggtatggcatgtgccatcagcattctgggaaagtctctgactgacgagcttgctcttgtggatgttttggaagataaactcaaaggagaaatgatggacctgcagcacgggagcttattccttcagacaccaaaaattgtggcagacaaagattactctgtcactgccaattccaagatcgtggtggtaacttgcaggagttcgccagcaagaaggggagagtcgcctgaatttg

SEQ ID NO: 12652 - DNA, 343 bp, Bos taurus
  Clone ID: 54-LIB3058-013-Q1-K1-F6
cacgtgcaccacttctttgtttcgctctctccggcctgccttctcctccaccttctctttcgtctccttcaggtccttggcgcttaactcggccgctgcctccacgctcttctccgacatggtgccggggccggggccggggctggcggtgagtcggggtcccggagcctggacggaagggccctggacggcagaggctggccgcggccggaacctggcgcggtggcggcggccgcggcgacagcggcagcggctgccgctcggcaagctggggctcatgatgaggccgcagaggcgcgcggagtggtgcgcgtttaggtctggagcggagacctacagggct

SEQ ID NO: 12653 - DNA, 389 bp, Bos taurus
  Clone ID: 54-LIB3058-014-Q1-K1-F10
gacagtgcggccgctcccggggcggtggacgcaatggcggcccagaagagaccctcccagagatccaagtacctggcctcggcgagcaccatggaccacgccaggcacggcttcctccccagacacagagacacgggcatcctcgactccctcggccgcttctttggctcggacaggggtgcgcccaagcggggctcaggcaaggatggacaccacgcggccagaaccacccactatggctccctgccccagaaggcgcatcacggccggccccaagacgaaacccctgtagggcacttcttcaggaacatggtgccacccggaacacttcctcaatcgcagggaaggggccagggccggtccttaaccaaatttagctggggggctaa

SEQ ID NO: 12654 - DNA, 425 bp, Bos taurus
  Clone ID: 54-LIB3058-014-Q1-K1-F6
gtcgaggcagagccgcggaatcgccgtgagatccggtctcggtccacgctgcccgtcgcgcaggcagtcggccaacccagcgttcgtcgctaccgcagccatgggagtgcaggtggagaccatctctcccggagacgggcgcaccttcccgaagcgtggccagacctgcgtggtgcactacacggggatgcttgaagatggaaagaaattcgattcctcccgggacagattcaagccctttaagtttgtgctgggcaagcaggaggtgatccgaggctgggaagaaggggttgcccagatgaatgtgggtcagagagccaagctgactatcttcccagactatgcctatggtgccactggccagccaggcattatccgaccaaatgccactcttatgtttgacgggaaacttttaaaactggaat

SEQ ID NO: 12655 - DNA, 333 bp, Bos taurus
  Clone ID: 54-LIB3058-015-Q1-K1-F6
cggcggccatcagacccttgggctcattctcgaggggctgggagctgcgcgctgggctcatgcagagcgacaccggcctccccgcgcgctcctccccgaggagccgagtccgcgcccggaccgcccgcccgaccggcgctgtcccggacctctcggtccgtgtgaggccgaccgcgcccggcctcgccgccgccgccgtcgtcatgggctgtctcggaaacagtaagaccgaggaccagtgcaacgagcagaaagcgcagcgcgaggtcaacaagaagatcgagaagcatcctgcaaaatgacaagcatgcataccgagccacgcacagtctg

SEQ ID NO: 12656 - DNA, 429 bp, Bos taurus
  unsure (306): unsure at all n locations; Clone ID: 54-LIB3058-016-Q1-K1-F6
cggacgcgtgggcgcggcagcaagcggctgtgtgggctgtggccgcgggaagtgaatggttttacccagagggccctgcgcggcctttctccgctggcaccagcgctgctccctttcccccggccatggcgttcacgttcgcggccttctgctatatgctggcgctgctgctcaccgccgcgctcatcttcttcgccatttggcacattatagcattcgatgagctgaagactgattacaagaatcctatagaccagtgtaataccctgaatcctcttgtccttccagagtacctcatccacgctntcttctgtgtcatgtttctttgtgcagcagagtggcttacactgggtctcaatatgcccctcctggcatatcatatttggaggtatatgagtagaccagtgatgagtggaccaggactctacg

SEQ ID NO: 12657 - DNA, 447 bp, Bos taurus
  unsure (434): unsure at all n locations; Clone ID: 54-LIB3058-018-Q1-K1-F6
cggacgcgtggggtttcggcccccagtctgtgtaacttgcttacatcagtctgagcaaacaaatttgctgttgttgtttagtggttcagtcatgcctgacttttttgcgactccatggactgtagcctaccaggctcctctgtccatgggattctccaggcaagaatactggagtgggttgccatttcctcctctaggggatctgccccatccaggggtccaacctggatctccttcattgcaggcaaattctttacctctaagtcacctgggaagaccaggaaacaaatacattatcattaaactgtctccatgactctgtctccagcaagtgaagcccccaggacctgcttcctcttctccctggaagaaacttctctcccttcctcagcagactgccccacctgtgttacttgccctgctgggccactccnctcacagctgggc

SEQ ID NO: 12658 - DNA, 432 bp, Bos taurus
  Clone ID: 54-LIB3058-019-Q1-K1-F6
cgactcttagcttgtcggggacagtaaccgggacccgtgtctactcctgttgcctgcgcctgctgacccgtagccaccatgcgtgagtgcatctccatccacgttggccaggctggtgtccagatcggcaatgcctgctgggagctctactgcctggaacacggcattcagcccgatggccagatgccaagtgacaagactattgggggaggagacgactccttcaacaccttcttcagtgagacaggggctggcaagcatgtgcccagggcagtgtttgtagacctggaacccacagtcattgatgaagttcgcactggcacctaccgccagctcttccaccctgagcagctcatcacaggcaaagaagatgccgccaataactatgcccggggtcactacaccattggcaaggagatcattgacctcgtc

SEQ ID NO: 12659 - DNA, 425 bp, Bos taurus
  Clone ID: 54-LIB3058-020-Q1-K1-F10
cggacgcgtgggtctagatcgcgagcggccgtcctttttttttggtcatttggtaccaatctgggcttattcaataacctacatccaggacacagtgaatgattccacatcaaggaagccacaagcataacccccttttcagtggaaaaccgaccgcatcccaacatgaaccataacgagtaaaggcacagtatatacacacgacacaaatgctggctcacccagggcacaggtccatcaatgtgcgggcagaagagaagtgcgttaggcccaagcttacgggtgaggcctggtctcagcatgaagggagcccttgctgcatgtcccctcagtctgggatctgcgattgatgaaccaatactctatggcagaaataacattttaccagttactggatccgggacttaagatactggcaatctcca

SEQ ID NO: 12660 - DNA, 325 bp, Bos taurus
  Clone ID: 54-LIB3058-020-Q1-K1-F6
acggcgcgagtccagtggaagccggcgggcgtgggaatccaggccgggcccaggcggccaggagcaagatggcggctgggccaaatgggcttgaggagtgggtgggcagcgcatacctgtttgtggagtcctcactggacaaagtggtcttgtccgatgcctacgctcaccagcagcagaaagtggcaatgtacggggctctccagactgccctagcagcactccttgcccaagacccttccccagtacctccctttccagcctacttttcccatctgagggcagaggccacaagaagttgaagctggttgggggatctggcccc

SEQ ID NO: 12661 - DNA, 382 bp, Bos taurus
  Clone ID: 54-LIB3058-021-Q1-K1-F6
gttctagaacgtgagcttacatgatctcaaggtcagaagcaagctgcgctgtgttaaatggttggttagttgctagacagagagaaaatatggacgatcacacaccattctttgtagatcattatatcaagggttcagtctctggctcatcaaagctaaatgccgtacgacctatctagttgctgtgaattatgccagggcgacaatggagagcgtttataatggtacaatgcattttacctaccagataggggtaggccgagccggtgatggggatgtctgctgtagctgattgatgagtatcaatgaacggggcgattctgaaaagaggcatacgaatatcgtgcccggcctgacccggctgggctgggaacagtttgta

SEQ ID NO: 12662 - DNA, 399 bp, Bos taurus
  Clone ID: 54-LIB3058-023-Q1-K1-F6
cggacgcgtgggggaacatgctgagagactgatgaagctgcagaaccagcgaggcggccgaatcttccttcaggatatcaagaaaccagaccgtgatgactgggagaatgggctgactgcaatggaatgtgcgctgtgcttggagagaagtgtgaatcagtcactactggaactgcacaaactggccactgaaaaaaatgatccccatctgggggaattcattgagacctaatacctgaatgaaccagttgaagccattaaagaattgggtgaccacattaccaaactgcgccagataggggctcctggatctggcatggcagagtacctctttgacaagcacaccctgggacacaatgagagctaaaacctcaaagccctttggggggtttccacaga

SEQ ID NO: 12663 - DNA, 414 bp, Bos taurus
  Clone ID: 54-LIB3058-024-Q1-K1-F10
gccagcccggataggcagtagatatttttgccagcctgaagaggaactcagataagcagcagcttgaaccaaggcctgaaagattagtagagacagaaatttcacattcatacaagaacatcactatctgacttgcttctgagaagagttgaaaagctgagtctctatggagagagtggtgatgttgcctctgccgttccataactcttgtggatttaaaaccaacctgttccctgacccccccaaccccattcttctttttttctctttaacctggattcttgacagtgcagagcagttctgagcaggcacagagcccactctctgttcttgtccctgtcatcccccaacccccagaatctgactcacaatctcaccatcagctgggttcacatcactggtttctatccaata

SEQ ID NO: 12664 - DNA, 367 bp, Bos taurus
  Clone ID: 54-LIB3058-025-Q1-K1-F6
caggtgatacaggagaatccagactccctaaccccgggtttgccctgcatccctccccagcctggcggaagttgaagctcccaggggacagctccttgatgacctaccggggccacggggtgctgcacaccctcatccgttgccgattctcccccacccacagcaccggccagcagttcatctacagtggctgctccactggcaaagtggtcgtgtacgacctcctcagtggccacatcgtgaagaagctgaccacccacaaggcctgtgtgcgtgacgtcagctggcacccctttgaaggagaagattgtcagcagtttcggggaagggaaatcgggtctgtggcagtaccgccaggctgagtact

SEQ ID NO: 12665 - DNA, 421 bp, Bos taurus
  Clone ID: 54-LIB3058-028-Q1-K1-F10
aagccacccagagacaagaaagattcgctgataggtcactattagaaatggaaaaaagggaacgaagagctctagaaagaagaatatctgaaatggaagaagagctgaaaatgttaccagacctgaaagcagacaaccagaggctaaaagatgaaaatggggccttgatcagagttataagcaaactttccaaataaaaaaaagcagcaagtaatggaattgcacatactagtaacccagtggaccataattgaccgtcactggaagcctgggaagaatccttggagactgtcatttttggatgtcctgccaaatgccctcttatctaggagttttgtttaattttctgttttttttttttttttttttctcttgtatcaagaccattgtttcatgttaatgcaactgctgagaagaattt

SEQ ID NO: 12666 - DNA, 280 bp, Bos taurus
  Clone ID: 54-LIB3058-028-Q1-K1-F6
gcattgtgttcctgccgaagactgacaagtgcatggaggagcacccataggggagtgtgcctctcaggacctggcccttctgccctgctcagccgtttcctgcaacacccgagaccccagcctgagaccccagccccggcccctcgccatccatgcccccctcagcctttattcccgctctgaaaataaactctgaagcaagtcaaaaaaaaaaaaaaaaaaaaaaaaaaaaaaaaaaaaaaaaaaaaaaaaaaaaaaaaaaaaaaaaaaaaaaataaaa

SEQ ID NO: 12667 - DNA, 440 bp, Bos taurus
  Clone ID: 54-LIB3058-030-Q1-K1-F10
tgttttctggcgaaggccttcctgcatttatgaattctctcccaagaagcaagagaacacctgcaggaagtgaatcaagatgcggaacacagaggaatcatcacctgctttaaaaaaataaagtactgttgacaaagatcgtttctctctatttgttcctaggtgtaaaattttaatagttaatgcaaaattctgtaatcattgaatcattagtggttaatgtttgaaaaagctctcgcagtcaagtctgtgatgtattaataatgccttatctattgtttgtagtcattttaaatagcatgagccttgtccctgtagtcagtagggggcaatcttgcttttattcatcctccatctcaaaatgaatttggaattaaatattttagtgtaagatatgtataatgctggccatttaaaaagggggttttctcaaaagtaaa

SEQ ID NO: 12668 - DNA, 340 bp, Bos taurus
  Clone ID: 54-LIB3058-030-Q1-K1-F6
gttctgcctttgcttcagaacatgagcagaagaattctcgtttgatgctaataattgcagtcatgacaaactcacctaggggaaggagttagttctgcattaagctgtggggctgcttctccccattgctccctaacaattcattgtgtggacttctctcatctaaaatgtgggtggcttttgcttgggatcagtgctctctatttatgtccttgctggtctctgaacacattcctgttgcgttaagacttgagagatttggagatgtgtgatgttcaggcacaggatgcgaagagcttatgtactattcttagttggttaatagtccttttgataccat

SEQ ID NO: 12669 - DNA, 375 bp, Bos taurus
  Clone ID: 54-LIB3058-034-Q1-K1-F6
gagctgctcgcagtactcaaaacatgcactgcatacactttctttacacctaatagcatgaagcaagtgaacgaccttatctctgggcttcgggaagctaatcaagcaattaatcctaagttgcttcagttggtcgaagacagaggttcaagtcgttccaggggtagaggaggcatgaaggatgaccggcgggacagatactctgcgggcaagaggggtggatttaatacatttagagacagggaaaattatgaccgcggttactctagtctgcttaagagagattttggggcaaaaactcagaatggtgtttacagtgctgcaaattacaccaatgggagctttggaagtaattgtgtgtctgctggtatacag

SEQ ID NO: 12670 - DNA, 434 bp, Bos taurus
  Clone ID: 54-LIB3058-036-Q1-K1-F6
cggaactatagaccaatatctttgatttcttcaatgcaaaaattctcaacaaaatattagcagacctaattcagttacttattaaaaggattacacacatgaccaagtaggaattatcccagggatgtagggatagttcaacatacacaaatcaataaatgttatgtatcacattaatagaatgaaagataaaaatggtcctctcaatagatgtagagacagcatctgacagtacaatttcgtgatgacataccctctgcagattggtaatggaaggaacatacctcagtatgttttttgtttcgttgttcagttgctaagtcatgtcctggggcccaccaggctcctcttccatgagattgtccaggcaggaatgctggagtgggttgccgtttccttctctaggggatcttcctgacccagggatcaaaccc

SEQ ID NO: 12671 - DNA, 414 bp, Bos taurus
  Clone ID: 54-LIB3058-038-Q1-K1-F10
gcacagggcactgcacctgatgccttccatcatcatccagaccgctccatgaatgagctgtgcctacaacatcccttgcctgctgccatcagaagagggggcccctctgcatctgagcccccccatcctctcgtcacctgggcccatggaacactctgatccgcctcattttgaaaccaaaaaaactgctccttcactctcaccctgaggccccagaaaagaggccctatggttggtgccccagagttaatcaccaccccaggggttgcctctggatgtcagatctcccctggggggtggggggcttggctgctgctgctgctgctctgtatttgcctcttgtgatcctgtcctttacccattccactccacccaggagaggccttggtacgccctctgctctggagtgtccct

SEQ ID NO: 12672 - DNA, 406 bp, Bos taurus
  Clone ID: 54-LIB3058-038-Q1-K1-F6
tcccgccgcccactcgtccgtggtcggagccgccgccgttttttttcaactggctttcggttgctggggggtggccagagctatatggaagacgattctggaagcttctactttgtcatcttggtcaccatgataatccagtttttgaaatggagtttacagctggaaaagcagaatccaaagacgatcaccgccatctgaaccagttcatagctcacgctgccctcgacctcgtagatgagaacatgtggctgtcgaacaatatgtacttgaagacggtggactaattcaatgaatggtttgtctcatcatttgtcactgctggtcatatgagatttattatgctgcatgatgtcaggcaagaacatggaatcaagaacttctttactgatgtctatgatttata

SEQ ID NO: 12673 - DNA, 277 bp, Bos taurus
  Clone ID: 54-LIB3058-039-Q1-K1-F10
tagatcgcgagcggccgcctattttttttttttttttttttttttttttttttttttgtttttttttttttttttttttttttttttttttttttttttttttttttattattttttttttttttttttttttttttttttttaaaaaaaaaaaaaaaaaaaaattattaaaaaatttaaaaaagaaaaaatttttaaaaaatgaaaaaaaattttggaaataaaaaaaaaaaaaaaaaaaaaaataaaaaaaaaaaaattaaaatttataatttat

SEQ ID NO: 12674 - DNA, 416 bp, Bos taurus
  Clone ID: 54-LIB3058-039-Q1-K1-F6
gcagaaactgctccacccccggaccagtcatcaagctttatccattcatataccatgcagttgagtcctgtacacagaccaccaaccagccgggacaaaggacgggggcctgaggagccaagtgactagacgctccccacttgtgtaacaagaaggtgtgacgtgtgaactgacatgatatccatgtgtatataatccgcgtttgtaggcaaggatgcagtcccttccgcccatgcagctgtcagtacatctgcgcctcctccatcccgacttacatagactgagacatactttgtttctttttttttctatttcagccctgattcttttatttttctttcttttgcccatcagacttcttgtgaaatttcatcagagtttgtgctaagcctgccaggtgtcttttttgatgccta

SEQ ID NO: 12675 - DNA, 423 bp, Bos taurus
  unsure (406): unsure at all n locations; Clone ID: 54-LIB3058-041-Q1-K1-F10
cggcccgacccactcgttcgggatgagttacatgttgttgaatctgattcgatgaattatgaaggcagtccaatgaaagtaacactggcaactttgaaaatgtctgtacagccaacggtttctcttgggggctttgaaattacaccacctgtggtcttacggttgaagtgtggttcagggcctgtgcatatcagtggacagcacttagtagccgtggaggaagatgcagagtcagaagaggaggaagaggagaggtgaaactcctgagtatatctggaaagcgttctgcccctggaagtggtagcaaggttccccagaaaaaagtgaagcttgctgctgatgaagatgaagatgatgatgacgatgacgatgatgatgatgatgaagatgatgatgatgacgattntgatgtagaagttgaag

SEQ ID NO: 12676 - DNA, 282 bp, Bos taurus
  Clone ID: 54-LIB3058-042-Q1-K1-F10
cacgcgtccgatggcgagcggccgcccttttttttttttttttcattaaaagtgtattactttatttgaatacctcaaaaccagggcatactttccttgagacccgtggtcacagctctcattgttgggtgtggccacgaatggaggtcactcagtcacaaccagctcaatgacgcagtgtgtgtgtcgagcaatttggagattttgtttctgaaattttctttttttttctaatcctctaatcattgaggctatgtattaatagacattatagtaaaccca

SEQ ID NO: 12677 - DNA, 269 bp, Bos taurus
  Clone ID: 54-LIB3058-044-Q1-K1-F6
gggattttaggtctagctttggtaatttttatcgtactattgccaagccgactattgggaacatggaaccgactagtaagcaatcggtttgcaaccctccgacaatgaatacttcaactggtatcaaaacaaaccatgagtatccacaactctaaatgacaaacctgaacattaatactaatatctatgatgctatttagcgcatcaacaaacctactaggcctattaccagattcattcacagcaacaacacaagtatacctttacct

SEQ ID NO: 12678 - DNA, 440 bp, Bos taurus
  Clone ID: 54-LIB3058-046-Q1-K1-F10
tggaaggtagtgcttgttaaattgtccatatatgatgaggggactttgatctcttcttggttgtcatttaccgtgaaggcagctttcaaatacgtggatgtgcctaaacctgggatggacgtggccgatgcgtacgtgactttcgtccgccactctcaggatgtccttcgtgataaggtcaatgaggagatgtatatagaaaggttatttgatcaatggtacaacagctccatgaacgtgatctgtacctggctgacggaccggatggacttacagcttcacatttatcagttgaaaactctaattaggatggtcaagaaaacctatagagatttccgattgcaaggagtcctggactcaaccttaaacagcaagacctacgaaaccatccggaaccgtctcactgtggaagaagccacagcgtctgtgagcgaaggtgg

SEQ ID NO: 12679 - DNA, 426 bp, Bos taurus
  Clone ID: 54-LIB3058-046-Q1-K1-F6
aaggagccttcgtctttaggacttccttccagactcccagaaatcatgttggtaggatcccagtccttctcacctggagggcccaatgggatcatcaggagccagtcctttgcggggttcagtggccttcaggagcggcgatccaaatgtaactccttcattgaaaattcctccgttctaaaaaagcctaaggccaaactgaagaaaatgcacaattaaggacacaaaaccagcatccctcccaaagagcctaagcctaaaagggtggaagaggtctacagggctttaaaaaatggacttgatgagtatctggaggttcaccagacagagctggacaagctgacaactcagttaaaagatatgagaagaaactctcgcctgggtgtgctgtatgacctagacaaacaaattaaaacgatcgaaaga

SEQ ID NO: 12680 - DNA, 323 bp, Bos taurus
  Clone ID: 54-LIB3058-047-Q1-K1-F10
cggacgcgtgggggtggagaggctccttgggctcccagggccagggttgggagtgacctgtcccaaagaaaaggcctagttagctgagctgcccctgtgccgccccaggtccaggatgggggcaggtgggccttgagttgttgctggttaggccgtgttcctctgttcagttgtaaaaagcagacgctccgtgtggggcccaggctgctggctgctatggggcctctctaagcagccatgcagcgccttccccacccttgattaaacctggaaccactgctaaaaaaaaaaacaacacatggaacgccatggggctggtatac

SEQ ID NO: 12681 - DNA, 437 bp, Bos taurus
  Clone ID: 54-LIB3058-048-Q1-K1-F10
ccgacgcgtccgcggacgcgtgggtcttgagcggccgccctttttttttttttttacgtgaatttaaagcttctttagcatcttcaaatgaagcaaattctataaatgcataccctttagatttgccattttggttctggggcaccttgatatgagttgccttctcaaatacttcctgaagagtttcttccgttgcactataggagagattgcttaaaaccagggtttttgattcaccactccaagtgctgttctttccacctctatggtcttgactttgacctttctctccggtgtagtacagagaaatggatcgcccatctatctctgttccctgcttttcttccaaggttttttctgcatcagcttctgtcttaaattcaatataagcaatccctttactctttccatccttgctgactaatctgatctccaca

SEQ ID NO: 12682 - DNA, 438 bp, Bos taurus
  Clone ID: 54-LIB3058-048-Q1-K1-F6
atcattttactctgtataaagatgtagtagtataaaacttagctgttgatgcagaaatcaaagaggccaatgcaggaaggatgtctcctcatcctcaggactcagcggctcgttctccggaagggagcacactcttttctgctgctgctgtgaactataacgacagtggaagtcacaaaaaatgtcccgcacccaccccccacgcccttgaaccccccccagaccgtgtgtgtatattactgtcttgtggcatcgtcgttgcaaacgtgtgtgtgctagttctccgctaccccctcccctttcagaatatatcctccacccgcccgttaggtgcatcgtggcgttctcttctcaaggctttgaaatcttccccctttgcactcagattagttttcaggtctgtgtccctgcccccctgcccttcgttacaagatctta

SEQ ID NO: 12683 - DNA, 426 bp, Bos taurus
  unsure (332),(401): unsure at all n locations; Clone ID: 54-LIB3058-049-Q1-K1-F10
ggcagccccttctgcagctaagggttatagccgcaccacctcttctcttcctcggccggctctgcggccagggctctgcgatctcgcgagagtggctgactggctgtgggggttgcggcggcagcaggcggagccggggagggaaagcagcggcggctgaggcgactgaggcggcggcgggcggagcggcaggcggcggcggcgcggcggcggagcgcagcatcatggcggaccgagacagcggcagcgagcagggtggtgcggcgctgggctcgggcggctccctggggcacccaggctcgggctccggcgggggcggtggtggcggcggnggcggcggcggcggcagtggcggcggcggcggcggcggggccccgggggggctgcagcacgagacgcangagctggccttcaagcgggtggaca

SEQ ID NO: 12684 - DNA, 304 bp, Bos taurus
  Clone ID: 54-LIB3058-049-Q1-K1-F6
cgcggtttctggaggcgaagaacgttgtttgccaatcgcaagccagaagatgaaggttctgtgggttgccgtggtggtcgcgcttctggcaggatgccaggcggatatggagggagagctggggcccgaggagcccctgactacgcagcagccccgggggaaggacagccagccttgggagcaggcgctgggccgcttctgggattacctgcgctgggtgcagaccctgtctgaccaggtgcaggaagagctgctcaacacccaggtcattcaggaactgacggcgctgatggaggagaccatg

SEQ ID NO: 12685 - DNA, 337 bp, Bos taurus
  Clone ID: 54-LIB3058-050-Q1-K1-F10
ctctcccctcctcctcggcttctccccgttccccgccagccctctcgctctcccactccgtcagcccgtcctccccgctcccctcctcccgctcattcactcgcccctctcctttctccactctctccccctctctcctttcttctccttctttctccctccgtctctcacaccccctccattcccctgtctcctttctgacactgcactgcagctgctcttcagccctgccccctccccagtgagaacaaaccagcaacattgctttttttttcttaaagagatttctattgatccgattaaaaaaaaacaaaaacaaaaacaaaacaaccttaag

SEQ ID NO: 12686 - DNA, 448 bp, Bos taurus
  Clone ID: 54-LIB3058-051-Q1-K1-F6
gaaggaaatggcaactcactccagtgttcttgcctggagaatcctagggacaggggagcctggtgggctgccgtctatggggtcacacagggtcggacacgactgaagcgacttaggagcttagccgcggcagtctaatggatacaatggtattgttttgatttgcatttcctaatgtttgtcttcacatatttgtcattcaggtgttctaatctgtgacttttcatactttgcccattttttatctgggtattatttttttcttgctgattgtagatttttgcatatgccttcaaattaatccttcattgggtacacatattgcacatatttgcttttctttttggtccttttagcaaacaaaaattctcaactttgatgtacagcatatactttctgtgtattttcttctatagactattaataggtggcgttggtaaacataact

SEQ ID NO: 12687 - DNA, 411 bp, Bos taurus
  Clone ID: 54-LIB3058-054-Q1-K1-F10
gatgaaatgagtgatgtggtggtccaaccctacaactcactgctcacactcaagaggctgacccagaacgccgactgtgtggtggtgctggacaacactgccctaaaccggatcgccacagaccgcctgcacatccagaatccttcgttctcccagatcaaccagctggtgtccaccatcatgtcagccagcaccaccaccctgcgctaccccggctacatgaacaatgacctcatcggcctcatcgcctcgctcattcccacgccacggctccacttcctcatgactggttacacccccctcaccacggaccagtcggtggccagcgtgagaaagaccacggtcctggatgtcatgaggcgactgctgcagcccaagaacgtgatggtgtccacaggccgggatcgccag

SEQ ID NO: 12688 - DNA, 422 bp, Bos taurus
  Clone ID: 54-LIB3058-054-Q1-K1-F6
ttggaattcagagcccttctttttgtcccaagacgagctccttttgacctgtttgaaaacagaaagaagaagaacaacattaagttgtatgttcgcagagtattcatcatggataactgcgaggagctaatccctgaatacctgaatttcattagaggtgtggtggattctgaggatcttcctctgaacatttcccgtgagatgttgcaacaaagcaaaattttgaaagttatcaggaagaatttggtcaaaaagtgcttggaactcttcactgaactggcagaagataaggagaactacaagaagttttatgagcagttctctaaaaatattaagcttggaatacatgaagattctcaaaatcggaagaagctttcatagcttgtgaggtactatacttctgcttctggtgatgagatggt

SEQ ID NO: 12689 - DNA, 432 bp, Bos taurus
  Clone ID: 54-LIB3058-056-Q1-K1-F10
aaataatatgcacacatttttaaaatgcacctcaaatatataaccagtgtagtggatttaacagaaatgtacagcaaggggactttgtggtgtgttgggggggaggtgcgggtcaagtgaagacaatgacttactgtatacgaaaactcacttttcttagggaaggacaccaaagcatgagactggttccgtggcctcttctggatctataaattaaccatatcaccacagacatactgaccagcaggaatgccttaccctcatgtttttgttagatcattctgtctgtgtatcactaagttttatggctttgtgcgcatctagatactgtatcatgaaaaagatggagtaaattgtggatttggtggtttcagaaatgtgtgatcacccagaagaaaataatggtgtgattttgggtggtgtttttttttt

SEQ ID NO: 12690 - DNA, 424 bp, Bos taurus
  Clone ID: 54-LIB3058-058-Q1-K1-F10
gaaaaagtaaaggaccgaagaaggagactggagagaccaggatccttccagctgaacaaacagactagccagccggctaccgttggagtcagagtcccaaagacatgggcttattagagtgctgtgcaagatgtctcgtaggggccccctttgcttccctggtggccactggattgtgtttctttggggtggcactattctgtggctgtggacatgaagcactcactggtacagaaaagctaattgagacatatttctccaaaaactaccaggactatgagtatcttatcaatgtgatccatgctttccagtatgtcatctatggaactgcctctttcttcttcctttatggggccctcctgctggccgagggcttttacaccaccggcgcagtcaggcagatctttggcgactacaagaccac

SEQ ID NO: 12691 - DNA, 373 bp, Bos taurus
  Clone ID: 54-LIB3058-058-Q1-K1-F6
cacagaatctgcctttgcactgagttccttttcattcgcatctcctctgccttagtcacaggggcagcagtgcagaaaactctgtcaaacctcagaatatagtagaaataattaaagctgttgaatgagtcttaaaaatcatactactgttaagtggaccaagtttggtgaagcagaatgtgacagaggttgattaaggaaggagcaactcaaggacattgggaatgataacttttccacttgagaactactttatgttttactgtattttttttttaatatcttctgttctgattgctatttcgcaaaagaaaatagtatttacaggtggcttcttttaaaatataacatataaagcaggaatgtatttgaa

SEQ ID NO: 12692 - DNA, 430 bp, Bos taurus
  Clone ID: 54-LIB34-001-Q1-E1-F6
cggacgcgtggggtgatgagatggtttctctcaaggactattgcacaagaatgaaggaaaaccagaaacacatctattacatcacaggtgagaccaaggaccaggtggccaactcggccttcgtggagcgcctccggaagcacggcttggaagtgatctacatgatcgagcccattgatgagtactgtgtgcagcagctgaaggagtttgaggggaagaccttagtgtcagtcaccaaagagggcctggaacttccagaagatgaggaagagaaaaagaaacaagaagagaaaaagacaaagtttgaaaacctctgcaaaatcatgaaggacattttggagaagaaagttgaaaaggtggttgtgtcaaaccggttggtgacatccccatgctgcattgtcacaagcacatacggctggacagcaaacat

SEQ ID NO: 12693 - DNA, 403 bp, Bos taurus
  Clone ID: 54-LIB34-002-Q1-E1-F6
attcgccggccgacccacgcgacaactgtgataagcctttgttggaaaaatcccactgcattgctgaggtagaaaaagatgccatacctgaaaacctgcccccattaactgctgactttgctgaagataaggatgtttgcaaaaactatcaggaagcaaaagatgccttcctgggctcgtttttgtatgaatattcaagaaggcatcctgaatatgctgtctcagtgctattgatacttgccaatgaatatgaatccacactggaggaatgctgtgccaaagatggatccacattcatgctattccacagtgtttgacaaacttaatcatcttgtggatgagcctcagaatttaatcatacataactgtgaccaattccacaaatctggagagtatggattcc

SEQ ID NO: 12694 - DNA, 415 bp, Bos taurus
  Clone ID: 54-LIB34-004-Q1-E1-F10
cggacgcgtgggtcagtctggtggagagcagccatgatttcgtggaatccgccagctccgggaatcctgtggacttcttccctatccttaaatacctgcccaacccggctctgcaaaggttcaagagcttcaaccagaggttcctgcagttcgtgcggaaaacggtccaggagcactaccaggactttgacaagaacagcatccaggacatcataggcgccctgttcaagcacagtgaggataactcccgagccagcagtcgcctcatctcccaggagaagactgtcaaccttgtcaacgaactctttgcggctgggtttgacacaatcacacaagcaatctcctggagccttatgtaccttgtgacatatcctaagatacagagaaagatccaggaggagctggacagagtggt

SEQ ID NO: 12695 - DNA, 395 bp, Bos taurus
  Clone ID: 54-LIB34-004-Q1-E1-F6
ggcggcggctctggatccactgcccacaccccgctctcgcaggcacacatgaggacatagagaacttccttcctcctggctctggggctcctggtgtcagggttctgctccagggtccagtgcctcccagagaatgtgaccccagaagaacagcacaatgggacgtctgtggatggccactcattagcctccagcaacactgacttcgccttcagcctctacaaccagttggctttgaaggaccccaataagaatgtcatcttctcccctctgagcatctccatagccttggccttcctgtccctgggggctcatgaccacactgtgacagagatcctggaaggtctcaagttcaacctcacagagacccccgagacagaaatccaccagggctt

SEQ ID NO: 12696 - DNA, 381 bp, Bos taurus
  Clone ID: 54-LIB34-005-Q1-E1-F10
gctggtggctcttccatccccagaccagccaagcctgtgagtgacaccccagacagaggaaccagagccatgcggagtctcagcggactgctgttgttactgactgcctgcctggcggtaaacgccagctccgtgcccacattgcccgatgacattcaagtgcaggagaacttcgacctgtctaagatctatgggaagtggttcaatgtggccgtgggctccacctgcccatggctgaagaggttcaaggagaagatgaccatgagcacagtggtgttgaaagcggggccgacgagcaaggagatcagcgtcaccaacactcacaggcggaaaggtgtctgtgaatcgatctccggtacttatgagaaaacaagcactgat

SEQ ID NO: 12697 - DNA, 412 bp, Bos taurus
  Clone ID: 54-LIB34-005-Q1-E1-F6
gcttcctgagccacaaagatgatagcccagacctccctaaattgaaaccagaccccaatactttgtgtgatgagtttaaggcagatgaaaagaagttttggggaaaatacctatacgaaattgctagaagacatccctacttttatgcaccagaactcctttactatgctaataaatataatggagtttttcaagaatgctgccaagctgaagataaaggtgcctgcctgctaccaaagattgaaactatgagagaaaaagtactgacttcatctgccagacagagactcaggtgtgccagtattcaaaaatttggagaaagagctttaaaagcatggtcagtagctcgcctgagccagaaatttcccaaggctgagtttgtagaagttaccaagctagtgacagatctcac

SEQ ID NO: 12698 - DNA, 401 bp, Bos taurus
  Clone ID: 54-LIB34-006-Q1-E1-F6
ggtcagcatgctggtgaatgatctgtacgcaattcctgtgccgttatattgtccatcatccatgcatttctatgcacacttctcgacacagtcaagcactgcaagcaacaaactgcagttgttcctctgttgccttgggcttgtgttgcacgagctcttagttacatctgttcatatgcctgtcgtcataggtcactctgtcgtgtttgttaacatgtgatgcgcaactgaagacatccgaacctgctttgctgtagtaggtacacgacttgttgtcttcaatcaatgagtcctacaccatgtaccacacaaccacaggcatctcaacacatcctgagggtaagcatgaacattagtattgatatctcagatcctattcaacggttctccatttctggtgg

SEQ ID NO: 12699 - DNA, 390 bp, Bos taurus
  Clone ID: 54-LIB34-007-Q1-E1-F10
agtcagtactggcgctttcaggacggtgtcctggagcctgacttcccccgaaacatctcggacggcttcgggggtattccggatgatgtggatgcagccttggccctccccgctcacaacttcaacggcagggagcgggtctacttcttcaagggcaaccactactgggaatatgtgttccagcagcagcccagtcaagaggattgtgaaggcagctccctgccggccgcatttaaacactttgccctgatgcagcgggacagctgggtggacatcttccgacttctcttctggggcggttcctatggtggtgctggacagccccagctcatcagccgcaactggtttggtctgccgggacgactggatgccgccatggccgggcagatc

SEQ ID NO: 12700 - DNA, 423 bp, Bos taurus
  Clone ID: 54-LIB34-008-Q1-E1-F6
atgttttaaaaagtatgggaaaatgtgggggatttttgaaggtaaacatcctctgttggttatcacggatccagacatgatcaaaacagtactagtgaaagaatgttattctgtcttcacaaaccggagggtttttggtccaatgggagttatgaaaaatgctgtttctgtggctgaggatgaacaatggaagagaatacggacattgctgtctccaaccttcaccagtgggaagctcaaggagatgttccctatcattgggaagtatggagatgtgttggtgaggaacctgaggaatgaagcagagaaaggcacgtccgtcgacatgaaagatgtctttggggcctacagcatggatgtgattactagcacatcatttggagtgaatattgattcacttggcaacccacaagatcactttgt

SEQ ID NO: 12701 - DNA, 396 bp, Bos taurus
  Clone ID: 54-LIB34-009-Q1-E1-F6
attagttatagttttgcagcacctaaaatgttttctcctctgacatttacattcttcctgtattatatatgtatttcattcaaacctcagcagtatgtgttgtttaaaataattaacatttaaatatttctattatttctttaattttctgccggctgtttttatttttctagcatggtgaccaaactatggtgaagaaaaattttactgttatcttccacttccccaacaatcatttattaatgtgctttctacattctgggcttcccaggtggcactagtggtagagaatctgcctgccagtgcaggagacacaggagacacagattcgatctgtcgggatcctctggagagggtaatggtaacgcactccaatgttcttgcctgggagattcc

SEQ ID NO: 12702 - DNA, 355 bp, Bos taurus
  Clone ID: 54-LIB34-010-Q1-E1-F10
atggatgatgatattgctgcgctcgtggtcgacaacggctccggcatgtgcaaggccggcttcgcgggcgacgatgctccccgggccgtcttcccgtccatcgtggggcgcccccggcaccagggcgtaatggtgggcatgggccagaaggactcgtacgtgggggatgaggctcagagcaagagaggcatcctgaccctcaagtaccccattgagcacggcatcgtcaccaactgggacgacatggagaagatctggcaccacaccttctacaacgagctccgtgtggcccctgaggagcaccccgtgctgctgaccgaggcccccctgaaccccaaggccaaccgtgagaaga

SEQ ID NO: 12703 - DNA, 400 bp, Bos taurus
  unsure (344),(350): unsure at all n locations; Clone ID: 54-LIB34-010-Q1-E2-F6
ccttcacgcccgtgtccgtgttgctgctggctgaaatctatactgaggctggagtccctcctgggctcttcaacgtggtgcagggaggggctgccacaggccagttcctgtgtcagcatcgtgatgtggccaaagtctccttcactggaagcgtgcccaccggctcaaagatcatggagatgtctgctaaaggaatcaaacctgtcaccctggaactcggaggcaagtctccacttatcatcttctcagactgtgacatgaagaatgctgtgaagggggcgctgatggccaacttccttactcaaggccaggtttgttgtaatggtacaagggtatttgtgcanaagganattcttgatcaatttacagaggaaagtggtgaaacagacgcaaaggataa

SEQ ID NO: 12704 - DNA, 378 bp, Bos taurus
  Clone ID: 54-LIB34-011-Q1-E1-F6
acgaataaaaatgagtacaattacaggccctgttcccagagagttcaagagccagctccaagaggcccctctagaatggaaggcactgctggaaatgcagcagacgaaaatggtgttggaaactttcggtggcgatggacatgccagaggagactctgtatctcaaggaacaggattagcaccaggaagtcccagaaagcctggaaccagtagtattggaaatgtgaaccctgggagctatggacctggaagtagtggcacttggaaccccggccgccctgagcccggaagtgctggcacctggaaccccggccgccccgagcccggaagtgctggcacctggaaccccggccgccccgagcccggaagtgctggcac

SEQ ID NO: 12705 - DNA, 411 bp, Bos taurus
  Clone ID: 54-LIB34-012-Q1-E1-F10
aaccgatggagaatcccagggacgggggagcctggtgggctgccatctctggggtcgcacagagtcagacaagactaaagcgacttagcagcagcagaagaatttaaagtacataggtggcttacgctgtatttctgttggactaaaaatagcagatagttctgctctaaaaactttcatttagactaagtatcactgaactcctctggaagcaaaatgtcctgtgaggtaacagcataaactcccacccctccctcttccagcacatttattacgtacggtgtgcgtttaaggggcagtctgccaggtggctcgtttccacagggtcagatgcctccagcttcgcaggctctcccacaccctctctgaagctctccccatccagctcccgagcgagtgttcagctctggt

SEQ ID NO: 12706 - DNA, 421 bp, Bos taurus
  Clone ID: 54-LIB34-014-Q1-E1-F10
aactgcccgttcgacagatagccgtaacttctgtgctgtgccagccgcatccctgagacaagatggtgaatgtcggagtgaacggattcggacgcatcgggcgcctggtcaccagagctgcttttaattctggcaaagtggacatcgtcgccatcaatgaccccttcattgaccttcactacatggtctacatgttccagtatgattccacccacggcaagttcaacggcacattcaaggcagagaacgggaagctcgtcatcaatggaaaggccatcaccatcttccaggagcgagatcctgccaacatcaagtggggtgatgctggtgctgagtatgtggtggagtccactggggtcttcactaccatggagaaggctggggctcacttgaagggtggcgccaagaaggtcatcatctc

SEQ ID NO: 12707 - DNA, 382 bp, Bos taurus
  Clone ID: 54-LIB34-016-Q1-E1-F10
cgtaaactataacctaggggtttctgttggatggttggcaactaagaatggaggaagaacaacaaagacatgttctccactttcttatttctcaaaacaatgttatcttcgtctttttaatcttaggtttttaacagattaaacctttaaagcaagaagtgaattctgtcttttcagacccagaaatacacatgaatactttgctatgattacattttagatattcatttatacttttctatatctaagactcatatcttgatttttactatcatatatgaatgaagcctttatatcttgtttttttgccaatcttgagagatagatgggaaaagataaaagaatgttgtctaactcttgattgcttagaaagtatttccat

SEQ ID NO: 12708 - DNA, 358 bp, Bos taurus
  Clone ID: 54-LIB34-016-Q1-E1-F6
ggcacttagacactcataaggtggcataacctgtctcacctggactgcagggtctggctctgtagttcacagtgctctttcttctcactgtatccaggttccctcccagaggagctgccagttctcttgggcggccctcagtttctctctcctctccagctgactaaacttttttttctgtaccagttaatttttccaactactaatagaataaaggcagttttctaaaaaaaatcatgaacgtaaagaatcccttgagggaaggccaaaggatccggttgacaacctgctgcaagaaaacagggtttgggaagattcactgatcagattccaactaaaaaatgggtggcctgcccaa

SEQ ID NO: 12709 - DNA, 404 bp, Bos taurus
  Clone ID: 54-LIB34-017-Q1-E1-F10
ggctgaagctagttaacatcagtgtcttggctcccaactggctcccaattcctggtgaaactcctaaagggagactgttaaatcatgaaattaatcaccatccttttcctttgttccaggctgctaccaagtttaacccaagagtcttctcaagaaatcgactgcaacaaccaggatgtatttaaagctgtggacgctgctctgacaaaatacaacagtgaaaacaagagtggcaaccagtttgtattgtaccgcataaccgaggttgccagaatggataatcctgacacattttattccttgaagtaccaaatcaaggagggcgactgtccttttcaaagtaacaaaacttggcaggactgtgactacaaggactctgcacaagctgccacaggagagtgcac

SEQ ID NO: 12710 - DNA, 397 bp, Bos taurus
  Clone ID: 54-LIB34-018-Q1-E1-F6
aggtcacggaagaagtccttgaagataaaccaagaacattcatcagtatcattcatatttggatttttaaggccacctgatttcttcttcgtcatgcattctgcatttgttaaatgacagttactacatcaatctgcaactatcaaaaatgagggaaaaggttcaggctgttaacagttccacgcagtatttaaacacactttggcagaattgatactctccccttgttctcttgctttattctgggcaagtttaaggggaaaacttgtgctgctgttagtgcaactgctgtgtatgttgagccactgttgtcatgccagccaggtgcaaaggcagcttagctactgaggtattgaatgttctgaggacattctagacaacagcttagttccttttt

SEQ ID NO: 12711 - DNA, 378 bp, Bos taurus
  Clone ID: 54-LIB34-019-Q1-E1-F10
aatggatcccaaaggccagagagtgaagcttaatgatggccacttcattcctgtcctgggatttggcactgctgaagctaaagaggttcctaagagtgaagctctgggggtcaccaaatttgctatagaggttgggttccgccatattgactgtgctcatgtgtaccaaaatgaagagcacgttggccaggccattcgaagcaagattgcagatggcactgtgaagagagaagacatattctacacttcaaagctttggtgcactttccttcgaccagagttggtcagaccagccttggaaaagtcactgaaaaatcttcacctggactaagttgatctctatattagtcattttccactggctatgaagccagggga

SEQ ID NO: 12712 - DNA, 423 bp, Bos taurus
  Clone ID: 54-LIB34-019-Q1-E1-F6
gtcttctcagcaggaagtgtgaccacgatcaatcatgacgacttacagcgacaaaggagagaagcctgaaagaggccgattcctccactttcactctgtgaccttctgggttggcaatgccaagcaggctgcgtcatattactgcagtaagctgggctttgagcccctagcctacaagggcctggagaccggttcccgggaagtggtgagccatgtggtcaagcaagggcagatcgtgttcgtcttctcctctgccctcaacccctggaacaaagagatgggcgatcacctggtgaaacacggcgatggagtgaaggacattgcgttcgaggtggaggactgtgactacattgtgcagaaagcccgggaacgaagcgccaagattgtgcgggagccttgggtagagcaagataagctttggaa

SEQ ID NO: 12713 - DNA, 407 bp, Bos taurus
  Clone ID: 54-LIB34-020-Q1-E2-F6
ccttcaaacccgtgtccgttttactgctcgctgaccactaaaggtacgcagcactccctcctgggctcttcagacgtgctgcaggcgacgggctgcaacaggccaattcctgtgtcagcatcgtaatatggtcaaagtctccttcactgcaagacgtgtccaccggctcaaagatcatggagatgtctgctaaaggaatcagacctgtcaccctggaactcggacgcaagtctccacttatcatcttctcagactgtgacatgaagaatgctgtgaacggggcgctgatggccaacttccttactcaaggcgaggtttgttgtaatggtacaagggtatttgtgcaaaaggaaattcttgatcaatttacagaggaagtggtgaaacagacgcaaaggataaaaatt

SEQ ID NO: 12714 - DNA, 286 bp, Bos taurus
  Clone ID: 54-LIB34-021-Q1-E1-F6
tcggaactcatgagcaggtccgggctgaagtcgccgctcagatggcctccaggctgacaccgctgactctcctgcggctgctgctgccggctggggagagagtcaccgcagatctgatcgtcggcccagggaatttatcgccaagggtatagtgaaggagacagccagcaatgacgtagtcccgatggtgagtctattcaacagcgccgatgacgcctgcagcttgtcgagacacagactgaccgtcgtgccggtcactgtcaccagaccactcagccagcctggt

SEQ ID NO: 12715 - DNA, 314 bp, Bos taurus
  Clone ID: 54-LIB34-022-Q1-E1-F10
tataggcatctttctggaaatgtcgtcttgcagctgacattgggagacagagtctggctggaatccaagctagacacaacagagactgagaaaggaccaattcaaagtatgttctttgggtatttgctctatggaaattatcctggctaaggggtaatggcacccttgaattcctcaagtggtcctaaacctcccagcaaacttccctccctgccccagtacttttcagtgatcattgaataaattacgttcagaacgtccaatttacccatgtgaatgtaaccctaaaaagcagtaaagattaattattcatt

SEQ ID NO: 12716 - DNA, 383 bp, Bos taurus
  Clone ID: 54-LIB34-022-Q1-E1-F6
atgactgcaaccacaaggaagatgtggttgtattctgcttggaagggcagcctgacatttgatgtttggcctgactcctgcagggcctgagtgtcctttgctttctcctggcctcaaatggcttagtgcaagtgctgggcctgcaggctcagctcccactccctcagcccctaagcaagaatctcgaaactctcggctctaaaaccaaattaccccaaacatctctggaatataagatttgtagatctctctcttgcaagggaatataacctcacactcatggtgctcttcagtgcagactctcggacattgattcgggcctctcgggcttctttatacccaccctggatatccccatgtctgtacatttgaccactagagga

SEQ ID NO: 12717 - DNA, 385 bp, Bos taurus
  Clone ID: 54-LIB34-023-Q1-E1-F6
caatggtacagattaaaccatcttcaaagtatactgctgctaagtcacttcagtcgtgtccgactctgtgcgaccccaaagacggcagcccaccaggctcccccatccctgggattctccaggcaagaacactggagtgggtgccattcccttccccatagtcacttaaaatactgtgacattaccaaaggtgactctctcttgaatctcaaggtatccgaaattttaaccccatgttaacctctttctttgtagtttacgctttcacatattagtggtaccagagatgtttagacagctttgagcttcacaaatgaaagctaatgcagagatgctaggctggctacttaatactgtactgtggatctgagagatgggaggaaaa

SEQ ID NO: 12718 - DNA, 418 bp, Bos taurus
  Clone ID: 54-LIB34-024-Q1-E1-F10
ctgggactcacgggtcgacacacgcatctacactgggtcgaaagaagcgtggccttctcctctccccgccatggcgtgtgctcgtccactgatatcagtgtactccgaaaagggggagtcctctggcaaaaatgtcactttgcctgctgtgttcaaggctcccattcgacccgatattgttaactttgttcacaccaacttgcgcaaaaacaacagacagccctatgctgtcagtgaattagcaggtcatcaaaccagtgctgagtcttggggtaccggcagagctgtggctcgaattcccagggttcgaggtggcgggactcaccgttccggtcagggcgcttttggaaacatgtgtcgtgggggccgcatgtttgcgccaactaagacctggcgacgttggcaccgcagagtgaat

SEQ ID NO: 12719 - DNA, 358 bp, Bos taurus
  Clone ID: 54-LIB34-025-Q1-E1-F6
gaacgcccctgaaacggtttgggggatctgcacgattatgctgccggcattcgctgtgtgggctctatttgctgtcactcaagcaaatgacggatccaggcttttggcttccagatcactgctgaacagatatactgtggaagggcgacacctgaccttacagtacaacatttacactgtaggctcaagtgctgcattagacgtgtcattacccgacgattccttccctccacaatacgttggcattgtctctggaatgctcaacatcaaatgggaccggattgcacctgctagcaacatctcacacaacgtggtcctacgctctctcaaggctggttacttcaacttcacctcagca

SEQ ID NO: 12720 - DNA, 411 bp, Bos taurus
  Clone ID: 54-LIB34-026-Q1-E1-F6
caaagttctgcatcgccactcagacatcatggcggacaaccgggatccagccagcgaccagatgaaacactggaaggagcagagggccgcgcagaaacctgatgtcctgaccactggaggtggtaatccagtaggagacaaactcaatagtctgacggtagggccccgagggccccttctcgtccaggatgtggttttcactgatgaaatggctcactttgaccgggagagaattcctgagagagtcgtgcatgccaaaggagcaggggcttttggctactttgaggtcacacatgacattaccagatactccaaggcgaaggtgtttgagcatattggaaagaggacgcccattgcagttcgcttctccactgttgctggagaatcgggctcagctgacacagttcgtga

SEQ ID NO: 12721 - DNA, 336 bp, Bos taurus
  Clone ID: 54-LIB34-027-Q1-E1-F6
aggacgcgtgggctcagcaggaagtgtgaccacgatcaatcatgacgacttacagcgacaaaggagagaagcctgaaagaggccgattcctccactttcactctgtgaccttctgggttggcaatgccaagcaggctgcgtcatattactgcagtaagctgggctttgagcccctagcctacaagggcctggagaccggttcccgggaagtggtgagccatgtggtcaagcaagggcagatcgtgttcgtcttctcctctgccctcaacccctggaacaaagagatgggcgatcacctggtgaaacaccgcgatggaatgaaggacattgccttcg

SEQ ID NO: 12722 - DNA, 339 bp, Bos taurus
  Clone ID: 54-LIB34-028-Q1-E1-F10
cacccgtcggagtgtaatcttctacattctttcattgctttcgttagcatgcctggtatatgttgctacccttgacaactgtcgcatcatagatgaaagatttggtagttattgcccagctacgtgtggtattgcatgtttcctgattaattacacataccatgtgtatcacagatttacgagctttggtacgaatcttatatcaggttgagatgaacagattataagccagatagctgggcaaagcaatccatatcagttataaccctgattatccagcatggtcagataacatagatactgctacgatgaattccacgagtatgatggaatctatta

SEQ ID NO: 12723 - DNA, 415 bp, Bos taurus
  Clone ID: 54-LIB34-030-Q1-E1-F6
ggaagaaggaagaactccagaagagcttaaacattttgactgccttccagaagaaggggggtgagaaggaggagctgtgagaaggcactccagggtttggtggggtggggaggggtaagttaccttctggctgtgaaactctcctgggatataacggaattttaggaaaagtggcatgaaaccagaaatctgagcatgcgtggatactgacgctgacgtgactatgcttggaacatctctgtagccggtcgcggacagctggtgaacacttagatggcttttgaaattcgccctcagaaggaattggtgctataaagaggagtatactgcccaagttcttgaaaggtatgattctgatcccaattaaagtttctgtgttttcgttaagtagacctgtagccattcagttttcttt

SEQ ID NO: 12724 - DNA, 390 bp, Bos taurus
  Clone ID: 54-LIB34-032-Q1-E1-F10
ataggttcctggccagacgaaccaactccaccttcaatcaggttgtcctcaagagattgttcatgagccgcaccaacaggccaccgctctctctttcccggatgatccggaagatgaagcttcctggccgggagggcaaaacagctgtggtcgtggggactataaccgatgatgttcgtgtccaggaggtgcccaaactgaaggtgtgtgctttgcgagtgagcagccgcgcccggagtcgcatcctcaaggccgggggcaagatcctcaccttcgaccagctggccctgtactcccccaagggctgtggcactgtcctcctctctggtcctcgtaagggccgagaggtgtacaggcatttcggcaaggccccatgaaccccgcatagcc

SEQ ID NO: 12725 - DNA, 368 bp, Bos taurus
  Clone ID: 54-LIB34-032-Q1-E1-F6
gtccgggattgttgctgacatcgagttagaaaacgtccttgatcctgacagcttctacgagctcaaaagcccacccctatcgctacgctcaagcctcccaatatcactgcaggccacaccagccaccccagctacactatctgcatcatcttctgccgatggctccaggacccctgccatgtcatcctcttcttcatcgcgggtcttgctgcggcagcagctaatgagggcccaggcccaggaacaggagaggcgtgagcgtcgggaacaggcctcttccttccctagtcctgcacctgcctctcccgccatctctgtggttggcgtctctgctgggggccacacactgggtcgtcctcccccagctc

SEQ ID NO: 12726 - DNA, 321 bp, Bos taurus
  Clone ID: 54-LIB34-034-Q1-E1-F10
gacatctttgcattggtcccgtctccggcttcgctgatcgccgcagccacctccgccgcgcgccatctccgccgccgcgggctccggcacctttaccgccagagtcctcgagctcgcgcttttcgtctcagtccgttgcatcgggtcagcggagtgctccatgatgtcagacgcggccgtggacatcagctcggagatcaccagcgaggacttaaaggagaagaaggacgttgtggaggaggaggtgactgggagacaggcacctgcaagtgggaatgcgcatgacgaagatggggagcaggaagcagtcatggaggtaga

SEQ ID NO: 12727 - DNA, 359 bp, Bos taurus
  Clone ID: 54-LIB34-037-Q1-E1-F10
agatgactgttacatggcatatcctgtcatcaccgacatcgaggaggtgcttgtctacgacacgaaccactttgtaactacaatcattatcactgctcacttcaacgtgtaagctggccctgcctgcaaagcaactacctgcgtgctcgacattgcttcagacaaagggtcagtgctcccgatctcatctattcaagacggatacacactcatcatgttcaagacaggcgtattgacgtttctgactatcagcaccaagccccacaccatcgtctgtcagtgcatattgacctccaatggcactatgactctggatatcatcttactcaatctcgagcttgaacctcctcatgctgagc

SEQ ID NO: 12728 - DNA, 425 bp, Bos taurus
  Clone ID: 54-LIB34-037-Q1-E1-F6
catacatgaaaaccagcccccattaactgctgactttgctgaagataaggatgtttgcaaaaactatcaggaagcaaaagatgccttcctgggctcgtttttgtatgaatattcaagaaggcatcttgaatatgctgtctcagtgctattgagacttgccaaggaatatgaagccacactggaggaatgctgtgccaaagatgatccacatgcatgctattccacagtgtttgacaaacttaagcatcttgtggatgagcctcagaatttaatcaaacaaaactgtgaccaattcgaaaaacttggagagtatggattccaaaatgcgctcatagttcgttacaccaggaaagtaccccaagtgtcaactccaactctcgtggaggtttcaagaagcctaggaaaagtgggtactaagtgttgta

SEQ ID NO: 12729 - DNA, 333 bp, Bos taurus
  unsure (291): unsure at all n locations; Clone ID: 54-LIB34-038-Q1-E1-F10
cactcaccgccaccgcctgggacccaactatctccagatacctgtgaactgtccctaccgtgctcgagtggccaactaccagcgtgacggccccatgtgcatgatggacaatcagggtggggctccaaattactaccccaatagctttagtgctcccgagcatcagccttctgccctggaacacaggacccacttctctggggatgtacagcgcttcaacagtgccaacgatgacaatgtcactcaggtgcggactttctatttgaaagtgctgaatgaggagcagagganacgcctgtgtgagaacattgcgggccacctgagagacgcaca

SEQ ID NO: 12730 - DNA, 403 bp, Bos taurus
  Clone ID: 54-LIB34-038-Q1-E1-F6
ggagaacaagtggcttttaagtgtctatcatattatcagttggatggatctaatactatacagtgtattaagagcaaatggataggaaggccagcatgcagagatgtttcctgtgggaatccacctcaagtggaaaatgctattatacacaatcagaagtctaaatatcaaagtgaagagagagcacgttacgaatgcattgggaattatgacctttttggggagatggaagtcgtatgtttaaatggaacttggacagaaccacctcagtgtaaagactctcaaggaaaatgtgggcctcctccaccaatagacaatggagacattacctcactcctgcaatcagtatatcctccaggaatgattgttgagtaccggtgtcaggcctactatgaacttcggg

SEQ ID NO: 12731 - DNA, 398 bp, Bos taurus
  Clone ID: 54-LIB34-041-Q1-E1-F6
agggccttgtcatcctccccgcgggatcgagctcctccacctgcagccgcgggcgagctgggtagccgagccgagccgggcctggccgggccgggtcagagctgcgggaggggcgggccgggggtccggaggagtcacgtgccccctcccgccccaggtctcccactcaggatgcggcttccccggcctcagccctgggggctcggtctgctgctcgtcctcctgcctggggcgctgagcgcagagaactatcgctcgctccagtaccacttcaccgccgtgtcggcccccgcagcggggacccctgctttctgggtttcgggctggctggggccccagcagtacctgagctacaataatctacgggcgcaggctgagccctacggcgcgtgggtctg

SEQ ID NO: 12732 - DNA, 186 bp, Bos taurus
  Clone ID: 54-LIB34-042-Q1-E1-F10
acggacgcgtgggacccatactacattgctagaagacatccctacttttatgcaccagagctcctttactaggctaacaacctataatggagtttttcaagaatgctgccgggctgaagatgtcggtgcccgcttgctaccagagatcgagactatgagagagagagtactgacgtcatctgccag

SEQ ID NO: 12733 - DNA, 427 bp, Bos taurus
  Clone ID: 54-LIB34-042-Q1-E1-F6
acaaaggaacagctggcaatgccctcatagaaggggcttctcaactggtgggagaaaaccggaccatgaccatccacaacagcatgttcttcagcacatacgacagagacaacgacggctggaaaactacagatcccagaaagcagtgttctaaagaagatggtggtggatggtggtataaccgatgccatgcagccaatcccaatggcagatactactggggtggagcgtacacctgggacatggcaaagcacggcacagacgatggagtggtgtggatgaactggcagggctcctggtactcaatgaagaagatgtccatgaagatcaagcctttacgtcccagagcaatagtaccccccacacagagtattattcttccacatgtaataacatttttatatatcacggttacagaaattttttt

SEQ ID NO: 12734 - DNA, 327 bp, Bos taurus
  Clone ID: 54-LIB34-044-Q1-E1-F10
gtcccgggccgacgcacaagtccaccgcatttagggagccaaggcttctggtggtcaccgatcccagggctgaccaccaccccctcacggaagcctcttacgtgaacctgccaaccattgccctgtgcaacacggactctcctctgcgctacgtggacattgccatcccgtgcaacaacaacggagcgcactcagtgggtctgatgtggtggatgctcgcccgggaagtcctgcgcatgcgtggcaccatctcccgagagcacccgtgggaggtcatgccggacctctacttctacagagatcctgatgagattgaaaaggaagagc

SEQ ID NO: 12735 - DNA, 434 bp, Bos taurus
  Clone ID: 54-LIB34-048-Q1-E1-F6
ctcctcgcatcctctatagttgaagctggggcaggaacaggctgaaccgtgtaccctcccttagcaggcaacctagcccatgcaggagcttcagtagatctaaccattttctctttacacttagcaggagtttcctcaattttaggagccatcaacttcattacaacaattatcaacataaagccccccgcaatgtcacaataccaaacccctctgttcgtatgatccgtaataattaccgccgtactactactactctcgctccctgtattagcagccggcatcacaatgctattaacagaccggaacctaaatacaaccttcttcgacccggcaggaggaggagaccctattctatatcaacacttattctgattctttggacaccccgaagtctatattttaatcttacctgggtttggaataatctctca

SEQ ID NO: 12736 - DNA, 428 bp, Bos taurus
  Clone ID: 54-LIB34-049-Q1-E1-F10
cggacgcgtgggcgtttttgtatgaatattcaagaaggcatcctgaatatgctgtctcagtgctattgagacttgccaaggaatatgaagccacactggaggaatgctgtgccaaagatgatccacatgcatgctattccacagtgtttgacaaacttaagcatcttgtggatgagcctcagaatttaatcaaacaaaactgtgaccaattcgaaaaacttggagagtatggattccaaaatgcgctcatagttcgttacaccaggaaagtaccccaagtgtcaactccaactctcgtggaggtttcaagaagcctaggaaaagtgggtactaggtgttgtacaaagccggaatcagaaagaatgccctgtactgaagactatctgagcttgatcctgaaccggttgtgcgtgctgcatgagaagaca

SEQ ID NO: 12737 - DNA, 385 bp, Bos taurus
  Clone ID: 54-LIB34-049-Q1-E1-F6
agcgagagaaggtgctgtctccatcttgttggcgtacgctgctcctgcgacgttgtggagatggggagcgtcttggggctgtgctccatggcgagctggatcccgtgtttgtgtggcagtgccccgtgtttgctgtgccgatgctgtcctactggaaataactccactgtaactaggttgatctatgcactttttttgcttgttggagtgtgtgtagcttgtgtaatgttgatacctggaatggaagaacagctgaataagattcctggattttgtgagaatgagaaaggaatggtcccttgtaatattctggttggctataaagctgtatatcgattgtgctttggcttggctatgttctagcgtcgtcgctctctcttaatga

SEQ ID NO: 12738 - DNA, 354 bp, Bos taurus
  Clone ID: 54-LIB34-050-Q1-E1-F6
aaaacctccgccatagaatgccaggatctggcgcaaactaaagaggcgctccaaaaaatcctgcgggagttgcagttacaggaatagttccatgtgatcatcattggatcgtcaatacaatcatggaagggtacgctggtgcaggcaactcgagtgaacctagaggcacctctgaacctcatgaaacaattctcattgttaggagcaacgaacctagaatggaggactacctacgggaagataaatcttgaccatcactcagcacagtctggcacaagtcatctgacatgcatcaaatctcatgatgtagaccaagagacagtctacatcacgggtgatcgatcctacacagat

SEQ ID NO: 12739 - DNA, 230 bp, Bos taurus
  Clone ID: 54-LIB34-051-Q1-E1-F6
gtcactaatgagagagcaggaggcaattcggctactggagcggagcaatgcctaagtcaaaggaacgtgtttcttcaagctcttctggtagcgattctgacagtgaaattgacaaaaagctaatgaggaaagagcaagttgctccagaaaaaactgtagagaagcagaaaactggtgaaacttccagagcgctgtcatcctccaagcagagcaacagcagcatagatgat

SEQ ID NO: 12740 - DNA, 242 bp, Bos taurus
  Clone ID: 54-LIB34-052-Q1-E1-F10
gggccatccccagagagaagaccaaagaggccctgctggagctgaaggccatgctggaggcgaaccccaaggtagtggcccactaccccgtggaggtacgcttcactcgcggggacgacatcctgctgagcccctgcttccagcgagacagctgctacatgaacatcatcatgtacaggccctatggcaaggacgtaccgcggctggactactggctggcctatgagaccatcatgaagaag

SEQ ID NO: 12741 - DNA, 236 bp, Bos taurus
  Clone ID: 54-LIB34-052-Q1-E1-F6
ggggaagctcaaagcgcactgcgcccggcccagcttctttcaaaatgtctaccgttcatgaaattctgtgcaagctcagtttggagggtgatcactccacacctccaagtgcatacgggtcagtcaaagcgtacactaactttgatgctgagcgggatgctctgaacattgaaacagccatcaagaccaaaggtgtggatgaggtcaccatcgtcaacatcctgaccaaccgcagc

SEQ ID NO: 12742 - DNA, 350 bp, Bos taurus
  Clone ID: 54-LIB34-055-Q1-E1-F6
catcggtgagttctgtggaaagcaaaggcccgagcgcattgatgcccaaagcaactcggtggacctgctcttcttcacggacgagtcaggggacagccggggctggaagctgtactacaccagtgaagtcatcaagtgcccccagcccaagaccctggactcattcaccatcattcaggacctgcagcctcaataccagtaccgggactatttcatcgccacctgcaaaaaaggctacgagcttgtggaggggaacaaggcactcctgtccttcacagctgtctgccaggatgatggcacatggcaccgtgccatgcccaggtgcaggatcaaggactgcgggcagcccc

SEQ ID NO: 12743 - DNA, 346 bp, Bos taurus
  Clone ID: 54-LIB34-056-Q1-E1-F10
gaaagaggtaatcccagcttgtctgccacccccgaactacatggttgcagcccggacagaatgttacatcactggctggggagaaacccaaggcacttttggtgagggcctcctgaaggaagcgcacctgcctgtgatcgagaacaaggtgtgtaatcgcaacgagtatctcgacgggagggtcaagcccacggagctgtgtgccggccatctgattggagggactgacagctgccagggtgacagcggcgggcctctggtctgctttgagaaggacaaatacattctgcaaggagtcacttcttgggctcttggctgtgcacgccccaataagcctggtgtgtat

SEQ ID NO: 12744 - DNA, 373 bp, Bos taurus
  Clone ID: 54-LIB34-056-Q1-E1-F6
gaatgtcccacgacgagttcgcctacacgcccgctcttctccgtccagctctcctgctgcctttagggccttaggctcgctgagtgaagaaatggccgaggagtccagcacagccgttaagtactacaccctgaaagagatccagaagcacaacaacagcatgagcacctggctgatcctgcactacaaagtgtacgatttgaccaactttttggaggagcatcctgctggggaagaagtcttaagggaacaagctggaggtgatgccactgaaaactttgatgatgttggacactctacagatgctcgagaattgtccaaaacgttcatcattggggagctgcacccggatgacagatcagagataaccagg

SEQ ID NO: 12745 - DNA, 218 bp, Bos taurus
  Clone ID: 54-LIB34-057-Q1-E1-F6
cggacgcgtgggtcacaatgctattaacagaccggaacctaaatacaaccttcttcgacccggcaggaggaggagaccctattctatatcaacacttattctgattctttggacaccccgaagtctatattttaatcttacctgggtttggaataatctctcatatcgtgacctactactcaggaaaaaaagaaccattcggatatatgggaatagtt

SEQ ID NO: 12746 - DNA, 219 bp, Bos taurus
  Clone ID: 54-LIB34-058-Q1-E1-F10
ctccggcctccgaaagccgctcgaatggcaagccaaaattcttttcggatagaatatgatacctttggtgaactcaaggtcccaaatgataagtattatggcgcccagactgtgagatctacaatgaactttaagattggaggcatgacagaacgcatgccaatcccagttattaaagcatttggcatcttgaagcgagcagctgctgaagtaaaccaa

SEQ ID NO: 12747 - DNA, 219 bp, Bos taurus
  Clone ID: 54-LIB34-059-Q1-E1-F10
aaagcgtccgagaaatctaagtacggcgctatagagaaagtaccgcaagggaacgatgaaagaaaaaactaaaagtataaaaaagcaaagattaccccttgtaccttttgcataatgaattaactagtataagacgtaacaaaatgaattttagctaagcagcccgaaaccagacgagctactcacaaacagtttaccaagaactaactcatctatgtg

SEQ ID NO: 12748 - DNA, 419 bp, Bos taurus
  Clone ID: 54-LIB34-061-Q1-E1-F6
gcgggccatcaccattgctggcgtgccgcagtctgtcaccgagtgtgtcaagcagatctgcctggtcatgctggagacgctctcccagtctccgcaagggagagtcatgaccattccgtaccagcccatgccggccagctctccagtcatctgcgcgggcggccaagatcggtgcagcgacgctgcgggctacccccacgccacccatgacctggagggaccacctctagatgcctactcgattcaaggacaacacaccatttctccgctcgatctggccaagctgaaccaggtggcaagacaacagtctcactttgccatgatgcacggcgggaccggattcgccggaattgactccagctctccaagaggtgaaaggctattgggcaagttgggatgcatctactcaaaccacccag

SEQ ID NO: 12749 - DNA, 186 bp, Bos taurus
  Clone ID: 54-LIB34-062-Q1-E1-F6
gaaaggcggatgtacgctgttagccggtctccgcgcgggtctgggtcgcggaacccggtggatgctgtgcaggcttcatgtcagacaacgaggacaattttgatggacacgactttgatgacgtggaagaggatgaagggctcgatgacttgaagaatgccgaagaggagggccaagagaacgttg

SEQ ID NO: 12750 - DNA, 146 bp, Bos taurus
  Clone ID: 54-LIB34-063-Q1-E1-F10
gaaggaaaatttacaaagccatttttgcctaaactaccctgtggagttaaaaacaacatgcacattcgaaggaaacaagtcttaggaggcaagccagcaaaaatgggagaattcccgtggaagatggcaatcaaggaaggagacaa

SEQ ID NO: 12751 - DNA, 413 bp, Bos taurus
  unsure (179),(284),(294): unsure at all n locations; Clone ID: 54-LIB34-063-Q1-E1-F6
ccacgcgtacgaaatgagctcggagcctcggcctcgccgggctcgcggtccaggtgaagaacaaaacatgaccgaaatagatgccttccctaggagagaaatatttgatccaactgaaaagtacaaaatggaccacaagaggaaaagaattgcattaatcttcaatcatgagaggtttntccgggaacttaaccctgccgaacaagcctggcaacagtgctgacagagacaatctgaggcgcacgtttcagatctaagattgaagtaaaatgttttgatgatcntacagcagangaactattgctcaaaattcatgaggcatcaactgctagccacgtagatgcagattgctttttgtgtgttttcctgagtcatggtgaaggcaaccacatctatgcatatgatgccaaaat

SEQ ID NO: 12752 - DNA, 199 bp, Bos taurus
  Clone ID: 54-LIB34-065-Q1-E1-F10
cggacgcgtgggtcgggattctcatactttacatgaagttttgaggaagtatgtgcagattggtcggtgtcctctaatatttataatctctgacagtctcagtggagataatagtcaaaggttactgtttcccaaagaaattcaagaagagtgtgctatttcaaatattagtttcaaccctgtggcaccaacaattatg

SEQ ID NO: 12753 - DNA, 212 bp, Bos taurus
  Clone ID: 54-LIB34-065-Q1-E1-F6
gccatgttgggacttgtgggtcgtgtggttgctgcctcggcctccggggccttgcggggactcagcccttcagcgccgctaccgcaagcccagcttttactgcgggccgctcctgcagcgctccagcctgccagagactatgccgctcaagcatctccatcgccaaaggccggcgccaccactgggcgcatcgtggcggtcattggtgcagc

SEQ ID NO: 12754 - DNA, 204 bp, Bos taurus
  Clone ID: 54-LIB34-067-Q1-E1-F10
ccccatctctccgcttcctcctttcctcaggcatcaaagcagagaccacgggaacctagttcaccaggctcgaggctggaggccccgccatgacatccctaaggccccttctgatgctggccctgctggcgtgggttgttgtggctgaccaagagtcctgcaagggccgctgcaccgagggcttcaacgccaccaggaagtgtc

SEQ ID NO: 12755 - DNA, 233 bp, Bos taurus
  Clone ID: 54-LIB34-067-Q1-E1-F6
cccacgcgtccggcagaagcaagtgcctggtcagagatggctcctgctggcctgagcctaggggctgccatcctttgcctcttggcctgggctggcctggctgctggcgaccgggtgtatgtacaccccttccacctcctcgtctacagcaagagcaactgtgaccagctggagaaacccagtgtggagacacctccagacccaactttcacacctgtacccattcagaccaa

SEQ ID NO: 12756 - DNA, 209 bp, Bos taurus
  Clone ID: 54-LIB34-068-Q1-E1-F6
cccacgcgtccgaccaaggtttggcctcacggcgactatcctcttattccagttggtaaattggtcttaaaccggaacccagttaattactttgctgaggttgaacagttggcttttgacccaagcaacatgccgcccggcatcgagcccagccctgacaaaatgctccagggccgcctttttgcctatcctgacactcaccgccaccg

SEQ ID NO: 12757 - DNA, 266 bp, Bos taurus
  unsure (241),(255): unsure at all n locations; Clone ID: 54-LIB34-069-Q1-E1-F10
ggcattccggcgtcgacacacgcgtacgggatgtttgcaaaaactatcaggaagcaaaagatgccttcctgggctcgtttttgtatgaatattcaagaaggcatcctgaatatgctgtctcagtgctattgagacttgccaaggaatatgaagccacactggaggaatgctgtgccaaagatgatccacatgcatgctattccacagtgtttgacaaagcttaagcatcttgtggatgagncctcaagaatttanatccgaaacaa

SEQ ID NO: 12758 - DNA, 191 bp, Bos taurus
  Clone ID: 54-LIB34-069-Q1-E1-F6
ggagtttcctcaattttaggagccatcaacttcattacaacaattatcaacataaagccccccgcaatgtcacaataccaaacccctctgttcgtatgatccgtaataattaccgccgtactaatacagggagcgagagtagtagtagtacggcggaaattattacggatcatacgaacacaggggatttg

SEQ ID NO: 12759 - DNA, 243 bp, Bos taurus
  Clone ID: 54-LIB34-070-Q1-E1-F6
cgggtcgaccacacgtccgagaggtgaaacaggtaatggatcccaaaggccagagagtgaagcttaatgatggccacttcattcctgtcctgggatttggcactgctgaagctaaagaggttcctaagagtgaagctctggaagtcaccaaatttgctatagaggttgggttccgccatattgactgtgctcatgtgtaccaaaatgaagagcacgttggccaggccattcgaagcaagattg

SEQ ID NO: 12760 - DNA, 419 bp, Bos taurus
  Clone ID: 54-LIB34-071-Q1-E1-F6
agaaagcccgagcttctcgtcgcagatcctcttcaccgatttcaggtttgaagcttatttcggagccggaaaagcagggcaccggcatggcgaaaaacacagctatcggcatcgacctgggcaccacctactcctgcgtaggggtgttccagcacggcaaggtggagatcatcgccaacgaccagggcaaccgcaccacccccagctacgtggccttcaccgataccgagcggctcatcggagatgcggccaagaaccaggtggcgctgaacccgcagaacacggtgttcgacgcgaagcggctgatcggccgcaagttcggagacccggtggtgcagtcggacatgaagcactggcctttccgcgtcatcaacgacggagacaagcctaaaggtcaagtgaactacaaaggggaaaac

SEQ ID NO: 12761 - DNA, 422 bp, Bos taurus
  Clone ID: 54-LIB34-073-Q1-E1-F6
agagctcacataaagaaaaatgtatttccaaggctgacatatttggaattgaacatggacaaggtcctttactaactaatcactttcccatctctttagatttgagtgtataccttctatgaatattcctttttctctttatggggagaagtctagctagacttcatattttactagaataagtagataagaaaatgtaatcactagagaaacatactgtggtgggaaattgtggccattccttcaggtccagcccttgaccaaattgtgaagttaagttcttcatcctgcccatcaggcattgtagttctccagcggagcaactcactgcttctctgtccttagcagcattccacatgccagatctttctaacatccccccaccaagttaaaatttattggatctgtatccaggatacttg

SEQ ID NO: 12762 - DNA, 309 bp, Bos taurus
  Clone ID: 54-LIB34-074-Q1-E1-F6
ccactctggaagccccggcgtgatccacccctgatgctctcatgatctctcggcgaactgtttccgtttcactgatacgtgccgtatcgacgacgatcctgccctgataccaggtgaactaccgttttccatactggttccactgaaatggacctatgaacccttgagcacatactcatctcatgcgatcccggcgacttatcccacacagggatccggcggtttacattcacgctcacacgactctggcccatcaacactctaatatgcatgccatagtatctccttttgctggcatcttagacaacg

SEQ ID NO: 12763 - DNA, 353 bp, Bos taurus
  Clone ID: 54-LIB34-076-Q1-E1-F6
ggaaccaggaagttcctgccaaatttaactttgctactgatgtgatagatcactgggctggcatggagaaggctggcaagcgaccccctggcccagccctgtggtgggtgaatggcaacggagatgaggtaatgtggaacttcagccaactgagtgaactcagtcaacaaacagccaacgtcttcgcagggccatgtggtctgcagcgtggggaccgtgtgacagtggtgctgccccgagtgcctgagtggtggctggtgatccttggctgcatgccggcaggccttgtcttcatgcctgggaccatccagatgaaagccaaagacattctctataggctgcaggtgtctaag

SEQ ID NO: 12764 - DNA, 451 bp, Bos taurus
  unsure (93),(317): unsure at all n locations; Clone ID: 54-LIB34-077-Q1-E1-F6
cctatagagagtcgtattaaagcaagtgcctggtcagagatggctcctgctggcctgagcctaggggctgccatcctttgcctcttggcctgngctggcctggctgctggcgaccgggtgtatgtacaccccttccacctcctcgtctacagcaagagcaactgtgaccagctggagaaacccagtgtggagacacctccagacccaactttcacacctgtacccattcagaccaagtcatccgcagtggatgaggaggccctgtgggaacagctggttcgagccaccgagaagctagaggctgaagatcggctgcnggcctcagaagttgggctgctgctcaacttccagggccttcacatgttcaagacacttaacgagacatggagtgtggccagtggggctgtgttctccccagttgccctcttcagcaccctgacctctttctatg

SEQ ID NO: 12765 - DNA, 457 bp, Bos taurus
  Clone ID: 54-LIB34-078-Q1-E1-F10
aactcactagagagagtcgtattaccgtgaggcggctgcgcaccgcatgcgagcgggccaagagaaccttgtcgtccagcacccaggccagcctggagatcgactccctgttcgagggcatcgacttctacacgtccatcaccagggcgcggttcgaggagctgtgctccgacctgttccggagcaccctggagcccgtggagaaggcgctacgcgacgccaagctggacaaggcgcagatccacgacctggtcctggtggggggctccacccgcatccccaaggtgcagaagctgctgcaggacttcttcaacgggcgcgacctcaacaagagcatcaaccccgacgaggcggtggcgtacggggcggcggtgcaggcggccatcctgatgggggacaagtcggagaacgtgcaggacctgctgttgctggacgtggctcccctgtcgctgggact

SEQ ID NO: 12766 - DNA, 439 bp, Bos taurus
  unsure (412),(423): unsure at all n locations; Clone ID: 54-LIB34-078-Q1-E1-F6
attaacatcagtctgcttactccaaggagaaataggcaatggatcccaaaagccagagagtgaaacttaatgacggccacttcattcctgtcctgggatttggaacctatgcacctccagaggttgctaagaaggaagctctggaattcaccccattcgctatagaggttgggttccgccatattgactgtgctcatgcctaccaaaatgaagaggagattggccaggtcattcgaagcaagattgcagatggcactgtgaagagagaagacatattctgcacttcaaagctttggttgacttcccttcgaccagagttggtccgaccagccttggaaaagtcactgaaaaatcttcaactggactatgtcgatctctatattatgcattatccaatggctctgaagccagnggaggaattantttcaaaagatgaaaa

SEQ ID NO: 12767 - DNA, 321 bp, Bos taurus
  Clone ID: 54-LIB34-079-Q1-E1-F6
ggactatctggcatgcctcgacgatactccgactacccagatgcatacacaatatgaaatactatctcatcaataggctcattcatttccctaacagcagttatactaatagttttcatcatctgagaagcatttgcatctaaacgagaagtcttgactgtagacttaaccacgacaaatctagaatgattaaacggatgccctccaccatatcacacatttgaagaacccacctatgttaacctaaaataagaaaggaaggaatcgaaccccctactattggtttcaagccaacatcataacctctatgtctctctcaat

SEQ ID NO: 12768 - DNA, 403 bp, Bos taurus
  Clone ID: 54-LIB34-080-Q1-E1-F6
agcggggaaccaggcacgacaacaatactagttggactgcgcaccctcctagtggaatcctcgacaatccttcattgcgttcttgaccaagcgtgggacatgttgctactcgacatagctgatgtatcctaaatgaaacatttggtaaataatgcacaactgcctgtgcgattgcacatcacatgcaatttctacaaactagtgttgacgaaaatgatcgaggttcggcaggaagctgagatcaagttgagaaacattaatcagctaccatatagcgtgacacagcacaccatttcaactataatgctgatcaaccatcaaagccatgtcacatagagagtgctaccatgaattccaccacatatgaatcgcgacattatgatatatttaacactgatagcat

SEQ ID NO: 12769 - DNA, 441 bp, Bos taurus
  unsure (381): unsure at all n locations; Clone ID: 54-LIB34-082-Q1-E1-F6
gttttccctttgagtggaactttaagtaagaaccagaagggtgcttttctagtggtaggttaagattatttatacgtaagcaataacttgattctttgtaagtcagtcaaggtgtccagacattcctttgctaataatggaaccttatgatgttactgagaatagtacagtttgtataaatgtacgaggcaatggcaccccactccagtactcttgcctggaaaatcccatggatggatgagcctggaaggctgcagtccatggggtcgctgatgggtggacaggactgagcgacttcactttcacatttcactttcatgcattggagaatgaaatggcaacccactccagtgttcttgcctggagaatcacagggacggnggagcctgatgggctgccgtctatggagtcacacatagtcggacacgactgaagcaactt

SEQ ID NO: 12770 - DNA, 361 bp, Bos taurus
  Clone ID: 54-LIB34-083-Q1-E1-F10
agggaaaccagcctgatcaagagatggtgtctgcctctgaatggtacctgaagaacttgcagttccaccgtttctggtccgtggatgacacgcaggtgcacacggagtacagctctctgcggtccgtcgtggtggccaattatgaggaatccatcaagatgcccattaatgagccagcaccgggcaagaagaagtcccagatccaggaatatgtggactataacgggggcgctggggtccagcacattgctctcaagaccaaagacatcatcacagcaattcgccacttgagagagagaggcgtggagtttttggctgttccatccacatactacaaacaactgcgggagaagctcaagat

SEQ ID NO: 12771 - DNA, 380 bp, Bos taurus
  Clone ID: 54-LIB34-083-Q1-E1-F6
agccatggcgtcgcccttcagcggggccctgcagctgacggacttggacgacttcatcgcgccgtctcaggactgcatcaagcccatgaaggtggataggagacctggaagcggcgtggccaagatccacatcgaagatgacgggagttacttccaagtcagtcaggatggagggatgaagaagctggagaaggccaagatctcgctggacgactgcctggcgtgcagtggctgtgtcacctcagcggagactgtgcttatcactcagcagagccacgaggagctgcggaaggttctaggtgccaataagacggcagcacctgatcagcagaagctggttgtcatctcggtctcgccccagttcagagcgtcactggctg

SEQ ID NO: 12772 - DNA, 400 bp, Bos taurus
  Clone ID: 54-LIB34-084-Q1-E1-F6
aggatttggaacctttgcacctcgagaggttcctaagagtgaagctctggaagtcaccaaatttgctatagaggctgggttccgccatattgacagtgctcatttgtaccaaaatgaagagcaggttggccaggccattcgaagcaagattgccgatggcactgtaaagagagaagacattttctacacttcaaagctttggtccacttcccttcgtccagaattggtccgaccagccttggaaaagtcactgaataatcttcaactggactatgtcgatctttatattattcattttccagtggctctgaagccaggggagacacttttcccaacagatgaaaatggaaaaccaatatttgactcagtggatctctgtcgcacatgggaggccctggag

SEQ ID NO: 12773 - DNA, 399 bp, Bos taurus
  Clone ID: 54-LIB34-085-Q1-E1-F10
acccaagcgtcagttttttttttttttttttttttttttttttttttttttttttttttttttttttttttttttttttttttttttttttttttttttttttttttttttttttttgggtttttgtaaaaccttcaaacccaaattgaggtcccctttcccccccaaaaaaaaaaaattttcccaaaaaagaatttcccggcaccaaaaacccccctgggggtgggcaggggcaaatttcaccccaaaaaattgggggggaaacaaaaaaaaacagtaacccggggtaaagccacaaaaaatttaaaaagcaaaggcaaataagcgtaaaaaaccggggaagtaaacccacaaaaaagtgggcaaaacccccaaccaacaagggaaaaaacggggggt

SEQ ID NO: 12774 - DNA, 85 bp, Bos taurus
  Clone ID: 55-BOVMS1-001-Q1-E1-F12
aaaaaaaaaaaaaaaaaaaaaaaaaaaaaaaaaaaaaaaaaaaaaaaaaaaaaaaaaaaaaaaaaaaaaaaaaaaaaaaaaaaaa

SEQ ID NO: 12775 - DNA, 373 bp, Bos taurus
  unsure (307): unsure at all n locations; Clone ID: 55-BOVMS1-002-Q1-E1-F4
atgcgacgtcatagctcttctatagtgtcacctaaattcaattcactggccgtcgttttacaacgtcgtgactgggaaaaccctggcgttacccaacttaatcgccttgcagcacatccccctttcgccagctggcgtaatagcgaagaggcccgcaccgatcgcccttcccaacagttgcgcagcctgaatggcgaatgggacgcgccctgtagcggcgcattaagcgcggcgggtgtggtggttacgcgcagcgtgaccgctacacttgccagcgccctagcgcccgctcctttcgctttcttcncttcctttctcgccacgttcgccggctttccccgtcaagctctaaatcgggggctccctttagggt

SEQ ID NO: 12776 - DNA, 400 bp, Bos taurus
  Clone ID: 55-BOVMS1-004-Q1-E1-F4
atcaacatttctaaaggacatgcatgaacattatgattaatatctctgatcctatttattggatcaacagacctactaggcctattaccccattcattcacaccaacatcacaactatcattaagcctaggcatatccatcaccctgtgagcaagagccgtaattagaggattccgcaatatgactagtgcatcacttgcccatttcttaccacaaggaacacccaccccactaatcccaatactagtaattattgaaactatcagcctttttattcaacctatatccctcgccgtgcggttaacagctaacatcactgcatgacacctagtaattcacctaatcggacgagctacacttgcactaataagcattaacactacaacagcgctaattacat

SEQ ID NO: 12777 - DNA, 257 bp, Bos taurus
  Clone ID: 55-BOVMS1-005-Q1-E1-F12
tcgggggactttctcacatctcacccgtgtgaccggtcggacttacacacgcttggtgaagatgaatctgcaatgtactgagattcgtactcactctagccttctctatcgtagctcttgttcagcttccctttgtacatacctctatatatcatctacataattttcagaccaatcactcatatgtctattcagagcgactattagtcatcctaatgccactcatatgccttgtacgacgacctttcgatcacccc

SEQ ID NO: 12778 - DNA, 232 bp, Bos taurus
  Clone ID: 55-BOVMS1-005-Q1-E1-F4
atcaatatagccctggatttggccctgcatgcagttgaggaatagtggtaatcggtgcacatggccactggttcacagtacttctgacgtgtttaaactgaatcgctacacatcctgcgtgattagtgaggcagtcgtcgatttggcagttcgtagactgacaactcttaggctgatgcatccgaattccagcatgacacatggtctctatgcaatatgacaagcagtcttc

SEQ ID NO: 12779 - DNA, 414 bp, Bos taurus
  Clone ID: 55-BOVMS1-006-Q1-E1-F4
ggtcgaccgacccgtccgttttaattttttttttttcaaattaaataatgagtgtttttatttctattataattttaaaaaagtgaacattctgtaattcagctgtagccattacttccaggtgacttcttcattaggtttcaattcccttttatataacagactcttgttccggaaggcagttagcttttcatcattctttctgtccagataatatccaaagacaaatcccatagggacaagtacatgtacccagtggtcacgcacaacctgaagtaagttcatcatgaatgctgcggcctcggagcaaacaacgacccaacgaccaaggacagcggggagcgcagcaactcgcgccggcggaaccggcggtaaaggtgtccaagctcaagaaaaagacggaacccacggaac

SEQ ID NO: 12780 - DNA, 225 bp, Bos taurus
  Clone ID: 55-BOVMS1-007-Q1-E1-F12
aaaaaaaaaaaaaaaaaaaaaaaaaaaaaaaaaaaaaaaaaaaatataaaattaaaaatataaattaaaatttaatataaaatttatatttatattaatttaatatataaaatataagggagtgaagaattattatataaaattaatatattgtaaaaaaataaaaatgggggggggctcccaattttaaaatttttattttgttttccctgaagtttaatttct

SEQ ID NO: 12781 - DNA, 405 bp, Bos taurus; identical to SEQ ID NO: 6649
  Clone ID: 55-BOVMS1-007-Q1-E1-F4

SEQ ID NO: 12782 - DNA, 378 bp, Bos taurus
  Clone ID: 55-BOVMS1-008-Q1-E1-F4
gtcggaatacgggtcgacgacgcgtccgtttaagaattgggacttcccacgacagattgactttttcgaccctacctttgactatgacatgctcttccgacgaacaggagcactgatatttgtcatagactcccaggacgattacatggtggccttggccaggctccacctcacagtgaccatcgcctacaacgtcaacaccgacatcagctttgacgtgtttattcacatagtggatggtctgtcagatgaccacacaattgaaacccagagagacattcaccagagggcagatgatgaccttgcagatgctgtgctacagaacattcatctcagcttttatctgacaagcatatgtgaccattcaatatttgaagc

SEQ ID NO: 12783 - DNA, 223 bp, Bos taurus
  Clone ID: 55-BOVMS1-009-Q1-E1-F12
atgcgacgtcatagctcttctatggtgtcacctaaattcaagtcactggccgtcgttttacaacgtcgtgactgggaaaaccctggcgttacccaacttaatcgccttgcagcacatctccctttcgccagctggcgtaatagcgaagaggcccgcaccgatcgcccttcccaacagttgcgcagcctgaatggcgaatgggacgcgccctgtagcggcgcat

SEQ ID NO: 12784 - DNA, 354 bp, Bos taurus
  unsure (35),(259),(284),(307): unsure at all n locations; Clone ID: 55-BOVMS1-009-Q1-E1-F4
atgcgacgtcatagctcttctatagtgtcacctanattcaattcactggccgtcgttttacaacgtcgtgactgggaaaaccctggcgttacccaacttaatcgccttgcagcacatccccctttcgccagctggcgtaatagcgaagaggcccgcaccgatcgcccttcccaacagttgcgcagcctgaatggcgaatgggacgcgccctgtagcggcgcattaagcgcggcgggtgtggtggttacgcgcagcgtgnacgctacacttgcaaagcgcctagncgccgctcctttcgctttcttcncttcctttctcgccacgttcgccggcttttcccgtcaagctctaaat

SEQ ID NO: 12785 - DNA, 463 bp, Bos taurus
  unsure (243),(251),(315),(354),(392): unsure at all n locations; Clone ID: 55-BOVMS1-010-Q1-E1-F4
acaaactgggaataatggcgttggggcaaaattaaaaccaaatgccgacgcccaatccaaaacccagaatttaaacccctaacggaattttaaggaaaaagaatggaaggaaccggccggcggtaccacaaccatccatccaccggtttgggggggacctaaccattacctaaagggcatttaaagcattaatttttccttgtcatccccaacaagttacaatttatataatatgaccatcanacatgtanacatcaacatatttggggagtccaattgtctttccttaaccagctgattttgcaattctagtanataccaaatgacaatcttgtattctaacaaaacctgtantgtctgttatttgtttcaacaattacagtgcatgtcanggagaaattctctagatctctctagtttcatattcagtcatactgctgaatgcaacataacataataaata

SEQ ID NO: 12786 - DNA, 187 bp, Bos taurus
  Clone ID: 55-BOVMS1-011-Q1-E1-F12
aaaaaaaaaaaaaaaaaaaaaaaaaaaaaaaaaaaaaaagaaaaaaaaacaaaaaagataaagaataaaataaactaaaatacaaaatcaaaaaaacatggggggtcgccctatagattcgatccatacttacttgtgcatgaaagttcatacttcttctatctagacactaaggtacatttaattg

SEQ ID NO: 12787 - DNA, 463 bp, Bos taurus
  Clone ID: 55-BOVMS1-012-Q1-E1-F4
caaaagtgacaaataaccctggcaccgtgaaaatcccacccaaacgcccaccaagaaaacacattatggatcgtaataccgagttttatcacatacctactcacagcgatgccagcaagaagagactgattgaggatactgaagactggcgtccgaggactggaacgactcagtctcgttctttccgaatccttgcccagatcactgggactgaacatctgaaagagtctgaagctgataatacaaagaaagcaaaggaaaagataccccttcacgtctttagtcccaaatacacaaaattacgtgactggcaccatgaagtttcagcacgtgctcttaacgtacagtgatttctgaggcttgccccccctcccccagcaagcagcacataccttttcattcacttgttctttttctccaacttcttagccaaatctgtattaaatttgccttaagaaagaaa

SEQ ID NO: 12788 - DNA, 353 bp, Bos taurus
  Clone ID: 55-BOVMS1-013-Q1-E1-F12
atgcgacgtcatagctcttctatagtgtcacctaaattcaattcactggccgtcgttttacaacgtcgtgactgggaaaaccctggcgttacgcaacttaatcgccttgcagcacatccccctttcgccagctggcgtaatagcgaagaggcccgcaccgatcgcccttcccaacagttgcgcagcctgaatggcgaatgggacgcgccctgtagcggcgcattaagcgcggcgggtgtggtggttacgcgcagcgtgaccgctacacttgccagcgccctagcgctcgctcctttcgctttcttcccttcctttctcgccacgttcgccggctttcaccgtcaagctctaaa

SEQ ID NO: 12789 - DNA, 461 bp, Bos taurus
  Clone ID: 55-BOVMS1-014-Q1-E1-F4
gttactttactcttactaactatacgcattataataataagctttaacacctacaaaccttccaactacccactctacgtaaaaacagctatctcatacgccttcagtaccagcataattcccacaataatatttatccactcaggccaagatctaattatttcaaactgacactgactaaccatccaaactcttaaattatccctcagctttaaaatagactatttctcaataatatttatcccagtagcactattcgtcacatgatctattatagaattctcaatatgatagatatactcagtccccaatattaacaaattcttcacatatctactcctagtcctcattactatgcccatccttgtaaccgcaaacaacctcttccagctattcattggctgagaaagcgtcggaatcatatcatttcgacccatcggatgatgacacggacgatcaga

SEQ ID NO: 12790 - DNA, 410 bp, Bos taurus
  unsure (402): unsure at all n locations; Clone ID: 55-BOVMS1-015-Q1-E1-F12
ctgacaccaacaaaaatattaaaacaaaacaccccttgagaaacaaaatgaacgaaaatttatttacctcttttattacccctgtaattttaggtctccctctcgtaacccttatcgtactattcccaagcctactattcccaacatcaaaccgactagtaagcaatcgctttgtaaccctccaacaatgaatacttcaacttgtatcaaaacaaataatgagtatccacaattctaaaggacaaacatgaacattaatattaatatctctgatcctatttattggatcaacaaacctactaggcctattaccccattcattcacaccaacaacacaactatcaataaacctaggcatatccatccccctgtgagcaggagccgtaattacaggattccgcnaataaact

SEQ ID NO: 12791 - DNA, 371 bp, Bos taurus
  Clone ID: 55-BOVMS1-016-Q1-E1-F12
accaacgcgtccgataaacatcatcatgactgacaatgatcttatcaagattcttgaccctttttatcatctttcagctacaagtttcaaagcacaacttttatcaaaatccagaactgacaccaacagtggtataacaacaaaacaccccttgagaaacagaatgaacgaaaatgtatttacctcgtttactacccctgtgaatttatgtctccctctcgtagccctgaacgtactattccgaagcctagtattcccaacatcaaaccgactagtaagcaagcgctttgtaaccctccaacaatgagtacttcaacttgtatcacaacagataatgagtatccacaattctaaagacaaacatgaacatt

SEQ ID NO: 12792 - DNA, 191 bp, Bos taurus
  Clone ID: 55-BOVMS1-017-Q1-E1-F4
atgcgacgtcatagctcttctatagtgtcacctaaattcaattcactggccgtcgttttacaacgtcgtgactgggaaaaccctggcgttacccaacttaatcgccttgcagcacatccccctttcgccagctggcgtaatagcgaagaggcccgcaccgatcgcccttcccaacagttgcgcagcctgaa

SEQ ID NO: 12793 - DNA, 276 bp, Bos taurus
  unsure (163),(228): unsure at all n locations; Clone ID: 55-BOVMS1-018-Q1-E1-F4
gtccgcccacaaagatccgcactcagtcaccctcaaattctgtccttgcggcggaggcaggcccgggtttgttgcaggtggacctgcataccccttgcatgtgggagcaggatgatggagtcaggagggacctggctccaggcagctgtggacgaaggagcangcactccagacacttcaactctccagcccactgctgcaaggtctgcgcgtgggactgtggggtcncggtgcggcccacggagttacgagggcaaataaattaattttatcttt

SEQ ID NO: 12794 - DNA, 433 bp, Bos taurus
  Clone ID: 55-BOVMS1-019-Q1-E1-F12
caaccaagccttcggctcggttacccatatctgccgagacgtgaactacggctgaatcatccgatacatacacgcaaacggagcttcaatgttttttatctgcttatatatgcacgtaggacgaggcttatattacgggtcttacacttttctagaaacatgaaatattggagtaatccttctgctcacagtaatagccacagcatttataggatacgtcctaccatgaggacaaatatcattctgaggagcaacagtcatcaccaacctcttatcatcaatcccatacatcggcacaaatttagtcgaatgaatctgaggcggattctcagtacacaaagcaacccttacgcgattcttcgcgttccattttatccttccatttatcatcatagcaattgccatagtccacctactattcctccacgaaaca

SEQ ID NO: 12795 - DNA, 425 bp, Bos taurus
  Clone ID: 55-BOVMS1-020-Q1-E1-F4
cctccctctaatactaatagctagccaacatcatctatcaaaagaaaacctaacccgaaaaaaactatttattactatgctgatctcactacaactattcctaattataacctttaccgccatggaactaatcttattttatattctatttgaagcaacactagtcccaacactcattattattacccgatgaggaaaccaaacagaacgcctaaacgccggactctatttcctattctatacactagctggctccctacccctattagtcgcactaatttatatccaaaacacagtaggatccctaaatttcctaatattacagtactgagtacaacctgttcataactcttgatctaatgtcttcatatgactagcatgtataatagctttcatagtaaaaataccactatatggcctccacc

SEQ ID NO: 12796 - DNA, 333 bp, Bos taurus
  Clone ID: 55-BOVMS1-021-Q1-E1-F12
atccgtccaatgaagccgctgcattcatcgaggatccagccctatcaaagatttcatcatgatgcgtatttcggaatccctacctgatgaatcttgccttactcctagaggtcctcagagggctattctgtagggatacactacaaatcgggtatatcaacaacattgtccttagtatatcatatccgctggatactgatctatgggtgaatcatactgacttcagatttaaacagtgccataatgtacaactccatgtttacatatccacgtatgcttacagttatcattccgttctaacactttactactctcttaaatgcccgaactatt

SEQ ID NO: 12797 - DNA, 446 bp, Bos taurus
  Clone ID: 55-BOVMS1-021-Q1-E1-F4
taaagattgtaaacaatgcattcatcgaccttccagccccatcaaacatttcatcatgatgaaatttcggttccctcctgggaatctgccgaatccgacatatcctcacatgcctattcctagcaatacactacacatccgacacaacagcagcattctcctctgttacccatatctgccgagacgtgaactactgctgaatcatccgatacatacacgcagacggagcttcaatgtgttttaactgcttatatatgcacgtatgacgatgcttatattacgggtcttacacttttctacaaacatgaaatattggcgtaatccttctgctcacagtaatagccacagcatttatatgatacgtcctaccatgaggacaaatatcattctgacgagcaacagtcatcaccaacctcttatcagcaatcccatacatcggcacaaat

SEQ ID NO: 12798 - DNA, 421 bp, Bos taurus
  Clone ID: 55-BOVMS1-022-Q1-E1-F4
caaccaagccttcggggggaaccgctaatggcaggtcaggaagactccaatggctgcatcaactatgaagcttttgtcaagcacatcatgtctaactaaatggagctctcaagatcaagcattgtttatgaagactggctgaaccttattttaagaacacccatgactaactgtccaaatctgtttaccatcatttagaaaaacaaaacaatttgtactattctaaactgaaggactccctgaatttttatacattttatgtttctctctgaattgtattcataccacacaaactaagtgtctgctgatccagacaagaatggtgaaatactgacaatctcagatccaagccctgctctttattgtataccatgggtcaaagaacatccttaaaataataaaccaataaataattttggtc

SEQ ID NO: 12799 - DNA, 203 bp, Bos taurus
  Clone ID: 55-BOVMS1-023-Q1-E1-F4
atgcgacgtcatagctcttctatagtgtcacctaaattcaattcactggccgtcgttttacaacgtcgtgactgggaaaaccctggcgttacccaacttaatcgccttgcagcacatccccctttcgccagctggcgtaatagcgaagaggcccgcaccgatcgcccttcccaacagttgcgcagcctgaatggcgaatggga

SEQ ID NO: 12800 - DNA, 425 bp, Bos taurus
  Clone ID: 55-LIB188-001-Q1-E1-F4
accttgaccattgtcctcagtctagacagaaggtctagtccctaccatagggaagctgaggggtagcaggagacccactgagacccaatcccaacactgaaacctgccaggctcccctttactcctccccaggtccttccagcgggaggacctgcaagggcaagcccaccttggcttgattgcctggcaactgagaccctgctctggggaagggaagaggtcagaggaagccctgcagagggctggggacgtggggcccatctctgagcaatcagagtatgaggaaagaatgtatgtgcctgatggagaaagggatcggcatgctgggaggtgagggacttatctggggtgctccttcctcctccgtttgtggtcacagacatgaagtcacacgatggcgccatccttcagtggttcactgtctg

SEQ ID NO: 12801 - DNA, 175 bp, Bos taurus
  Clone ID: 55-LIB188-002-Q1-E1-F4
actgtgtataaggagatccgccataactccacgggatgcctgcggatgaaggaccagtgcgagaagtgccaggagatcctggaagtggactgttcggccagcaacccaactcagacgctgctgcgccagcagctgaacgcatccctgcagctggcggagaagttcagcaggctgt

SEQ ID NO: 12802 - DNA, 432 bp, Bos taurus
  unsure (369)...(370): unsure at all n locations; Clone ID: 55-LIB188-003-Q1-E1-F12
ttctccaaacccaaagaggaaccctagataaaatgccccaacactgtgatgagagcatccaaatgttgcaatgagaaaccaaaaggcaattcttcacaaaacccccaagggctcacccctgcccattgttaggaaacagggttgttgaaagccccggtctcactgcaccctcaaccacttggccattcaccctccgcctaacaactttgtccactgtcctgtgtcagacctctaacctccctctacccttttctaaaaaattatttgggctgcaggtggttccatttttggtttttaaattgtaaacctttttgtatgaaaaaaactaaattttgtactttgattctaaatagggaagctgggccagannaagtggtaagtttccggtgccactgaactttttttttttgaccgcactgcaggacatgggga

SEQ ID NO: 12803 - DNA, 408 bp, Bos taurus
  unsure (225),(234),(266): unsure at all n locations; Clone ID: 55-LIB188-003-Q1-E1-F4
ggatacacgcgcgacaaccactgggctgtcggaaactaatgggaaaaaaaaattttggaaaatccccaaaacttcaataagaaggaaaccttaaaggacaacttaaggaattatcccaattggaaaaaaccaaaaaggactttccaaacctcctaaaaagaaaagggggcccaaggccacaagatccctcaatgggaccccctgagcattcaccagcctgcctgngattccgangacgtcagcaacttcaaagacacaagtcctcnagcatgaagaaggaacccccagctgaactgacaatgacgatggccgcctcactcaaagaagcaaaacaaaatccttaagaaactgcgttctatgggcatcagttctactggatcatcaacaaatttcctttgtgcaaaatac

SEQ ID NO: 12804 - DNA, 239 bp, Bos taurus
  Clone ID: 55-LIB188-004-Q1-E1-F4
ggatacactctgactgtcacgggggacaacgtccccaccttccggaaggcattccgttttctggggaaaaccggaaggacttttggcaaggggactccggaaggcccctggtccgcaaaggtaattgcaacttgcttcaagccggggttgtcaacttggggcaatggttccccaaacccaaaccggcccggatccacacccgcgtcacctcctacctggactggatccacagtatcact

SEQ ID NO: 12805 - DNA, 338 bp, Bos taurus
  Clone ID: 55-LIB188-005-Q1-E1-F12
gatacaaacataataattaaagatgataatttaagtgtgaagcaactgtttccaactcaagcaagtacaaacagtgtctggggaaatctcagtaaaaaaggaaagcaagtcctacggcttggaccttccaaaccccgtgtaagaccggccaagacagaaatgacaactgtttcaaggactcttgccagcctctagagaaatcctggaataagcagctctgacacattaataccctgcacagactgagagactcagtctcccagattcttatcaagccattggatttctcttccataaacattctcacctcagctcgaggtgagagagccgcatataac

SEQ ID NO: 12806 - DNA, 417 bp, Bos taurus
  Clone ID: 55-LIB188-005-Q1-E1-F4
tggccgcgggataccgcgtgcagatacgcaggatcaggatatccaggcaggcagccttgaggagggtgatctggtccgcaatggtgagggtggtgaagccgggcagttgcttggcgaactccacagtcttaatgatgcacttggtggagagttcactgaacttgtcccagaggtcaatgtccagagagacacgctgttctgagctgttgttcgtagtgtatttgcccagttggcagagagcagggaaggtctcctgatgcgctttgcgcaccttctcgatgagctcccccacctccggcgtcaacgtgtagctctcggagcactcgggcttgggcacctccttctttttcttgttccggtcatttctcacagactccttggacatgcccacttcgaagcacttctgcagccgggagt

SEQ ID NO: 12807 - DNA, 378 bp, Bos taurus
  Clone ID: 55-LIB188-006-Q1-E1-F4
tgggcccgggcataagcgcaaaatcaaccttcgaggggatcctcaaaaacccaagagcagagtctttgaacagcaggtccctctggccgggtggagagccaaagagctggaagctccgagacttgttttttccaaatttctcctgcgccttgctgagaagcttccagatcaagtcttccttgccatccacacttcgggccacgacagcatgagaagggacctgggccaggtggcactccttgaacgcatccactggcgcccgactgttgttcaggcagagaagctcatactggtccctgtcagccttctctggcaagttctcaaacactgtcgtctctttaacaaaagccacgtctccagccccgtcctgcagacact

SEQ ID NO: 12808 - DNA, 408 bp, Bos taurus
  Clone ID: 55-LIB188-007-Q1-E1-F12
gggcccgggatacatcttaaaggaggctcttcctcaacatcacggctagggtctccaagatgatgcgagtgggggccccagggccgcggtctggaagcggaacttctcggattgttttaagaaaatggcagacaagcccgacttgggggaaatcaacagcttcgataaggccaagctgaagaagactgagacgcaggagaagaacacccccttgtaatcttgagcctcactcactacagatggcttagagccagcctcttctccacccctaggcacagcctcccctctctacctgatcaatgttaaatagaagcacccctgatcctgggacagaaggaaagatgcccagtctccgttttgttttttttttttgtagcctgcaaagtggctcgttggtcattttcccac

SEQ ID NO: 12809 - DNA, 275 bp, Bos taurus
  unsure (125): unsure at all n locations; Clone ID: 55-LIB188-007-Q1-E1-F4
gggatccctctccatagagatgggcacacacttgtccaggccctggtcatcgccagcacacaaggcaaagagtctggattttcggtcagcccaaggggaaaactcctgactaaagaattcatcanatgcgcaaggacctgtctggttgacgattaaggccatggggattttccaacctgcagtcctgtccacggcggtgtggcacgacttcttgtctttcagagaattccatgtgagcccctcatttgccttcttgacaactgccacggcaaggt

SEQ ID NO: 12810 - DNA, 387 bp, Bos taurus
  Clone ID: 55-LIB188-008-Q1-E1-F4
ggcggcgggatcacctgcaggaaagatagcgatgaatctaagccatgacggcaccaacatcagggtacacctggacttcaccatgctgttgagcgatgactttgacagaccgtgactccagacagtcggggaccatagtcaagtgttacggggccaggagcatgccagttctggcacgttcagtgacggtgactatccgctgagcgagattctgaggctgggggatccaaccaatagccggatggtggatagcctcacatttgggaggagcaacacccgggtcacggtcaatacagatgttggagccgctatctcatggccaggagctccacgccaattcagggaggcgaagggcatcaatggctactagcagcatagtgacctcat

SEQ ID NO: 12811 - DNA, 112 bp, Bos taurus
  Clone ID: 55-LIB188-009-Q1-E1-F4
actgataacttcttgcttcagttcagcgacagtgatcttgccctccagatctcacatcttgatgctaggacccgtggcagcacagaaccagtagcggttacgactgaagtag

SEQ ID NO: 12812 - DNA, 435 bp, Bos taurus
  Clone ID: 55-LIB188-010-Q1-E1-F4
actaccacgctaagaacggccgcgcgttcgtggaatccccagcccgaaagctctcgcagtcttttgccctgcctgtcacaggaggcactgtggtaacgcccaagcagagcctgctgacagccatccacatggtgctgacagagcacgaccctttcaagcgcagtgcagactcggagctgaaagccttggtgtgcatggcgctgaacgagcagcgtctcgtgtcctggatgaacctcatctgcaagtcggggtcgctcatcgagccccactaccagccctggagctacatggcacacacaggctttgagagcgccctcaacctgctcagccgcctcagcagcctcaagttcagcctccctgtagacctggctgtgcgccagctcaagaacatcaaagacgccttttgatgaaagtgccctgggcccagaccaacac

SEQ ID NO: 12813 - DNA, 372 bp, Bos taurus
  Clone ID: 55-LIB188-011-Q1-E1-F12
cgggcactttgacacgcttgttgttgttcaaatgaagttccctcaaatgacgatttttggccattgaggcattgtcaaccgcaaagatgctgtttgaaggtcagtctcaacttagccaaggtattcagtcctttcaagctagctgcatcaactttggtgattttgttgccatccatatgttagtcagtatcggaagggggaagaccctgatggatggtagttatatttgtgtcagcaatgcggatgtatgagagcctcttcattccctgaaaggctccattttcaaggcctgagcccttcagcgggttggtgccaagttctacgacgatcatctggttcaatcaagtatcacagactttcgcactttgggga

SEQ ID NO: 12814 - DNA, 429 bp, Bos taurus
  unsure (105): unsure at all n locations; Clone ID: 55-LIB188-011-Q1-E1-F4
tggccgcgggatacatgaacaataaacatagatgagaaaaatcagttgcactgaaacacttcagccaactgtagaacagagagggtgtggacactgagagggcangggtggcaattccagaccagcttccctcaaagggctcgtggtccaagcccaaaaccagagggtgctctgggcaggaccgtgcagtgcagactctgggcaggcagacaagaaggaccagtcacaacagggactgctgctgggcacgagtttattagcttctggcctctcgctcctgcttgatgaagttgatcagcccattggtggaagaatcgtgagaagtcactgggctgctcccgtcaagctcaggttcaattttctaagcaagctgctttcccagctccactccccactggtcaaagctgtttatgtcccaaatgatgccct

SEQ ID NO: 12815 - DNA, 412 bp, Bos taurus
  Clone ID: 55-LIB188-012-Q1-E1-F4
acaccttgaacttgacagatccggatgctcccagcaagacagacccatatacagggaatcgcaccatttcctggtggtcaaaatgacagggcaacaacatcagcagtggcacggttctctccgattaggtgggctctgggcctctcaagggcacaggcctgcaccgctatgtctggctggtttacgagcaggaatgaccactgaagtgtgatgagcccattctcagcaaccgatctggagaccaccgtggcaaattcaaggtggcctctttccgcaaaaagtacgagcttggggccccagtggccggcacgtgttaccaggccgaatgggatgattatgtgcccaagctctacgagcagctgtctgggaagtagaggagatggacaccgtaccagagttcccaaacagtgtt

SEQ ID NO: 12816 - DNA, 430 bp, Bos taurus
  Clone ID: 55-LIB188-013-Q1-E1-F12
tggccgccggatacttgctgttactctgtttggaggcccgggtggtctccacgttgcgggtgatggtgctgccgtctgccttccagaccacggtcacgctacccgggtagaagtcgctgatgagacacaccagggtggccttgttgccgttgagctcctccgtggagggcgggaacagggtgaccgagggtggggacttgggctgacccaggacggtcagtgtggtcccgctggcgaaaatcggttcaccgcgtgtgtccgttgtttgacagtaatagtcggcctcgtcctcagtctgggccccgctgatggtcagggtggccgtgttccctgatttggagccagagaatcggtcagggatccctgagggtctctcatcagcgtcatgaatgaccaacataggggcctggcctgacttctgctggtactg

SEQ ID NO: 12817 - DNA, 387 bp, Bos taurus
  Clone ID: 55-LIB188-014-Q1-E1-F4
ttgtttaagctcatacaagggaactggcaaaccaactagccaaagccttcacagatgttcctaccgaaactcaatgtggcctgtttttatggtggaccatcaatctagtacattaatcgtatccaaatggtattgacatcttggttgggaccccaggtcgtatcaaagactatctgcagaacggccgcttacgtctttctaaactgctccacgttgtgcttgatgaactggatcaaatgttagatttaggttttgctgaacaagttgaagacattctccatgagtcctacaaaactgattctgaacacaatcctcagactttgcttttttctgcaacttgcccacactggggtatacaatagttgccaacaaaatatattaacatcc

SEQ ID NO: 12818 - DNA, 378 bp, Bos taurus
  Clone ID: 55-LIB188-015-Q1-E1-F12
ccatggaagcgggatacgtcgtcatcggtgaccagctcttctcagctctctggaccttcctgtggttcgttggcttctgcttcctcaccaatcagtgggcggccaccaagaagaacgatgtgcatgtagaagccgactcagcccgggcggccatcaccttcagcttcttctccatcttctcctggtgcgtgctggccttcctggcctaccagcgctacaaggctggagtggacgaattcatccagaactacgtggaccccactccggacccgagcacggcctacgcctcctacccaggcgtgcctgcggacacctaccagcagccgcccttcacccagaacgccgagagcaccgagggctaccagccgccccctgtgt

SEQ ID NO: 12819 - DNA, 427 bp, Bos taurus
  Clone ID: 55-LIB188-015-Q1-E1-F4
gccatagccgcgggataccaaaagaccttcctcctgatactgcgctgctggacctgcaaaacaacaaaataactgagatcaaagatggagactttaagaacctgaagaaccttcatacactgattctcatcaacaacaaaattagcaaaatcagccctggggcatttgctcctttggtgaaattggaacgactttatctttccaagaatcaactgaaggaattgccagagaaaatgcccaaaactcttcaggagctgcgtgtccatgagaacgagatcaccaaagtgcgaaagtctgtgttcaatggattgaaccagatgatcgtcgtaaaacttggcaccaacccgctgaaaaactcatgcattgaaaatggagcctttcagggaatgaagaagctctcctacatccgcattgctgacacaaattt

SEQ ID NO: 12820 - DNA, 416 bp, Bos taurus
  Clone ID: 55-LIB188-020-Q1-E1-F4
accttggtagtgtaagtagtggaggaaacacaggctataatccagccctgaaatcccggctcagtatcacgaaggacaactccaagagcgaagtctctctgtcacttattagtgcgacaactgaggacacggccacatactactgtgcaaagactagtaggggttggaatacattttatgttaacagagcttttagtgatagtgataatgatcaatactacatcgatgtttggggccaaggagtcctggtcaccgtgtcctcagaaggtgaatcacacccgagagtcttccccctggtgtcctgcgtgagctcgccatccgatgagagcacggtggccctgggctgcctggcccgggacttcgtgcccaattcagtcagcttctcctggaagttcaacaacagcacagtcagcagc

SEQ ID NO: 12821 - DNA, 421 bp, Bos taurus
  unsure (386): unsure at all n locations; Clone ID: 55-LIB188-021-Q1-E1-F12
tggccgcgggatacatgaaccaagccatcgtcgcccctgatggctttgatatcatcgacatgacagccggaggtcagatcaattcggaccagaggagaaacttgggatcagtggccaaggtcctgcagcatgcagcctccaacaagctcttcgaaggagaaaacgagcacctctcctctatgaacagttatttatcagagacgtatcaggagttcaggaaatatttcaaagaagcatgtaatgtccctgaaccagaagaaaagtttaatatggataaatacacagatgtggtgacagtcagcaagccagtcatttatatttcaattgaagaaatcatcaacacacattcactcttgccggagcaacaagatgcgattgcacctganaaaaacgacttactgaatgaactgctggagctgct

SEQ ID NO: 12822 - DNA, 282 bp, Bos taurus
  Clone ID: 55-LIB188-021-Q1-E1-F4
ggatacacctcatcgtcatcgggatacagctctgactggacttgcaaaacatgatcataccagggatcaaagatggtcactttagtagcctgaagctcattgatacatagattctcatcagtatcacccattagtcttcatcataccatggggcatcatgcgcctttggtcgcaattggggacgaccttagctttcctgaagtcttatgaaagtcttgctagagaccatgccgatacctcgacacgagctgcgtgtccatgaaaacgacatcagcaaagtac

SEQ ID NO: 12823 - DNA, 434 bp, Bos taurus
  Clone ID: 55-LIB188-022-Q1-E1-F4
gccatggacgcgggatagactggcaacatggcccttctctacgcggtggcgtaatcccggatccaaatccggtccaaattgacctgggtgcctatccggtgggcaacagttccttggaattgttggaatcccaccctattaaaacttggctttgccaatagatgagttgaatgagacatcgtttgaacctggaactactctgagatacacctgtcgtcctgggtacacgataagttcaagaaagaactttcttatctgtgatggaacacaaaattggaaatacaatgagttttgtgtcaaagtacgatgtgaaaacccaggagaattacttaatgggcaagtgatacttaacacatattactcttttggattagaaataaaattcagctgttcataagggtatgtcataattggctcagccaacagttattgtc

SEQ ID NO: 12824 - DNA, 434 bp, Bos taurus
  Clone ID: 55-LIB188-024-Q1-E1-F12
ccatagccgccggatacaacttgtaaaagctggacaggaggaattcggggtatgtcctgaggctgtgagctttgggtcccatgcagctgggggagtccatacaaacctggaagtaaaccgtgtctggtttgtaaccttcgcttccgtgaatagagagggtggattaaatggttcccaggaagccctctgcgattgttgctcagtcactcagttgcatccagctctttgcggctccatggactgcagcacaccaggtttcctggtccttcaccgtctcctggagctggctcaaactcaggtccattgagttggcgatgccatccagtcatctagtcctctgtcatccccttctgccttcaatctttcccagcattagggtcttttctattgagccagcttctaataagaaggccccacggctcccaaacatggga

SEQ ID NO: 12825 - DNA, 412 bp, Bos taurus
  Clone ID: 55-LIB188-026-Q1-E1-F4
cttcaaaaaggacccgggaaacatccccaaccggttaacccaaccttataaagaactgcggtcggaggtgaacctggaattgttaggaaacacggaaggactaaacctctaatttacagccatctgtaacaccgggatccccgttccacaccaaaagaaatgctctcacatgaaggtgggagacacagcttcattcaatgtgactgtgagtttaccaaactgtgagagaaggagcaggcacattatcctaaagcccgtggggctgggggacgctttggaaatcctcgtcagcccggaatgcagctgtgactgccagaaagaagtggaggtgaacagctccaagtgcaacaacggcaatggttccttccagtgcggggtgtgtgcctgccaccctggccacgtgggtcaccac

SEQ ID NO: 12826 - DNA, 431 bp, Bos taurus
  Clone ID: 55-LIB188-027-Q1-E1-F4
tcccgaccgccaagggcgcgggatacatcggtcacggaactgcccaatgcccttgaaaggacaattaccataactattgtaaaccgtgatggcacccgttattacaagaaaggcgaatacagaactaacccagaagacatcaaccccagcgtcgttagccccagcagccctcctgacgatgagatgagcagcggctcccccagtgagagaaacacttcaggaggctacagcatcttccacacgcacctcccaactgtgcacccgtccccaaaacaagacgggccctgggtctccaacgagccaaagaataactccgataacaaaaactaacggtccgtccaagaacccaattgaagatcctatacaactcacgcatctgaatcaactggacactcaagtgggagtgaagaacatggggcaaacacaacctc

SEQ ID NO: 12827 - DNA, 363 bp, Bos taurus
  Clone ID: 55-LIB188-028-Q1-E1-F12
cggtttaatggcgacgtctttgggcttggagacggcgttcttttctgggaagggcaggtccgagtgggccactgtgcacgtgaactcctctccggactcccagtcctccgagcagaccgaggcctcaccccgggcgctgaaggtgtccttgaggtgtcgctcaaaatacgtgtgggtctccagggccttgccgttctgacgggaccagctgatgttcaggccatcataggaggccaggtttgtgaccagacaggacagcttggctgacttcgtgaggaagatgtcggcgaaggatggggggatggtgaagaccccgatgggagatggtggtgcaacatcacatgaggaggacacgttcttctg

SEQ ID NO: 12828 - DNA, 377 bp, Bos taurus
  unsure (61): unsure at all n locations; Clone ID: 55-LIB188-028-Q1-E1-F4
catgcgccgagccgccatgagcgccgggataccgataagatgcagtatggtctccacgtcntccccagcgaagaatccctcgctcctgcccaagggcgggttcccctgcctgggaagagcaagcatcaatgggaagctgatcagtgtttcccagaatccgcactcacacccttggaactccccccgtgtcacttgttctactgccctaaagggctttgtgcatcccaacccccaagattctgaaagaagaatgacaagaaattgggacttaaaggcactggggttctacactaactcaacacgattattagacaagaaaggggacacagaatgggttgagcaaacatcttcaaaaaggtggtgggtgttttgaaaac

SEQ ID NO: 12829 - DNA, 375 bp, Bos taurus
  Clone ID: 55-LIB2809-001-Q1-E1-F4
cgtatgtgtatgatacataaggttatgtattaattgtagccgcgttctaacgacaatatgtacaagcctaattgtgtagcatctggcttactgaagcagaccctatcatctctctcgtaaactgccgtcagagtcggtttgggtggacgaaacttccgagtttccgggaacgccgttccggcaccgggaatggtcaacgaaccaatcaacaaggtcaacccctagccagatcctctacgccggacgcatcgtggccggcatcaccggcgccacaggtgccgttgctggcgcctatatcgccgacatcaccgatggggaagatcgggctcgccacttcgggctcatgagcgcttgtttcggcgtgggtatggtggc

SEQ ID NO: 12830 - DNA, 422 bp, Bos taurus
  Clone ID: 55-LIB2809-002-Q1-E1-F12
tgggcccgggatactccgtgagttcatgtcagaatggatttgtaatgtgtcgacggatggtctgtgactgtgagaatcccacagttgatcttttctgctgccctgaatgtgacccaaggttgagcagtcagtgcctccatcaaaacggggaaaccttgtacaatagtggcgacacctgggttcagaattgccagcagtgccgctgcctgcaaggggaagttgactgttggcccctgccttgcccagaggtggagtgtgaattcagtgtcctccccgagaacgagtgctgcccacgctgtgtcactgacccttgccaggctgacaccatccgcaatgacatcaccaaaacttgcctggacgagatgaatgtggttcgcttcactgggtcctcttggattaaacatggcactgagtgtatcact

SEQ ID NO: 12831 - DNA, 370 bp, Bos taurus
  Clone ID: 55-LIB2809-003-Q1-E1-F12
atggccagcgcgataaggacacttaagtatgcaaatgtgtgaccataccacatagttattacataggagaacttgcttaaaaacaaggatttgcggaggatgtataattctttcattatgttactcttgtggtaacatatttaactaattatgatatttagcctttcgtgttttataagtgaagtttgattgtctggcacttatgccatattctaaatcctcatgaatttacaacttgatgcctttgaggactcaggattagtagcttctagcaggagaagtactgctagaagttggccactgataaggaactccttgaattaaaaaattccatattaagacttagttttcattaattcatgactcaaat

SEQ ID NO: 12832 - DNA, 312 bp, Bos taurus
  Clone ID: 55-LIB2809-004-Q1-E1-F4
accttgtatttcttcagtctgagaagctgttccagagagcgcaagtaacgctcagagggcacatcttccttttgaatgtgcttctgcgcaacactattgggaacaatttcctcacgttgagaaatgctttcaggttccatttgcataatatctgccatggcttgatcctcagttgattcactcccaatatccttgctcagttcattgaccttctccttcccaaacacttctggaaaaggtgccacaaaacacctgagtaaattttcattgaggacttcttgacggagtccttggtgcctgataggatgttta

SEQ ID NO: 12833 - DNA, 456 bp, Bos taurus
  Clone ID: 55-LIB2809-005-Q1-E1-F4
ccatggcagccggatacagccgaaaagcctgactaggcatatctctctggggatatggcactgctttctggggaacacgcagcgactttgagactgtagaaatggacagcacggacttacgaggaaacatgacacttgtaggaataggctgttgacgctggtgcatccaagactggagcagaggcaaaggaaggtgcatattttcaacatcagtgacagtcaggctctggctttcagtatagggctcaactggatatttacggaagggcatttctttgtgcttaggagccatagcctccttcactttggagactcccattacttcacgctgaaggaaatgcggcaccaccacaggggtttgagtaccaggacggatgttttgtggcatgctgttacggatgggcccactgaggggatagactagagactgtgtctgggcaaatgggtggattttat

SEQ ID NO: 12834 - DNA, 428 bp, Bos taurus
  unsure (23),(27),(57),(83),(394),(422): unsure at all n locations; Clone ID: 55-LIB2809-006-Q1-E1-F4
gccatgggtacgggatacagccnaaangcctgaatgggcatatctctctggggatanggcactgctttctggggaacaggcangactttggactgagaaagggacagcacggactgaggaggaaacatgacagttggaggaagaggctggtgaggctggtgcatccaagactggagcagaggcagaggaaggtgcagattttcaacatcagtgagagtcaggctctggctttcagtaaagggctcaactggatatttagggaagggcatttctttgtgcttaggagccatagcctccttcactttggagactcccattacttcaggctgaaggaaaggcggcaccaccacaggggtttgagtaagaggagggatgttttgtgggaggctgttanggatgggcccacggaagggatagactanagactg

SEQ ID NO: 12835 - DNA, 437 bp, Bos taurus
  Clone ID: 55-LIB2809-007-Q1-E1-F4
gcagaaaggaccaaatgggcatatctctctggggatagggcactgctttctggggaacaggcaggactttggactgagaaacggacaccacggactgacgaggaaacatgacagttcgaggaggagccggtcaggctcgccccccaccccgggagccccgctcctgaccgtgcccctctcctccctcttcaccctccccctccccctccccctctcgccccccttctctcctccccctctcctccccctccccccccccccccccccccccctcctccctcccctcccctcccccccccccctccttttctccttccccacccctccacgccccccccgtccccttccccccccccctctccctccctccccccctccctcccccctcctcccccctcccccctctctccctccccctcccccccctccctcccccc

SEQ ID NO: 12836 - DNA, 428 bp, Bos taurus
  Clone ID: 55-LIB2809-008-Q1-E1-F12
atgggcccgggataatacagaagagaactcaagaagaaagagtgccttcaatttgagattgccctattctaaaacagcagttgaagcctttggatagaatggtttgacatgatagatgaaaagacatgtagagcatggaattttcagaaccatcaaagaccataactgtggagtccctcagaattcacttgactcttcaccacagtggcatagtagtcttttcactgttctcagagccaatgggattagggatgtcagagaatgatggggcatcagtgtattgtgtgcctagtggaacgtaataccaggcaccagatggataggcatccagctggtagaattgtctgaaaagctcagggtagaagtaggccagttcctgattcactcctatcataggttctttctgttgggcatggattccctctttc

SEQ ID NO: 12837 - DNA, 247 bp, Bos taurus
  Clone ID: 55-LIB2809-008-Q1-E1-F4
actttttgacgtaggtgtccagcacaaggactttgttctcattcaaggcatcgatcttgaacaccgcagggatcttggtttttttctgcaatgatcttcttctgagcacactcaccgttctcccatttctgcagcaggatctccaggtcgccctcaggggtgggcttcagctcctccacatacactctcaggggggcactctgggcgtccagcagggagatgtcgctggccgccatggccaacgagt

SEQ ID NO: 12838 - DNA, 222 bp, Bos taurus
  unsure (45): unsure at all n locations; Clone ID: 55-LIB2809-009-Q1-E1-F4
gaggtagccagtgtgcataggaattcgacaaagatttctaggacncaagcaggactttagcatgtgttcagaacttctcagactgccaatgatccatcttcttaggagaaagtggcttatggggcaagcacttctaaaatcctaccttatccagaatcatcttgacatatacaacgtcatcaataatatcaccctccagtacattgtcagacgaaattttac

SEQ ID NO: 12839 - DNA, 427 bp, Bos taurus
  unsure (148),(154): unsure at all n locations; Clone ID: 55-LIB2809-011-Q1-E1-F12
gataccccaaggactcctgagcaggcccgtggaacatgagtcttcccaaggccaacaaggtgaggctatcaaacaacttgaagatggaataacgaggctgatgaatggagaagatgattgtccgtccttgtttagacatcctcttcangagcanaaggacagcatttgctgtgcttgaatctaagccagttgtgggctcatccaggaacaagatggatggatcagtaataagctccattgcaatactagtcctttttctttctcctccagacacaccacggataaactgagttccaaccttggaatctgccactttatccagacctaactcttgaataaccttgttaatccgttcatttttttcgtaacttgtcatagttgttggaagccgaagggctgctgagaactgtaagtttctctcactgtc

SEQ ID NO: 12840 - DNA, 460 bp, Bos taurus
  Clone ID: 55-LIB2809-014-Q1-E1-F4
cgccaaggccgcgggatacaccaagctggtgggacaggatgtggccaagtttatgaactggatggcggatgaatttaactatcccctgggcaatgtgcatctcttgggatacagccttggggcccatgctgctggtattgcaggaagtctgaccaataagaaggtcaacaggataaccggcttagatccagctggacctaacttcgagtatgcagaagctccaagtcgcctttctcctgatgatgcggattttgtagacgttttacacacattcaccagggggtcaccaggtcgaagtatcggaatccagaaaccagtagggcatgtggacatttaccctaacggaggcactttccaaccaggatgtaacattggggaagctctccgtgtgattgcagagagaggccttggagatgtggatcagctagtgaagtgctcccatgaacgttccgttcatctc

SEQ ID NO: 12841 - DNA, 258 bp, Bos taurus
  Clone ID: 55-LIB2809-016-Q1-E1-F4
tgggcccggcatactccttagccaaggcggccagcgacatctccctgctggacgcccagagtgcccccctgagagtgtatgtggaggagctgaagcccacccctgagggcgacctggagatcctgctgcagaaatgggagaacggtgagtgtgctcagaagaagatcattgcagaaaaaaccaagatccctgcggtgttcaagatcgatgccttgaacgagaacaaagtccttgtgctggacaccgactacaaaaagt

SEQ ID NO: 12842 - DNA, 392 bp, Bos taurus
  Clone ID: 55-LIB2809-017-Q1-E1-F4
gccaagggcgcgggatactctgtgaatggtgagagactgggcacctacatgggccataccggagctgtgtggtgtgtggacgcggactgggacaccaagcatgtcctcactggctcagctgacaacagctgtcgtctctgggactgtgaaacagggaagcagctggccctgctcaagaccaattcagcagtccggacctgtggctttgactttgggggcaacatcatcatgttctccacagacaagcagatgggctaccagtgcttcgtgagcttctttgacctgcgggatccaagccagatcgacagcaatgagccctacatgaggatcccttgcaacgactccaagatcaccagtgccgtttggggacctctgggagagtgcatcatcgc

SEQ ID NO: 12843 - DNA, 306 bp, Bos taurus
  Clone ID: 55-LIB2809-019-Q1-E1-F4
gagagactgggcacctacatgggccatatcggagctgtgtggtgtgtggacgcggattgggacacctgtcatgtcctcactggctcatctgactagagctgtcgtctccgggactgtgattgatggaagcacctggctctgctcaagatcaattcagcagtccggacctgtggctttgactttgggggcaacatcatcatgttctccatagatgagtagatcggctagcactgcttcgtgagcttctttgacttgtgggatctacgccagatcgacagcaatgacccctagataaggatttcgtgt

SEQ ID NO: 12844 - DNA, 379 bp, Bos taurus
  unsure (303): unsure at all n locations; Clone ID: 55-LIB2809-020-Q1-E1-F4
gggacactcagtacaggtaacaccatcatcaccataggccaccctgtaggcagccacatattgaatgtggccaaagtctcgggcaccctgggtgatgatgcccgtgactcgcttctgggagcccaggtcaatctgcagccactcagaggcactgttggtctgggcggtccaggcgttgaacttgccctgattatccagtcgtgcgtagtagggaaaccagctaaaggcactcaggccccaggttttgtactagctggaggctgtgatctgcttgttggggatggtagtatccttcaggcctangggttcagtgcatccagtcaactcacagccaaggagttcaaacgcgagggtgcagccccggtggcagatgatgggt

SEQ ID NO: 12845 - DNA, 295 bp, Bos taurus
  Clone ID: 55-LIB2809-021-Q1-E1-F4
gccatggtacgcggatagacggaaaaggtgtggaaagccgttcacgcagtgaggaatctcttacacgcatcaatgcgaaaattgagatatctcagattgtcgcacagtagcatacagtggatgtagtccatgatgttatccactccgttgctcatacacactctctagtccatcccttctctgagcccatcccttacagtctcccacatgacatccctcctcatactcctaccccctgtggaggtgccgtctttccttaagcctgatgtcattggagtctccagtgtgtgacgac

SEQ ID NO: 12846 - DNA, 398 bp, Bos taurus
  Clone ID: 55-LIB2809-022-Q1-E1-F12
gataccattcaagcaaactgacacctccgtagcccttcaagtctttcagctcccggaacacctcacattttgtacaagcttttttttttttttttttttttttttttaggtttatgcctttattgctgaaggaggagccgccccaaacaggaggccccaggaggggcctggaggggcctgggtcccaggacgggtgaatgtggtcccggttcctcctggtcccctgatggggcatgcagggatgacatcgtctgtccccagagggggcaaggctcccgggctcacatatgcgccggcaagggctcacctacatgtggcactgctcctccagctgggttgggttgaaggacagccggatgtgcattggcacggccttgaagggctttgtccaaattctc

SEQ ID NO: 12847 - DNA, 426 bp, Bos taurus
  unsure (391): unsure at all n locations; Clone ID: 55-LIB2809-022-Q1-E1-F4
gcctagggcgcgggatacttggaaaaattcacaggggacgatacagacttatttaattgtttggcaaatgtttctgtgatttctctgttgagtatatctttaggaagtctacaagcccttcttaaagattttagatggcaacacttagaaattattaactgtgactttgacaagtttcctgcattgaagctcagttctctcaaaaagtttgttttcacagacaacaaagatataagcacttttactgagtttcagctaccaagccttcagtatctagatctcaaaagaaatcacttgagtttcaagggttgctgttctcacactgattttgggacaaccaacctgaagcatttagatctgagcttcaatgatgtcattaccttaggttcanacttcatgggcttagagcaactagaacacctggat

SEQ ID NO: 12848 - DNA, 146 bp, Bos taurus
  unsure (123): unsure at all n locations; Clone ID: 55-LIB2809-023-Q1-E1-F4
tactgttgaattaaaagcgccatcatggacatcgagcaagggtcaaaagtccagagcgccattcatgcaccccctggagattagtccttacatgtccattgtcactacagggcccaggctcanagatgagttagcctcaagggggt

SEQ ID NO: 12849 - DNA, 367 bp, Bos taurus
  Clone ID: 55-LIB2809-024-Q1-E1-F12
acagtaatctttaaaattttctttttaaattgaaagccaacaactctgcctttatgatgctaagctcatgttcttatttcttctcctatcttctttctcttctgttcccattatccttccctttgttttgtccctgtcaccttcctttctccttctcctcattgccccccaggcaagcaggtggtcagtcattggtgggtttccagcttccaaagcctagacaaccctgctgtactctcaaactactggtctttgccccggctgatcctttccttgagctgtctgagctttaaagtggatggctcaagctagagatatgacagaatcttctgggaagggccttgatgatcttcagcccagacttttg

SEQ ID NO: 12850 - DNA, 387 bp, Bos taurus
  unsure (99): unsure at all n locations; Clone ID: 55-LIB2809-024-Q1-E1-F4
atacctggtgagattgtggaaagcctttcaagcagtgaggaatctattacacgcatcaataagaaaattgagaagtttcagagtgaggaacagcagcanacagaggatgaactccaggataaaatccacccctttgcccagacacagtctctagtctatcccttccctgggcccatccctaacagcctcccacaaaacatccctcctcttactcaaacccctgtggtggtgccgcctttccttcagcctgaagtaatgggagtctccaaagtgaaggaggctatggctcctaagcacaaagaaatgcccttccctaaatatccagttgagccctttactgaaagccagagcctgactctcactgatgttgaaaatctgcaccttcct

SEQ ID NO: 12851 - DNA, 395 bp, Bos taurus
  Clone ID: 55-LIB2809-025-Q1-E1-F4
actgcacagcgattatcgggaagatgctacactcgtcacaaccagtgaacatcactgtccaagagtccagctcgagcggcccctcatcgatgacagctgtggctataggcacctgttttgctgcagtggctattgttgcggccataataacctggttccgcctcaggagaaagccaatctcagttggagcatggcatacagggattccttgtgtcctggagatgaatgaagacactagatgcattgtctcagactccttccccacttcctgaggaatgctgctttgcagatactgagctgctttccgcactggcaaaccggtctcactgatgctgaaaatgatgctgccagaactgatgctgagaacacagtcacctattcactcctctcgcacc

SEQ ID NO: 12852 - DNA, 410 bp, Bos taurus
  Clone ID: 55-LIB2809-027-Q1-E1-F12
agggaaaaaattttcaacccaggtcaaattccagaaatcctgataaaaaaggtttgtttactgtgaaagcttcattgatcatcagggacacctctatgaaaaatgtgtcctgctgcatccggaacctccttcttgggcaggagaaagaaatagaggtttccataccagcctccttcttcccaaggctgactcactggatggtggctgtggctgtcatcttggtggtcctacgacttctcacaattgggtccatattttttacctggagactatacaacgaaagatccatacagaggagggatgaattcagctctaaagagaaactcctggaagagctcaaatggaaaagggctacattgcatgcagtggatgtgactctggattcagatactgcccacccccacctcttt

SEQ ID NO: 12853 - DNA, 337 bp, Bos taurus
  unsure (32): unsure at all n locations; Clone ID: 55-LIB2809-027-Q1-E1-F4
gcatatcttccttttggtgttggttttgttgnttggtattgggaagaatttcctcggttgacgaaatgctttcagcttccatttgcgtaatatcttccatggcttgatcctcagttgattcactcccaatatccttgctcagttcattgaccttctcctttccaaacacttctggaaaaggtgccacaaaaaacctgagtaaattttcattgaggacttcttgagggagtccttggtgcttgataggatgtttaggcctggcaagagcaacagccacaagacaggtaaggatgagaagtttcatggttgtcaagatcttgaacccaagactgggaag

SEQ ID NO: 12854 - DNA, 417 bp, Bos taurus
  unsure (380): unsure at all n locations; Clone ID: 55-LIB2809-032-Q1-E1-F12
catggctcgaccgccattaggccgggatgacagcagaaaggcctgaatgggcatatctctctggggatagggcactgctttctggggaacaggcaggactttggactgagaaagggacagcacggactgaggaggaaacatgacagttggaggaagaggctggtgaggctggtgcatccaagactggagcagaggcagaggaaggtgcagattttcaacatcagtgagagtcaggctctggctttcagtaaagggctcaactggatatttagggaagggcatttctttgtgcttaggagccatagcctccttcactttggagactcccattacttcaggctgaaggaaaggcggcaccaccacaggggtttgagtaagangagggatgttttgtgggaggctgttatggatgggccc

SEQ ID NO: 12855 - DNA, 228 bp, Bos taurus
  unsure (71): unsure at all n locations; Clone ID: 55-LIB2809-032-Q1-E1-F4
cccgggatccagcagaaaggcctaaatgggcatatctctctggggatagggcactgctttctggggaacangcatgactttggactgagaaagggacagcacggactgaggaggaaacatgacagttggaggaagaggctggtgaggctggtgcatccaagactggagcagaggcacaagaacgtgcagattttcaacatcagtgagagtcacgctctggctttcagt

SEQ ID NO: 12856 - DNA, 398 bp, Bos taurus
  unsure (336): unsure at all n locations; Clone ID: 55-LIB3057-001-Q1-K1-F4
cgtgtgaggtcggcggacaggaggtagttggcccgtatcggctcacggaagctgctgaggccggggtgaaggccgagccgagcggccgtgtggagtcgctggatattagaaatggctactccccaatcagttttcatctttgcaatctgcattttaatgataactgaattaattttggcttccaaaagttactatgatatcttaggtgtgccaaagtcggcctcggagcgccaagtcaagaaggcctttcacaagttggccatgaaataccatcctgataaaaataagagccctgatgctgaagcaaaattcagagagattgcagaagcatatganactctctcagatgctaataggcggaaagaatatgatacacttggacataatgcttttactaa

SEQ ID NO: 12857 - DNA, 360 bp, Bos taurus
  Clone ID: 55-LIB3057-002-Q1-K1-F12
cggacgcgtgggtcgcgagcggccgtccgcgatctagaacaccataaagatattggtacccgttatctactatttggtgcttgggccggtatagtaggaacagctctaagccttctaattcgcgctgaattaggccaacccggaactctgctcggagacgaccaaatctacaacgtagttgtaaccgcacacgcatttgtaataatcttcttcatagtaataccaatcataattggaggattcggtaactgacttgttcccctaataattggtgctcccgatatagcatttccccgaataaataatataagcttctgactcctccctccctcattcctactactcctcgcatcctctata

SEQ ID NO: 12858 - DNA, 433 bp, Bos taurus
  Clone ID: 55-LIB3057-002-Q1-K1-F4
cggacgcgtgggcgaagggaagaaaagtgaccgagaggccgctgaacatcctcgccccggcgcagcgggagccgcccgaggcagcttccccgtgacagagcctcagcctgcctggaagatgccgagactgtgcagcagtcgttcgggcgccctgctgctggccttgctgcttcaggcctccatggaagtgcgtggttggtgcctggagagcagccagtgtcaggacctcaccacggaaagtaacctgctggcgtgcatccgggcctgcaagcccgacctctccgccgagacgccggtgttccccggcaacggcgatgagcagccgctgactgagaacccccggaagtacgtcatgggccatttccgctgggaccgcttcggccgtcggaatggtagcagcagcagcggagttgggggcgcggcccagaagcgc

SEQ ID NO: 12859 - DNA, 350 bp, Bos taurus
  Clone ID: 55-LIB3057-003-Q1-K1-F4
cttgattcttgggttgctgcgctcctggaatgaccctctgtatcacctagtcaccgaggtacgggatatgaaaggagccccagatgctatcctatcgagggccatagagattgaggaagaaaacaaacgacttctggaaggcatggagatgatatttggccaggtaattcctggagccaaagagactgagccctaccctgtgtggtcaggactgccgtccctgcaaactaaggatgaagatgcacgttattccgctttttataacctgctccactgcctgcgcagggattcaagcaagattgacacttaccttaagctcctgaattgcagaatcatctacaaacaacaac

SEQ ID NO: 12860 - DNA, 380 bp, Bos taurus
  Clone ID: 55-LIB3057-004-Q1-K1-F12
ttccggtctaaggttgcgtctgtcgttgttggaagctgaagccgcaatgcccgtgaagatggcggtctaccaaccgtttggatgctcttccaagagtcacatgtccaaaccatccagatgcgatcctagtggaggactacagagctggtgatatgatctgtcctgaatgtggcctggttgtaggtgaccgagttatcgatgtaggatctgagtggagaactttcagcaatgataaagcaacaaaagatccatctcgagttggagattctcagaatcctcttctgagtgatggagatttgtctactatgattggcaagggtacaggagctgcaagttttgatgaatttggtaattctaagtaccagaataggagaaccatg

SEQ ID NO: 12861 - DNA, 349 bp, Bos taurus
  Clone ID: 55-LIB3057-004-Q1-K1-F4
gaaaaggctgagaagccagatactaaggagaaaaaacctgaagccaagaaggctgatgctggcatgaaggctaaaaaggtggaaaaggtgaagaaagttacgaaggcgtagccccactgcatcctaaatcctgtcctggtcagatgatttggcagatattcccgatctgtcatgttctccagaaaggcccagttcaagggaacgtgctctccctctcaatgctcgactttaaagacaaagagttttctccaaaataactcaaccttattaatccttttaccgttaatagcttcactgagtgggattaagatatttcatatttattgtttccacagggcggttctttatt

SEQ ID NO: 12862 - DNA, 397 bp, Bos taurus
  Clone ID: 55-LIB3057-006-Q1-K1-F12
aaacggatggcggacggcctttttttggtgcctgatattgattccattgtgtaaggcttggatggttaacctggtgccttaacctgttacctgaatccaggacttgccagaactactaccgggaataaagtctttggggccctagagggagctgtcgatggaggcttgtctatccctcacagtaccaaacggttccctggttatgattcagaaagcaaagaattcagtgctgaggtacaccgaaagcacatcatggggcaaaacgttgcagattacatgcgctacctgattgaggaagatgaagatgcttacaagaaacagttctctcagtacatatagaacaacgtaactccagacatgatggacgagatgtataagaaagctcatgctgcaatac

SEQ ID NO: 12863 - DNA, 393 bp, Bos taurus
  Clone ID: 55-LIB3057-006-Q1-K1-F4
ggaaaaagtaacatggaaacttacattaccatatgtaaaatagatagcaaacgagaatgggctgtatggctcaggaaactcaaacaggagttctatatcaagctagaggcgtggaatggggagggaaatggaagggaggttcaaaagggaggggataaatgtatacctatggctgattcatgttgaggtttgaaagaaaacaacaaaattctgtaaagcaattatccttcagtaaaaaaaaataaagaaagaaaaaaaaaaaacttatcaaccaggcttgtggtaaacagtaattactcaaagaacaggtattttgttatttattaaaagataatttgtatactctgcacagctgagaattttaggcagtaaaaaaatttttttttaatgagt

SEQ ID NO: 12864 - DNA, 397 bp, Bos taurus
  Clone ID: 55-LIB3057-008-Q1-K1-F4
agcaggcgctcagctactttgcccgcatggaggaggactgcaaggagtacgtggcggctgtgctcaagcacatcgagagcaagaacctcatgccgccccttctagtggtgcagaccctggcccataactccacggccaccctgtctgtcatccgggactacctggtccaaaaactgcagaaacagagccagcagatcgcccaggatgagctccgggtgcggcgctaccgagaggagaccacccgcatccgccaggagatccaggagctgaaggcaagtccaaagattttccagaagaccaagtgcagcatctgtaacagtgccttggagctgccctcagtccactttctctgcggccactcctttcaccaacactgctttgagagttactcggaaag

SEQ ID NO: 12865 - DNA, 396 bp, Bos taurus
  Clone ID: 55-LIB3057-009-Q1-K1-F4
cgggctccgccatgttgggacttgtgggtcgtgtggttgctgcctcggcctccggggccttgcggggactcagcccttcagcgccgctaccgcaagcccagcttttactgcgggccgctcctgcagcgctccagcctgccagagactatgccgctcaagcatctccatcgccaaaggccggcgccaccactgggcgcatcgtggcggtcattggtgcagtggtggacgtccagtttgatgagggactgcctcccatcctaaatgccctggaggtgcaaggcagggagaccaggctggttttggaggtggcccagcatttgggtgagagcacagtaaggaccattgctatggatggtacaaaaggcttggttagaggtcaaaaagtcctggattctg

SEQ ID NO: 12866 - DNA, 335 bp, Bos taurus
  Clone ID: 55-LIB3057-011-Q1-K1-F4
cgacccgatattgttaactttgttcacaccaacttgcgcaaaaacaacagacagccctatgctgtcagtgaattagcaggtcatcaaaccagtgctgagtcttggggtaccggcagagctgtggctcgaattcccagggttcgaggtggcgggactcaccgttccggtcagggcgcttttggaaacatgtgtcgtgggggccgcatgtttgcgccaactaagacctggcgacgttggcaccgcagagtgaatacgacgcagaagcgatacgccatctgctctgcactggctgcctcagccttaccagcgctggtcatgtctaaaggtcatcgtat

SEQ ID NO: 12867 - DNA, 354 bp, Bos taurus
  unsure (285): unsure at all n locations; Clone ID: 55-LIB3057-014-Q1-K1-F12
ccgggtcgacccaagccttccggatttggcttggcccccaccttgggttccaggatttaccaagaattcaaagttactgggcctgattctatcacttcttgggttgcaactgcttttgtgatctctgaggatttaggtcttggactaacaactgctccagtggagctccaagccttccaaccatttttcatttttttgaatcttccatactctgtcatcagaggtgaagaatttgctttggaagtaaccatattcaattatttgaaagatgccactgaggttaangtaatcattgagaaaagtgatgcttttgatattctaatggcttcgaacgaaataaatgccacgggacac

SEQ ID NO: 12868 - DNA, 396 bp, Bos taurus
  Clone ID: 55-LIB3057-015-Q1-K1-F12
gttttaagaagcggacagagctgttcatcgctgctgagggcatccacaccggccagtgtgtgtgactgcggcaagaaggcccagctcaacatcggcaacgtgctcccggtgggcaccatgcctgagggcaccatcgtgtgttgtctggaggagaagcctggtgaccgaggcaagctggcaagagcctctggaaactatgccacagtcatctcccacaaccctgagacaaagaagacgcgagtgaagctgccttcgggctccaaaaaggtcatctcctctgccaacagagctgtggtcggtgtggtggctggaggtggccgcattgacaagcccattctgaaagccgtccgtgcctaccacatgtataaggcaaagaggaactgctggccacgggtg

SEQ ID NO: 12869 - DNA, 313 bp, Bos taurus
  unsure (212),(215): unsure at all n locations; Clone ID: 55-LIB3057-015-Q1-K1-F4
aatctactcttgtgccagggtgtggtctccacccccgtctgtcccaatgggcctggcaactgccaggtatcccttcgagacctgtttgaccgggcagtcatggtgtcccactacatccatgacctctcctcggaaatgttcaacgaatttgataaacggtatgcccagggcaaagggttcattaccatggccctcaacagctgccatacctnctnccttcctacccctgaagattaagaaccaagcccaacagaccccaccatgaagtccttatgagcttgattcttgggttgctgcgctcctggaatgaccc

SEQ ID NO: 12870 - DNA, 440 bp, Bos taurus
  Clone ID: 55-LIB3057-016-Q1-K1-F4
gtccgcttctcgcccaacagcagcaatcccattattgtttcctgtggctgggacaaggtggtcaaggtatggaacgtggcaaattgtaagctgaagaccaatcacatcggccacacaggctacctgaacactgtgaccgtctctccagatggatccctctgtgcttctggaggcaaggatgggcaggctatgttgtgggacctcaatgaaggcaagcacctttacacactagatggtggggacatcatcaacgccctgtgcttcagtcctaaccgctactggctctgtgctgccacgggtcctagcatcaagatctgggacttggagggcaagatcattgtagatgaactgaagcaagaagttatcagtaccagcagtaaggcagagccttcccagtgtacctctctggcctgggctgctgatggccagacactgtttgc

SEQ ID NO: 12871 - DNA, 390 bp, Bos taurus
  Clone ID: 55-LIB3057-018-Q1-K1-F12
accgacgcgtaagcttgttactgacaaatttttcaactattaacacactgcatcgataatagatatagtataaaacccagactcttaaagctttttaaaagaaagcacaagagactatcttaataatcttaaagcagacaaaaaacttttggagaaaagcactgattaaaataaaacaataacttttatttaacctcatcaaaaatttatgctatcacaagataccattaaggactgaaatatataaaccactaatttggaaaaaatataacatctatattcaacaaaaggcttgtatctggtatatgtaaagaacccctataatcataaattagattgaacagtccaactgaaaaatgggcaaaagcctttagcagatacttcacaaac

SEQ ID NO: 12872 - DNA, 479 bp, Bos taurus
  Clone ID: 55-LIB3057-018-Q1-K1-F4
ctagatcgcgagcggccgcccttttttttttttttttttttttttttgccaagccaattcgacccgatctatatttaggtttgtttattttccattcatacacttttatctttatgtctcatttataaaaaaaatttcccttataaccctaccaactttatcacacatatcatataccctctgattttactcttttatttaaatcttatctaattcttttttttatatattaatctttattttcatatttttaacttttttttattttatcttttttttttattttttattttttttatcttttattttttttatgttttttttttattttatttttttttcatttttattattttatttttttttaattttatttattatatttaatttatttatttttttttttttttatatatttttttttattttttaattattttttttttttttattattttattattatatttcttttattt

SEQ ID NO: 12873 - DNA, 344 bp, Bos taurus
  Clone ID: 55-LIB3057-019-Q1-K1-F4
cgctgtgccccggcgcggccgccgccgatcgcagcgcatgagccgccgccgccgcggttgatgtggttgacccggggctgaggaggccgctaagatgccgcagtccaagtcccggaagatcgcgatcctgggctaccggtctgtggggaaatcctcgttgacgattcagtttgttgaaggccaatttgttgactcctacgatccaaccatagaaaatactttcacaaaattgatcacagtaaatggacaggagtatcatcttcaacttgtggacacagctgggcaggatgaatattccatctttcctcagacatactccatagatattaatggctatatttctt

SEQ ID NO: 12874 - DNA, 442 bp, Bos taurus
  Clone ID: 55-LIB3057-020-Q1-K1-F4
cagcggccggtggccgagcacagaggggcgagccagagggccagcgctagcgccgagcgaccgcgagtaccctcacaaataccccgggaaccggcggcggcgtgtgcgtgtggcccgtgtgcgggcggcggcgcgggaggagcgcggagcggcagccggttcgggcgggtggcatcatggacgagaaggtgttcaccaaggagctggaccagtggatcgagcagctgaacgagtgcaagcagctgtctgagtcccaggttaagagcctctgcgagaaggctaaagaaatcctgacaaaagaatccaatgtgcaagaagttcgatgtccgtcactgtctgtggagatgtgcatgggcaatttcatgatctcatggaactgtttagaattggtggcaaatcaccagatacaaattacttgtttatgggcgattatgttgacaga

SEQ ID NO: 12875 - DNA, 278 bp, Bos taurus
  Clone ID: 55-LIB3057-021-Q1-K1-F12
tcggtaactttaacacattgttatgtgagaaatgttactggggaaatagatcagccacttttaaggtgctgtcttaaattgggaaatgaatgacctaaaatcactttaaccattgctactggaaagttacaaagtcaaaattggaaggttttagtcattcttgaatttttcctttctgaagagctcttctgtttatacatgcctaaattctttaaaaatgtagagggatacctgtctgcataataaagctgatcatgttttgcaacagtttgcaggtg

SEQ ID NO: 12876 - DNA, 354 bp, Bos taurus
  unsure (330): unsure at all n locations; Clone ID: 55-LIB3057-021-Q1-K1-F4
cccacgcgtccgcccacgcgtccgcttctgcctgtattgtataattttaggggggttatgttttgatcaaatttgaactccattttggtgggggattctttggtactgtgatgcagtttatccaaatgttaatagacgaacatcaacccagactttaaagaagaaaaaaaattctggtaaaaagaccaggtctgcagtattagaacagaacttcaaagagtctttaagggaggttgaaaacagaaaagagattgactgtctccgcctttgtgaccctgagcacagaattgtgtgtgaaggtacctactggcatgtgttttcacggctctngctcaccaagacaaccaggggacc

SEQ ID NO: 12877 - DNA, 429 bp, Bos taurus
  Clone ID: 55-LIB3057-022-Q1-K1-F4
cggacgcgtgggcgcaggtttgcaggaggccgaagccgggctcgcgccggaaccatggtgtcgcagccagtatgacaatgatgtcactgtttggagccctcagggcagaattcatcaaattgaatatgcaatggaagctgtcaaacaaggttcagccacagttggtctgaaatcaaaaactcatgcagtgttggttgcattgaagagagcacagtcagaacttgcagctcatcagaaaaaaattctccatgttgataaccatattggtatctcaattgcgggacttactgctgatgctcgactattatgtaattttatgcgccaggagtgtttggattccagatttgtatttgacagacctcttcctgggtctcgtcttggatctcttaattggaagcaaaacccagataccaacacagcgatttggcc

SEQ ID NO: 12878 - DNA, 186 bp, Bos taurus
  Clone ID: 55-LIB3057-024-Q1-K1-F12
acccactcgtacgctctatttaataccagatttcccaaggtttcatactgacatttgataccaccttttctgcaagctctataaagaccattggcaaaatcaagtcttcttacacatatgaatgtataaacctcgtttgtgatgttcacttagatcttgctactccttcactccatttttcagctt

SEQ ID NO: 12879 - DNA, 430 bp, Bos taurus
  Clone ID: 55-LIB3057-025-Q1-K1-F4
cgaccgtggcggcgcctggtccactctggataattcctaaaatttgggggcgctttgtaaaactaaaattgcaggttttgcagccagagggagctagtcagatcagaagctgtcatatatacctcattggctgtgctgtgctttaaggtacattgcagtaccagccacaaccaccagatggaggaaaagacacataaatgactagtccaggcatcctcttgtgtgcagtctgctgctcctatctaatccctgagtcctgctcagccttcccacgacctctatgtgctttgaaaaataaatctttcatggccaaattggctgcgtttagcacttctgaatgaaacactgagccagaactttatattctgcacaatttttttttttttttttggtgaaagaacaacccctatatgcattcatgatgggcaac

SEQ ID NO: 12880 - DNA, 345 bp, Bos taurus
  Clone ID: 55-LIB3058-002-Q1-K1-F4
cccacgcgtccgaaaagcctttacaggtgcagtccctcctacacatgttcttgcaggcctgcaaggatacctgatcagcatgctgctggtcggatccccagaagtctgtgcctggaagccgcaagaacttgacaggttgcgcctgcccagcagtacagacaatgtcgactacaggtctacagccttggctccagttacccgggtggctcatcacgtaacctggcgggcaagagcatgtaggcgtagggaagtagtggcagattccatttggaccacacaggccatgaatgttgcaaggctgagacagtgcgatccaggaaaccgaccacctgccatttgaaccat

SEQ ID NO: 12881 - DNA, 440 bp, Bos taurus
  Clone ID: 55-LIB3058-004-Q1-K1-F12
cacaaatactgtgtacacattatcacaccttttgaaatgcctgtgaatcattgatattgagcagctacacagctaactcatgattctgctttgaaatgtaaatacttataattaagtctgcacatatttttttaatcaccctaatggactcaagtgtttttcaccaagaggttttcaggttgcccctaacctttgtgcaatcttttctggttccctaaagtgtatttttctctgacttgggggctgtgccataatacaaatggaaatgttacctttgattttcttacagaaaagtttaaaacagggttttttaaaatggaataacattcctgataagtttgaagtgaattgagcattaatggttcttttttataaatcttatttccttgaagtatttattcatgaaaagaaagtaaagcagaaactccatttttgccggg

SEQ ID NO: 12882 - DNA, 442 bp, Bos taurus
  Clone ID: 55-LIB3058-004-Q1-K1-F4
gttaaacctaagccaaaatgggaaaggagaagacccacatcaacatcgttgtcattgggcacgtagattcagggaagtctaccacgactggccatctgatctataaatgtggcgggatcgacaagagaacaattgaaaagttcgagaaggaggctgccgagatgggaaagggctccttcaaatatgcctgggtcttggacaaacttaaagctgaacgtgagcgtggtatcaccattgatatctccctgtggaaatttgagaccagcaagtactatgttaccatcattgatgccccaggacacagagacttcatcaaaaacatgattacaggcacatcccaggctgactgtgctgtcctgatcgttgctgctggtgttggtgaatttgaagccggtatctccaagaacgggcagacccgtgagcatgcccttttggcttacac

SEQ ID NO: 12883 - DNA, 356 bp, Bos taurus
  Clone ID: 55-LIB3058-006-Q1-K1-F4
ggtgactcggcaggagaagatggcgactgtgtgggacgaagcggatcaagatggaatcggggaggaagttctcaagatgtccacagaagagatcatccagcgcacacggctgctggacagtgaaatcaagatcatgaagagcgaagtgttgcgagtcacccacgaactccaggccatgaaggacaagatcaaagagaacagcgagaaaatcaaagtgaacaagacgctgccgtatctggtctccaacgtcatcgagcttctagatgttgatcctaacgaccaagaggaagatggtgcaaacattgatctagactcccaaaggaagggcaagtgcgcagtgatcaaaacctctacgc

SEQ ID NO: 12884 - DNA, 420 bp, Bos taurus
  Clone ID: 55-LIB3058-007-Q1-K1-F12
ggaaaatggaaacgtcaaagtgataaacaaggagctgagagctgatggaactgtgaatcaaattgaaggtgaagccaccccggagaacatcacagagcctgccaagctggcagttaagtttttctggttcatgccgtcagctccgtactgggtcctggccaccgactatgagaactacgccctcgtgtactcctgtaccacaatcatctggctttttcacatggatcatgtttggatcttgggaagaaacccttatctccctccagaaacagtgacctatctcaaagatatcctgacctctaataacattgaagttgagaaaatgacgatcacagatcatgtgaactgtcctgagtccatgtaaccaggctctaaagggagctgcattcacttcatgttccttcttttggcttgcttttt

SEQ ID NO: 12885 - DNA, 418 bp, Bos taurus
  Clone ID: 55-LIB3058-007-Q1-K1-F4
cggacgcgtgggcggacgcgtgggtcagtgctcgctccatgatgcagcggtcctagcccccccctcaaatgggtcccctcttcactgtgtttcccagcatccttgctctgaccaaaccggggaagggacacagcccacccccaaaagatggaatcattctcttaaccgtctttgtcccaactgcctgccactccaaacccgtccccctggcccctgaccctgctgggtggggaagaggctcacgtgggcccaggctgagcagtgaatgagcatgtcaagctgtcagactctgtgaaattagtgcatcctactggcaacccgcctccctgatcccgcctgattttgtacataaagtgacatgagatgcaacatgtgtgtgtatgtgtgtgcgcgcgcgcgtgtgtgtatgctatgtcat

SEQ ID NO: 12886 - DNA, 410 bp, Bos taurus
  Clone ID: 55-LIB3058-008-Q1-K1-F4
gttatagatcgagagcggacgcccttttttttttttttttttttttttttaaaagtgtattactttatttcaatactcaagaacagtgcatactttccttgagacccgtggtcacagctctcattgttgggtgtggccacgaatggaggtcactcagtcacaaccagctcaatgacgcagtgtgtgtgtcgagcaatttggagattttgtttctgaaattttctttttttttcttatcctctcatcattgaggctatgtattaatagacattatagtaaacccacgcgaaatattcagaattagaaggggattaaagagccacgtttgggcgttacgttgactattcctcattttcatcctaaggggggttgtgacgccagtgtggggacttcgtgggggtctggtaaaa

SEQ ID NO: 12887 - DNA, 324 bp, Bos taurus
  Clone ID: 55-LIB3058-010-Q1-K1-F12
gctagctacctgtcccaaggctagatcagaactggtgcgctgcgctataagcacagaggatagctgtacctctctatcagttgaccaaaggatataaacatatcgcctgttaagggataactaactggctatgcaggaagagacctacttgctcactagagtagacccaagaaggaacctgacaagctctgatactagcagcggatatctacaaacgctataaagcgcacatgtgctgagggtcctgggcggataccactatgtgcttcaagaaacgcctaaatgtgtagaacgagctaaacacgatccttagtactaagttgt

SEQ ID NO: 12888 - DNA, 420 bp, Bos taurus
  unsure (373): unsure at all n locations; Clone ID: 55-LIB3058-012-Q1-K1-F4
tgatgccattgattggaagtggaacctgagacaggatggaatttgtcatacatagcagatagcccggttgacttggtgaataagtctgatgaagctttcataaggagtgttgaaaagcagttttaccaggccataggcctggcagaattgtagtctctgttcaggttatgattaacctatttggatactagtaaagaattcttgctgttcagcatttaatatgtgcttataatttgtaccaattgacctttcctgaaatcatgcagtattgagtcatgtcattaaatctgtttccatgccagaatcttaccaatatgtaataaatttagaaagactaggtgccaaaatacccagcacaatacttgtatatttntagtatcatatagaacaaatcccaggaactatgaacactctggacct

SEQ ID NO: 12889 - DNA, 291 bp, Bos taurus
  Clone ID: 55-LIB3058-013-Q1-K1-F4
tcgaaaaaagatccaggagacacggcgtctaagggagaaagtgtctctgatggacaagccgggcagaagacattcgaggtccaggctaaaggcgccaagaaaaagcacctgcatagccccaggctaggactcgccttcagaaaattctttaggcataatggcgaggaaaagtcagatcgcccttcagccaacctcaagtcagacaaagcctgacgtacgcttcaagagccccagggtgccgacaagaattctacacccactgaaacagccaaggaaaaagggggccccagc

SEQ ID NO: 12890 - DNA, 425 bp, Bos taurus
  Clone ID: 55-LIB3058-018-Q1-K1-F4
cttgaattcccgtcgtaacttaaagggaagctttcacaatgtccggagcccttgatgtcctgcaaatgaaggacgaggatgtcctcaaattccttgcatcacgaacccacttacgtggcaccaaccttgacttccaaatggaacagtacatctacaaaaggaaaagtgatggcatctacatcataaatctgaagaggacgtgggagaagcttctgttggccgctcgggccattgtcgccattgaaaacccggctgatgtcagtgtcatatcctccaggaatactggccagcgagctgtgctgaagtttgctgctgccactggagccactcctatcgctggccgcttcactccgggaaccttcactaaccagatccaggccgcattcagggagccaaggcttctggtggtcaccgatcccagggct

SEQ ID NO: 12891 - DNA, 433 bp, Bos taurus
  Clone ID: 55-LIB3058-019-Q1-K1-F12
gatcgacctaaagggtattgtgcctagtgaaataagtcaggcaaagggagacaaatactctatgctatcacttatttatggaatctaaacacacacacacacacacacacacacacacacacacacacaaatacatataacaaaacagaaaacttacagagaacaaactagtgattacctgtggggagagggaagaggcaggaacaagataaaggtatgaacctagagatacaaactactacatataagataaatgaggaataaggttatattttacagcagaggaaaatacagccattattttggaataactataaagggagcataatctttaaaaatactgaattacattgctatacacctgaaaatagtataacattcaaaataaaaaagtatttcactaaaaagaaaatgaaaataatattctgcaaaa

SEQ ID NO: 12892 - DNA, 466 bp, Bos taurus
  unsure (454): unsure at all n locations; Clone ID: 55-LIB3058-019-Q1-K1-F4
aattgaagaatccatgctaaaaattaatcaacagaaattgaaattagaacaagatatgaccacagtagatgaaggtgacgaaggaagtatgccagcagatatagccacattactgaaaacatcaatgggcctgtgaagtaagaattgttaattcctaactgatgaggaaatatcaacttggtgcactcaaggacatttacattatgatgaccatggggtttatgaacatttataactttttataatttccatattacatttctcatagtatggacaacttttttgccactaactgaattctccagatgctcacatgtgaaatttcgaaaaaaagccacgaatatgtagtcttgaagatgttaaataatcattttacaaaacagttttctgaatggggattagttggtgattgtttgtaacaaatacgctaatgctttagaaatgtcagtatttntggaattatttc

SEQ ID NO: 12893 - DNA, 319 bp, Bos taurus
  Clone ID: 55-LIB3058-020-Q1-K1-F4
gttctattcacccccagaatcctttgcagggtctgacaatgaatctgatgatgaaattgttgggaagaaaagcttctctgcccaggaacgggagtacgtccttcaggggaaggaggccatggcggtggtggaccagatcttggcccaagaagagaactggaagtttgagaagaataacgaatatggggacactgtgtacaccatcgagattccctttcacggcaagaccttcattctgaagaccttactgccctgccccgcggagctggtgtaccaggaggtaatcctgcagcctgagaggatggtgctatggaacaag

SEQ ID NO: 12894 - DNA, 320 bp, Bos taurus
  Clone ID: 55-LIB3058-021-Q1-K1-F4
acgcggacgcgtgggcccacttgagcctgttactgaagccgtcagaaggggtctcccctctcacccctgcaggtggagggagagaagctgggcccggtttggccacacctgctagtacagacgccttaacgctgtgtgtgtgactgtgtgactgcgtgggagcctggactgactgaccggccgagagcccgcgcggcatcttcgggtgttttgtatcaaacagccacttagtgctttgtcccggacttcactcatgctcgggatgtggaataggaaaaagggctgcctcggtgcataagcaggatcagaaagcgatgcag

SEQ ID NO: 12895 - DNA, 352 bp, Bos taurus
  Clone ID: 55-LIB3058-022-Q1-K1-F4
tcgcggacgcgtgggccgtcacccctgggccggagcacccttcgtctgagtccggggcagcagcccccgccaagcccaaggactccagcttctttgacaaactcttcaagctggacaagggacgggacaaagcccccgtggacctcccgctggaggctgagagcacagagcatcctcacccggccgccgaagctcctgggttatccaagcagtccgaggatggccctgcagagagggacttagttgacggcaagggaaaggctggacaggaagtcccaactgtgagctgctctgtccccggggaccctgagcaactggagattgcaaaggaggacgcccaggcagagaacag
